United States Patent Application Publication US 2019/0348154 A1 - sequence listing, part 80

SEQ ID NO: 302418 - DNA, 1752 bp, Proteus mirabilis
atgaaatttttagataacacacctaattatttattttttactggaaaaggtggtgtgggtaaaacctctatttcctgtgcgaccgcaattaagttggctgaaaaagggaaaaaagtcttactggtgagcactgatccagcttctaatgttgggcaagtattctctcaatcgataggcaacaatattaagccaataacattggttccaaatctatttgctattgaaatagaccctcaagccgcagccgaagaatatcgaaacaaaattattaatccaatcaaagaaagtttacctgaagcggtaattcaaagtattacggaacagctatcaggtgcctgtacaacagagattgcagctttcgatgaatttactggattgttaactaataccgaaattacggggcaatttgaccatatcatttttgataccgcaccaacggggcataccatccgtttattacaactcccgagtgcgtggagtgattttattagtgacaatcctgatggtgcgtcatgtttagggccaatgtctggtcttgataaacaacgtgagcagtacagcatggcggtggaagcgttgagtgataaatcactaacaaggctagtcttggttgcacgacctcagtctgccgcattgagggaagttgcaagaacctatagtgagttgtcatctctgggtatcaaaaatcagcaattgattgtcaatggtgttttccctgaaacggcggtgactgaaaatgataagttatcccatgcgctctactctcgtgaacaagcggcattagcgtctatgcctgaagccctacgctcgttacctattgatatgctttatttacaaaatatcaatatggtgggtgtcgatgcactgaagcagttgttatcgaatgacatgccacaagttccaactattaccccgacaaaacaacctatttctttacctaccttgtcagaactggttggcaaaatatctcagcaacagcatgggctggttatgttaatgggcaaaggtggtgtagggaaaacaacgattgcggcatcaatcgcagttaaattggcagaaaaagggcttgatgtacatctgaccacatctgatccagccgcgcatattgaatcaaccctcgatggtgttttacccaaccttcaagttagccgaattgaccctatcgctgaaactgagcgttatcgtcattatgtcttagaaagcagagggaaagatttagatgaagaggggcgtgcattactagaggaagatttacgctctccatgcacagaagaaattgcggtatttcaggctttttctcgcatcattagagacgcgggtaaacgttttgtcgtcatggatactgcaccgactgggcatacattattacttctggatgcaacaggggcataccataaagaaattgctaaaaaaatgggtgaaaaaggccactatttaacgccgatgatgcaattacaagatcctgaacgcaccaaagttattattacgactctcgctgaaacaacgcctgtgcttgaggcggaaaatttgcaaaatgatttaatacgggcagacatacatccgtgggcgtgggtgatcaataacagtttatctatcacggaaacaacatcaccattgttacttttaagagcagaacaggaagtcgctcagattgaaaaggtgacatcaacattggcaaaacgtgttgctatcgttcctttgcttgaaacagaacctgtggggatatctgcattaagtcagctcgcagaataa

SEQ ID NO: 302419 - DNA, 441 bp, Proteus mirabilis
atgaatgagatcactatctaccataaccccaattgtggcacttcgcgtaatacccttgccatgatccgcaatagtggtgttgagccaacgattatttattacctagaaacacctccgactaaggatgtgctagtgcaacttatcgccgatatgaaaatcacagtcagcgaattactccgcaaaaatgttgagccctatgagcaattaaatttagaaaataacctttattccgatgagcaattgatcgattttatgttgcagtacccaatactgatcaataggccgattgttgtcacgccgctaggcgtaaagttgtgtcggccatcagaggtcgtattagatatattgcctaatcagcaacaaagtgaatttatcaaggaagatggccaaatagtgattggtagtacacgatgtaaaaatgcaaatgaaaaggccagttag

SEQ ID NO: 302420 - DNA, 210 bp, Proteus mirabilis
atgagcactcaagcgatccctttattagatgaccaatgcgttgatatgaaatttataactagtttaaccggactaacagataaatggttttataaattgatccaagatggggagtttccaaagccgataaaactggggcgtagttctcgttggttaaagagcgaagttgaaaattggttacaagcacgtattgccgaatccagagtctaa

SEQ ID NO: 302421 - DNA, 843 bp, Proteus mirabilis
atgctgagctatcgtcatagtttccacgctggcaaccacgccgatgtattaaaacatattgttcaaaccctgattattgagtctttaaaagagaaagaaaaaccgtttctttatttggatactcatgctggcgctggacgttatcagctcactaatgcacatgcgactcgcacgggagaatacttagaaggcattgcacgcttatggcaacaagaagaggtgcctgaacttatcttgccttatttggaggcggtcggttcgttaaatacatctgatgagttacgttattatcccggctctcctttattggctgctaaattactgcgtgagcaagatctgttaatgctaactgaattacatcccaccgatttccctttattacgtacggaattttctcgcgataaacgtgtgagagtgtgtcgggaagatggctttggacaattaaaatcaaaactccctcccgccagtcgtcgtgggtttgctttaattgatccaccttatgaacttaaacaagattatagtgcggttgttaaaggcattgtggaaggctataaacgtttcgccaccgggacctatgcaatttggtatcctgttgtgcatcgccaacaaattaaacggatgctaaaagagctagaggccaccggtattcgtaaaattctgcaaattgagttggcagtgaaaccagatagtgatcaactaggtatgacagcatcaggtatgattgttattaacccaccttggaaattggcatcacaaatggcgtctatcttgccttggctacataaaaccttggttcctgaaggtactggacacacattagttgaatgggttgtaccagaataa

SEQ ID NO: 302422 - DNA, 2139 bp, Proteus mirabilis
gtgaaaaccatagtgataaaacgagacggatgtaaagtctcttttgaccaaacccgcatcagcgatgctatcaaaagagcagccgaagcttgtcagatcactgatgatgattattgtgagtttgtcgctcaatctgtttcacaatctctcgcaggacgttcgaatgtcgatatccgtgagatccaagacgccgttgaaaatcagctgatggctggcgagcacaaagatattgccagagcttatattgaataccgtcatgaccgagatgttgctcgtgagcaacgaggacgattaactcaggaaatccgcggtcttatcgaacagagtgatgtctctatcttgcacgagaatgcgaataaagacagtaaagttatcccaacccaacgcgatttacttgcgggaattgtggctaaacattacgcaaaattacatatcctgccaagagatgtggtactcgctcatgagcgcggtgaaattcattatcatgatctcgattactcaccctttttccctatgtttaactgcatgctgattgatctcaatggtatgttaaccaacggtttcaagatgggtaatgcagaaatagaacagccaaaatccatttcaacagccactgcggtgactgcacagatcattgctcaagtcgctagtcatatttatggtggcacgacaatcaaccgtattgatgaagtccttgcaccttttgtcaaagccagttacgacaaacactataaagtggcgcaagaatggcaaatagcggataaagaagcttacgccaacgcacgtacagaaaaagagtgttatgacgcttttcaatctttagaatatgaagttaacactctacatacggctaatggtcaaacgccttttgtgacctttggctttggcctaggcacatcaaaagaagcacgtttaattcaacgctcaatccttgaaaatcgcatggcgggtttaggtaaaaaccgcaaaacggcggttttccccaaactggtttttgctattaaagatggcttaaaccataaatttggtgatcctaactacgacatcaaacaacttgctttagaatgtgcaagcaagcggatgtaccctgatattttaaattacgatcaagtggtaaaagtaactggctcatttaaaaccccaatgggttgtcgtagcttcttaggcgtctatgaagaaaatggcgagatgctccacgaagggcgcaataacctaggggtgatcagtttaaacttaccacgtattgccattgaggccaaaggagatgaagccgcattctggtcgctgcttgataaacgtcttgaattggctaaaaaagccttaatgacccgaattgctcgtttagaaaacgtcaaagcacgtgttgcccctattctttatatggaaggtgcttgtggcgtacgtttaaaagcggatgacagtgttgctgaaatttttaaacatggccgggcctccatttcattaggttatatcggtgttcatgaaacgattaatgccttatttggtacgcaaaaacacgtctttgatgatgaaacattgagagctaaagcaatagcaattattcagcgtttacgtgaagcgacagatcaatggaaagcagaaacaggctatggttttagtctttacagtacacctagtgaaaacttatgtgaccgtttttgccgtttagatgcagcggaattcggtattataccgggggtgactgataaaggttattacaccaacagtttccacttagatgtagagaaaaaagtgaatccatatgataagttggattttgaagccccttacccgccattagccaatggtggtttcatatgctatggcgaatatccaaacttacaacataacctaaaagcattagaagacgtttgggattatagctacacccgtgtcccttactacggcacaaacacccctattgatgaatgttatgactgtggttataccggcgaattttcttgtaccagtaaaggttttacctgccctcgatgcggtaatcacaaccctgcaagagtctcggtgatacgccgtgtatgtggctatttaggcagtcctgattcgcgtccatttaatgccggtaaacaagaagaagttaaacgtcgagttaaacatctggctaatggtcagttaggttaa

SEQ ID NO: 302423 - DNA, 2379 bp, Proteus mirabilis; identical to SEQ ID NO: 279417

SEQ ID NO: 302424 - DNA, 1500 bp, Proteus mirabilis
atgcaacttgcagaacggatctcacaacttagccaataccttgaaactgggctttatgaacgtcaatcagcgatacggctttgcttactcgcggctttaagtggagaaagcgtttttttgctaggtcctccaggtattgctaaaagcttaattgcgagaagaatgaaagaggcatttaaacacgctaaagcgtttgaatatttaatgacccgtttttcaacacctgaagaaatttttggtccactatccattcaagcattaaaagatgaaggaaaataccaacgtttaaccgaaggttatttacctgacgccgaaattgtttttcttgatgaaatatggaaagccggtcccgctattttgaataccttattaacagcaattaatgaacgtaaatttcgcaatggcgaaaacgaagtaagtattcccatgcgtttgttagtttcggcttctaatgaactacctgattcagacagcagtcttgaagcgctttatgatcgaatgctgattagaatttggttatcaaaagtacaagataaaaaaaacttccgggcgttattagttaataaagaggtcagcgcttttcgtattcctgaacaactacaaattacaacagacgaatttttactttggcaaacagagttagaaaaaattactttgaatgaccacttattcgaattaatttatcaacttcgcgactcactcgataaaagtgatgcagcaccttatgtttcagacagacgttggaaaaaagcggttcgtctattacaggccagtgctttttttaatggtcgtagtgctatatcacctttagatcttattctgttaaaagattgcctttggcatgatcaagcttcttttgcgctgctaaatgacttattaaaaacactattaacagaacaagcataccaccagctaacacttttacagaaaatagaaaatctgtgggctgaatggatgcaatcgacaagaagcaaacaagatcaacaagcatttcgctttgaaaaacaaagtagtatgtttggtagaaatatacatttcaaattatcagaaaaaatgcagtctgataaatttacgctgtttttacatattccactgcatatacatagtattcaagttaactttataactgttgagaaaaaagcattagaaactttcttagataaaggtgatgaactctctgccagattaaatggtattggtttcccacaatctattaatgcacaaattcgtcaagatggtgtcttagaggtgttggatgttagtcgccgaacaacgtcgttataccaacagtcagaaagcatcaaaacagagcctattgaagataatcaacaatggttagataaattaaaagatctcacccaagagatttattctgaacaagaaaattttaatcatcatcaacccaatatctttattgataatgattggctcatttctatagaacaaagctttttgcaattaaatgaaaaattatctcaattaagaagtcaaataaagtga

SEQ ID NO: 302425 - DNA, 927 bp, Proteus mirabilis
atggaagcgaagaaattagtgattttaggtagtgttaatgtcgatcatattcttaatgttgctcattttccgcatcctggtgaaactatttccggtaatcagtatcagatggtttttgggggtaaaggtgcaaatcaagccgtcgctgcagggcgttgtggtgctaatattacctttttagcttgtcttggaaatgacgatattggtcaaagtgctaaagctcagctgatcacagataaaatagatacagattgtattgaattaattgatgatgaagccacgggtgttgcgttgatttttgttaatcagcaaggtgaaaacgttattggtatacacgctggagccaatggaaggttaaacagagaatatgttgaacgttataactcggtgattaaaaaagcagatgctttacttatgcaattagaatcacctctagattctgtattaaaagcggctcaagtcgctaaacaagaaagtgtgcaagttatattaaacccagcaccagcacaggctttacctgatgaattattatctctcgttgatatcattacacctaatgaaacagaaactgaatacctcacgggggtaaaagttattgatgatgaaagtgctcaacgtgcatctaatatattacatgataaagggatagaaaccgttttaattactttgggtagccgtggtgtttgggttagtcaaaacaatcaaggaacgatggttccggcatttaaagtgaccgcaatagatactattgctgcaggagatacatttaatggcgcttttataacggctttattagaaggtttaccaatgatgaaggcgattaaatttgcgcacgcagccgccgctatcgctgttactcgtgcaggagcacaaccgtcagtaccttggcgccatgaaattgaagcttttttgtcgcagcatgactag

SEQ ID NO: 302426 - DNA, 2463 bp, Proteus mirabilis
atgtataaatatgtcgagcctcaactacccgatgtcgcgacattaaaagatgttcgtttacaaactcctatgcaggtctttagcgcagacggagagttaatggcgcaatatggcgaaaaacgtcgtttgcctcttaccttgcaggagatgcctccgcaattaattaatgcctttattgccactgaagatacgcgttttcgtgaacatcatggtattgaccctattggcatctctcgtgctgttgttgttgcgttaacatcggggcaagcatcgcaaggtgccagtaccatcacgcaacaattagcgcgtaatttcttcttaacacctgagaagaaattaatgcgtaaaatcaaagaagcctttttggctatccgtattgagaaagagcttactaaagatgagatcttggcactttatctcaataaaatttatctaggaaatcgcgcttatggtgtgggtgctgctgcatatgtttactttggtaaaagtgtgcatgatcttagcttaagtgagatggctgttattgcaggtttacctaaagccccttcgacactaaacccactttattcgtatgatcgtgccttaaaacgccgtaatttagtgttacaacgcatgttggaagagaactatattacccgcgaagagtatgacagtgctaaagctgagcctattgttgctaaatatcacgccccacaaattgatttttcagcgccttatttgactgaaatggtcagaatggagatgtatcagcgctatggcgaaaatgcctatacggatggttataaaatttacactacagttatccgtaaagatcaattagccgctgaacaagcgctacgtaataatgttattgattatgatatgcgccatggctatcgcggtgctcaagaggtgctgtggcatgcagggcaaactccttgggatgataaagccattaacgataagctaaagggtatacagacttatggcccattaatccccgctgttgtgttatccgctgatgctaaagaagctcaggtggtattaaaaaatggcgataaaataacactcgatttaaaagcggttcgttgggcgcgtaaatttatttctgatacggctcaaggggccacgccgagcaaagttgatgctgttgtacatgctggtgagcaaatttgggtacgacaaaatagtgaaaacgattggttattagcacagcttcctgaggttaatgcagcttttgtcgcattagatccacttaatggcggtattattgcgctggtgggaggttttgattttgaattgagtaagtttaatcgcgtatctcaatcgttacgtcaagttggttcaaatatcaaacctttcttatatgcggcagcattagataaagggttaacattatcgacattactaaatgacttacctattagtcgttgggatgcgggagctggaactgattggcgccctaaaaactcaccacctacttacgcagggcctattcgtttacgtcaaggtttaggtcaatctaaaaacgtagttatggtgcgcgctatgcgggcgatgggggttgattacgctgcagattatctattgcgttttggttttcctaatcaaaatatagatagaacagagtcattagctttaggctcaccttcatttacaccaatgcaaatggctcgaggttttgcggtaatggcaaatggtgggtatctcattgagccatattttattcagcgtattgaaaatgctgatggtgaagtgatctttactgctgagccgaaagtcgcttgtcctgaatgtaccgatatccccgtaatttatggtgatactacgcgctctattgcattatctgatgattatatggaaaacgtcgcacaatctcagcaagcgcaaccggcagaaacggcgcctgatattgagttagagcaagctcctcttgctgaaacagtcaaagaaagcccatatgctcctcatgtgataagtacgccactggcgtttctaatgcatgatgcgttaagaaccaatctcgttggtgagccgggatggtctggtacaggatggcgtgcattgcgagatttaaaacgtcaagatatcggtggtaagacaggaacgaccaatagctctaaagatgcttggttctctggatatggtgctaatattgtggcgactgcatggattggttttgatgatagtagtcgcaatttagggcgaactgccgcaacgggtggtgaagcgggtgccaaaacggcacaacctatttggaatgactttatgaaagttgctttagaaggtgttccggtacaaatgatgccgatgccaaaaggcgttgttgccgttcaaatagatcgcaataccggtaagttggcgggagatggcccatcaatgaaagagtattttattgaaggcactcagccaacagaaaaagcaaaaagtgaagtgggtacacggatctttgaggataatggcgaatctaacgagctattttga

SEQ ID NO: 302427 - DNA, 228 bp, Proteus mirabilis
gtggatgttgttgctgtttttgttatttccggttcagctggcttagccgagaatgttggtgatcgtggtgatgtaaccgcgacttgttctaccttgaaggtatttacaatcatatctaacattgaggcttgttcacttagtgttgctgaagcagctgtagattgttccaccatcgcggcattttgttgtgtcgctttatccatttcattaactgcaaggctaatctga

SEQ ID NO: 302428 - DNA, 291 bp, Proteus mirabilis
atgccacgagtttgctcttctgatgctgctaaaatctctttcatcgagcctgatacatggttaactgatgtgacgatctctcccatagataagctgacttgttcgacaagatcattaccctgttttactcgtaaaatagttgattcaatgagttcttttatctcttttgccgcctccgcactacgttgcgccaaattacgtacctcactggctaccacagaaaaaccgcgtccttgctcaccggctctggctgcttctactgcggcattgagtgctaatatattggtttga

SEQ ID NO: 302429 - DNA, 1248 bp, Proteus mirabilis
atgaataaatggggaaaattatgttttcttattttgggtggtgggactatattcaaactatccagcatgaaagatgtattttatgtgccaatgcaacaagattggggattatctaacacccaaattggttttggctttactatttatgccattattcaaacaatcggattattttcatcattgtatattgccgatcgtttctctaagaaaattttattaccagcgggcttaattggagtaggtttatgtggtgcttatttaagcacattgcctccttttacgggttatttaattgcatttggtgcaatggcatttttcggcgaggttgtttattggcctgttttactaaaatcggtacgtttattaggaaataaagaagaacaaggacgtatgtttggttttctagaagctgggcgaggggttgttgatgttctagtagcttcgggagctctttatatatttgttttatttggtgaaggtaaaacaggtatgcaagcaggattaatttattatacgcttgctacaataatagtaggtataattacatattttattgtggataatgacgataagaaggaaacctcctcagcaagtgaagctaatcgccaagttttggaagggattaaaaatgtcgtaaaatgtcctaacttatggttagcatcaatgagtatcttctttgtttattctgcttactgtgggttaacttattttattccttttttaaaagatatttacgcactaccaatagcccttatcggtgcctatggcattattaatcaatatgcactaaaaatgataggtggtccattaggcggatttttagctgacaaagttgcaaaatcgccaacaatatatctgaaatggacatttttattatctgcgattgcaatggctattttcattatgttgcctcatgactcaatgaatgtctatttaggtatgactgcaacattaggtttcggtgcaatcattttctcgcaaagagctattttctttgcaccaatggatgaaattggaacaccaagacaatatgcaggttcagcgatggcgtttgggtgtattattggttatatgccttccatgtttgcttatgctctctatgggtcattattagataattttgagggcattcaaggatataactatgtatttagtattatggtcacttttagtttgcttggttttatttgtgcaaccatattagctaagcgtattaaaatgataaataacactttaaatatagcttaa

SEQ ID NO: 302430 - DNA, 870 bp, Proteus mirabilis
atgtggcggttattctggcaacgacttgcgcaagataaaagtgcacaactctgtttattggtgatagtgatgattaccatcgccggaataggcgcaccttggtttgcacctcatgatcccactttaacatcgatacgcttaaaatttcagccaatcagctttcactatccactgggtacagacaatttaggacgttgtgtattttcacgtttactctttggtattcgaaccaccgttttttatgccatttatgcgatgagtataacactgctgatcggttggctaatggggatgttggcgggctattttcacggtaaaacggatacagtgattatgcgtttatgtgatgtggtattgtcatttcctgcggaaattatgatcttagccttagtgggcataatggggcctggaataggtaacatcttgattgcggtgatcttggttaaatgggcttggtacgccagaatgatacgaggcattgttcgacaatattcacatcgtcactatattgcttatgctcaagtgattggcgcaccaccaacacatattttacgacgccatttattacccgtgacattagctgaaactatcgttttagcctcaagtgatattgggagtgttattttaatgatctctgctctttcatttctggggttaggggtacagccacccaccccagaatggggcaatatgctgagtgaagcaaaaaatgtcatggtattacatcccgaacaaatgctacctgcggggatagcgattacggttgttgttactgcatttaacttttggggcgattttttacgtgatgtgttcgaccccgataatcgtcaatcagtcggggataaatatgaacaatttactgacgcttaa

SEQ ID NO: 302431 - DNA, 4290 bp, Proteus mirabilis; identical to SEQ ID NO: 32493

SEQ ID NO: 302432 - DNA, 285 bp, Proteus mirabilis
atgaaccgtaaaaacctgtttactcgcacagctctcgctgccattgtaggaacactttcctcttatgcaagcgctgccggttttcagttaaatgaatattcaacttcagcactaggtcgtgctttttcaggagaaggcgttattgcagatgatgcgagtgtaggtagtcgaaaccctgccgcattgaccatgtttgatcgtcctgagttttccgtcggtgctatccatattaatcccagtgttgatattaaaggtaaatctccactctctgggcgccagcactaa

SEQ ID NO: 302433 - DNA, 744 bp, Proteus mirabilis
atgaagtatcgcctgtgcggtgttgctcttttagtagctttactttcaggatgtgcaagcacacctaacaatggtgacagtcgttctgatcccttggaagggtttaaccgccagatgtttaattttaactattatgttttagatccttacgtattacgacctgtagccgtagtatggcgtgattatgttccaccaccagcacgtaatggactatcgaatttcttaggtaaccttgaagagccagcaagtatgctaaatagcatcttacgtggagattttgaaaaaggggctaagcatttcgggcgtttttggatcaataccgtatttggtattggtggtttaatcgatgttgcaggaatgtctagagagtcaatggaaaaagaagttcctgtaaggtttggtagtacgttagggcattatggtgtgggatatggcccttatgtggtattaccgggctatggcagctttacagtgcgagaagaggggggcgattgggctgatgccacctatccagtactgagttacctcactttctggatgtctgcgggtaaatgggcccttgaaggtattgaaacgcgagctcaattattagattcagatgcaattttacaaaactcatctgatccatatttaatgatgcgtgaagcctatttccaaaaaaatgatttcgatgctaatggcgggaaaacaggtgaaaatccaaacgcaaaagcgattgaagatgatttagactctatcgattaa

SEQ ID NO: 302434 - DNA, 1905 bp, Proteus mirabilis
atgaagcttgaaataattaggctatcaggatttcaatcttttggtcaggagccaacagaattgaatttggaagacattacttatttgattggtccaaatggatcaggaaaaactgcggtgcttcaggcattatgccgtctttttgcgtttgatcctggattacgtagagttcaacgttcagacttctatattccatttgatgaggaagaaactcctcgtgaacgccagttatggatagaagctgactttatatttcccgaacttgcaagagatgaggataatagtactgtagcgcctcattttggtcatatgcgattagatgagctagacggtgtaccacgtgtacgttttcgtctctcggcaacaatgggattggatggagatatcgatgaaagcttagtttatgttctggatataaatgaagatggctatcctgataatacatctaaggttccacgggcagaacgtaataacatccaagttcactatttacccgctcgacgagatccagctgatcatattacttatggtacaaacgctttactagggcgtttacttcgtgccgtacgctgggatgctgaacgtaatacaattaaggaattaaccgatcaaatcagcggtagccttgcagcaaactcttccgtaaatgcatttagtgaaactttaaaaacgacttgggcttcgttacataaaggaacatttttcgctgatccaaaagtaacatttgttgcatcggaaattgaggctttattgcggcatttatcgatttctttcactcctagtcacgatgggtcacttgttgacttctcacggttgagcgatggacaaaagtcaatgctttatctttctcttgtattatcgtctcaagcaatcggcagagctgtacttgcggaagatgatatatcttttgatcctgataaattacgtccccctgtctttacattgatagctcttgaggagccagaaaatagtctctcccctcactatttaggtcgtattgtaagtgttttgaatgagatgacaaaaaatgaagatgctcaagcacttatagctacgcatgctcctactatgttgcgtcgagtttctcctgagttaatacgttatttacggctaacggaatcacgcaaaacacggatcacttgcatcgagttaccagcaaaaactgatgatgcgcacaagtttgtacgagaggccgttcaggcatttcctgagatctatttctctcgtctggtagtgttgggtgaaggtgatagtgaagagattgtattacctcgtttgtttcaggctaaaggagcgcctattgatgaatcagcaattacaattgcgccgttgggaggtagacatgtaaatcatttttggcgattactttcagcgttacaaatcccttattttacattgctcgatcttgatataggccgctatgccgcaggatggggacgtataaaatatgtcaatgaccaattttctctacatgaaccacataaaaaactacccgatggttacggtattccaatatggaatagcacaaagcataaaattaggaactataaccattatttagaaaagctcgaagaacgtggtgtttttttttcttacccaatggatttggatttttcaatgctgcaggcttaccctgaagcttatgatgttgaagacaaggaacctgatgactcgacaattaaggctgtacttggacaaaaccattacgattcatgtcaatatagagaagatgaattagaattatttagtacctatcagcaacgctttaaacttggtagtaaaccagccgcacatattgaggcgttagctcagttaacggatactgaactacttgcaagaatgccagcatcattaagtcgattagctgatgcagttattgtcaaattggcggagttacctgaatga

SEQ ID NO: 302435 - DNA, 1209 bp, Proteus mirabilis
atggcactaacagatgtgaaggtaagaacggcaaagcccgccgacaaaggatacaaactcactgacggtgaaggaatgcacctttacgtgcatgctaatggctctaaatactggcggctacaatatcgatttgacggaaaacaaaaaacattagcgcttggtgtttaccctgaaatttctttagctgatgcaaggcagcgtagagatgaagcaaaacgtcaaatagctaacaacattgatccttcggaacagaaaaagcttgaaaagatagaacgccaatcggcggttaataatacatttcaagccgtaacccttgaatggcacgagtataaaaagccaaactggtctaaaggttatgctgaagatctgatggagtcatttgaaaatgacatttttcctgatctaggtaaaaggccaattgctgaaattaagccactagaagtactcagtacgttgcgtaaactagaaaaaaggggagtgctagacaagttacgtaagatccgtcaagcatgtaaccaagtcttcagatacgctattgtgacaggcaaagcagaatacaaccccgcctctgaactcgctagcgcgttaacacctcccaaagcacaacactatccacatttgcttgctaatgaattacctgcatttcttaatgcattaaatcattattcaggtagcccaatcactcggctagcaactaaaattctgatgttaacaggcgtgagaactattgagctacgtttagcagaatggggtgagtttgatttcgaacgctgtatttgggagatcccaaaagaaagaatgaaaatgcgccgcccacatcttgttccattatcgactcaagtcatcacggcattacgtgaagttcaagacattacaggacgctataagttggtattccccggcagaaatgacattactaagccaatgagcgaagcaagtgttaatcaggtccttaaacgtattggttatcatggaaaagcaactggacatggttttaggcacacaatgagcactatcttgcatgagaagggattcaatacggcatggattgagcttcaacttgctcacgttgataagaatacgatccgtggcacatataaccatgctcagtatcttgaaaacagaagagagatgatccagtggtatgcggactatattgatgagttggagtgtggggtagggaatgtggtgagtgtgaattttaagtga

SEQ ID NO: 302436 - DNA, 3336 bp, Proteus mirabilis
gtgcgcctgataatcagtctactttttagcttttttctgactatctcattcaatacttcggtgtttgctgcggatgttgataaattacgtcaagatatcaaacaacttgaaggcagtactaatcctcaagatattgaaactgttcaggcgctacaaggcaccatcaattggataaatgatggtgaaaaagctcaagttaatgcggataattatcaaaagactattgatgaatatccgcagatcactcaagagctaagggctaaattactcgaagagagtcactcagttccaacaattccagaaaaaattactattcctgagcttgagcaaaaaatcattcaagtgagtagccaactgatggaacaagctcggctacaacaacaagagcaagataaaagccgtgaaatcagcgaatcactcaatttactccctcagcaactttcagaagctcgtcgtttactaagtgatgcaacggcgcgtttagcggcaataggggcatcaaacaccccactagcagaagcacaaaataaattaacccaagctgaagtcacagcacgaaaagcgatggttaatgagctggaaatggcgcaactttctgctaataatcgtcaagaaattactcgactgcgcttggagctatttaaaaaacgttatcaacgacttgatgtacaactgcaacaattgcgtagtttactgaatattaagcgccaagaagtggcagatctcgctttagaaaagacagaaatgctcgccgagcaagggggcgaactccccgagtttctgactaagcaaatcgagactaaccgtcaactttctcagatcctcaataaacagacgcaagaaatgagtgagttaaccgaaaaacagcgtctaacaacacaacaaacccaacaagtaagacagacactcacaaccattcgagagcaagcacaatggttaagtggctctacggcattaggtgaagcattaagaacacaattggcccgcttacctgaaatgccccgctctcaagagctggatagagatatcgttcagttacgtgttgaacgattaggctatgaagagatgctagaaaacctaggcaaaatccaacctcctgaaactgccgatggctcaaagctaccagaagctcagcaatatatttttgactccctcattcaagcgcgccaagagttactcaattctcttttatccggttatgactcccaaatcttagagctgaccaagcttaaagtagccacaacacaacttgcggatgccttaaaagagacaaaagatgccacaaaccgctatatgttctgggtggccgatatcagcccaataaaactcaattatccggttttattaattaaagatattactcgcctactctcattagatactttctcacaattagggcatgctgcggttaacatgctcaaaaaccaagatacctttatctatctactggtcaccctatctattgtcggttttagtcttcgtacccgtaagcattacaatgcgtttcttgaaagagtcagtaatcgcattggtaaagtcactcaagatcatttctcattaacggtgcgtaccgtattttggtcaatattaatcgccttaccactaccgctattatggtctgccgtaggatatggtttacaaagtgtcgaatggcgttatcccatggcgggagcgattggttatggtgtaactgccgcagcccccgtgctatggctatttatgataagtgctacctttgctcgccctaatgggttatttatcgcgcaatttaaatggaaagagagtcgtgtgaaaaaagcgatgcgcttttatcaactgtcgattttcgtcattgtgccgttaatgatgtcgcttatcacctttgaatactatagtgacagagaatttgcgccaacagttggacgtttttgctttttattattgtgcattgctttaagttttattacctcaagcctaaaaaaggcacatgtgccgctttacttagataaacatggctctggtgataatgtgataaataccattttatggtggttcttacttgttgcccctgttcttgcagccctcgcggctatcttaggctatctctcaacctccatcgtattactgggtcgcttagagatgtctgtggcgatttggtttgccttgctgattatttatcatattattcaacgatggatgctgatccaacgtcgtaagcttgcctttgaacgagccaaacaaaaacgggcagaaattttagctcaacgagccaaaggggaagatgagaataccattgttggcagcagtggtgagagtaccgctaacttagagttggaagatcaagccattgaccttgatgcgattagtgcacaatctattggtctagtacgttctattctgaccatgattgcactcgtgtccatgattttactctggtcagagctcaatacagccttctcttttgtcgataatatccgactatgggatgtgacttcctctgttaatggcgtcaatactatccagcccattaccatggggtctatcttagtcgctatattagtgattattatcacggcacaattggtaagaaacctgccagcactgcttgaactggcaattttacaacacttagatctaacacctggtacaggttatgccattaccactttaacgaaatacagcatcaccctaataggcagtattgttggtttctcattattaggtattgagtggtcaaaactacaatggttaattgccgctatgggggtaggtcttggttttggcttacaagaaatttttgccaacattatctcagggttaatgatcttgtttgaaaagccaattcgtattggtgataccgttactatccgtaacttgactgggaatatttctaaaatcaatacgcgagccaccacgctcaccgattgggatagaaaagagatcattgtgcctaataaagcatttattacagagcaatttattaactggtcattatcagactctattacacgtatcgtaatgaccatccctgcgccagctgattgcaatagtgaacaagtgaccaatgttttattagaagcctctaaacgctctaccatgattttagacaaccccgctcctgaggtttacttggttgacctacaacaagggatccaaatcttcgagttacgtgtttatgccgcagaaatgggacatagaatgccagccagacatgagatccatcaaaatattctgctagcctttgcagagcatggcattccattaccattcccgccgttccaagcacgggtagatatggtgggtaataccattagtacttcaatgcgtgcaacaccgagagaagtaggcggattgtag

SEQ ID NO: 302437 - DNA, 450 bp, Proteus mirabilis
atgttaaaaattagaatatcacgcccctcagaagcaccagaaatcatacaaatctggaaaaattcagtcgatgctacacatgactttctgacagctaacgatcgccaagagattgaaaaagaagttatcggttttttttccgaaacaccggtatgggttgctactaatcaagaagatcgcccactcggctttatgtttttacatgacggtcatctagaggcactttttatcgatgcatcagcacgcgggttagggataggaaaacagttaatatcacacgcattaactcttcatcctaatttaagcgttgatgtcaatgaacaaaatcagcaagccgtcggtttttatcagcatatgggctttcaaatatctggacgttcggagttggataatcaaggaagagcgtacccattattgcatctaagtagagctaaggcgatcaccctttag

SEQ ID NO: 302438 - DNA, 1344 bp, Proteus mirabilis
atgttgtattttcaccgaatgttactattagttatttgtttcattagtctgatctttagcgttgtaagcaaagcggtatgtattaaggtaacagataatagttttctatccgatagtgcaattaaggcaggctatactgctcgtaactggtatggtgcctttgatgataatattgggcatttaggcttaccatctgtaattagtgtgagtaccagtaataaatttcaacctgctggtactgtactagcgagctctattgctaattttcttacatcagcaactcgaacaccatatagtgcgaaacagatcctttttcgttgtgagctaaaggatgcagggcaactttatgaattgtattccaccaatggtgataacatatttgtgggagggcgtccggcgaaagaattggaaggagcctattatgatgtagaacgtaatgtcgctgtacgtatgactaatcttagtacaggagagtattatagtcgttattggaaacagcgccaacttacggcagatagttggtttcaagatgatcacgctatttatattcctgctagcgcatttagcaatatattgtatgagatgataaaaatctcagcctcagatcagtttatttatgcgggtagaattaataaagatacttataaccaacctcgaggttatattgcttttaaagggcctggcttagatacttttgctatccaagaaggagatgatcatgccaataaatatttgggatggccatatgtatggccgggcgcatggggaacttataatcaagttacttatattcgaggtgcaacttgtacaatagaggattatccctcaatagttatcctgcctcaaattactgttagggcactctcttcagggcaaagcagtcaagcaacatttagtcttacacttaattgcgaatcaggagcaatgtcttcaactcaccctacaactaatattgcgaatgtagcaatgggctttttagttaatcaacctacggcggttgcggccgcccgtcgtttaggtctaacaacatctggtggtggattaacatggctattggatacacattatggtgaaaaaggcgttgcttctggggttgggatcaaaatctatgataaacaaggtgctgcaattaatttgctaccagacaggatggtgacgggaagtggaagtactcgagggtggtatgcgtataaagatcttactacgttttctggtacaaaagaaaatggttctatagaaacttggcatggtgattttactgcttctttagaagctcttagtggacaaaccgtaaccgtggggagtgttaatgcacaattacaagccgtggttagttttcaataa

SEQ ID NO: 302439 - DNA, 963 bp, Proteus mirabilis
atgtcagtcccttcacaggaaaatatcacactaaccaaagaagacttacgccaactgcatgtttcaagttcactttatcgttggtttttgcgttattttccccatggaggtacttaccgtgctatccataatgaattgataaaacaacgtcaaacacaatggatagaaagcttaattcaatatatttatctgcgtcattttagtcagtcctcttttgccaaacaggaacaagaagtgatagaaaacatcttgtccctgttaggcaatgaaaaacaaaccggtgtgacattacaacgtttaccctatcaccaaccgcaatctagcgacgaaaacattcagttttctaccgaatggcatcaactgattgtcaaaagccagcaatttaataccgccctcgcattatgtggtcgtgataatattgtcgccttttccggtgatgaaaacagtattgctaacactggttatagtaaccaattaatcaacagcggatttgctggaaagatcagtaatacggcagatcaatgtcgtattggtagcttaggaggacgctctcgtatttgtaatagtggcaacgatgttaaaatttacgcttctggtcaaggggcgcatattgccaatagtggtataagaaactttattaatgcgactcaatcccgtacaaaagtcaccaatactggtgatttagcacatattactgttactggcgataacgccattgctatcaacacaggtgataactgcacactctctgtatctggggataacagcgtgtgtatctcaacagggcatcttcagcaattttgcttaggaaaaggcggtagcgctgtgattgcctatcacgatggaaaacgcacccgctttaacgttttctatgaaggtgaagataatattgaggccggcattcactactacttagatgaaaaacctgtctcttatacacatctccgagcccacgagacgtag

SEQ ID NO: 302440 - DNA, 2160 bp, Proteus mirabilis
atgatgttgatagcgttttttaaaacactatttaaattcttatttcgagtaagaattgaaggactaattaatcagttttcacaatatgaaaaatgcattattacgccaaatcatacatcgtttattgatggtatattattgcgtttatttttaccgattaaccctgtctttgctgtttacacctcagtggctaatgccaaacataccaaatggctcagtcattatgcggatattgttcctttagatcccgctaatccaatggcggttcgccaattagttaaagaagtcgataaaggccgtcctgttgttattttccctgaagggagaattacggtaactattggtttgatgaagatttatgaaggtgctgcgtttattgctgctaaatcaggggcaaaagttatccctgttagaatagaaggtgctgaatttagctacttttctcgagtgcgtaaaacgttaaatataaaagcaaaactctttcctaaaatcacaataaaagtgctacctgcggttgatttacctatgcctacagcggaaaaatcagcagagcgccgtcgcttatcgggagaaaagctccgtgatattatgatggatgctattatgcaagcacgtcctaatatcacgctctatgaggcatttttacaaggaatgtctcagtttggtcgtttcagtcctcttatttcagatattaatatgaaagaggatagttatcagggcctattgaaaaaaatattaggtgttagtcgtattattgaacgctataccgaacctaatgaacgaattggccttttacttcctaatactaccgttacggttgcggctttatttggggcgacaatgcgccaaagggttgtggcgatgcttaactatactgcgggtagcttaggtgtacaaaatgccatgaaagcggcatccattaaaacgatttttacctcacgccaatttttagagaaaggaaatttattacatattccagaacagactccggatgcaaactgggtttatcttgaagatctcaaagatagcattactagagaagataaacgctggattgcacagcacttactcactcctcataaagcgatgttagcgcaaaaatcgacggacgcagcagttatcttatttacttctggatctgaaggcacaccgaaaggtgtcgttcatagccactccagtttattggcgaatgtagagcaaattcgcgctattgctgacttttcacccagagataaatttatggctgcattaccgttattccatgcttttggtttaacggtaagtgtattagcacctatctgcttaggagcacgagtattcctctacccaagcccactacattatcgtgtagtacctgaattagtgtatgaccaaaattgtacagtattatttggtacttcaactttcttaggcaattatggcaaatttgctcatccttatgattttgctcgactaagatatgtggttgcaggggcggaaaaactgtccgaatcgacacgagtattatggcaggataaatttggtattcgtattttagaaggttatggggtcactgaatgtgctcctgttgtctccattaatgtaccaatgagtgctaagccatataccgtggggcgtttattaccaggcatggaagggcgtttaattcctataagtggtattacggatggtggaagattacaactgcgtggccctaatatcatgcttggctatttgcgcgttgagtccccttataaattagaacagcctacagcaataaatgccgaaggcattgaagaagcaggttggtatgatacgggagatatcgttgctattgatagcgaaggtttttgcactattaaagggcgtgtaaaacgttttgcaaaaatagcaggagaaatggtttctcttgaaagtgtagagcaattagcagctaaagcctcggaaggcaaccatgctgtggtggcggtaaatgatccacgtcgaggtgagtcattagtgctttttaccaccgataagcaacttgatcgcagtatgttatcggcattagctaaatccactggtgtggcagaaattgcggtaccaaaagatattcgttttctcaaagaaattcctgttttaggaagtggcaaaacggattttgtctcgttaaagcaactcgctgaacaggaaaataattaa

SEQ ID NO: 302441 - DNA, 273 bp, Proteus mirabilis
atgaagcaatatggtttttattttgactccactaaatgcactggctgtaaaacctgtcaagtcagttgcaaggacgaaaaagatttagatttaggccctaaattccgtcgtgtttatgaatatggcggtggtagctgggcaaaacaagacggtatctggacacaaaatatttatagttattatttatcaatttcttgtaaccactgctctaaccctacttgcgtggcaggtgccctactggcgcgatgcataaacgtgaagaagacggtttag

SEQ ID NO: 302442 - DNA, 708 bp, Proteus mirabilis
atgtcttatcgttatcaaatagccattatttttttactgggtttttttattgattgtataaatatttttatgtcggcaattgcattaccagcaattgcagcggatatgaaggtatctatcgtctccattacatgggtatcaaatagttatattttaggtttaacactgattattccattgagtcactggttatctcaacgttttggcgtgagagtattaatggtcagctcgatgttgatatttagtgcttctgtggcgttagtaggctattcacactcattttttgagctgattttatggcgttttattcaaggtcttagtggtggattattaattcccatcggccaagctttaacatttcagtattttcaagggcatgaaagaagcaaagtctcaactttaattatggctgttgctcttattgcacctgcaatttctcccacaataggtgggtttatcgttgatgctgtatcttggcgttgggttttttatagtaatgtgcctttttcattacttactgcgtttttggcttttatttgggtaaaagagtctaaatcacaagaaaatataataccagatcttaaagggatcttattaatcagtattattatcgtatcagggttatgtgcattatctgcttacggtgagtatcactctacacctgtctcttatacacatctgacgctgccgacgatctactctgtgtag

SEQ ID NO: 302443 - DNA, 963 bp, Proteus mirabilis
atgtctattattcatcttgaatttgaaaagcctattgttgaattagacgagaaaatagatgcattacttgcatttaaacagtctcaagatgaaacaacggcagttgatatagacgaagaaatcgccaaacttcgccaaaaaagcctttcattaacacgctctatattttctgatttaggggattgggagatcgtacagttagcacgtcatcctatgcgcccttatacattagattatatcaaagctatttttactgatttccaagagttggccggcgatcgtgcttatgctgatgataaagcgattgttgcagggttagcgcgtttagatagaaaaccagtgatgattatcggtcaacaaaaagggcgagatactaaagagaaagtaaaaagaaactttggtatgccatcaccagaaggttatcggaaagcattacgcctgatgaaaatggctgaacgcttccatttaccagtgattatttttattgactccgcgggtgcttatccgggggttggcgctgaagagcgggggcaatcagaagccatagcacgaaatattcttgaaatgtcccgattaaaaacaccgataatttgtacaataacaggggaaggtttttctggtggtgcattagcaataggtgtgggggatcgagtaaatatgttgcaatatagtacttatgctgccatatcgcccgaaggctgtgcctctatcttatggaaaaatgctgataaagcgcctattgccgcccaaaccatgggaatgacggcacctaaattacaggcattgggtattatagactcgattattcctgaaccattgggaggcgcacatcgccactaccagcaagcggctgaattcgtaaaaaaacagctcctcgcagatttaacagaattgaatcgttattctaaagaagaactgcttgagaaacgttatcaaaaattaatgtcctatggttattgttaa

SEQ ID NO: 302444 - DNA, 825 bp, Proteus mirabilis
atgcaaattcaagcacttcaaaccagtcagcatatctttgcttttgaaggtgagtttaaatgtgtcggcatttatgaacatgctttgaattttatttgccctcagcaacgcttaatcacttttcatcggcaaggaagaggattaagcccgatggggtggctactgaaacaagccgattttgattctttggctaagcagtgtcatcccgctttgaaaatgcggatgaaaaacaatcaaatcgcaatcgcagataatatgacattgattgccggtgatagtgaaaatttgcgtttacaagataaagcgacattagatttacgatggttagagagttttttttctctattatctccggtgatagcgacaggactctatgggccattaaaaaactatcgtaaaatcgcccgacttgatgaaattaagttattaacaaagttattttatcatcaattgtctggaaaagcggttaattgggcgatgtttattggtaaaggtccagggttaacaccgagttcagatgatatgctggtgggaatgttatttgcgcattatttagcacagccagaaaaatcgattgaacatttttttaatgaaacaccaccattatcgtcattaactacgatagtgagtcaacattatttggaatacgccacacggggaatattttctacctatcttattcaactaggtaaaaaaataaaaaataaagagattatttttaaagatatgttggaaatactctctatcggtcatcattccggtgcagatactttactgggattatggattggttatcaaattaaacaacaacagcgtatagattaa

SEQ ID NO: 302445 - DNA, 420 bp, Proteus mirabilis
atgttagatatattaacacctaatgaaacagaagccagcttattatcaggtattgaagttgttgatttagtatctgctaaaaatgcagccaatgctatttatcaaaaaggtgttaataaagttgtcattactttaggtagtaaaggttcattagcttatgacggttataaatatatttactcaccagcttatcctgcggtggtaaaaaatacagcgggcgctggtgatgcttttaatggtgcactagcagcctcattagcaaaaggaaagcagttttcttacgcgttacgctatgcatcagcttttgcatcactagctgttgagacgagtaatgcttcagaaatgcctgaagatattaatgtcatgcatcgcatcaatcaaacaacatattcacagattgtcactcaatcccctgaataa

SEQ ID NO: 302446 - DNA, 738 bp, Proteus mirabilis
atgaaaatcttatttattggtgagtcatggcacattcatatgatccactcaaaaggctacgacagtttcacttctagtaaatatgaggaaggtgccacttttttattaaattgtttaagggaaaaaggggtagcagttgattatatgcctgcacataccgttcaggtcgcatttcctcagactgatgaagaattagcaaaatatgatgtcatcgtgatcagtgatattggtgctaatactttcctcttgcaaaacgatactttctacaacatgaaagtacttccaaatgcattagggctgattaaacagtttgttgctaatggtggtggcttattaatgattggcggctatctatcatttatgggtattgaagcgaaagcaaactataaaaataccttattggcacaagtgttacctgttgaaatgttagagggtgacgatcgtgtggaagccccagaaggagtattcgcaactccagttaatgcagagcatgccacgataaaaggttttagtgaatggccgatgttccttggttataacaaagtgttcgctaaacataacactgaaacggttttgaatattggcgaagatccactactggtgtttggtcaatttgaaaaaggaaaaacagcttgttttatgagtgactgttcaccgcattgggggagcaaagagtttttagcatggccacattatgctgatatgtgggtcaatattctaaagcaaatcgcacgttag

SEQ ID NO: 302447 - DNA, 1263 bp, Proteus mirabilis
atgaataaagatgctaaaaaatactatgtgatcttaagtgcgttgctatttttcttcttttttacatggtcttcatcgttttcattaatctctatttggttacatcaatatgttggacttaaagcaacagatactggtttgatattctcggctatatcattgattgctttatgtgcccagccactctatggctttattcaagataaactgggtttacgcaaaaatttactgctggttatcgcggtattgcttattttatcggggcctttttttcttagctttgcggcaatattacgctggaatatttttattggctctattctcggagggctctatgtaggaatgacttttaatgccgggatcggcgttttagaatcttatactgagcgtgttagccgtattcgtggttttgagtatggcagggcgaggatgtggggctctttgggatgggcatcggcaacctttattgctgggcataatatcaatatcgatcctaactataacttttttatggcatcgatagcgggggtgatcttcttaattctgttggcgttactaaaaacagataaaccagatgcttttaatcaattagagcatggtaaaccttctgcactcaccatcaatgatgcattaaacttactgtcattaccgcgcttttgggcattaatattatttgtggtcggaacctgtatttatagcgtctacgatcaacagttcccggttttcttctcttcacaatttgcatcattacagcaaggtaatgagatgtacgggtatcttaattccttacaggttttcttagaagcgggaggaatgtttgttgcgcctttcttagtgaacaaaataggggcgaaaaacggtttattattggcgagtagtgtgatggctgcgcgtattattggttctggattagttgaagggccgataatgatctcttgtatgaagttattacatgcagttgagcttcctatcctgttaatttctatttttaaatataacagccaacattttgataagcgtttatcttctacattgtatttagtcggtttccaatgtgtcagttccattgtggcaacattgttatccccattagcgggttatggctatgatcattacggttttgcccctacgtatatggtgatgggatgtatggtagtcggtactacgttactttctgctgtgttgttacgtgctgactcgaaagcattaccacaacatgatatgactgatctcgatagtaacaataaagctcaaccgatttaa

SEQ ID NO: 302448 - DNA, 582 bp, Proteus mirabilis
atgaataaacaacgttgtgattgggtaactcaagatcctgaatatctcgcataccatgataatgaatggggaaaaccacagcgagataaatacaaactttttgagatgatctgccttgaaggacaacaggcaggtttgtcgtggtataccgtattaaagaaaagagcaggatttcgtcgttgtttttttgattttcgtcctgaaaaaatagcactaatgactgaaaaagatgtggaaacactactacaagatccgtctattattcgtcatcgtggcaaaattaacgccattatcaataatgcgcgtgcctttttagcgatggaagctcagggtgaagatttcagtgaatttatttggcaatttgttgatggaaaacccattgataaccagtggcagactatttcacaggttcctgcttttactgaaatttcagatgatatggctaaggcgttaaagaaaaaagggtttaaatttgttggtaccaccacctgttatgcatttatgcaagcagtaggcatggttaacgatcatatactctgttgtttttgtcggcaatctcagctggaaagtagtattaaatag

SEQ ID NO: 302449 - DNA, 333 bp, Proteus mirabilis
atgaatgcgccactgattgaagccatcaaacaagccaaatttccacaaaatagttatcagacaaccactatcatcaatactgatgatgctatctttggtactgggccttttgttcgcggtagtgttgaagacagtaaaaaagagtttccttggtcacaatttattgttgatgctgatggtgtagcgcaaaaaggttggggactagaaaaagagagttcagcaattattgtgctggataaacaaggaaaagttcgttttgtcaaagaaggtgtattaagtggtgcagaaataacttccgccattaaccttatcaatgacttaattaaagaatag

SEQ ID NO: 302450 - DNA, 3897 bp, Proteus mirabilis
gtggcactatcatctgcgatgctctacaaagagatagagcaactctcgttgcgggatcagcaacgattgagaaaacgcttacgtggcgttgataaaataagtaaagaaacgtcgaaacaggcggtattaagcgagattgagcaggatattattgttgcaaaacagcgtatattaaatcgacaagctcactgtcctaaaattgtttatccagaaaacttgcctgttagccagaaaaaagaggctatctacaatgcaatcaaagataaccaagtggttattattgcaggagaaacgggatcgggtaaaacaactcagatcccgaaaatttgtctcgaattagggcgaggcgtaaaagggtatattgggcatacgcagcctcgacgtttagctgcgcgctctgtcgcagagcgaattgctcatgaattaaacacaacattaggtgagtctgtcggttataaagttcgttttagtgatcatgttggtgataacacgctggttaagttaatgactgacgggattttattagctgaactacaacaagataagctgttattacaatatgatactattattatcgatgaagcccatgagcgtagcttaaatattgactttattcttggttatttaaagcagcttttgcccaaacgcccagatttaaaagtgattattacttctgccactatcgatcctgagcgtttttctaagcattttaatcaagctcctattattgaggtatctggccgaacttatccggtcgaagtgcgctatcgtcctattggtggtgacgctttggatagtgataaggatatgactgagggcattattgatgcgattgacgagttaagtagagaaagtgcgggtgatattcttatttttatgagcggtgagcgtgagataagggataccgcagaggcattaaataaattacaactgcgtcataccgaagttttacccctatttgctcgtctttctaatagtgagcaaaaccggatatttcagcctcataccggaagacgcatcatattagcaaccaatgttgccgaaacctctcttacggtaccgggcattaaatatgtgattgatacgggttatgcacgtattagtcgatatagttatcgaaccaaagttcagcgcttacccatagagcctatctctcaagcttctgcggatcagagaaaagggcgttgcggtcgtgtttctgatggtatttgtattcgtctttattctgaagatgattttatttcccgtgcgcaatttaccgatcctgaaatactaagaaccaatcttgcttcggttattttacaaatgacctcgataggattaggggatattagcggatttccttttgtacaagcgcccgataaacgcaatatacaagatggtgtacgcttattagaagagctgggtgccttacaagagggtactgataataaaggtgcttatcgtttgacgccgatggggaaacaattagctcagcttcctatcgatccaagattagcgagaatggttcttgaagcgcgcaaatatggtgcagttagagaattaatggtgatcacatcggcgctttctattcaagatcctcgtgaaagaccgatggataagcaacaagcatcagatgaaaaacatcgtcgtttccaagataaagattcagattttctttcgttactcaatttatgggactatttaaaaactcagcagaaagagttgagtcactctcagtttcggaaacactgtcgccaagagtttttaaactttatgcgagttagggaatggcaagatgtctatacgcaactacgccaagttgtgaaggaattaggttttccaattaatagccaaccggccgattttaaaagtattcatgtggctttattaagtgggctattatcacatatcggacaaaaagatagcgataagcaagagtttactggcgcgagaaatgcgcgttttgctatttatcccggctctgggttatttaaaaaaccgcccaaattggccatggtggcagaattagtcgaaacatcacggttatgggggcgtattgctgcacgtattgaagcggaatggattgaacctatcgcgacccacttagttaaatatcactatagtgagcctcattggtcaaaagtacagggtgcggtaatggctaatgaaaaagtcaccttatatggtttacctattgtggcctcacgattagtaaattatggcaaaattgatccactattatgtcgagagttatttattcgccatgcgttggtagaaggcgattggcaaactcgacatgcttttttccgtgaaaatttaaaattacgtaccgaggttgaagagttagagcataaatcacgtcgtcgcgatattttggtagatgatgaaacgctgtttacattctacgatcaacgaataccacaagatgttatctctacccgccattttgataaatggtggaaaatagcgcaaaagaattcacctgatttgctgagctttgaaaaaagcatgcttatcaaagaagatgctaaacgtgttagtgcattagattatccaaattattggcatcaagataatttaaaattacgcttaacttatcagtttgagccaggtacagcagcagatggtgtcactgtccatattccattaccgattttaaatcaggttaaagatgaaggttttgattggcaaattccgggtattcgtcatgaattagtcgttgccttaataaaatcattacctaaacctatacgtcgtaattttgttcctgcgcctaactacgcttcagcttttttagaacgagtggttacccctgaaggtgaattactcgataaattagaaaaagagctacgtagaatgaccggcgttacggtcgaacgtgatagttggcaacttgagcaagtggccgatcacttaaaaatgacttttcgagttgttggtgacaacaataaaacccttgcggaaggaaaagatcttaatcagttaaaagcacgtttaaaggacaaagttcaagaaacattatcagcggtagcagatgatggtattgagcagcaagatttacatatttggagttttggtgacttgccacaacgctacgaacaaaagcgtggtagctattcagttaaagcctatccggcattagtggatgaaaagaatagtgttggtatcaagctatttgaaacagaaacagagcaacaagcggcaatgtggcaggggataagacggttattactacttaatattccttcccccattaaatacttgcatgaaaaattgcctaataaagcaaaattaggtctttattttaatccttatggcaaggtgctagatctgattgatgactgtatcgcttgtggggttgataaactcattgcttcttatgggggattaatatggcaagaagagcaatatcaaaaactccaagattatgtccgtgctgaattaaacgatgttgttgtcgaaattgctaaacaagttgaatctattttaactcaggtatttgcaataaataaacgcttaaaagggcgggtcgatattagtgttgcttttgcattgtctgatattaaagcacaacttaatcaattagtttttcccggatttgtcacatcccatggctggaaacgacttgcggatattcctcgctatctcagtgccattgaaaaacgtatggagaaattagcgattgatcctaaccgtgatagagcacaaatgagccgagttgaaaatgtcattttgcagtggcaacagtggttagctaagttaaccgagaagcaaaaacagcaagaagaggtacaaaatattcgttggatgatagaggaattaagagtgagtttatttgctcaacagataggaacgccttatcccatctctgataaacgcatcttacaagctattgagtctatctcattaagttaa

SEQ ID NO: 302451 - DNA, 225 bp, Proteus mirabilis
atgtctgtgatcctctataccaaaccaaattgtgttcaatgcagtgcaaccgagcgcgcattacaacaacaaaaaattcctttcactgcggttgatctcacccaagacactcaagcattagcaaaaatagtttctatgggatatcgccaagtaccggttgtcgttaatggtgacgaacattggtctggcttttgcccagataaaattcgtcaaatagcgcgctaa

SEQ ID NO: 302452 - DNA, 1899 bp, Proteus mirabilis
atgttttatccagaacattttgacgtcattgtcatcggtggtggtcacgccggtacagaagccgctatggctgcagctcgtatggggcgtcaaaccctattactgacccacaatattgatactttgggccaaatgtcttgtaacccagctattggtgggattggtaaagggcatctggtaaaagagatcgatgccatgggtggattaatggccacagccatcgaccatgctggtattcaatttagaacccttaatgcaagtaaagggccagcagtaagagcaacaagagcacaagccgatcgcgtactgtatcgccaagctattcgtacaacacttgaaaatcagcctaatttaatgatcttccaacaacctgttgaagatctcattgttgaaaatgaccaagtaacgggtgcagtcactcgtatgggattaaaattccgtgctaaagcggtagttttaaccgtaggaactttccttgatggaaaaatccacattggtttagaaaattacagtggtggccgagcaggtgatccaccatcagtctctttatcacatcgattaagagaattacctttacgtgtaggtcgcttaaaaacaggtacaccacctcgtattgatgcaagaactatcgattttagtcaattagcgccacagttaggtgataatccaatgcctgttttctcatttttaggtaatgtggatcaacatcctgaacagatgccttgccatattactcatactaatgagcaaacacatgaaataattcgtaacaacctcgatcgcagtcctatgtatgccggggttattgaaggtatcggccctcgttattgtccatcaattgaagataaagtgatgcgatttgctgatcgcaattcacaccaaatctttttagagcctgaaggcttaacaagcaatgaaatttaccctaatggtatttcaacaagcttaccttttgatgttcaaatgcaaatagtaaattccatgaaaggtatggaaaatgccaagatcatccgacctggttatgcgatagagtatgacttttttgatccacgtgatcttaaacaaacactcgaaagtaagtttatcaacggattattctttgctggccaaattaatggcactaccggttatgaagaagcagcagcgcaaggtctattagcaggtcttaatgcggcacgttatgcttttgatcaagaaggttggttccctcgtcgtgatcaagcctacattggtgtattagttgatgatctttgtaccttaggtacgaaagagccataccgaatgtttacttcacgtgctgaatatcgcttgatgttacgtgaagacaatgctgatttacgtttaactgaaattggtcgtgaacttggtatggttgatgacaaccgttgggcgcaatttagtgaaaaagtcgaattagttgaaaaagagcgtcaacgtttaagagatatttgggttcatccaaaagcggataacctagaagaaatcaatcaattacttaaaacgccactgtctaaagaggcgaatggggaagacttattacgtcgtcctgaaatgacctatgagattttgaaaaagatccctcgttttgctcctggtattgatgattcgagaccacaagcggcagagcaagttgagatccaagtaaaatacgaaggttatatcaatcgtcaacaagaagagattgaaaaacaactgcgtaatgaaagtgctgcattgcctattgatatcgactacaaacaggtgagtggattatcaaatgaagttattgccaaactaaacgatcacaagccaacttcaataggtcaggcatcgcggatctccggtgtgacacctgcagctatctcaattttacttgtttggttaaaaaaacaaggtttattacgccggagtgcatcatga

SEQ ID NO: 302453 - DNA, 1203 bp, Proteus mirabilis
atggcactggtaacacaagctcgcaccttggggaaatactttctcctccttgacaatatgctggttgttttaggattttttgtcgtattccctttaatatcaattcggtttgttgagcaattaggctgggcgggtgtgattgtcggctttgcccttgggttaagacaacttgttcagcaaggcttaggtatttttggcggtgccatcgccgaccgatttggtgctaagccgatgattattaccggtatgctattacgtgctcttggctttgcattaatggctttagcggatgaaccttggatcctttggttatcttgtattttatctgcactcggtggcactttatttgatccgccaagaactgccctcgtgataaaattaactcgcccttatgaacgcggtcggttttattctttattattaatgcaagatagtgcgggtgccgttattggggctttaattggcagttggttactcctttatgatttccatttagtttgttgggttggcgctggcgtattcgttcttgcggctatttttaatgcttggttactacctgcctatcgtatatcaaccacgagaacaccgataaaagaagggctaaaacgcgttattcttgataaacgttttgttcaatatgttcttactcttacgggatattttgtactgtcggtacaagttatgctaatgtttccgattgttgttaatgaaattgccggcacccctagcgcagtaaaatggatgtatgcgattgaagctttattatcattaacactgctttaccctattgcccgttggagtgaaaaacattttcgcctagaacaacgcttaatggcaggtttatttctgatgagtatcagtatgtttcctgtggggatcacccactcattacatgccatatttcttattatcaccctattttacctaggcactattaccgcagagcctgctcgagaaacattaagtgcctctttagcagatcctcgtgctcgaggcagttatatgggttttagtcgattagggttagcttttggtggcgcgattggctataccggagggggatggatgtatgatattggcaaacaacttgaactgcctgaactaccttggtttttattaggctcaataggatttatcaccctttacgcactacatcgacaatttaatcgtaaaaaaattgaaacagccatgcttaccccatag

SEQ ID NO: 302454 - DNA, 2175 bp, Proteus mirabilis
gtgttcaatttgtttaatggcgcccgccgatttatctataatagccactttttatattatattcgcataataatcgcacttacgggaacgactttatttccatgggctttaggacaagaaccaaaatatactatacctcttacattaggtgttgtcgcagccgcattaactgacttagatgataggcttgtgggccgcttaagaaaccttgtgatcaccttatgttgtttcttattagcatcaacatctatcggattactctacccttaccctattttattcttttgtggtcttgctatctccacttgggggtttattttattaggcgccttggggcagcgttatgctaccatcgcctttggtgcgctattaatcgctatttataccatgttaggtatgccgattttcccagaatggcatgaacaacctatttggctccttttaggcgcgatttggtataatttgcttaccttaattggtcacctacttttccctattcgtcccgttcaagatagccttacgcgttattatcagcagctttccgcttatctagaagccaaagccgcattatttgatcccgatattgaaggtgatcaacagcaattactgtataacttggcattggctaataatcagttaattgaggcaatgagccaaactaaactaacattactaagccgtttaaaaggtgataggggccagcgtagcagtcgtttcacattgcattattactttgtggctcaagatattcatgaacgggccagctcttctcatattcaatatcaattactgagtgatagattacgccacagtgatgtccttttccgctttcagcgcttactgtcaatgcaagcaagagcctgcgaacaagtcgctcaatctattctttggcataaaaagtaccaacataatcctcattttgaacgtgcaatcactcatttagaaaatgcacttaataatgtaaaaaacagtacttctgatccacaaattattgcgccactctataatttattacaaaacttacagggcatcgatgctttattaaaaagtattagtacagagcaatatcaaatctctcatgaccaaaaagaagaaactcagttatctgatgaagggcttactgggtggcgagatatcgtgctaagaataaaaggtcacttaacaccaaaatcagctctatttagacatgcagtacgaatgtcacttgtcttatgtataggttatgtgatcatccagttttttgatttgcatcgagggtactggattttattaaccagtttgtttgtttgtcagcctaactataatgcgacacgtagacgattaacattacgggtcagtggcactattattggtattttaattggtttccctattctctattttgtgccttccatcgaaggtcaattagtgcttattgttgtgacaggtacgctcttttttgctttccgaaccgtacaatacgctcatgccactttgtttattaccctactcgttttattaagttttaatttattaggtgaaggctatgatgtcgcactaccgcggatcattgatacgttaattggttgtgctattgcctggtttgcagtcagttttatttggccggattggaagttccgtcagttgccattgctcatccaaaaaaccatgaccaataactgctactatcttgatgcgatcctcattcagtattatcaaggaagagataatagcgttaattatcgtattgcacgtcgtaatgcacatagcagtgatggtgagttagcatctttaatttctaacatgtcatcagagcctaaaagctttcaaacctctcaagaagaagcatttaaattactgtgtttaaatcatactttactgagctatatttcagcgttaggtgttcatcgttgcaaaattgaagatgaagcagtactcaccctgcttaatgatactgtctgttatattgattccgcgttgagacgtaaaaaaccacaagataatgattttatacaatctcatgatcaacttatcgcacgtgttaatgcacaaccaagttcagataacgcccgtattcaattagtgttaacgcaaatacgcttgttactggatttattgccacaaattgtcaattgcattgagctaattgagcaaacagaatggcaaaacgataaagataaattagctacagcttga

SEQ ID NO: 302455 - DNA, 615 bp, Proteus mirabilis
atgtcaattttacctgagcaaaggaaggctcatttattatcgcgcgtagcggaatatggaaagttaagtaagaagtctcaattcggcggttatagcttaatggttgatgaggttatctttgcgattactgctgataatgaattttatttaaaagggagtggttttgttgaaacactctataaagcaaacaacatggatgcatacgtctatctaaaaaaaggtatccccattacattgcgctattatcgtattacgcaagcaatatggcgtaatagcgctaagctcaatcaatatatcgattttgcatatcactatagtactcaggagtttttagggcagcaaaagcagcctcgtcgtatcaaagatttacccaatttgggcatagcattagagaaaaagctgaatcaagttgggattaaccgtatcgaggaattacgtacgatcggtgcgaaggcatgttatttaaaactgattgcgcaacctaagcaaggaaatagcgacttattgcttgcgttagcaggtgctattgttggctgtcatcgctctgtgttacctaatcaattaaaaatggaattgttaaattggtataaagagttatccgttaaatcctattaa

SEQ ID NO: 302456 - DNA, 138 bp, Proteus mirabilis
atgaataaagtatctgttgaaatgtttaagttttatttgctattaaataagagcaattcatatcaactggtagctttattttacctattacatcttgctattgataatagtaactattatcgttatagttttaattag

SEQ ID NO: 302457 - DNA, 1335 bp, Proteus mirabilis
atgaagacaaaagtgattttgttctctatattgctattggcgggttgccagcaatctaagagcataaaacccgatttgtctgcgataacacccacatctttagggacttcaacttcttaccaaccacaatatgatataaaaaccaatttgtggggttatgtagtaagtgaattaaaaatggatatccctgacaatgaaaggatttcgcagcaagaaacttattttttaaataatccaaaacatatacaaaccgttgcattacgtgcagagccttatatgtattggattattgaggaaatagaaaaacgtaatctaccgatggagcttgcactggttccggtggtggaaagtgcgtttaatcctcatgtcacctcttcagctaaagcggcgggcttatggcaatttgtccctgtcacagctaattattatggtctagcacaaaatcaatggtatgacggtcgccgtgatgttgtcgcttctactaatgcagccttagatttgcttgagcgcctttacattatgtttgatagcgactggcctttagcattagccgcttacaatgcgggcgaaggtcgtgttatgcaagcgataaaagctaatgagagcaaaaacctacctaccgattactggtcactttcattacccaaagagaccatgaattatgtgcctaaaattctcgccttaagtaaagttatccgtgacaatgaagccgatatcactttcccgaaaagtaactatcgcgataaatcattagccgcaattgatattggcgaacagataacattaagcaaagtcgctgaacttagccaattacctattacaaccgtaaaagactataaccctggctataagcgcgggatcaccgcaccaaatggccctcatgttattttgcttcctcgtaataaacttacgcagttccaaaatgcgtttgctgacgaagcgattttaaagaccatccgtttagcggtcgctaaagccaatcagtcgattaaacaagaaggcatttataaagtccgctccggtgattctttttatgccattgctcgacgttataatatgagcgtaaaagagctacaacgactcaatggattaagtgcaaagagtaccctattagttgggcaaacattaaaaattcataatgcaggtagtgtgaacaatcgtccgacaggcaaaccaaccggcgcttcaccaagttactataaagttcgtcaaggtgactcttattacagtattgctcgtcgtcacaatattaatcttaagcaattaatgagctggaatgctgatatcaagatgttaaaaccgggaacgcaattaacgctttacttaaaaaaatag

SEQ ID NO: 302458 - DNA, 1638 bp, Proteus mirabilis
atgattacagttttagattatttattagtaagattaaaagagttagaaattaaaactatttttggtgttcccggcgattataatttaccttttattggtgttgttgataatgataaagatattcaatgggtaggtgcatgtaatgaattaaatgcatcatatgcttgtgaaggatacgcacggatcaaaggtttttctgctctgtgtacaacctatggagtgggggagttaagtgcgataaatggtgttgctggcgcatttgcagagcaggttcccattattcatattgttggcgcgccttctcagtcaaagcaagagaaaggaaaaacattacatcattgtttagcgacgggtaggtttgatgcctttgaaaaaatgtatcgccatatttcaaaaacaacggctgtattaacatatcacaatgcgacggaagaaattgatagagtattagaaacattgtggcgttatcgatatccggtttatttattaataccagaggatgtcggtgtgatgaaagttaataaaccaaagttaccattacaattaacattacctcaaagtaatcccgacgatttaaataaagttattactcttcttgaaaataaaattaagcaatcaaaatcaccatgtattattattggcgaacaagtatcacgttaccaattaagaaaacaagttgagaatttattagaaaaaactaatctgccgttttttactgtatggggaagtaaaggggttgttgatgaagggcgtcaacagtatggtggaatattatttggtgaattatctaatccacaaggtttagattatattataaattctgatttaattattagtcttggggtgagttgggatgaagttaatacagcgggatttaccttcgacgttcccacacaaaattgctatcaattttatgatacttatagcttaatagaggaagagaagatttatggcgtttctttactcgatatgcctaacgccttattagcccttgactatatttatccccacaacatagcgttactaccgcaaaaaatagtaccgcctgattggcaaggactgataaaaatagattctattcctcttctgttagataaagtccttgatgataattcggttattcttgctgaagcaggtaatgcttttttatgtgctgttaatcatatattttctggtaacagtcaattagtggtcagtaatatttgggcatccattggttatactttacccgccgcattaggtgttactcttgcattagaaaaccaaggacgtgcctttgttgttattggtgatggtgcatttcagatgactgcacaagagctttctactttattacgcttaaaactcaatcccgttatttttattgttaataatcaaggttacgcatttgaaaagatcttttacgggcctaaagatacctttaatgatatccaaaactggaattactcacagttacctgagctatttaattgtgatgcttatagtgtgaaagtggatagtctagaagcgttagaaaccgtattacctttattaaaagtgcatcaagataaactgtgccttgttgaacttgatatggataaacatgactattcggagccaatcagtgaatttattgcgttgcttaatcagtataaatga

SEQ ID NO: 302459 - DNA, 1338 bp, Proteus mirabilis
atggcacatcgattaacttccagagacattctggcattaggttttatgacttttgctctatttgttggagcagggaatattatttttcccccgatggtggggttgcaatcaggggagtttgtttggactgcggccattggttttttgctaaccggagttggcttacctgtgctaacagtggtggcattagcgaaagtgggagggggaattgaagcattaagcacccccattggtaaatctatgggacttttattagcaatagtcgcttatcttgctgtcggccctttatttgccacccctcgaaccgcaacggtctcttttaaagttggcattgcccctttagtgggtgatagtgatattgccttacttatttatagtgttatttactttttaattgttatcggtatttcactgtatccgggaaaattacttgatagtgttggtcacattctggcaccgattaaaattttagccttagctgtattaggtttagctgcgctattttggccagcaggaacgccgatccccgctacacaagcgtatcaagatatggcatttacccaaggttttattaatggctatcttaccatggatacgttaggcgcgatggtctttggtattgttattgtcaatgcggcccgctcaagagggattgataattcgtctttattaacacgttatactatgtgggcgggaattatcgcgggtgtgttattaacggcgatttatcttagtttatttaagcttggttctgctagcggcagcattattccagaagcaaaagatggcgcagatattttacatgcttatgtgcaacatactttcggtaattttggtagtttctttttagctctgcttattttcttagcttgtatggtgaccgcggtaggtttaacttgtgcttgtgcggagttttttagccgctatttgcctatttcttatcgtacattagtattgattttggctgtattttccgcggtagtctctaatcttggtttaagtaaactgattgcgttctccattcctgttctggtgatgatttatcctccttgtattgtgattattctgatgagtttcactttacgtttttggcataatccaagccgtattattgcccctgcaatggcaataagcttattttttggcatttttgatgccattaaagcatccgatcatttaaaacatttattaccggattgggcggctaaattaccattaagtgagcaaggattagcgtggttaattcctgtattagtgactattgttatatgcgctatttacgataaagtagctggctcacaacataaaaaagtgatccactctgggataaacaaataa

SEQ ID NO: 302460 - DNA, 2004 bp, Proteus mirabilis
gtggccaactatgatttgggcgtctttcaaagtcgtgttaaaaacgcccaagattcatccagtagctactttaatttagacacattattagctaaagctgaacaccattttaatattaatgcatctgcctacagtataggtaaatccaattccaatattgaactctatagagcaatgtatgaacgtgattttaatggattgcgttttgctatcgggttaatgagcacttggaatttacagtccttagccagcttaacagtattgagcagcagtaaaatttatgcagcatcaatcgggaataattcatcaagtagggtggtgaataaacagcaatcattaactccgatttatgcttttttaaatagtccaggtgaagttcgtatttatcgccaaggtaaattattaaatattcaaaatttcccgatgggtaattttgaagttgataccagcatgttgccttatggtatttatgaagtaacgattgaaaccgttattgatggcaaggtagtgacaacacaacatcaaaccattaataagtcttttggtaccgctaacggtaattttgaccaattaaattgggaaatttatggtggctatattgattttgataaacgtcattatatcaaagaggggggcgcttataaccaaactcccgaaaaaagttatttaatcggtagctcttttgcttataactttcctctgttatccggtattcgttttcaaatgtctaactatggatttgataaatttattgtacaggagacgaatatcagtgtagcggtaaataactatctttctattgcttggcaaggaatgttagagaatcatggtagtcaccgtaatattagtacgctttctattaatatcccagaaggctatggttcattatgggcatctaaagagaaaactatcgtaagaggtgatttaccgctatatgaggctgacagttactcttatggaggaactattaatttcgataagataatggatagaacgggttcatttactatcagcaataccaaagataagcgagttggtagtgattctattaattatgaatatgcaaatacattattttcgggacgttatggcacggtaggattaagagctggggttcagcgttatcattatgataatcaaaatagcactaatgaaaaatttattaatcttgatttctctttacctctttcaacgtggttaagtactgggatctcttcaaccaatggcaatgtaaaagccaatatttatgtgaataagaattttgaaaactccgtgatcactaatgcgggggtttctgtttctaagttagtgcatgataaagataatggtgaatctgacttctcaactctaggttacgcttcttatgatacgaagtataactctggtacggtgaccattaatcgccctgataataaacgactcaatggtaatttaacttctcgtggctctatagcttatagtgaagggatgatcacacccagtggtcaacaaggtaaatctggcattattatcaattcagacattaaaggtagtggcagtatgctcgctaaagttaacgggcaaaattacccgattagtggaaaaaatacctttattccattatctccttattcagattatgacatccaattaatgaatgatggcaaatcgaaagacagctttgacattatttctggccgaaataaatccgtcacattgtatccaggaaatattgccttttatcaaccggaagtgaggcaattagtcacggttttcggacgtctgaaatcccctaatggtgaacttttaaaatatgcttcaattcgaaatcatattggtcgaactaaaacagatcaaaatggtgagttttcaatggatgtagatgtccgttatccggtgatctcgttactacaagaagatcagcaaacaatctgtgaagcagacttagatcttaaaggggcacaaggagcaatgtgggttggagaggtaacttgtcaacctcagtctagtttcgtaaaaagataa

SEQ ID NO: 302461 - DNA, 582 bp, Proteus mirabilis
atgataataaaaacatcacggataattaattcacttgaaaaatatgaatatattaataatgttatgcatacacaatcgaaaattatgagacagactatgagttttaataaatttcccaaacatctcctaggaaatgtttggcatgcaaccacagctacccgatttaagttaattaaaaaaaatggttttattaaaataaatcctaatattcctgaccaagatagaacaggctgtggtaataaagaaaaatatccattggtaagaacactaaagggaataagtatttttgactttcgaattgtagatgaaaaatatctgaatgatcattatagccattggaattgggtactagtttcaggtgttgaatatgaagatatcatatggatatctataaacctcgataaattaaaagactgttttctatctggggaggaagtttcagcgatagccaataatagtaaggagtacagaaaatatataccaaagattgaaggtgctatcctatgtgacattccattaagttcatttgaagatgtatgggggttttcacataaaaacgagtatagctggtcgaaactataa

SEQ ID NO: 302462 - DNA, 1047 bp, Proteus mirabilis
atggttgagttttctatctactcaacaattatctcattaattattttattaattgttttgtactttgtgcttcattggatcaataaaacctttgtttctaatcttaatacattgtctgagatattaaataaagtaggtaatgctgacttggttttttctgtaccacaagtaaaaaatgatgagtttggtaaacttttttctcgtgtcagtgatatgcaaaaagcattaacctcgacaatcttttctgtcaaaaaagaggctatggatataaaagggggcgcatttaaaattgcttctggtaatcaagagctttcatctcgtacagaagaacaatccagtgcgttacaacaaaccgctgccagtatggagcagatcaaaatagccgttgctaacaataccgataatacaattgaagcaaataatattattaatcaatctactgacattgttatggatggcgctaatgtcatgaaagaagctgtattatcgatgaagaaaatagaacaaggtgcagtgaaagttggggaaattaatgatgttattaataaattagccaatcaaactaatattttggccttaaatgctgccgtagaagcagcaagagcaggcgaacaagggcgtgggttcaccgttgtggccgctgaggtacggaacttagccgcaaaaagtgctgaagcagcaaaagagattagccaagttcttaaagcatctatcaatgatgttacctatggtacaaatttagtgaataaaagcggtgagtgcatgcaagagattgtctcttccatttcaaaagtaaacaagatcatgcaagggattagtttagcgtcggaagagcaacgtcttggtgtcgaacaaattgcagtagcaattaatcaaatggatacggtagtacaacaaaatgcctctttggtcgatctcgccgcctcttctaccatgatgttaaacgataaagcacaagtgctgatggataatgccgcagtctttaatattgacgatctcgaaaaagagccagagcagaaacaagagttaatcaatgaacaagaataa

SEQ ID NO: 302463 - DNA, 924 bp, Proteus mirabilis
atgcaacatgttacattgactcgacgccaatcgatatattcttattcaggggcatttatttttattctggcaatgatagctatcgcgagtttaggcaatgatcgcgaaattgtattgcctgaaatagcggcaatggctattgcattatgggtctaccgtgaacaagactggatgttgcaccctgaaaaggtatttttatggccaaccgttaccgcactgctaggttttggtattaatttattaactttaccctttattgctaaacttgttttagtacttatgggtatgctgctattttttagtatattcaaatatagcttggcacccgcattagcaactggctttttacctatcgtaacaaatgcgacagagttttcttttattttttcgattgttatcacaacgtttattttaatggctgttgtgatatttgctaaattaaaaactaattctaatcgtgaagcgcaaattaaacctaatttaatggcaatatatgcagtaattattggcttaagtattattgttgcttctttagctaattatccacatttggcagttttgccccccgttgctgttgttatttatgaatcactgcatatgaaaatgtattcttggcgtatggttatcaaacaatcaatagtgctcacattatctgcaactattggcgttaccttatacctgataataaatcattgggttgttgtcgcattactgagtatgccattaatgtggggactattgtctatatttaagatgagagtgcctgctgtttatgctttcccactattagcatacgtttttcctagagatgcattgcctttactgccgattgcttcattgttcgtttcgtttggctctttaggaatggtatttctttatcgggcggtaacgggcaccttgatgccaatggagcataaaatttaa

SEQ ID NO: 302464 - DNA, 219 bp, Proteus mirabilis
ttggcagaaaaaggaagttatcagccacgctctttatctgttgcatttctaaaaccaattgatgatgaagatatggaaaatgcggctattaatgcattaaagtttagaatggagaattttgacaaagtttatggtacttgtgcagagtctcgctatcaacttaatgcagtacaaggggaaggttccctttctggattattacaatttgttgcagagtaa

SEQ ID NO: 302465 - DNA, 327 bp, Proteus mirabilis
atgaaaaaatatctgaccattttatgcagtcttctcgtttccagttcgatatcatttgcttgggcgtcaacagcacagcaaaccacaggacagatttatgtacgaggagcaattgttgatccagcttgtgaaattaatttcacactcgatcaagctgagtaccaatgttacaaaaataacaaagtctttacatcaacccagtctattttccctacctcttttgaacaatcatcatcaattatactgcctcaaaatatggggaaagctgaaatccgttggatggatggcgctgaaaaaaatggattgattaatgtgcaatatttttaa

SEQ ID NO: 302466 - DNA, 1242 bp, Proteus mirabilis
atgtcagaagtcacatccattgctaaacgcccatctatactcggtggtgcgatgattattgccggtacggcggtaggcgccggtatgttctccatccctattgtgacttccggtgtgtggtttaccggctctatctttttactcatttatacttggttttgcctatttatgtctggcttaatgatcttagaagttaatcttcactaccccctaggatcaagctttcatactattaccaaagatttattaggtaaaggatggagtaccattaatggtctttctattgcttttgttctctatattttaacttatgcctatatttctgcaggtagctccatcattgtgcaaaattttgctaatgtggttagcttgccacaagccgttgcaggcttagtatttgcccttgttgttgctttcttcgtttggttatcaacccgagccgttgatcgcttaagtaccatattaattggcggtatgattgtggcttttgtatttgctatcggtggattatttaccgaagtgaaaatgccagtattatttaatacaacagaaagccatgccagttatttaccttatgcactagccgcattaccttatttattaacctcctttggttatcacggcaatattcctggattagtcacctactaccgtaaagacggtaaagccgtgatgaaaagtctattaattggtaccttgatttcgctggctatctacattttatggcagtttgttgtacaaggtaatattcctcgtgaaggctttaaacaagtcattgctgaaggcggaaatattggtaacttactggcacaaatgcgtatcaatacagcaaatacttccgtttcattcttattagacttgttctcatatatggcattagcgagttcatttttaggcgtgtctttagggttatttgattatttagctgatttctttaaattctcaaatacagggacaggacgtttaaaatcggccatcgtaacttttgtaccacctactattttagcgattatttttcctgatggcttcttgtatgctattggctttgcaggacttgcagccacaatttgggcggcgataattccagcattaatggcaaaagccagtcgtcaacgtcatcagcaacaaagctttaaagcacctggtggcacctttatgattatctttgtgatcttatttggtgcaattaatgcgattgcacacatattagcaaactttaatctcctacctatttaccgctga

SEQ ID NO: 302467 - DNA, 2283 bp, Proteus mirabilis
atggaagacaaactacaacaaagtgcattggattttcatgaattccctaatcctggcaaaatcacagtgacaccaactaaaccactaataacacaacgtgacttagcattagcttattcaccgggtgttgcggctccttgccttgaaattgcggctaatcctttagctgcgtatcgctttacagcgaaaggtaacttggttgccgttatctctaatggtacggctgttttaggactcggtaatattggcgccttagcaggtaaacctgtgatggaaggtaaaggcgtattatttaaaaaattctccggcattgatgtatttgatattgaagtgaatgaaaccgatcctgataaattggttgatattatcgcttcattagaaccgacttttggtgggatcaatttagaagatattaaagcaccggaatgcttctatattgaacaaaaactgcgtgagagaatgaatatccctgtctttcatgatgatcagcatggtacggcaattatttctacggccgctattatcaacgggttacgtattgttcgtaaaaatattgataaagttcgcttagtggtttcaggtgccggtgctgcttctatcgcgtgtatgaaccttcttgtcgctttagggttaaagcgtgaaaatattgttgtttgtgactcaaaaggggttatttatcaaggccgtgaagccaatatggcagaaactaaagcggcttatgcgattaaagataacggcagccgcacacttgatgatgtgatcaacgatgccgatattttcttagggtgctcagggccgggggtactgacccaaaagatggtgaaaaaaatggcacgcgacccgctgatccttgcgctagcaaatccggagccagaaattttaccaccgttagtcaaagcggtacgatcagatgcgattatttgtaccggacgctctgattttcctaatcaggtcaataatgttctctgtttcccgttcattttccgtggtgcgctggatgtgggggcaaccgctatcaatgaagagatgaaacttgcctgtgtacatgcaattgctgaattggcactggcagaacaaaatgaagaggttgctagcgcatatggcgatcaagaactgtcatttggcccagaatacattattccaaaaccttttgatccacgtttaattgttaaaattgcgcctgccgttgcaaaagctgcaatggattcaggtgtggcaacccgtccaattgaagatttcgccgcttatatcgaacacctcaatgaattcgtttataaaacgaatttatttatgaaacctatctttgctcaagcgaaaaaagagaaaaaacgcattgtattggcggaaggggaagataaccgcgttctgcatgcgactcaagaattagtcactttaggacttgctgagccgatcctaattggtcgtcctagtgtgattgaaatgcgtattcagaaattaggcttacatattcaagcgggtagagattttgaagttgtaaacaatgaaaacgatccgcgttttaaagaatattggcaagaatattatcaaataatgaaacgtcgtggtgtttcgcaagaacaagctcgtcgagccgttattggtaatccaacactgattggcgcaattatggtacgtagaggggaagcagacggcttgatctgtggaaccgtgggaagttattcggaacattttgaaatatataaaaatgtttttggtttacgtgaaggatctaatactgcaggggcgatgaatgcactattactgccgagtggtaacacctttattactgatacctatgtaaatgaagatcctaccgctgagcaacttgctgacatcactataatggcggcagatactattcgtcgctttggtattgagccaaaagcagcattagtatcccgctcaagttttggctcttttgacagcccatcatccataaaattaagaaaagcgttagagcttattaaacaacgcgcaccagaattagaaattgatggtgaaatgcatgctgatgctgctttagttgagtcaattcgtcgcgatattatgccagacagcccactaaaaggttcagctaatctgttagtgatgccaacaatggaagcggcgcgcattagctataacttattacgtgtcactagttccgatggggtaacggtaggtccagtgttaatgggagttgctaagcctgcccatattttaacgccaattgcatctgttcgtcgcattgttaatatggtggcattagctgtggttgaagcacaaacacaatctcaacgctaa

SEQ ID NO: 302468 - DNA, 573 bp, Proteus mirabilis; identical to SEQ ID NO: 294792

SEQ ID NO: 302469 - DNA, 378 bp, Proteus mirabilis
atgacggatcacgatctacaattattgacagtgctcattgttgatgatcaccctatcaatcgtttattgttgaccgatcaactgaaaaaaattggttttaataccgcaacggcagaagatggctgtgatgctttagcctttatgcaagaaaatcatgtcgatattattttaaccgatgtcaatatgccaaatatgaatggttatcaattagcgacaacagtgcgtgaattgagtcgcactattcctattattggtgttacagcaaatgcgattgccgaagaaaaacaacgttgtattgatgcgggaatgaatgattgtgtttccaagccagtctctcttactgtattaaaagacgtattactcacctatgtggcataa

SEQ ID NO: 302470 - DNA, 657 bp, Proteus mirabilis
atgaataaccttaatattattattgccgatgatcatccaattgttttattcggcattcgtaaatctttagaacaaattgaatgggttaatgttgttggtgaatttgaagattccacttcacttatcaataatttatctaaattaaatgcagaggctcttatcaccgacctatctatgcctggtgataaatatggtgatggtattacgttgataaagtacatcaaaagacattatcctaatttgtctattattgtactcactatgaacaataacccagctatcttaagtgctgttcttgaccttgaaatcgaaggtattgtattaaaacaaggtgcgcctgctgatctacctaaagcacttgcagcattgcaaaaaggcaagaaatttatgcctgaaagcgtggctaaactgttagaaaaagtgaatgccaatggttatggtgataaacgcttatctcccaaagaaagtgaagtgttgcgcttatttgccgaaggtttccttgtcactgagattgctaaaaaactcaatcgtagtatcaagactatcagtagtcagaaaaaatcagccatgatgaagctcggtgtcgacaatgatatcgctctgcttaactacctatcatcagtcactattgataaggaaattaacggagaaagctaa

SEQ ID NO: 302471 - DNA, 750 bp, Proteus mirabilis
atgaaatctttattaaaaacgacgttgttggcaacaagtttagcatttgcatttagtgcacctcatgcactggcagaagagacagctaaagtaccaacattaaatagcgcgtttaaaactcaggatgagcagaatgcatatgctttaggcgcgtcaatgggtcgctatatggaagctgcattaacagaacaaaaaaatatcggtattaatttagattcaaaacaattattagccggtgttcaagatgcctttaataataaatctaaattatcagatgcagaaattgaattaacgctggcagcttttgaagatcaagtacgtacggttgcaacggcgaaaatggaaaaagaagctgcagagaataaagccgctggtgataaattccgtacagaatttgcggctgaaaaaggtgttgttaaaactaaatcaggcctactgtatttagttgaaaatccaggtaaaggtaaaacaccaacagatgccgatcgcgttactgtgaactataaaggtatgctgattgacggtaaacaatttgatagttcttatgatcgtaaagagcctttaactattagcctgaaaagtgttatcccaggttggactgaaggtatgaaatacattaaagaaggcggaaaaattaagttagttattccacctgaattaggttacggtcaacgtgcaacgagtggcattccagctaactcaacattagtctttgaagttgaattgctgagtgttgaaagcgacaaataa

SEQ ID NO: 302472 - DNA, 411 bp, Proteus mirabilis; identical to SEQ ID NO: 298166

SEQ ID NO: 302473 - DNA, 678 bp, Proteus mirabilis
gtgatctctggtgcataccctaccaatttaggaggtaacattctgtcatcactttctaatgaaatacctgctgacttacttgattctattggtttaaaagagtctgtaaaaccaaaagtgactgtataccctaatagtcaatgccttgatctttctgttttgaaaggaatgcaaacagttattgatctcccaacactatcactcaaaataacgatcccccaattatggatggaatatagagatccttattggactcctcctgcattatgggaagaaggaattaatggtgctttccttgattacagcgctaatgtttcaatcaccgaagaaaaagagggggataaacgtacttatttgtccactaatggtactgcgggtattaatttaggtgtttggcgctttcgtggtgattatagtgccatctatcaaaaaaagcggggtggcagacaatcacaagaaatacacgattttgattttagccgtctttatggttttacctccttgaaaaaattggcttcaattttaactattggagaaaattatttttactcagatgtttttgaatcaagtaagtcagcaggtatacagatagcttgtgtttgcgttttttgctctagaaccgtgatatcgcgaggtgcacctaaacgttgtccattaacaaaaactgttaatacataa

SEQ ID NO: 302474 - DNA, 1191 bp, Proteus mirabilis
atgttagatgcacaaactatcgcgacaattaaatccactattcctcttattgctaaaacaggccccgcgttaacggcgcatttttacgacagaatgttctctcgccatcctgagttaaaagatatttttaccatgagccaccaaagcagtggcgcacaacgtgaagcgttatttaatgcgatatgtgcttatgcaacgcaccttgaggatttacctgctattttgccggcggtagaaaaaattgcacaaaaacatgccagtttgaatattcttcctgaacattatcctattgttggagaaaacttattagccaccattgatgaaatgtttaacccaggcaaagaagtgcttgatgcttggggagccgcttaccaagttttggctgatgtttttattaatcgggaagagcaaatttatcaacaaaaagaacaagcatctggaagctggcgaggattacgtcactttaaagttaagcataaagtaaaacaaagtgaggttattaccagctttgaattagagcctgaagatggacaagcggttacaccttaccgtgcaggccaatatttaagtatttatattcgtgatgagaaacttgcaaatcaagaaattcgtcaatattccttaacgcaatcggcaaacaataaaacctatcgtattgcggtgaaacgtgaagacaagggaattttatctaattttcttcatgaccatatccaagaaggagacatcttacaagttgccgcaccagggggcgatttttatttagatatctcatcaacaacgcctgtcacattaatttcagcaggtgtaggcttaactcctatgttagcgatgttgcacactctctcttctcaccaagcacaagtcaattggttacatgcagcagagcatggtggcgtgcatgcttttagggaagaaatcgcacaagcaggaaagcaaattaaacaatatcaacaagcagtatggtatcgtctccctcgtactgaagacattatcaataaagactatcaatttgaaggattgatggatttaaccaagatacatgaatggctatcaatacctaatatgcagttctatttctgtggaccattaccttttatgcaatctgtcgctaaacaacttattgctctcggtattgaaagcgataaacttcattatgagtgctttggccctcatgctgttattagccaataa

SEQ ID NO: 302475 - DNA, 1104 bp, Proteus mirabilis
atgaataatactatccatacagcaacagagtttattgagcaattgttacgtcacagccttgctcaacgtgtttctgatcttcatttagagccacaacaaaatagcctgagaattcgcgcgagaattgataatcatctagtgttgttttctccccctgacaatcaattagctaacgagatcctgacacgtttaaaaatcctcgcgaatattaatattgccgaaaaacgcctaccacaagatggtcaatttaattggtcttaccagaaaaacaattattcaatacgtgttgcgacacttcctactttatatggagaaaaaatagttttacggctcatgaataatctgcaacagccacaattagcacagttaggttttcaaacaattcacctaacactattaaaaaaatatcttactcaacctcagggaatgattttagtcaccggccccacagggagtggtaaaactttaacactctatagttgtttacaatatttaaataaagataatcgtaatattaatagtattgaagatcctattgagttacctatccatggcattaatcaaacacaaataacagaaaaagctggtattacttttgcaacaatattacgggcactattacgccaagatcccgatgttattatgataggtgaaatacgtgatcaacaaacagcagaaatagcaataaaagcggcacaaacaggccacctagttttatcaacactgcatactaactctacccaagcaacactcgcccgtttggctaatttaggcatcgcaaaagatttaatcgactcttgtgtaaaattaattatttctcaacgtttagttcgttgcttatgtagcaactgtaaatacccatcaccggaacagaaaaatttcattattaataatcaacaaattatattacccaattggcaagcaacaggttgtcaattttgttattccggctacaaaggcagaacagctatttatgattgttttgaacttgccaagcaatcactcccctcaccttacgcactatttaactcaggtattgaactgataaaaaaggggatcacgtctttagatgaagtttatcaagtagtcggagatattgaatga

SEQ ID NO: 302476 - DNA, 1668 bp, Proteus mirabilis
atggtgggtctatgccttgccgtagttgaaggtctttttgctactattccatatattctactctattttttattaattgatctttttgccaataaaatcacactagctcagttattttattactttttatcaatactcttatctattgttctgcgtattgtcattggtacttatagtatgccaatgatttttattggtgcttataaaatgatgggacaagcccgtctaagaatagccgatcatttacgaaaaatcccgattggctggttttcttctcaacgcagtggtgatcttgcatcacggcttactgctgatttagagatcattgaaaatatctggtcacatttcttaggaatgtttatcagtactttagcgatgcctgtttttctctcactattcttagtatgggtagattggcaactcactttaattatattattttctattccaatcgctctgttcgcattatccataagccataaaataatgttaaaagctgcacaacaggcagctgatgctaatgccaatgtacaatccgaattactcgattatatccaaggaattatggttattcgtagttttgggcgacttggtcctgcatggaaaaaactaaaagcagccttagaaacacaaaataaaacccaaatagttctagattccaagcctgccccttggattgcactttatggttttattcttgaatcaggttttattttattaatgataataggaacaagccgtttaattagtggctcactttctccttctcaattcgtttttttccttgtattagcactccccatttatcgacaattctttgatttaggattatccagtatgttgttaaattatgcacaaaaatcattacaacgcatagaagaagtaatgaaagtggttccactttctgagcctaaatatactcaattaccaataagaacagatatctattttaacaatgtaagctttatttatccttataatagtcaattaacattagataatatatcttgctgttttcctgaaaaaagctttactgctattgttggccctagtggctcagggaaaagcactttactacagcttatttctcgtctatgggatgttaaccaaggtgaaatattgctagatgatattaatattaaccaaataaattccgataaactctgttcatatgtatcttctgtttatcaagatgtcgttttattttcaggaacaattaaagataatattttaatgggaaaaacagatgctcacgatgatgaaataataactgcagctaaattagctaatgcacatgagtttattatacaaaaaccacaaaattatgatactcctattggttacggtggtatgttactctcaggtggagaacgtcaacgtctttctcttgctagaactttattaaaaaatgcaccaattttactgatcgacgaagcaacatcgagtatcgattgttcatcagaagtattaattcaacaagctttatcattgttatcaaaagataagacaatcattatgattgcccatcgattaaatagcattaaaaatgccgataacattatcgtaatggaaaatggaaaaatagcagaacaaggaaaacatgctgagttacttgcaaaaaatggcttatatgcacatttatggttacaacagaaagcgttatgctaa

SEQ ID NO: 302477 - DNA, 816 bp, Proteus mirabilis
atggaaatgattttactgtttctgattgtgggatgtataactggattttttgccggattgttaggaattggtggtggagccattattgttcctattgtgatgtatgttgttagccaacaagctatccctgcagatatggtaatgaaaatcgccctctcaacctctttttctgtcattatattttctaccgcctcttctgcttattcgcataataaacataaagcgattttatggtcacaatttccgctcctcgctgtaggcactcttctcggtatgctagttgggacattcctagtacaaaaactctcaaataccctattgcaaattatcttttgtatttttatggcctataccatatatggattactgaccaagaaaaaagaagctgaacgtgttgagaatgcccaagatccggttgtttcaaaaccagcactgacaaccggtggtagcttagtgggttttatttcaagttttattggtatagctggtggcaccataacaataccgctattaagccactgggggtttaatacccgtaaatgtattgcaacatcatcaatgctgggtgtgattatcgccactattgggactgttatggggatcgtttatggttggcaacaaactgaattagcagactattatttaggttttgtctatctacctgcttttattggtattagtattaccagtatacttacagcccctatcggcgtaaaagttgcctataaactacctattgccagagtacgccaaatatttgccctattcttattaatcgtcatggctaaaatgttatataccctgatattgggatag

SEQ ID NO: 302478 - DNA, 579 bp, Proteus mirabilis
atgtctttcgaattaccaaaattaccttatgcgttagatgctcttgagccacatatctctaaagaaacattagaataccactacggcaaacaccaccaaacttacgtaaccaacttaaataacttggttaaaggtactgatttagaaaataaatctttagaagagctcatcaaaactactgaaggtggtattttcaataatgccgctcaagtttggaaccatacattctactggaattgcttagcaccaaacgcaggcggtgcaccaacaggtaaaattgcagaagcaatcaataaagcgtttggctcttttgaagagttcaaaaaacaatttaatgatgcagctgcaaaaaactttggttcaggttggacttggttagtgaaaaaagcagatggctcattagccattgttaatacatctaacgctgcaacacctgtttctggcgaagataaaccactgttaactgttgacgtctgggagcacgcttactacatcgactatcgtaatgcacgtgtgaaatacttagaagagttctgggcactggttaactggtcatttgttgaagcaaatcttgcttaa

SEQ ID NO: 302479 - DNA, 1611 bp, Proteus mirabilis
ttgtttttcctatttatcttattaacttattttattcctttagaaacgcgcctgttatggcaaccagatgaaattcgttatgctgaaattagccgtgaaatgttagtttctggcaattggtcagtgccttatcttcttgatattcggtattttgaaaaacctgttttaggatattggatcaattgtattgctcagtggctatttggtgaaagccattttgcggtgcgtattgttgtagtaacatcaaccttattaacaggatggcttatttataaagcggcaatggtagtttggcgcaatagcgctcttgcttttaatgctatgaccgtttttttatcttcttttctggtattagcaataggtacttataatatattagatcctattgtgacgctgtttgtgaccgctgcaatgtactcatttttagttgcgttatcgaccccgaataaaaagggcaaaataattgcttatatgggtattggctttttttgcgcacttggttttttaacaaaaggctttattgcggttgttttacctgcattagtttttttagtcatggcaattagtcaagctcgctttaaagaagtggtttgctattcctctattgcattgttagctctcgctattacagctggaccttgggtgattactgttgcattacaagcaccggattattggaattattttttctgggttgaacatgtacagcgttttattgctaaagagtctgctcgctcacaaccaacgtggttctatatcccgatagttatattgggtgtattgccttggctaggttttttatttggtgcattaaaatcagctttctctttaaaaaaaggtacactctattttctgctgtggtttgctctcttttttgcttttttctcagcctcaaaaggaaaactattaacctatatgctaccgtgctttgtgccattatctattttaattgcacactatatcgaagagttaaaagatagacctgatgagaaaattagcaaagtgaatgcatctattaatattgcttttgggctaatgggtatatcagccgttatctattctttatacagtgccaaatttgcgctttatgatacgaatgaaacgttaaaaatagtgttagcaataagtgggtttttattttggagtgtgattggtgcgggggcgctgtttagacaaacacagtttttaacgatgttttgctctatcggactaagtttagttattggctatgcaatcccagaaaagatagaaagtaggagtacaccagaaaatattatccaacgttattatgagcctttgagtaataaatcgtatcttttaacggacgaagttggtattggtacatcacttgcttggggactaaaacgtactgatattcgtttaacagagacgaaaggtgagttggcttatggtttaaattacccagatgtaaaaaataaatactatagccttgaacagctattagcattaattgaagcaaaccaatataaaggggtagcgattgttttagtcagacctgatagaaagcagattttgactaaattgactacattaaaggaaaagccgatagtagaaaaagagggcgatttaacgctggtgttctttaattag

SEQ ID NO: 302480 - DNA, 783 bp, Proteus mirabilis
atgggtgaacattgtacaaaatgggcaataggtgatcgtgtttgtgctttagttgctggtggcggttatgctgaatattgtttagtccatgaagatatcgctttaccgtcgcaaggattaaccgatattgaagcggcagcattacctgaaaatttatttactgtttgggcaaatctatttcaactcggtcagttaaaagccggggaatcggttttgatccatgggggcacttctgggattggctctatggcgattatgttagcacacaatcttggttgtgaaatttacacaacggtaggttcaaaagaaaaagccgaagttgcccaaaaattaggggctaatcatgttattaattaccgtgagaaagattttgctacagaaattcctgtattaactcaaggtaaaggcgttgatgtcatacttgatattatcggcggcgattatgtggaaaaaaattatcaagttgcggcgaaatttggcagagtgatccaagttggcatgatgaaaggggcccctaaaaacttaaatatgatgccactgatgcttaagcgattaattcatacaggttctaccatgcgttctagaacgccagaagaaaaaacgcatatagcacaagaattaaaacaacaagtatggccgttgattatcaaaggtcaaattaagcctattattaatgcggtcttttctttacaagaagttgccaaagcacatcaattaatggagtctggtgacttaattggtaaagtagtgcttgagattgatatgaataaatcactggtgtag

SEQ ID NO: 302481 - DNA, 1701 bp, Proteus mirabilis
atgaaaacgcataaagttaaccgggttcgcccctttagtgcatttattgatgcatgtgtaaaagagccttactcttttgcccgtttattaaaagatattattgcagggatcaccgtcggcattatcgcaataccactggcaatggcattggctattggtagcggtgttcccccgcaatacggtctttataccgcagctattgccggtattattatcgctgtaacaggtggctctcgctacagtgtttcagggcctactgccgcctttgtggtgatactttatcctgtttcacaacaatttggtttaagtgggctattaattgccactttgatgtctgggattattttagtggttatggggttagctcgttttggtaagctcattgaatatattcccgtttctgtcacattaggatttacttcggggattgccatcactatcgccaccatgcagatcaaagatttctttggtttagaaatgtcgcatgtcccagaaacctatattgataaagtaattgctctaggtgccgctctaccgacaatccatcttggagatacattaataggcgtaaccactctcttagtattaatttattggcctaaattgaatttacgccttcccggccatttaccagcattaattgccggtacggctgttatggggatagttaatttatttggccatgatgttgccaccattggttcacaatttagctatctattgcctgatggttcaacaggacaaggtattccgccgatcctgccacaatttgtgctaccgtggaatttacccagtagtggtgagtctattgcattaaattggagcacggtcagtgcgttattacccgccgctttttcaatggcaatgttaggtgcgattgaatcactcctctgtgctgtggtgcttgatggtatgacggggaaaaaacatcactctaatggtgagttagtcggtcaaggtattggtaatattgtagcgcctttctttggtgggatcaccgcaactgcggctattgcccgctcagcggcaaacgtacgtgccggtgcaacgtcccctgtatctgcgattgtgcactctttattagttttagtaactttactggttttagcgccttttctctcttatttaccattagcagcaatgtctgcattgttattaattgttgcatggaatatgagtgaagctcgtaaagttatcgatcttattcgtcatgcaccaaaagacgatattatcgttttagtattatgtttatcgcttaccgtgctgtttgatatggttattgcgatcactatcggcattgtattagcctctttattatttatgcgtcgtattgctaatatgacgaaaataacagaatcaacttatactgatgatgataaacaattattagttgtgcgtgttaatggtccgctattctttgctgccgccgagcgtatttttaatgaattacgtgaacgtagtaaaggatataaaactcttattatgcagtgggatgctgtacctgtattagatgctgggggattacatgctttccaacactttgtggcggatgtgcaacatgatactcatattattgtttgtgatattcccttccagccattaaagacattagcaagagcacgagtaacgccaattgatggcacacttaatttttatccttcgctacaaaaagcgctggatgatatggaattaattcagtag

SEQ ID NO: 302482 - DNA, 1227 bp, Proteus mirabilis
atgcgcaaaatattcgttatatcatgtgcacttgtcgttcaaggattgctcatatcacaggctaatgcggcagtggtgccatcaggaacgatactcgacaaaaaacaggaagtagtgcgacatttaaaagatgaacccgcatcacttgatcccattaatgccgtaggtttaacggaggctcaagttcaacgagacttatttgaaggattagtgatagaagatgagcgagggcgtcccattcctggagtggcacaatcatggcgaacagaagataaccgggtttggatttttacattacgtgataatgctaaatggtcaaatggcgaaaaggtgacggcttctgactttgtttatagttggcaaagattagttgatccaaaaaatctttctccttttgcttggtatgcagccctagcttctattgagaatgcccaaaaaattattgatggtaaattaaaaccaacctcgttaggtgtggaagccattgatgaaaaaacgttaaaagttaccttagaacgacctgttccttatttccctagtttagcaaccaatttttcactttatcctgtacctaaacacacaatcgaaaaatacggttcagaatggatcaaagtaggtaatttagtcggtaatggggcttttatactaaaagatcgcgttgtgaatgagaaaattgtgttaacgccaaacccttactattgggatcaccacaatacggtgttaaccaaagtcacttttgtgcctattaatcatgaatcacaagcgactaaacgttatttagctggggatattgatattacagagtcttttcctaaacacttatatcacaaattgatgaaagatattcctgatcaagtgtatatccctgagcagttaggtacttattattatgcatttaatacacaagcagggcctaccaaagatattcgggttcgcaaagcgttagctatggcaattgatagaaaaattattactgataaagtccttggtactggagaaaaatcagcgaatcgctttactcctgatgtgacggctaattttacgcctgagccaacgctatatgatgaatacagtcaggatgaattagatagccaagccaaaatattgttatcagcagccggctatggtcctcataatcctttaactctctctctctgctttataataattcagaaaatcatcaaaagatcgccattgctgttgcttctatgtggaagaaaaagttag

SEQ ID NO: 302483 - DNA, 1563 bp, Proteus mirabilis
atgacgatcgcctgtcaattttctcagcttaatattgaattcaatcaagaagcgcttttcccaccgctgactcattcactgacttgccaaagaaatgctttaattggtcagaacggtaaaggaaaatcggtgctgttaaaattgttagcacaaaaactattgccttcatcaggccatatcatgtggcgtatgccttttattcatgtcgaccagcttactcgcctaacaggtaataccattgctgatgctttaggtatagagactttttttcaagcatttaagcgggttgataacggcagtgcttcattagaagattttgagttacttgaagataagtggcatttgcccatgacttggcaaaatttacttcattcagcacaactgccggtttcacttgatacacctattccccacttaagtggtggtgagcaaacgcgtttagcattatgtcaggcttttttacatgacgatcattttctattattagatgaaccagataaccatctcgatcatcaaggtcagcaatggctcgttgaacaattaatgcatcataaatcaggtgtattatttattagccataatcgacatttattatcttatgctgaaaatatatttgaactgagtgaaaaaggcttacaagaatatggcggtaattattcgctttatgaaacacaaaaaaatgcgcaaatagcctcaatcgaagctgcaaatgagcgtatcaatagtcaaataaaacaggaaaaacgccaacaacatgtaacattacaaaaagcattacagcgacgtaaacaaggtgaaaagataagaaacagcggctctcaatcactgttacttcttgatatgcaaaccaatcgagctgagaaaaaacagtcatcaatagctaaacgacatcagcgcgttatggatgatatgcagtcacaaaaacaacagttagaacaagagttaactcatattcatcagcaaaaattaatattaaactatcaaggcgatggccatcggttaaatgtatttgccacagagcttgttttaccttttggcaagcaaactccctactccttttccgcttatggtggtgaacattggcatatacaaggtaaaaatggcagcggtaagtcaaccttattaaaatgtttaatgggcaagctatccccgttatccggcgaatatcgtctcaacccaaattattgctatcttgatcaacatttaactttattagataaatcattacccgttgctgaagcgttatatcaataccagccattaatgaccattgagcagtggcgcacaaaactgggtatgttacgtattcgaggtaacaagtctttatttcctttagaaacactcagtggcggtgagcaattaaaagcaacactattagcattaatttatagtcctcacccccctgccgttttattattagatgaaccagataattatttagatttagactctaaacaattattggaaaatttattatctcaatatcaaggaacattattattaatctctcacgatgaagattttgttaaacaatgtggtataacaaatacattattactctaa

SEQ ID NO: 302484 - DNA, 1407 bp, Proteus mirabilis
atgtcaaaacagcaaatcggcgtggttggtatggcagtgatgggacgtaaccttgcgctaaacattgaaagccgtggttacactgtatctatctacaaccgctcgagcgataaaaccaatgaagtgatcgctgaaaatccaggtaaaaaactggttccgaattactctattgaggaatttgttgattcattagaaaaaccgcgtcgtattttgttaatggttaaagcgggtgaagcaacagataaaaccatcgcagccctgacaccacatttagataagggcgatatccttattgatggcggaaatactttctttaaagatactattcgtcgtaatcgtgagctatcggctcaaggttttaactttattggtacgggtgtttctggtggtgaagaaggggcattaaaaggaccttctattatgcctggtggtcaaaaagaagcctatgagttagttgctcctattcttgagaaaattgccgcggtggcagatggcgagccttgtgtcacttatattggtgcagatggtgcaggccactatgtgaaaatggtacacaatggtatcgaatatggtgatatgcaactgatagcagaagcttattcagtattaaaacactcactaggtttaactaacgaagagttagctgacacttttaccgagtggaataaaggcgaattaagtagctaccttattgaaattactgctgatattttccgtaagaaagatgaagaaggtaactaccttgttgatgttattcttgatgaagcggcaaataaaggcaccggtaaatggactagccaaagctctttagacttaggtgttcctgttacgttgattacagaatctgtttttgcacgttatatttcttcactgaaagatcaacgtgtggcggcatctaaagtattatcaggcccagcaccaaaagcatttactggtgataaaaaagcctttatcgagaatgttcgtcgtgcactatatttaggtaaaattgtctcttatgcgcaaggcttccaacaattgaaagctgcatcagatgaatataactgggatctaaattacggtgaaattgcgaaaattttccgtgcaggttgtatcattcgtgctcaattcttacaaaaaatcactgatgcctataatgacgatgcgaatattgctaatttattattagcaccttactttaaaaatatcgctgatgagtatcaacaagcattgcgtgatgttgtttgttatggtgttcaagcaggtattcctacgccaacattctctgcggctatctcttattacgatagctaccgtgcgcaagtgttaccagcaaacttaattcaagcacaacgtgactattttggtgcgcatacttataaacgtactgataaagaaggcgtattccatactgagtggatggagtaa

SEQ ID NO: 302485 - DNA, 1257 bp, Proteus mirabilis
atggcttatttgtcattaaagttaacattaatctttcttgccaccatcccactctattttatcttagctaaattaattgcccctaaaatagaaaaaaccgtacaacaactttatcaatattcagcaacaaatagtgcttttttaacagaaaccctaggaggtatagaaacaataaaaagcctttcattagaaccacgttttacacaacagtggcatacgcaaatccatcaactgactaatgaaaatttaaaattacaaaatattgataacttatcgcaatacattgtttcatttttacaaaaaataacgacagcgatacttttatgtctaggtgcttttgaagtcatttcacttgcaatgacaataggtcaactcattgcttttaatatgctattaaaccactgtctacaacctttaagttctgcaatagaagtttggggaaagtatatccgagccaaaacggctatttataatttacaagacattcttaatctcccaatagagcaagaaaaagccaataagaaaatgaccttacaaggtgaagtgagttttgagaatgtcagttttagttatcaacatgatgccccccctgttgtaaggcaaatttcatttagaataaataaatatgaaactattggtatcgtcgggacgtctggatcagggaaaagtacattagcgcgcatcatcgcagggctttatatcccacaattaggtcaagttaagcttgatagcattccggtttgtgaaattccccccgcagtattacgtcaacaaataggttttgtcttacaagagaattttttatttcatttaaccgtgctcgacaatatccgtttaacgcagccatcagcctcattagatgatgttattcatgtagctaaattagcaggtgctcatgagtttattttgaaacttcctttagggtacgacacactcattgctgaaaatggcagatctttatctgggggacaatgccaacgtattgcaattgctagagccttactctcatcccctaaaattttaatttttgatgaagctaccagcgcattggatggtgagtctcaagccatcatcgaaaaaaatcttccccttattacccaagataagaccgtcattatgattgctcatcgcctttccacaataaaaaactgtgaccgcattattgtattagaaaaaggccagataattgaagaaggcaaacataatgaattgattagaaaagatggcgcttataagaaactttggcaacatcaataa

SEQ ID NO: 302486 - DNA, 543 bp, Proteus mirabilis
atggaaagaataggggaaattaaacgtccacttacccctgatttatttaccgcattaattaaaaatattattgaacagcaaatttctgttgcggctgccaccacggttcagcaacgcttacttaccctatgtgatggtatttatactcctgtacatattgctagtttatcagtgcaagatattcagcaatgtggaatgacaatgcgtaaagccggctatattaaaggtatcgctgactcagttataaatcatacgttagatttagaccaaatccccgctatgtctgataaagcggtgatcaataccctgataaaattaaaaggtattggtatttggacagctgaaatgttattaatttcatcacttaatcgtcctgatattttaagttggggggatttagctattcagcgtggtatcatgcgtttatatcgccatcaaagcttagatagaacacgctttgaacgctatcgtaaacgttattctccttatggttcaacggcttcactctatttatgggcattatctaaagaaagcgcagactaa

SEQ ID NO: 302487 - DNA, 864 bp, Proteus mirabilis
atggaaaagagacattatcaacttattgaacaagcctgccgttttattgaagaaaatcagggtgatgtttctcttgccgacatcgccgcacatattcaatccagcccatattatttccatcgacgatttaaatctataatgggaattacacctaaagagtatgcgaatgcttatcggcacaaactaattaagaaagcattagctggcgataaaacaattacagatgcgatatatcaatcaggctttaatgcgaatagccgattttatgaaaatgcgacggccatattaggtatgacgccaacccattggcgcaatggtggacaaaatatcgtgattttttttgctgtagggatctgctcattaggccatatccttgtagctcaaagtgaaaagggcatttgtgcgataacacttggcgatgatcctgcgtgtttattagatgaattacaaaaacaatttcctcaagctgaacttgttggtgcaaaccaagagtttgaaaaattgattgcccaagtcattggttttgttgaactgccaacacaacctttggcattaccacttgatattcaaggaacagtatttcaacaaaaagtttggcgggcattattagatattccttttggttgtaccatgacatatcaagaaattgctcaaaaaattggttcgccaaaatcttatcgagcagtggcgaatgcctgtgcatcaaataaactagcagtggcgatcccttgccatcgagttatcagacaaaatggtgaaatatctggatatcgttgggggattgagcgcaaagaaaaattattacaaagagaaaaatcccttcatcatcagcatgatagattggctattagcaagagcgattaa

SEQ ID NO: 302488 - DNA, 1230 bp, Proteus mirabilis
ttggctatccttaatgaatatctatctaaaaatcatttaaaaaaagcgaacaattttgccaatcaagcacaactaatacaaagtcatcatttagaacatccacagactatcgaagcgatgggaatgcttagtcaattacgtaaacaatggcaaacctctcatttcaaatatttacaagcacaaacacaagccagtgataatgcagctggtattaacgctatcacaaaagtaacacgtatggcattacaatctttaatgctaggtttagggggatggcttgctattgataatactatcagtcctggaatgatgattgccggttcaatacttttaggtcgagcattagcccctattgagcaagtgatcaatgtatggaaaagttgggatagtagtaaagcagcctacaatcgattgacaactttattaaaaacataccctcaagaaaataaaaaaatggccttacctaagcctcaaggccaattacttgttaatatcgatgaagccgtgtatccacacagtgacagaatattactaaataatatcaattttgctctattaccgggagatatactaggtattattggcccgagtgcttctggtaagtcttctttagcaaaatttattgtcggtatatggcaggtcaaaaaaggcattgtacgattagataatgcggatatctttcagtggagtaaagaagaaattggtccacatattggttatttacctcaagaaatcgcccttttccccggcactatcgctgaaaatattgcacgctttactgaggttgatcctcaaaaagtgatccaagccgccaaaatggcacatgtacacgagatgattttacgctttcctcaaggatatgaaacccaaattggtgctcacggtgaaggattatccggcggacaaaaacaacgtattgcattagccagagcattatatggcgatcccacgttagttgtcttagatgagccaaattctaatttagatgatttaggtattagagcgttaacacaggcgatcgaaacattaaaacagcataaaaaaaccgttattttaattacccaccaaaaacagctactttctgtcactaataaattattagtgatatttgatggaaacaccaaattattcggtccaacggcgtctgttattgctgaattaaataatccaactatcacaaaaacggcaaacactatttcttcaacaccagcaacctcaaataacgcttaa

SEQ ID NO: 302489 - DNA, 660 bp, Proteus mirabilis
ttggggataaaagagacctaccataaaaaagaaattaaaaataaaaaagtaaatctatctgtaataaaaccaacaacagactcttttttcactcgctattttttaagtcgtttacttatttcctgcttaggaatggccgttattcttacttatgtcaatatttcccctattgtagtgatgcaacaaatgaattattcaacaggagagtattcaatattaatgacatcattagcaatgataagtatgaccatttcttttttaatgccaaaaatattaatgaaataccgctataagcatattttatcagtagggtttatatgttttggaataggtattattttcctttttatagggaaaaagagtgacatgcgttggttttttattacctttgcattatgcggctcaggatttgcgttattatttgggattattatgagccaagcactttctccctttagccaacgagccggcgttgcgagctctgtgctgggtatttcacaattaagtttttcttcactttatatttgggtaatggggtggattgaagtatcctcaataaatatgttggtggttattttatttatcagttgtattgtaggtactctttttctatgctttcctcggttcacagaacaaaaaaaggttaaatataatgtctag

SEQ ID NO: 302490 - DNA, 972 bp, Proteus mirabilis
atgtctagcaaaccattacatagaattgatttgaatttgttagtcatatttcaaattcttttacaggagcgcagtgtcaccttggccgctaagtggttatccatttctccttctgctgtgagtaaagcattagccaaattaaggatatggtttgatgatcctctttttatccgtagtccacaagggttgatcccaacaccattatcgttaagtattgaagattctttatctgattttattaatattagccaccatatagccaataaacgtaatacagaagttcctgttggacttaaatttaatttagttttagaaacaccgttacatcaggtcatgttaccttctttaccacaacaaatattatctcattacccaaaatccacacttcagataaaaaattgggaatataattccctttctaatattattgatggagaagttgatattgggcttgttggacgtgaatactattcacgctcaaaagagttattagagctacttcctgatgtgattgattatgaaatattatttgatgatatcccactcgtttatctacacaaaaatcatccgttaatgaaaatgaagtgggatcttaataattttttatcgttttctcaggtgagtacagaatatgacaaacaaagtcattgggctttggataatatcttaaaagaaatgaacaaaagtcgtcagatagcaattacttatacttcttttgagcaatctctttttatgatatctcaacctgaccatcaattaattacttgtgcaccaggatattgtcgttattatgtaaaaacacattttcccgatattgtaacattacctatccctctcccccctgtgtttttagaacagcttcatctaccttttgttttgttatggcataagcgtaatagccataatacaaaaattatatggctaagaaatacaataagaaaaagtattaaccaacaaacctccgatatctga

SEQ ID NO: 302491 - DNA, 1167 bp, Proteus mirabilis
atgccattaacagatattcaaatccgcaaagctaatcccaaagaaaagccgtatacattgaatgatggtaacggattatctctattgattgaacctaatggctctaaaggatggcgtttccgttatcgttttgcgggcaaacctaaaatgatttcgttgggcgtatatgggcaagtcacactagctgaagcaagaaagaaacgtgatgaagctaaaaagcagttagctgagaatattaatccaagcgatgcccgtaaatcagaaaagatagcgttaagatacgcaacagaaaatacgttttatgcggtagcgatggaatggcatagctctaaatgctctacatggagtgatggttatgcaagcgagatattgcgttgttttgaaaatgatatttttccctatataggaaagcgacctatcgaccaaattgctcccttagaattattagctgttcttcaaaaaattgagaaaagaggtgcattagaacaagcaaataaaatccgtaggcgctgtggtgaagtttttcgttatgcggtcataacgggtagggtaaaatataatcctgcacctgatttagcgggagcaatgaataagcctgaaactaaacacttcccgtttttacgtgaagatgagatccctgattttgttaaagcgctaaataactatcaaggcagtaaaataacgaagtatgccacccagctgttaatgctgacaggtgttaggactgttgaattgagactagctgaatggtcagaatttgatttcgataatgatatttgggaaatacccaaagagagaatgaaaaagcgccgtcctcatttagtaccattatccccacaagttattgcgatactcaatgagttaaaagtaattacaggatattacccattattatttcctggtcgaaatgatgtaagaaaaccaatcagcgaagcaagtattaataaggttattgaaaagataggttataaaggcagattaacagggcatggctttcgccatatgatgagtactattttacatgaaaacggttttgatagcgcatggatagagttacagcttgctcatgttgataaaaattccatccgtggaatttataatcatgctttgtaccttgaaaacagaaaaaacatgctcaaatggtattcatctaatattatgcgttga

SEQ ID NO: 302492 - DNA, 936 bp, Proteus mirabilis
atgaaactaggtattgaaacagagtcctatcacctattttttcagcagggtgtaatggatgtttttgattttataaataaagcaactgaattagggctggatggggtcgaattaaatatcattcctgatgaaggattacacccagaatttggtgtgttaacaagtgatagccctgaatatttagcaaaagtacgtcaggcaattgaagataaaaatctttattgtgaattagatacacgttttacaacaccaaaggcattaacaaaagcaattgatatcgctcgaggaattggtgctgatgtgatacgtacttatatgtttcgtcgaggacaatacaatccgaaacaataccctaaaattattcaagatattaagtctattgttccattattaaaaaaatatcgtatacgtcttgcaatagaaaatcatgaagatgaaacggctgatgaaatcttaaatattgtaaaagatattgattctatttgggttggtgcacattgtgatattggtaatggcatgatggcgtgggaagatcctatagtaacagtgagcaaattagcaccttatacatatagcactcattttaaagatcatattgttacacatgatgatgaaacactggtaattacaggaatgcctcttggtgaagggagtattgatatcgatgaatgttttcgtttattagttgaacattcgcctgtaacacgtattaacttagaaaactgttttccctatacatctcattttgctagagataaaggaacggggggagtatttgaattaagtggaagctttgaagttaaatcaccaccttttgatacgcaattaattaaccccttggaatattattatccagctaaaatttctcctgttgcattaaaaacattaatggacgcacaagagcgttgtgtacaagtttcatgctggatagtttga

SEQ ID NO: 302493 - DNA, 1488 bp, Proteus mirabilis
atggatatatttattagcgcattagcttatattgattacacgacaatacttgttgtcataggcgcttgcttatttggtttatttgttggagcaattccggggttaacatcaaccatggcaattgctttaatggtgccttttactttctttcttgatccaattcctgcattagcactgatgatctccgtaggtgcatcctcgatatttgccggcgatattccaggggcattattaaatattcccggaacacccgcctctgcagcttatactaacgatgcccatacattggttaaagaaggtaaaactaatcgtgtattagggatgtcattaacaagctccgttattggtggggtgatcggcacaattattttagcgtcaaccgctccgttgttagccgagtttgcacttaaatttagctcttacgaatatatgtggcttactttaattggattaagctgcgccactattgtttctggcgctcaaattagaaaaagtttgctagcactgtttttcggtattgctttagccactattggctacgatgaatttacaggacaagcccgttttacctttggtgaagtctctttaatgcaaggtgttagttttattcccgccatgatagggctatttgctatctctggtgcgattaaatattacgtcgatcgctggaaagaaaagcaaattaaattagcagttaatacagataatagctcatataatatttttaaaggagtgggaaaggttgtttgccaacgtaaagggggcattttccgtagtggtattattggtacattgataggtgctttacccggtgctggtgccgatattgctgcgtggatctcttatgcagtatctaaaaaattatcaaaaaaaccgcaaaagtatgggcaaggctcagaagaaggtattgttgatgcatcagcaagtaataatgctagtttagcaggaagttggataccttcattggtttttggtattcccggtgattctgcggcagctattatcattggtgtattgtatatgaaagatatgcaacctggaccaactctctttttatttaatccagataaactgtacgccgtttttatcattttctttattgcgaatttaatcttattacctatagcttttattgttgttaattttttaaagaaaattgttgctattgataatgcaattctttatccagcaattattttatttagtattgtcggttcatttgctattaccaatacgatgtcatccattgtggttatgatggtgatgggagttatcggctattttcttcaacagcgtaactttcctatctcaccgattatattagggatgattttaggaccgatgctagagaagaatttactttcttcgttgatgaaatcggacggagagctaattaattttgttaatagacctatttcaattgtattagccagtgttttcctattaattgtcgctatgcaaattaggagcgcatttaaaaccaaataa

SEQ ID NO: 302494 - DNA, 990 bp, Proteus mirabilis
atgcttgctagccaagttttatgggatgatggtgtcactgctttgtttagctcatattcttattttggcaaatataacaatcaaaataagatagaacacaaaatcagttttaattcaggtgctaacttaggtgcttggcgagtacgtagtaaaagttattatcatcatacggataagcaacagcaatttaagctatactcattatatgcttatcatcaattaaatacgctgttggcaacgcttaatgtgggggaatttcgaccaaccagtagaatgttatcaacagataaattaattggatttcaacttatatctagtgatttgctctctggtaatgatctctatatgaatagtcctattatagaagagattgcagaatctcatgctgaaattaaagtgaaacaacaaggaagaaccatttatgaaactattgttcctcctgggccttttattttaaacgatctacctgttataggtagcaatgaattggtattagaaataaaagaagcagatggacgtataagaaaaagtacgcattactttactacaatgccaaaccaattaaaaaaaggtcgttatcaatataattttatttctggatattcttatgatagatataaccagtttaataatcaaaataataaccctatttttttactgggtgagttctcctatggtattaatcaaaaaataaccgcttatggtgcaattagaaagaagctgaatagcaatactttcttttcaggattatcattagatttaggacgctgggggggagtagccagtgatattagttattttgaacacaataatctattaaaataccaattgcgctataataaacgatggagcaatattggtacttctttaaatatatcttctagccatcatcaatcgatgctggtctatcatattttaataaaaattctaagctaccacgttcaccggcaacctccgaagaaaatgtacgttctgaattctcaccattaa

SEQ ID NO: 302495 - DNA, 870 bp, Proteus mirabilis
ttgaacgaaatcaacaataacttacaacgtatccgtgagttaactgttcaagcgaaaaacggtactaactctaattcagatatcacttctatccaaaacgaagtgaaagaacgtttagacgaaatcaaccgtatttctgaacaaactcagtttaacggcgttaaagtactgagcggtgagaaatcagaaatggttatccaagttggtactaacgataatgaaactatcaaatttaacttagataaagttgataacgatacattaggtgttgctagcgataaactgttcactgaagctaccgtttctaaaggtgagaagaaagcaagtgctgatgatgctgttattgctgatttaggtgttgctggtggtactactctaaaagctggtttaacagttaaaaaatacgaagaagatggcaaagttgttgatggtaaattcgttgcaactgaaggtggtaaaagctacttagtttctgcttcagattttgaagctgatggtactactgctacacaaatcaacttaaaagcaggttcagctgttgctggtaacgaatttactgctgctgcaggtaaagacgttaaaactttaaacgttaaagatgacgctttagcaactttagacaaagctatcaacaccattgatgaaagccgttctaaattaggtgcgattcaaaaccgttttgaatctactatcaacaacctaaacaacactgttaacaacttatctgcttcacgtagccgtatcttagatgctgactatgcaacagaagtttctaacatgagccgtggtcaaatcttgcaacaagcgggtacttcagtacttgctcaagcaaaccaagtaccacaaactgttctgtctctgttacgttaa

SEQ ID NO: 302496 - DNA, 417 bp, Proteus mirabilis
atgttgagagggcagttacaaaatcttttttttgcgataacagaattaataccatctcattattccttatctaaaaaagaattcagccgtaaagagcacttatgttggcaattttgggaattagttataaaacatagccaccagcacagagacgttgcctattatgcaaatcgccttagcatcacaccgttttatctatcacagctcactaaacaatattttaatgatgttcctaagacgctgattaatagacaagtaattcttaaaataaaagcgttattgacgcacactacgctatcagtaaatgagatcgccataaaactccattttgacgatccctcatatctatgccgttattttaagcgcgagactgattgttccttatctggatatcgccaacaatatcaacggcaataa

SEQ ID NO: 302497 - DNA, 1011 bp, Proteus mirabilis
atgtattattccttagtaaggaaggcattgtttcggctagatcctgaacgtgcccatgattttacctttcgtcagttaaaacgcttatctcattccccatttcaatttcttattcaacaatcacttcctgccaaacccgtttcttgcatgggactttcatttaaaaatcctctcggtcttgccgccggccttgataaaaatggtgattgcattgatgcattaggggcaatggggtttggctttattgaagtgggtactgttacaccacgagcacaagtaggtaataacaaaccgcgtctctttcgcttagtagaagctgaaggcttaattaatcgaatggggtttaataatttaggggttgataacctaatagagaatgtaaaacaatctcaatatggtggtgtgctgggtattaatatcggtaaaaataaagatacccccgtagagcaaggaaaagatgattacttaatctgtatggaaaaagtttacccttatgcaggttatattgcgattaacatctcttcacctaacacccccggcttacggacactccaatatggtgaagcattagacgatttattatctgcgattaaaaataaacaacttgagttacaagggaaatatcaaaaatatgtgcctgtggccgttaaaattgcccctgatcttactcatgaagaattaatccaagttgcagatagcttagtgcgtcaccatattgatggcgtaattgcgaccaatacaacattagacaaatcattagtgagtggattagatcactgcaatgaagccggtggattaagcggtcgtccggttcaatcaaaaagtacacaaatcattcgacaactaaatgaagagttaaaaggcgctttacctattattggggtaggggggattgattcattgactgccgcacgcgaaaaaatggatgcaggtgcttctttaatacaagtctattcaggattcatttatcatggtcctgcacttataaaatctataattaatcatatttaa

SEQ ID NO: 302498 - DNA, 345 bp, Proteus mirabilis
atggctataggaataaaatatatcccacatgaaatactttttttacttatagggttcaaatatattcttttttctgcaggactagtttctttttacactggtttaatgagcttatcttcattgaaacaagctggtattgatttcactattttccaatgtacaaatgcttttacagcaatcattgctactctattaggcacttggacagcggaaaactggtcttatcattttgtttttgcaatatcatctatttatacttttatcgcagtactaatttccattaaattaataaaaaaacgccttaaactaaatatttcatcaaacaattttgagcaatatgtataa

SEQ ID NO: 302499 - DNA, 213 bp, Proteus mirabilis; identical to SEQ ID NO: 238123

SEQ ID NO: 302500 - DNA, 567 bp, Proteus mirabilis; identical to SEQ ID NO: 293945

SEQ ID NO: 302501 - DNA, 225 bp, Proteus mirabilis
atgtcattagcactaacagaactagccccttcaccactagtgaaagtaatattatctggaacaacaatttcacacgttttagcgagaaaaacgactgaaaaattatatttcactgattgcgctgcaactgaagcccaactcgtcaataataaacaaagactaactattaatattgacactttttttgtctgcataattaatcctgaatatattcaaataaaatag

SEQ ID NO: 302502 - DNA, 576 bp, Proteus mirabilis
gtgtctacaataaaaaactttaaaagaacagtattgttagcgatgatggtgtatgcagtaaactgtcaatccgcaaataatggtactctcaacttttctgctaatgtaacacgtggcacttgtgaatttagcgatagtaatgagctgagtaaacatgtctcatttgaacagttttttactattggtgatgcagaagacacaccaataaaggcgcctattaaaggtagtctcggcactaagcaatttacttatcttatcgattgtaaagagtacgaacctgatagtgagaaaaaaatcacgattaatgtaaaaacaggcgcgaatactgaatattcagatcaggttttttatggaaaaggcgatacgactcaaacaggttttttagtaaaaggttgtcttgagggtgaaaatgcgagttgccaaattctagaaaacaataaaaagttatctttttcttctcactctaattcagcgataagtattaactacatcgtcgattttgttagacgcaacaataataaaatgacacctggtgactcaacggcgactattttatttgaatatattcaggattaa

SEQ ID NO: 302503 - DNA, 831 bp, Proteus mirabilis
ttgttagctaaagaatctattgcggtaaagaaaaaaagtttagatagacataataagattatatctgaattaaatgtgatagcccgtaatgatgaagggcgtgtttctgaatatgttcaggcagaagcaagaaaaatattagtagaacaagatattaactattatgaaaaagaattaatgacaacgttaagtacgttatcaaaatatacgggtttccccgttggtgaaagcgatcttgtcaatccttttgatggaatgacggtcagtgatatgtatagcgaattcactgcggaaaataataatcaaaatccagcttatctcgtgagtcaggctgatatcgatgctaaaaaaatgggcgttaaagtagaaaataaaaaacaattaccaagaattaatttaactggaaatataactaaagatgatcgtcagataggcattgatgtgacatgggacattattaatttttcatcattatattctattgatgaaaaagtaagtcaattaaacgcggcacaacagagaatggagagagtgattagagatattgaagaagcaagacgtttatcagtaattaatatccaaaaaagtactcaaaaattgaagatattagatgcacaaattttatcatcgacaaaagtagtcgatttttatcaattgcaatttaatgttgcacgccgttctttgttagatgttttgaatgcagaaaaagagttatctgatgttgaattatcttatgccacgacattgagtgatcttaggtacgggatgcttgattatttgtatgcacaaggaaaactttcgcactgggcacttaattcacacactcactaa

SEQ ID NO: 302504 - DNA, 651 bp, Proteus mirabilis
atgagactatatcaaactaccgatacattaactccactaaataatgaaattgaagagctaaagaaagaacaaaaaagattgtttaaaattgtttctgaaaaggatatagccaaaaaactcgatagtgtcctgaataaagtacagcgaaatattgggagaatactaccttatctagatggtgagtggcctgactccccggttagtttaattattcctgatctaacggtaaaagttaatagagggggacgagatgactacctttgggaaactggcagcggagcaaactggttagcttatcacattgcaaccactctcgcattgcaatggattttttcacaactaaagcaccatcctgtaccaggattattaatttacgaccaaccaagccaagtatattttcctgttagaaaagcagaaaaatcagcaatagacagtaatgatcctcactggcaggatgaagatatagtagccgtaagaaaagtatttaacacattggatatgttcatatccgctactaaaaaagaatttcaaattattgtattagaccatgccaacgaagacgtttggtatgatttagataatgttcacttagtagaagaatggagagggaaagctttagttccttatgaatggaaagatgaatcaatctaa

SEQ ID NO: 302505 - DNA, 465 bp, Proteus mirabilis
atgataaccataagaaaagctgtactttctgatgttgagcagattaataccctgtatggctatttatttgctgagatggcgaaattacagccagaaagattaaaaccgggtaaacaagatgaagcatttattattaatggcattaaaaatgataaatttcatctgttagtggctgagttagaacagaaaattgtcggttttactattgcccaaatacaagagacaccgctatttaactgtttagtacagcgtaaatatgcctatatttttgatattgttgttgacccttctgttcgtggacaaggggcaggggcattgttgctaaatgccatgaaggcgtgggcaaaacaacaaaaaatgacccacctagagctttcagtattggctgaaaatgccgatgctaaacgtttttatcagcgagaagggttaaaagaagtcagtaccgtgatgggtattgctttgtaa

SEQ ID NO: 302506 - DNA, 360 bp, Proteus mirabilis
gtgaagtcttcttatcatatttcacttcatcctcaaaaatggggaattcaaatttatcataaaggtgttattacacacgcttcaagccaaagaccgcttaatttattagagggaaataactttgtactcacaggaaataattggaatggcgtggatgtcggtttcccctgtacggtattaatcacaataattgggcatattgggatgatggattcgatgggaggaaaaacaattagggtaaccctctgtgggcgaggtaaccgcattattcctcattcgatgatagtctccggacagatgtcaacaacctcactaggtaagcagtatttttatattgatgtgagggagtatggtgggtga

SEQ ID NO: 302507 - DNA, 387 bp, Proteus mirabilis
atgacttataaagtcgatggtcaaacaagcgctatcacaaaaaatattcctattacatgtacttattttaagggctcaccttacgttaaagtatctggcattcagttagctggagcgcctgataatgtgcttaaagtttccgcagatagcgtgaattcaaatcgatttggccttgccttatatcaaggagagagtgttgatgagaataatcctttgcgtttgaatggttcagcccctcgaggttatgccattacaaaaggtttttctaatacagggcaagacaggagccaatttactattactgctgttccttttaaaacaggtactgctgatttatctcctggaaattttacggcctccgcatcattaagcattgtttataactaa

SEQ ID NO: 302508 - DNA, 543 bp, Proteus mirabilis
gtggagattaagcaaggctggctaacgggagtaaagcacgttccatcgccaaattatgacaatagacctgaaggtgaaatcccttcattgttgattatccacaatatcagtcttcctcctgggcaatttggtggaccttatattgatcaactgtttaccaatacgcttgctgttgatgatcatcctttttttaatgagattgcacatctgcgtgtttctgcgcactgtttaattcgccgtgatggtgaaattgtgcaatatgtgccttttacggcacgagcgtggcatgctggggtttccttctataaagggcgagagaaatgcaatgatttctcgattggtattgagctagaaggaaccgatgagtgtgactttacgccgcagcaatatcagcaattatcgacactcactcagcaacttattgaacactatccgggcattaaagaaaatattaccggacatagtgatgtcgcacctggtcggaaaacagatccaggacctcattttaattggtcatattaccgagcactattagcaaaataa

SEQ ID NO: 302509 - DNA, 732 bp, Proteus mirabilis
atgtttaattttagtcgtgggttatattgtattcttgttgggtattccatatttatttcgatggcggcacatagtgctgtgacattagatagaacgcgtattattttccctggaacggaaaagtcaattaatattactatttctaatgataatcctgaagaagcttatctcgcacaaagttggatagaagatttgcaggggaataaattaactaaaggtgctattttagcaacgcctccattacagagaatcgagccaaatagttatagtttagttaggttaagtacaacaccagaattacataaattaccacaagatagagagtcggtattttattttaatttacgtgaagtaccaccgaaatcaacagatggcaatacattacaaattgctttgcaatctcgtgtaaaactattttatcgtccaaatagtattttatctgaagcagaaactaaatggacacataaagtgacattaaccaaaacggctcaaggctaccgagttaataatataacgccttttaatttaacaataattggatttggaaatagtaaagcagccgctgaaaaaaatccttttgatgttgtcatggtgccacctaaatcgactcatgatattgcgtcttctatattatctacaccttatcttacttatattaatgattatggtggtaaaccatcgttggtatttcgttgccaaggtgatacctgtatggtaactggtgaacaataa

SEQ ID NO: 302510 - DNA, 918 bp, Proteus mirabilis; identical to SEQ ID NO: 301239

SEQ ID NO: 302511 - DNA, 885 bp, Proteus mirabilis
gtgtctcaaaccactgaaggtgcattgaacgaaatcaacaataacttacaacgtattcgtgaattaaccgttcaagcgaaaaacgggactaactctaactcagatatcaactctatccaaaacgaagttaatcaacgtttagatgaaatcaatcgtgtttcagaacaaactcagtttaacggtgtaaaagtgttgagtggtgaaaagtcaaaaatgaccattcaagtgggtactaatgacaatgaagtgattgaattcaatttagataaaattgataacgacacattaggtgttgctagtgataaactgtttgatgctaaaacagagaaaaaaggggttacagcagcaggtgatgcaatcgatgcgaaagatatcggtgtttcaggtggtgcaaaatatgcgactggtatttcagtaaaagagtataaagtagatggtaaggtttctgctagtaaagttgtcttaaatgatggtagcgacgagtacgtagtaagcaaatcagactttacattaaaatcaggtactactactggtgaagttgagtttactggtagtaaaaccactaaatttactgcagatgcaggtaaagatgttaaagttttaaatgttaaggataacgctttagcaactttagataacgcaattagtaaggttgatgaaagccgctctaaattaggtgcaattcaaaaccgtttccaatctactatcaataacttaaacaacactgttaataacttatctgcttcacgtagccgtatcttagatgctgactatgcgacagaagtgtccaatatgagtaaaaatcaaatcttgcaacaagcaggtactgctgtactggctcaagcaaaccaagtaccacaaactgttctgtctctgttacgttaa

SEQ ID NO: 302512 - DNA, 660 bp, Proteus mirabilis
atgcagaaaaaaacatcaccacagatcctttgccaaaaaatcgctgatattattcgccaaaaaattactatcggtgaattacctccaggagagaggctttcagaagctactttaagcgaacagcttgaaatatctcgtaatacattaagagaagtatttcgtatattaacccaagaaggcctattaacctataaacctaatcgtggtgtgtttgtttctgtaccagatatggcatcaattatggatatttatcgcgtaagaaggctgattgaatgtgatgctttacgacatgcctatccaatgcacccagccatttcccgcatgcaagataacgttaatcaagcaaaaatatttcaacaacaaaaagattggaatagcgttggaacctgtaatatgcatttccataccgctatcgtcgagctttctgatagccctaggttatttaaacaatatcaacttattttagcagaattacgattagcctttggtttactcaatgatccccagttattacatgctccttatattgagaagaatgagcatattttaacgctattgatgaatgggaaagcgcaagaagcggcaatcgaaatggaaagttatttagaaatatccgagcgaaccgtattagccgctttttctcgccacaacatctgttaa

SEQ ID NO: 302513 - DNA, 294 bp, Proteus mirabilis
ttgagagagccaaatgctatttggcaagatcaattagttttaaataagctatctgacggttatgaaatagagaatccaacaccttattacgtcactgtattcggtattggtggttcaaagaaagaagcggttgattctgagtttaatgcagtcatgattgcccctaaatcatcacaaagggttaatagtaaagtgtactcaacgccatacttatcttatataaatgattatggtggaagaccgacaattaaatttcaatgtcaagctaatcgttgtgtagcagagaaaaaataa

SEQ ID NO: 302514 - DNA, 294 bp, Proteus mirabilis; identical to SEQ ID NO: 302513

SEQ ID NO: 302515 - DNA, 438 bp, Proteus mirabilis
atgaaagcagagcgtcataaaaaaattgttaatctgatcaaaggtcatggtgcagtaaaagtttctgttttagcaaaagagcttagtgttaccaaagaaaccatacgatcagatttaaatacattggttgagaaaggcaataaagttgacgctaataatccacaagtcagtaattattttggcctagcagaatattatcctaatggcacttttattatgtttacccctgaaggtaaacaaaaaatgcaaggggattggtcaatgtctaatgatggaaaaacgcgtacattagttgccaaagatgcacaaggaaaaacactatttactcgtgatgtagaaaatatcaccatcaataatgatgagtatacctatcgtatttacccaactgaaggggataatactgtttattttgatattattcatcacgttaagaagtaa

SEQ ID NO: 302516 - DNA, 357 bp, Proteus mirabilis
gtgtcatctagcgcactgaaggacggtggccgtagtgcgtcaaaaatgtttaaaatcaaattattacagtgttctactgagacatataaaacagtcaaaacaacctttaccggtgctgaagctcctgatgttttagagggggctttaggtattgaagggatcgccaaaaatgcagctgttgttatcaccaatgcaggtggtgaacaaatcaaattaggtcaagcaagtgccgcccaaacattgaatgacggtaacaatgacttaaattttgccgcttatttacaaggttcttcctcaaaagctgctattcctggtgattttacagcaatagccacttttgctttatcttatcaataa

SEQ ID NO: 302517 - DNA, 276 bp, Proteus mirabilis
atgactgaacgaggtcagcttgataataaaacattacgtcgtatgcgagaggcattatcttcgaatgaagaactacaacatagtggcacaacaagtcgtgtttatttagataaagataagaaaaaatcagtatcactatctttaaaaatgtcagcactacggaaaatagataaactttcgtttttaagaagtacaacccgaagtcagacggttgagtttcttgttgataattatgtagaacatttaattcaagttgctctccaagataaaaaataa

SEQ ID NO: 302518 - DNA, 387 bp, Proteus mirabilis; identical to SEQ ID NO: 295557

SEQ ID NO: 302519 - DNA, 501 bp, Proteus mirabilis
ttgtctttttttggggcatcacctgattatattgctgaaaactcaccccgaagccactatagaaaattgagtctaaatatacattatcaatatttatttccttactctgtctcctatattacgtctttttatggtcaatatacatctgataatctttatagtgtggaaaaaataaccatagatggattaaatgcagttcgtggtgctaaacaaaataagcttagtgccaatagaggactttattggcgtaatgaaattaatacaccatggataaattcatttttaggtcaatggcgttttattacagctgttgattatggcgttatctattctgatcaatatgaaacaaagcagcagtctttattagctggcgctatggggctttcattttatcgttcccctttttcttcacaactattgataaacaaaccattcatttatccaaagtggtcaaatgctaaccaatggtctttatcttggtcaatttcttttgctctttaa

SEQ ID NO: 302520 - DNA, 687 bp, Proteus mirabilis
ttgtttattacaacaacatgcactttacctgcacaggctaattatctcggtggatttgctaatatcagtatcaattatcttgactggacgacacataccacccataaaacaggccaaacttcccataaagatgattttgcttatttagaacttgaagggggagcccacttttcatggggtgagttttatggcttttttgacttagaaaatccttttaataatcgacaaacacagcccggcgataatcagcgctataccgtcaaaggaactagtcgtatttatttagctgacagtggattaaacctttatggccatatatatggtacttggtcactgcccggaaaagaatatggcggtaatttccatgaggttaatacactttatggtattgggtataacacacaattagcagatatctggtttaaaccttttatagctttacattatgtcgatcaaacttattattcaggaaataatggctatgtggttggttgggttgccggttacgattttaacctggtaaatcaaaatttagcatcacaaattggcatgagatggagtttgatcgtaataaacgttatggcaatggcggaaaaaatggctttaatggagctgtcgctatttggtggcaccccacggcttccattactacaggcattcaataccgctatgcttataaaaagttag

SEQ ID NO: 302521 - DNA, 708 bp, Proteus mirabilis
atgttaggcagcctctatattggtgatgaatttaaaccacatatcacaacgttaatggatgctttctacttttccattgtctgtatgacaacacttggttttggcgatatcgttcctatctcaagtaatgcgagaatgtttaccctaacagtggttattttggggatcactgtttttacgacttctattgtttatgtgatgggatttttggctcgtggtactcgcgatattgtgaagaaaaggatcgctaaaatgcatgatcattttattattattggctcttcaatgttggcagcacaattagagaaagggcttagagagcaaggtaaaccggttattgcgatttgttcggataaaaagcaagccatgtatgataaagaagccaatattattgaaggtgatccaaccaatgtaaaaacattacaaacggcaaatattcgccaagcgagttgggtggcgacgttatctgaaagtgatgcggaaaatacctttattttattaactattcaagagtgtccagaccttcaagcgaaattaatcactatcattaataaagatgagaatagagaaaaaataagtcgattacgtccagatatgctgttgtctttagcttcgttaggcaaagaaattatgatgaaagtcctttgtggtgaatctattaattcgtctgatgttactgatttgttaatcaataaatatttaaaataa

SEQ ID NO: 302522 - DNA, 258 bp, Proteus mirabilis
atgtccacattggctgtttttgtgattgtttcacaaggccttgctattacacttccattaacagtaattgttgcatctgcagccatagcgaatgaagtattgcagcataaaatagcaaatattacgttttttactcctcgccatttatatttcatcattgattctctttatctctattggtactcgagtgtaaaagtggcactggctttaatttttccagctaagacaggcatatcagatgccattaatcgactatag

SEQ ID NO: 302523 - DNA, 756 bp, Proteus mirabilis
atgctattaaaaaaaatatttttagtgtcttttttattccctactctctcttacgctaataccttaccaacatcaaatatagataattcactaactcccaaccatgataatcttgcccgtttttcactcggtgacaatagtcaagcatccggcagcggtgccactgctataggtatcaatagccaagccaccaatactcgagcggttgctattggttatggtgcattagccaatgaggaaaatacggtttcatttggtaatagtgaagagaaacaaacagcacgactcaccaatgtcagtgaaggtaaaaataatactgatgcagtcaatctggcacaaacaaaagcactacttagtaaaaataaaaggttaactgatagccaaataaatgtttttagaaatcaaactaataataacttaaacaccatcaaaaaaaccatccatgaatttgatgattattatcgaagacgccaagcatcaattaccgatgcaattgaagcactggataaaaaagttatttcattagaaaaaaaagtctatgcaggtattgcttcctcaattgccatgaccaatattccttatcttactcatcatacttttagtggtggcctcggtattagtaattatcgtactggcatagcacttgctggaggtatccaatatcagccaaataacgatatagcatttcgatttaactcatcaattaatagtgaacaagagcttatttttggtggcggattagcttatggctggtga

SEQ ID NO: 302524 - DNA, 786 bp, Proteus mirabilis
gtgatcccctatcaaaatattcccaataatcattttgagatattaacgcgattaattcataacagtttaaaacgggctaatatcaccctagaaaagcttcgcgcttcacgtaccataatgtatcttgcaggtcacgggcctagagccgattttatggattaccaagggttttatgataaaaacgatgccgaagacgttcaatattctccacagataaaatcactccatgcagcctcttttgcacaggatgaattagcgaataaattgtgggctgaatatcagttagatttcccacctattcctatctattgtgccagtaattctgcgttaatggctgtgcatataggacataatgaaataagccaagatatggcggatattgtaatagtattgtcgtggaatagcttacttttacaagatatagcctttatggatagccaaggcatgttagttgaagcgcacgctcaacctttgagtaaatacagtgatggggtcaccttatcagatggttatgccgtgatgattttagaaagccaacaacagataaactcgagacaatatcttgcacctgcttatatctatcattccgtttttatgcaaagtaatgctgaacggacaatgggaggcacattatttaacttttatacaatatcaaaagtgatttctcagcttctcgatcttagtcattatttaccaagtgatattggtgctatttttattcatggtaatggttcgattattagtgataaagctgagacggtagctattactaacatctttaaataa

SEQ ID NO: 302525 - DNA, 231 bp, Proteus mirabilis
atgtcattacaaggtcctgctcaaatatttgccaaacgatataaaattatcatctcgcctttagctcttcctaaaaaagtcgaagaagatagcctaaatttaatcgctgattatttgcacggttttactatttcaatcagttgtaatccagacaaaggtattattaaaaatgaaatgatgtatggtccattaaagctaatctgtcattcattaggaatggccaaaatgtaa

SEQ ID NO: 302526 - DNA, 624 bp, Proteus mirabilis
atgttaaataaaaaaatagcgtcggtgatgctatcaacaattattgctgcttcttttgctacggctgctaatgcagatactcgtgttgcacaagcaactgctacttggcaagcaactgcaattaaagatacaaccagtatgttagttgtcactccattaaaaagtctgacttttaattatgctgaaggacaaaaatcatttaaccaacaaaatggtgcatttgatattgctattcaaggccaatctggcgcaaccgattttaaattatcatcaaaactaattgctaatacgttagcaagaacaactgatgattcaacattaacagttggtgttaaatggaatggggaagacctttctaaaacaactgatgtcgtgttaattgatacatcaaaagggttaacctcaggtttagataatttagctgctgatggtatttacaatggctctgagcgcgctacagatcgtggtgaattcacttttgtaattgccagtgcacaagcagcaggagcaacagccgattttaaatcactggctgatggtgtctgggatggtgatgtaaaagtgcaatttactgccacttgggatggtgacttttctaccgttaaacctaatccagaaccttaa

SEQ ID NO: 302527 - DNA, 495 bp, Proteus mirabilis
atgctgggattacttgcgggtattatctgtattattaaccctttttcttcaggggtcgtggtcagtgttttcctcggtgtggtgttttttgcttgtgcaataaccagcataatggcggcctttaatagccggatctcttctggttggtcgatgttaattactttacttgctggttttatctatctatttttaggttatatttttattaccgatcctttaaatggcatgttaagccttgcatttattatcggttatttatttatctttgcaggaatactccgcttagtactcggctttaagcaaattaaagatagcttttatggctggtttaatattttagtgggctttttagatcttgttttagcctatttcttactagcttttggccctgaaacttctataacactggtgatggcattgattggtatacaacttattttaagttctataactattctatcaatagccagtgcaatcaagcggatgactcgttaa

SEQ ID NO: 302528 - DNA, 687 bp, Proteus mirabilis
gtgtgcataaatactattttagagaacgagaacgagcaagaatttgattttaatacgcataatatagatgaaataaaagctttactaatctgtataggtaatgcagaaaataatattattctttataaaacaatggctactgtaaatatattttcacgagatagtttctttcttgtaaaatctgataccagatttaaagagatcaagcaggattttttcagagttagcggaaattttcaactaatcaaagtaaatggagaactttacgttatagatttgagtttggtcgaaaaaatgtttggttttcatgatgttataaaaaaagaggccagccagggaatacggtctattcgtaatatgaatttaatctcaaatatcgatgttatacaagaattaattgatgacgttaaatacgcaaggaaattgactcgcgtcgctaaatcttccccagtaattcaggctggtattaataattcaagcattatttcattttgtaaatcttatccaaccctaaaagggcgtattagatttaatgaagatgacacaatgatcactttggatacaaaagtttcaaaggatttatttattaaagtattgatggatgattttttaacatctcaattaactcagttttactatgatagcatcgccaaagatgcgctgattgctgaatcagttgatagttaa

SEQ ID NO: 302529 - DNA, 612 bp, Proteus mirabilis
atgaagaaaaataaacttatgctatttactgcaacattattattatcatctgcaggtattatttcaacagcatcagctgaggtgacattaaagcatggctatattgatagtccacccagcagagcttttctttgttcatccaaaggggggaatttaaataaaaattgtggtccgatacagtatgaaccgcaatccattgaaggggataaaggattccctaaaggtggtcctgcagatggtgaaattgccagtggtggaaaggcaactttttctgctttaaatgcacaaagtgcagatcgctggcataaagtggcaatgaaaagtggcgaaaatacttttaagtggacattaactgcaaaacatagcactgaatcatggcgcttctttattacaaaaccagggtgggatgttaataaaccattgacccgtgctgattttgatttaacacctttttgccaacgaaatgataatgggaaaatacccacagaaaccgtaacattaaattgtaatataccagaacgttctggttatcaaattattttaggtgtttgggatattgctgatacgggtaatgctttttatcaagttattgatgctgaatttaaaaaataa

SEQ ID NO: 302530 - DNA, 714 bp, Proteus mirabilis
atgaacgaacaaaattttttagcaaattacaatcgccgtgattttctatcgccgcttattactgttgattcagtactattcacttaccatgaagggcagttaaaagtgctcttggtggaaagagctaatcatcctgaaaaaggaaaatggggattacctggtggctttgttgatgaaacacaagacaactgcctagaagatactgtgctcagaaaattaaaagagaaaacaggggtgatcccgccgtacattgaacaactctgctcagtgggaaataatcagcgcgatgtaagaggttggtctgttactgtatgttacacggcgttaattgctcaccaagcatgtaaagcgcatattgatagtgtggatcatgtgatgtggttacctattgatgaagtagcacagaaaaatctggcatttgatcataatgaactgattgcgcaagcgagagagcgattaaagcaaaaatcgctttattctattgtgccgggatttgcgttacctgaagtgtttactttgcctgaattacagcatgtgcatgagatattgataggtaaagagatccagaaaaaatcttttagacgacggattgaacaagccgacttattaattgataccggagaaaaacgtgctgagaagggacgccctgctagtctctatcgacttaagaagtcgtctgcggattatcgttttattcgtaatcttgaattttaa

SEQ ID NO: 302531 - DNA, 522 bp, Proteus mirabilis
atggttgcattatcagccgctctagtgatcaactatcctaagccgaaagatcaaatagcgataattaatcatcatgctcctcaagcactctctatggtagcaattattttagcggcaggtgcttttttaggcatcatgtctaatgggaaaatgctggaagctattgccctcgatttagcagcagtattaccttctcattgggtcgataatttgcatattgttgtaggtatattaggtgttcccatggatatctttaccagcactgatgcttattattttgcgctattgcctattgtgcaggaggtcactgctagtggtggtgtccatgttgctgatgttgtgtatgctatggccataggtaataatgccggaacctttgtaagtccattctcaccagccgcttggcttgctatggggcttgcaggcactgatatgggtaaacatttacgttactcatttggttggatttggctatttagcttctttaccctaggtgttggcacattattgggactgttttaa

SEQ ID NO: 302532 - DNA, 525 bp, Proteus mirabilis
ttgacaatagaaaaattagactcaccacttgaaaatgggaaagttattccggttactgatcccaatgaaattctatcaacaccggctaatctgattcttcccggtcatgcaagtgatgtatttaaaatcatttatcaagggcctaaggatgataaagagcgttattatcgattaaattggaaagatgatcctattgctgaaaatggtataacacaaagctcaaaatcagcgacagcaacaacatctgcaactattagtacaattttagtggttgcacccagaattgagaattttaattatcagtatcatgataataaagtttctaatatcggtaatagttcatttcgtgttgtggcttcaggcccttgtctagcagaaaaacaacaatatggtgtggaggggatgtgtcgcgagcgttattaccttatgccacatttagccgttaaattacaacttgtcgatctcacaaataaaaaatctagcgtaggcatttggcacaaaggagagttcattgttgtcaaataa

SEQ ID NO: 302533 - DNA, 261 bp, Proteus mirabilis
atgtggcaactggtaggtttctacctaggttggttaggcggtgaaggtaaaggccgagctttgggtgtgggtgaagtgaaattcactgggcaaattctaccaacagccaaaaaagtcacctataaaattgatttcaaacgtgttatcaatcgcaagcttattatgggtatcgctgacggtgaagtttatgttgatggtaaactgatttatgaagccaaagatttaaaagtcggcttatttaaagatacctccgcattctaa

SEQ ID NO: 302534 - DNA, 528 bp, Proteus mirabilis
atgattggggctgtagccccacaacctgattttactactgcggaatctgccgctttgatcgccaataagttttcaggttgcagtattaatttgcatgtaccggctgtagtgtcaaatgcacgtttggcaatggaactacaagcagaacccataatacggcgtaatttctctgctttaaatcaatgtaataaagctttgtttgttgtgggtaatactcaagatgacaaccctttgattacaacaggcgtactcaccacaaatgagatggcacaatatcgcgatttaggtgctgttggtgtcatttgtggtcgattctatgatgcacaaggtaatcctctgctttctgatatcgaccttagaattatgggaattagtcttgcacagttaagacagatcccacagcgtatttttattgctggaggcgttgaaaatgttgctgcaaccataggcgcaataaaagggggatatgctacagatattgtcatcgatgaagtgacggcattagcattattggagttgagtatttaa

SEQ ID NO: 302535 - DNA, 597 bp, Proteus mirabilis
atgagaatgcttaagctcataccggcgtttattgtcgtagctacgttatcagcctgtagttcacaaaacgcgtcttcacgcttagctaattcaacaactgccccacttaataaatcttcaagcacatctatttcccaagcatctcaagatgaatttgaatcattggtgaagaatctcgatataaaatctaagatacttgaccaatatgcagactggaaaggtgttgcataccgcttaggtggcaatacaaaaagtggtattgattgttccgcttttgtccaaagaacttttcgtgatcaatttggtgtcgaattacctcgttcaacctccgatcagcaatttgccggtaccaaagttaatcgttcaaccttaaaagcgggtgacttagtactgtttaagactggtcgcactatgcgccatattggtatttatatcggtaatgataagtttgttcacgcatcaaccagcagtggtgttatcgtttctgaaatgtccaatgtctattggaaaaaccgtttctatacagcgcgtcggatcattgataataatacaacaacaagtcttgctgataactattctcaagcgtcattaagataa

SEQ ID NO: 302536 - DNA, 507 bp, Proteus mirabilis
atgtctttgactattttcgagcaattaaccacattactcaataaccaccacgcccgttatcgcgtcatggaacacccgaccgcgggtcgttctgaggaagttgctaaaataagaggtacacaattagggcaaggggcaaaaggtctagtttgtcatgtaaaaggcaatggtattaaacaacatgtactggccattttacctgctgataaacaagctgatctatcaaaactcgctatcgctattggtgggacaagagcctctcttgcaagcccgaaagaagttgatgaactaacgcaatgtgtatttggcgcgatcccaccttttagttttcatccagcactaaaactggttgctgatccgctattatttgaacgttttgatgaattagcctttaatgctggaacattagaacgctcgattattttaaatacacaagattatcagcggattgctcagcccgagttaattcattttattcgccaagatgatcaagagcataatgattaa

SEQ ID NO: 302537 - DNA, 456 bp, Proteus mirabilis
atgactaaaaatttatctattgattacacatgggaacatcaattagttaattttgatgaattatcctttgattttattaataaaaaaatatatttttctgacccagtttttatgataaatcagatcaatgatgaaattattgctgagaaacaaaaaatagaaaaagataagatagaacgagaaaaaagagccgcagcaatgcgtggagacctatggaaaaggcgttcctatagtgaagtttcttctgaagaagagcaacaaaaaagaacaacatctaatcgagatataatcacttacccaagcaaaagaaacaaagccaatctaaatctttcatcttcttattctcataaatcatttggtgacgcagtaaaatgtcctcattgtaagaaattagttaagaaaaaaaagattcgaaagagtttactctgcaatgaatgcctacaacctcttgaatag

SEQ ID NO: 302538 - DNA, 384 bp, Proteus mirabilis
ttggcttcttcagaaaaagatattctctctgtttttgtcgatctgctaaagcaattttttacccatctggagaaagggttttcttaccaaaaactggtagagacacgtcatactcttattgataactatctgatacagataaaaaatctaaccaaactagaacagaaaaaacaagctctcttatttaccctaagtcgttattatgcagtcacagaaatcaatcaatatattgatatgttaaatcaacaattatcgctattagagcagtattggcatacattaatagagcaactgatacaattaaaacgcaatctttccgaggcaaaaaacgtgctctcacctcatcttgtattccttaatcacttttcacaccattatcaataa

SEQ ID NO: 302539 - DNA, 444 bp, Proteus mirabilis
gtgaaactcgcctttacggggttagcattcggtattattggtgtgatcattactggagggatctttggttcaaaagctgaaaaaattcgtaaaaaaagaaatgaaacaatagagaaactacataatatcaataaaggaataaaacaacaatcaactatttctgagtgtttacaacgttttcaagtcgatttagacgaaatagaacaatatattgaagatgctgatatgtctgtggagcatcttctttatatgtggcaaacaattttaactgaaattaatgcttcattaattaattttaaaaaaattgataatgcaatggagttaattagatttagtatttatttagaaaaaatcattgcaccttggtatatggtggtcggttactcaaaggaaatgatggcggtatttgatgaagctttatcctctttttattcatctaaataa

SEQ ID NO: 302540 - DNA, 147 bp, Proteus mirabilis
atgctcagtttgtcttttcctttagcatcggtgacaaagatatcgataatgaaaataccaaatacaattaaagatactgaagttaatgatatccaaaaaataaagtttttaacttttgatgagatttcaatcattgcatatacctag

SEQ ID NO: 302541 - DNA, 177 bp, Proteus mirabilis
atgagtcgattagcctcacgctttgggcgtgccaacagtattcgtcgtgaccggccattaacgatggaagaattattttgtaccgtacccagtgttttctctgaagaaaaacatgagtcgagaagtgaccgttatacctatatccctaccattacagcctcgtcgttgggaggataa

SEQ ID NO: 302542 - DNA, 213 bp, Proteus mirabilis
atgaagaattatcaagaacgttggattcataaatttgagcttaagaaagataaatgggtttatgtaccttctgagttaacaagaagtgaaggtataaaaatattaaatagtttatctactaaatggactcctcctgtatatttttatcattttcgaaaaggtggacctgtctcttatacacatctgacgctgccgacgatctactctgtgtag

SEQ ID NO: 302543 - DNA, 189 bp, Proteus mirabilis
atgaaaataaattatggcttagctaatgagcgaatttttttgatgattggtatcattaaattagttgatgctagcatttcattagctgataatttaatcgattttgtcatcaaacattacgacctcattagcatggtcttctactataaaaaaaacgatgaagaattatcaagaacgttggattcataa

SEQ ID NO: 302544 - DNA, 540 bp, Proteus mirabilis
atgactaatgcgtatattgaaaaaggctatattacttcacaagcttttattgccgatcaagatctctcaaatcatcaattaaccattaacgtaattgaaggaaagataaaatcaatctttattgataacatgacttctcccatggttgatattctatttccttcatatcaagataaacgacttaatttacgtgagttagagcatgggcttgaacaacttaatcgattaacaacatcacaatatagattagatattcaacctagtgacaggataggatactcgactatttttatttataagaaaaacaaaacgcatcctttcagaaatcaacttactattgataattcaggttcaaaagcaacaggtgaaattttactgacgaataccacaacaatagattcgttatttggatttggagagcagtgggatctctccttaaacagtaatacagatttattacattcacattattatagaggctatacagcgagtataaacattccctatggctattggtatttatcaagccgttaccgataa

SEQ ID NO: 302545 - DNA, 513 bp, Proteus mirabilis
atggttggagaaaataactataaaaactatcactcaggacagccattttctactcaaaaaataggtaattttagtgctaaaaatattccctttttttcgtcggctattgataatgcaagggttcactttgatagagcaaaacaacaatatgcattaaaaaaatatggtgcaatggtaaaagatatcgcgaaaagtcttgatcctggttttagagggatgttttctactataaaagctatagttaattctgctacattaccgagaacaattaaaacagatgctctaaatgatgtaaaaaaagcgattaaacatgattatcatctgcttaataaatatattactggaattaacaatggtaaatctcaaggtgaggttgtttattctttagtagaacaattaaatgataaagagagtattacaattagccaatataatgatatccgtgcattctttggcattagtgcatctgtctcttatacacatctgacgctgccgacgatctactctgtgtag

SEQ ID NO: 302546 - DNA, 414 bp, Proteus mirabilis
ttgatccaaccattgggttttacttgggatgataaacggctacgccgtgcagggcttgattatcgtgagtttgctgatatcaaacagcatcacgattattatacttttttagaaagtgaaggattaagccctgataatgcacaatcaccgacaggtgcgcggttgtttgcattaaccactaaaggtactcccgcccatagtaatgtaaattatcaagatggggattatctactctttggccctgagacacgaggtttaccaccttatgtgttggataatatgccaacacaacaaaaaatccgtgtaccaatgttagcagatagccgcagtatgaatctttctaatacggttgccgtggttgtttttgaggcatggcgtcaattaggctatcctggtgcattattaagagattaa

SEQ ID NO: 302547 - DNA, 189 bp, Proteus mirabilis
atgtatggtgataccccaacaatagtgtttccttctttgtcagttggcggtgaatcattgaatgttataccctctatatttttaatttttgcaattgcgacagtatctcttctgacattactgaataataatcctgtatctggggtggctaataaacttcctgaagcattaatagaactggtagtttga

SEQ ID NO: 302548 - DNA, 141 bp, Proteus mirabilis
atgaacctcgcaaacttatctcaagaagaaaaagacaaaatcaatgtcgatttggctacttcaggtgtcgcatataaagaacggctcaacatgccaattgttgcgtccaaagttgaacgacaacaaccagcacatttatga

SEQ ID NO: 302549 - DNA, 255 bp, Proteus mirabilis
atgcataaactcacccatcaagatgttgggcaaatggatatgtatgtccgcatgtatgaagagaaaaaacgccgtcatgatgataatccaaccataggactaattctttgcactgaaaaaaatcacacagtagccaaatactccattctaaatgaaagtaaacagctattcgcttcaaaatatatgcttgaattaccaagcgaaaaagaattaattttacaattagaaaaagaacgccaaaaattatttgaataa

SEQ ID NO: 302550 - DNA, 228 bp, Proteus mirabilis
ttggcgcttaattatattgatagtttacataatgaatggaataaatttaatcatgaaaaagaagatgatttaatatccacaatagaaacagtattacaaaaaacaggaaaagactttctaaacctaagttgtggtgagcaaaccacatttaatcatgatgttaggaaaaaattgattatggatacacttttttgtattgttaaatctaatgatgaatggctatcttag

SEQ ID NO: 302551 - DNA, 273 bp, Proteus mirabilis
atgggacgccaaagaacgattgatagagaaaagttacttgaggctatttttgacatcgtgatggagcaaggggctgccgctctgactatcgatacggtggccaaaaaaatggggatttccaaaggtggtgtccaatattgctttaatagtaaagaagcgatgattgatgccatgtttgaacattgggaaggaggatatgaagcgcgatttaatcaggtggttgccaatgataactcagccaataatcgcagcacatattcatgcaactcatga

SEQ ID NO: 302552 - DNA, 825 bp, Proteus mirabilis
gtgtatgcagaagataaagaatttaaaaaatattctattgatctaaaaagacaaataaacaataccattatatcagcaaaaaagtatggactagaaggtagtgattataatctgtatatgcatagaataagcgatcattcattcttgttcaccaaaacaaatgacggggaattaataaaaaaaataaataaaaaaacttcatctatcgaagatattagaaaaagccttgcatcagacgaatcactagggtttccttcatttttatttataaatgatgatgtcattggttttgcatctaccatttacgggccaagcattagagaattaaaagattttttatgccaaaagataaatatcaataatgatatgactttattttttgagccgttaattagaaacataagtagcaaagaaacagaaaaaatggtgtttattgggaggaccacactaaaaactgaagctgatacagcaacctttaaaaaggttttagctgcttttgggatcggtgaaattagagaggaactttataatggacttgaagtgatcattaaaccacaaaaaaacaaagatataaaagcaatggcatcagatataataaataaccctgacaatcagtttagtgatgtgcatatcagagctaaagagcatttaggcgatcagttaactgatttctatttatcaggacaaggcgtgataagcgcaaatctaaaaaagaccaccaatgcggagttgtccatggaaatggaaaattgttacgagagaaacaaaaatgctataatgaaggcgtttgatgaatcaatacctgatggtctatccgagatataa

SEQ ID NO: 302553 - DNA, 432 bp, Proteus mirabilis
atgatatacaagaaattacctgctattttttttgttgtaatcccatacttgattacctatggtggacatacagttttccgccattatttctcttatgtttcgttttcctcgaataaagttcctttgggtgcagctataagctcttatgctggaacaacgatagctatactaattgcggcgctaacatttcttataggtataagaaataacaatatgtcgaaactaaagaaatatggctacatgccatctattgtaactatgtacgcattttcctttgtggagctagggatgctttttttgttagggttgctactcctatcgaatattaatggctttcctttagcgacaataactatttttatagctgtatcatcctttattcatatatgtattttattgacccaattgtatttactttcaaataaaaaataa

SEQ ID NO: 302554 - DNA, 489 bp, Proteus mirabilis
atgattattcaagcattaaataatagagaattcttaatgaaaccaataactcaggataaatttaacgagttactggaagaattcggagaagaccagctagcaagagagttggactacttgcaaaaaagagggttagtgcaagacggtgctgtgagaatcggcgttgtcgatgatgaaccctattcttttaatattcacaaaatggggttaaccgctgatggtgttgactgcgctaatgccgatactcttggtaacaaattaaacgttgttaacataaaaattcacgaaagcaccattaaaaacttagaagcaatgatcagagccgttaacctacctgatgaagataaaaaaactcttctcgatatggtaaaagaaaagggcgctgaagctgttgttagcagaatggttgattatgcatttgctaacgcgagcattgctactaagttattccttgaagctaccaaaacaaaactcggctttcatgactaa

SEQ ID NO: 302555 - DNA, 195 bp, Proteus mirabilis
atggcaggtaaagatagttttttcaaaatagaatatgatgaaattatttattttataaataaagactcaatatgccatatgtatgagagtcaagggcattttggcacagaaagtcatttagtcttgaaaagcggcaagagatttacttacggaatgccgctagaagagttaatgaaagagctatttaaaatatag

SEQ ID NO: 302556 - DNA, 210 bp, Proteus mirabilis
atgagcattaaagtaatttctgatgacaaccctgttaaacgagttgcttttgatatggcgctagctttagccgctaaacaggattcaattaaaacgccagagcaattaatggctgaaattgaagcgctttatcctgagtgtttagaagttgctgagaagcaaaaaagaaaagaaacagatccgccaccaaaaaacctatattttaaatag

SEQ ID NO: 302557 - DNA, 321 bp, Proteus mirabilis
atgaacagttttacacattatgggcaatttatgaaattcacactgccagagccagaccctaaggatgtttgtaacctttgtggagagaatgttggcaaagataatttaatccaaggtcaggcggcaaatatttgctttgactgctcagatttagcgaaagaaatggcggatgaaaagcgtaagggaatggctaaaaaagaaatagaacgtatcgcagctgttatttctgctggtaataaaggattaattgatttaggtatggctactgcttatatgtacgccgagcgtttatataaagctggatatagaaaggtgaagtaa

SEQ ID NO: 302558 - DNA, 315 bp, Proteus mirabilis
atggataaatcaaggcggcagtttgaagagacaataaagcaacttagcgacccgtcagaatttgaatcaaaacttaaacgtgcgaataacggattaaattacgctgaccaatatgtagatttaatgtggattagctggcaagcatcacgcgaaagtgatgagccagaaattaaacatcaccaactaagagagctcgttaatactgcgagagatacggcaattaaatatcaagggtgtcaatgcttacgttcagcgttagaagcatccataagaaacagcttaacaagcaatggagtgaaaataaaagatgaataa

SEQ ID NO: 302559 - DNA, 477 bp, Proteus mirabilis
atggcacgaaaaactaaacgccaagcacaagagacaagacagcagattattgatgctgcacttaggctatttactgtgcaaggtgtttctgccacatcactttcagatattgcaaccgaggccggagtaactcgaggtgcaatatattggcactttaagaataaagtggatttatttactgaagcgtgtgaactcaccgacttaaaaatagaatcattagaattagagtatcaatcaaaatatccagatgatccactatttgtattaagagaattgcttatttacatattgacatcaattgtcgaagatccgaaacataatgcacttctagaaatatatttccataagtgcgaatttgttggtgaaatgacaccaattgttgaaatccgccgagaattatgtgcagccgattactctagaatagagcaatctttatttcgctgtatcgaaaaaaaaacaactcccagccaaccttga

SEQ ID NO: 302560 - DNA, 831 bp, Proteus mirabilis
atgagtgatatcgcgcccatcgaatggttgatagataatttacctgcagatatgcaaaatcatccatttgctcactcattaggctctattggtggtggaaatcactttgctgaattccaacaaattgaccaagttattaatcaagcattgtttacaaacagtggtattaataaaaaacaattattgctattggtgcatagcggttcacgtggtttagggcaatctattttacgtgctcacacagagcaatttggccatcaaggactggtcgcgaatacagacgctgccaatgactacttacaagcccatgaccatgctcttaattatgctaagctcaatcgccacttgattggccatagaatgatggaacaaattcatacacaaggaacggttattactgatgttaaccataatctggtagagccttgcgaattatataatcaacagggatggttacatcgcaaaggggcgacgcccgcccatcacgatattgtggttattcctggttcacgtggtgatcacagttatctcgttaaacctattatctctgaattaagcctccattctctaccacatggtgcgggtagaaagtggatgcgaactgagtgtaaaggccgtttatcacatcgatttacgccattacagctctcacgcacagcactaggtagccgtattatttgtgctaataaacaattaatttatgaggaagcgcctcaatcgtataaatcaattgaaactgttatagaaagtatgaggagtcttggtttaattgaggttatcgcccgcttaaaaccggttattacttataaaaccagtggcgagatagcataa

SEQ ID NO: 302561 - DNA, 234 bp, Proteus mirabilis
atgaaattattaacaccttgggaaccaggttctcaattattaacagattttgatattaaattaggcaagcttgcatcaagtataaaaaataaatcttgcacagatatagaaataaaaaatgcttgtcagactgccgacttgttaatatctaatatgatgaggcaagaccgaaatgaaaacagacgaatgcgtagaacgcaaaacaaaaaaagaaacgacaaatatcccagataa

SEQ ID NO: 302562 - DNA, 276 bp, Proteus mirabilis
atgaaaacagacgaatgcgtagaacgcaaaacaaaaaaagaaacgacaaatatcccagataacgttaaaagcaaagagtatgaagatgatgatatgttaactcctgaagaggcttgcattgaactaggaggaattagtactaaaacattatgcgattggaataatagacatcgtcacagaaaaatactcgcaccaatcaaatttaccaataaagttgttcgatacgagtacaaaaatataaaagcttttattgaaaaatgtagaagcacttattaa

SEQ ID NO: 302563 - DNA, 729 bp, Proteus mirabilis
atgaaaaagacaacgtttactgagcggctgaatctagccatgaaaatgagaggcttcacccaagctgaacttggtgaggcagtgggtatggcgcaacctagcgtctggaagctaacgtctgggaaagcacaaagctcaagaaaagcagtagagatagctaaagccctaaatattgatccagtatggctaaccacaggcgaaggtgtgcagcctgattttattagcaataacgacgagaaagcaaaagatggaacccctatagatcagttaaaatcgagagaagttgatgtctgggatagcaaaaccccgcttaacgatgatgaagtagaggttccatactacaaaaacatagagcttgctgcagggcatggtagcaacggtggcagtgatggcaatggatataaactaaggttttctaagtcaactttaagaagatatggaatttcagcgaaagatgtagcttcgtttcctgttcatggggatagcatgtctccagttataccaaatgggtcgactgtatttgttaatcaggctgatcatcgtatagttgatggcggcatttactttattgaacaggacggactacttagaataaaaatgctttatcgtcagccgggcaaattaattataaaaagctataactctatagatttccccgatgaagaagcagacccgaaggacgtaaaaatcattgggcgaatattcaactggtcagttatggcttattaa

SEQ ID NO: 302564 - DNA, 219 bp, Proteus mirabilis
atgagaaataaattaattgataaggctattggcatggtaggaagccaacagaaattggctgagatatgtaacgttaaacaaccttcagtatgggattggttacatggaaagaaaaaaccatctgccattagcgcgaaacgtattgagttagctaccaacggaacgattaaagctagtcaattacgacctgatttacatgaattatttggcgaaaactag

SEQ ID NO: 302565 - DNA, 834 bp, Proteus mirabilis
atgagtaatgttgcatacgctgaatttggtaatcaacgacggcaagagaggtcaacagtggcaaatcttgaagatggttacacaagaatagccaacgacctatttgaagctgttatgtgtgcagatttaacagcaagacaactaaaagtcgttatggcgatcatcagaaagacatacggcttcggcaaaaagttagaccgtattacaaatactcaaatagctgaaatgacaggcattcatcatactcatgtttgcaaagcgaagaatgaaatgattgctatgaatattgttatttcatcaggtaataaaattggaattaacaaagattttactgagtggaatttcaatattagccaagttagcgaaacattagctaagtcggctaataaaacattagctaaaacggctaattcacataagccaagtcagctaaacacaaaagaaactattacaaaagaaaagaaagaaagtaatacaccccttacccctcacgaggtgaaagggggagaatcggtaaaacctaccaagagaaaatcaactccaattaactacgatgaatatctcaatgcctacaacgaggaggttggcgacagactacctcatgctgtggaagctaacgagaaacgtaaaacacggatcaggaagataatcaaaaaccttgcaacggcaaacgttgatggttggcgagcctacgttagagcttttgttcgaatggctaagccattttattttggtgaaaacgacacaggctggacggctgatattgattatctgctaagagaaacaacgttgacgggtgttcgagaaggtaaatttgctgacagggggttttaa

SEQ ID NO: 302566 - DNA, 336 bp, Proteus mirabilis
atgaacattaaacaattacagcaacaaatccatcaacaaaataaatctgctggatggtgggataacccacgcgaaaaaggaacgttactctgccttattcattctgaaattagcgaggcgatggagggtgagcgcaaagacttaatggacgatcacttgccacatcgaaaaatggcagaggttgaacttgctgatgctgttattcgtattttggattatgccgaagcttttgattatgacattgaaagcgcaataactgaaaagctcgaatacaacaaacatagagcagatcatcagcgtgaaaaccgcatcaagaagggcgggaaaaaattctaa

SEQ ID NO: 302567 - DNA, 1377 bp, Proteus mirabilis
atgtatacattatcaatggatcgtgccatgaatagagattataaacagtaccaagaagatattactgatgatattaaaacgtgtatagaaacgctggaatgtcagccaatattgtttgtagggtctggatttagtcgtagatatgctgatgggttagattggcctagtctaatcaaaaagttaatatcagaatgccctgaagttgataagcaatttgcattctataaacaaaggaatgagtccttaattgatattggtagtattttgagtgataaatacgcgagttgggcatggggggatggtaatgtacatttcccgaagcaattgtttgacgagagctacaaagccagtatttatgttaaatatattatctctcaatattgtaaggagttaaaaataattaagtccgaacaatgcgcaagagagatcgagtcgctacaagaaatctgcccgcattcaataattactacaaattacgacaatgtgataaatgaaattttccctgaatatcaagatataattggtcaagaggtattaaaaaccagttacgatagtattggtgaaatatttaaaatacatggatcttgcgaaaaaccaagttctttggtgtttgacagggaagattatgacgatttctctaaaaagaaaaaatacttaagtgcaaaactacttacattttttgctgaacacccattgttattcataggctacagtgctgaggatgacaacattaaaagtataatctctgatatagatgaaattatatctgataatgaaacaataattcctaacatatacatgctcaagcgagatgagcaaataacagataaatcatacccattaactgaaataaacataacaacggaaaacaacaaaaacgtaagaattaaatatatagtggcaaatgattttacatgggtctacaaggcattcgcagctcaaccatcaatgaagaatgttagccctaaagtgttaagggcgcttttagcgcgtaattacaagctagtaaatagtgatataccaaagcatatagcccaacttgattattcgaggctgacctctcttgcgtgtgaaaatggggaattagaaaaattatacggcattacagacggtgattcatatgacgctttctcagcaaactattgttatgtcattagtgatttggcatcccagatgggttatagcagctggaattatgtccaacaattactacaaaaaataaaagaagtttcaggtattgatattaaagccacaaacaaccaataccatcaacttgtaacgacaggtaaaaaaggaacggtgcataagtactcgcgagaggctttgcagctcttgacgaaggcaaagaacaatgagccgtttgacgttgaagtatag

SEQ ID NO: 302568 - DNA, 291 bp, Proteus mirabilis
atggcgaacttacgcaaagaagctcaaggtcgtgaatgtcaaataagaataccgggtgtctgcaatggtaattctgaaactgtcgtcttggctcattatcgaatgcctggcatttgcggtaccggaataaagcctaatgatgtatttggcgcttgggcgtgtagtgcttgtcacgatgaatcagatagacgtactcactacgtcgatgctgaatacgcaaagcaatgtcatttagaaggtgttattcgtactcaggacattctcatcaaggagggtaagattaaggtatga

SEQ ID NO: 302569 - DNA, 192 bp, Proteus mirabilis
atgttcactgacttaatcgcagctattgaagaagcaagatatttaaaatacaaatcaggcggtcgagttaacttctgtgtaatccagattgctgaatgcatggaagtattatgcgggctgatggatggtgtcagggttttatatacaactgccaatgatgattatcatacagtattaccggaggcgagatga

SEQ ID NO: 302570 - DNA, 639 bp, Proteus mirabilis
atgagagaatgtaagccagatatttataggtatgtagcagactcacctcgaaaatcatatttaggcaaggcaaggaggctgactccatcacaagatagatgggtaagagcaatcatatctctgtgggctggagaaatgaaagatgatagttatcttgggttgtcttggggatctggaagcatctggcgatttgttactggatggtcaggagaaaatatagagcgcttcactaaggtattcgaacaactaaagaaggaaggttacacaggaaatgaacttgaagaaaaagccaaatcaatattatttccaaagcaatcactcagcaacatgtttcagcgcgccaacgatgtagatgaagctgattttgtagagaaagcaatattgaaagcgttcgacaagtccaatcctgtttatgtcgttgctaccgattactatcttggcagaaatacgatgcaaacactcgcaaattacattcaaaaacaagtagcaccttggcttaccactaaacaatgtattgatcgtgtccgttggtgcattacattatttaatgcgaagttatatatggtgctacaagatgaaatagcgagagaacgctcacaacttggagttgaatataaaaatatttcaaaaatcacttga

SEQ ID NO: 302571 - DNA, 219 bp, Proteus mirabilis
gtgaataaaattaaggttactattgctaagcttgatggctcagtctcttttgaggttcgtgagcaagataagttaattattaaagatacaattaatgggaagtgttcaggtgaatttcataaggaatatcttgtgaatagctcaacactttcattaacttctgtcattactgggtataaaggtaacaagcccgaaatatcaataaatgttattgattaa

SEQ ID NO: 302572 - DNA, 216 bp, Proteus mirabilis
atgtttgtagataaaaacttaaaaccagacccaatcaatcaaggatttgttctgggatggggcgttgttagaggaagcccttgggatttaaaaggggtttatgctacagaggaacaggccaagcaaaaagcccaatcactaggttctgattatgaagttcattttggttcacaccgattgcaaagtgacgattttgtttggagtatcgagtcataa

SEQ ID NO: 302573 - DNA, 768 bp, Proteus mirabilis
atgaaccaattagaattgccattaatttctaggcaggaaaacaatgtagttatttcacaaagagctcatgatggatatataaatgctactgcaatgtgtaaagcagctggcaagttgttagggcattatttggaaaattcaacagctaaatcatttctatctgagttgtcagccgatatcggaattccgatatcggaactaattcaaacagttagaggtggatttcctcaaatgcaaggcacttgggttcatccgcaggtagccatcaacttaggtcaatgggcttcacctaagtttgctgttcttgtttcaaaatgggtattcgattggatgtctggcgcaaagcagcatcaatcagcgatgccatatcatgtaaggcgttacttaattaatcgggaaaaaataccgccaactcacttttctatgctggatcaaatgactttaaagttattagctccattagaatctagagggtatatgctcccacaaaaacttatgcctgacatatctttaggtagattctttagcgatattctcagggctagaggttatgaccctgattcatttcctgtttatgagcatgaatttgatgatggaagaagaccagttgttgaggcaaggctttatccaaatgagttaatgacaatgtttaattttgaaattaacaactggataaagaataaatcaataacttattttaagggtagagataaagaagcattaccccatctgaatgacataatattagccttgccagccccagagtaa

SEQ ID NO: 302574 - DNA, 468 bp, Proteus mirabilis
atggcgttaagtgatatgaaactgggtgaaacaatagtttccgttggtattatcttggcaatgaccctttgtgtggcgtggcagggtaaccggattgataagctaaaaatttcaaatgctgaattaactagccaactctctcagcaggtagaaatcaacaaagactatgaaaagcgcatcaactcccttcgcgaactcgacacaaaacacactacggaactcacaaatgcaaaagctgaaattgaccagttgcgtattgctgctgagcgtaatcctgagcgggtgtacatccgagccagttgtccgaaaggcgaaaccaattcaacctccggcatggatgatgcaaccaccgcccgacctactgacaccgctatcagaaattattggttactcagagagcgaattgcagagtcagaacagatgattaaagggttgcaggattatatcaaacaagaatgtatggaataa

SEQ ID NO: 302575 - DNA, 183 bp, Proteus mirabilis
atggcactttctcaacacccagaaaaaatgaaaaaaggggtgaaaattggcatcctgaagataaagctttttgggaaaaaactggtcaaaaaatcgcatcgcgtaatttatggatttctgttccttgtctactgctatccttctgcgtctggatgctatttagtgcagtcgctgtcaatttaa

SEQ ID NO: 302576 - DNA, 300 bp, Proteus mirabilis
atgtcaacatacgataatgagaaattaaagttaatacgtgagtctgaaaggcttaatgtcaaacaagcggctgatttagtcggaattaactatgttacatatcatggatatgaaagtggaaaagctaaaatgtctattgaatctgcaatgaagtttttcaaacatccccgttttagaaaatatcgagattggtttatgtttgatgaaataaaccctgaagctggtcaaattgctccagctctcgcacacagtgggctaaacgacaatccatcttcccaatcaagcaagaaaactggctaa

SEQ ID NO: 302577 - DNA, 1098 bp, Proteus mirabilis
atgttgccagaaatgatcaccggtaaaagtagcatgccggcttttgtgttaattgctggtgatgaagatatcagtgccaaaattcaagggcgattaatttcgctttcattaacggacaatcggggctttgaagctgaccggcttgatattgagttagatgattctgacggcgcattaatgatgcctaaacgaggtgaggtattgaccttgcatcttggttggcagggtgaaaaccttattcataaaggctcatttacagttgatgagatcgagcattcaggtgtacccgataaaatgacattgcgcgctcgtagtgccgattttagggcaacactgaatgtgcgccgtgaaatgtcttaccaccaaaaaacattaggcgatatcgtcagaaccattgcagggcgtaataatgttacggcggtggttgatcctggtcttgatacggtaaagattgaacatatcgatcagactaatgagtcagacggtagttttttaacccgcttaggacaattaaacggtgccaccgcttgtgttaaaaacggcaatttgttgtttatggtacaagggggcaatactaccgccagtggtcaagcattaccgctagtacaaattacccgaagtgtgggtgatggacaccgtttttcattagtggataggggcgcttacaccggtgtgacggccaattatttaaatacccgtaaaccgcaagaaaaaacacaatcacaaattcgccgtagaaaacccactaccaataaaccgaaaaaagaagagcagaaacaaggggaataccttgtcggtgaagaaggtaatgtgatggtgttgtctcatacttatgcgagtaaaaccaatgctgaacgtgccgcgaaagccgcgtgggaaaaaatacagcgaggtgttgcctcttttagtattacccttgcgaaagggcgtgcggatctctttcctgaattacctgtaaaggttagcggatttaagcctgagattgatgaggcctattggacgttagtcacggtgagtcactcattaaacaatagcggatttaccacctcgttagaattagaagtcaaaagcagtgatatagatatggataaggaatag

SEQ ID NO: 302578 - DNA, 465 bp, Proteus mirabilis
atgatggcagcacttggggtatttgtgtttgagttacgcaccgtaccttatcaatccctacaaaaacaacaaacgtggcgacatggttttactcaacgtgtcgcacgccgaccggcacaacaatttattggccctgataccgatgtgatcaccttatcgggggcgctttatccttcattaactggcggtaaagtgtcgttgctggcattagagttaatggcagatagcggtaaagcgtggtcgtttattgatggtacgggcaccattcacggcatgtttgtgatcaccgatttacaacgcacccacaccgaatttttccaagatggtgctgccagaaaaattgatttctcgctgacattaaaacgggtggatgactctatcagtcagatgttaggggatttaagcgaccaattaggcatgatggccaatggtgccggtgaagcgatgaaaggagttttatcataa

SEQ ID NO: 302579 - DNA, 2835 bp, Proteus mirabilis
atgagtaataacttaaaattacaagttgtactgagtgcggttgataaattaaccgcaccgtttcgcagtgcgcaagaaagtaataaacgattggcgtccgctgtgcgtcaatcgcgtgactcgctaaaaaacctcaatcaacaagcctcacaaattgatggctttcgcaagattaaacagcagttaacctctacacagcaggcgtatcaatccgccacacaacgtgttgctactctcgccaaagaaattgccaatactgaaaatccgacaaaaaaacagttagaggcgtttaaaaaagcgcaacgggaagcggggcaactcaaaaccaaatatgagcaattacagcagtcggcacagcgacagcgctcagcattacaagctaatggcatttcaacaaaccaactcggtcaagcgcaacggcgactgaatagtgatattgaacgcactacgcaacagctccgccggcaagaaaatcagttaaggcgcagtgctgaacaagagcggcgcatggcagcggctaaatcgcagtatcaaaagacgctcgatgtacgaaataaaatggcgggcgccggtgccaccatgacggcaaccggtgcgggtatgttgtattccgccaaacaaaccttaatgccggggtacgagtttaatgtcgggatgtcaaaggtgcaggcattaacgcgcttagataaaaactctgatgaatttaagatgttgcgtgaacaagcgcgagagctaggcgcaaccacggcatttaccgccaaccaagtggcgcaaggtcaggcattctacgcaatggcgggttttaagcctgagcaaattaaaaatgctatgcccggaacactggcaatgtcattagcaggtgatattgatttaggtaccacggcagatatcggctccaatattttaaccggctttaagctcgattctgaccaaatggggcgagtgagtgatgtgttggtcggggcctttactcgttcaaataccagtttaaccatgcttggcgataccatgaaatacgttgcaccggtggcgtcagggttaggggttgatttagaaaccgcagccgccgcaacgggtaaattgggtgatgcgggtattcaaggttcaatggcgggtacttcattacgcgctatcttagggcgtcttgctgaaccaccgaaaatggccgccaaagcattagaagaactcggtattaaaacccgtgatgctaaagggaacttacgcgactttcctgagttattagctgagttggataagaaaaccgctaagatgggtaatgcgcaacgggcggggttctttaaacatattgccggtgaagaagctttttcggcgttatcggtactggccgaacaagcgggtaaaggggagttgcaaactcttgttgctgacttaaaacaagctaaaggtgaagcgcaaaaagtcgcgggcaccatgacggataacttaagcggggatatgaaaaacctgcaatctgcatgggaagatttaggtattcaaatttttgacggtattgatagcccgctacggcagatatcacaaagcattacccgtgtgatttctaaagtcggtgtgtggatgaaagaaaaccctgaattggctaagacgctgacgatgatcggtttagcgatagcgggcattattactacgctgggtattctctcgttatccattgcggcaatgttagggccattagccgccgcgaaattaagcttgtcaattttaggcattaaaggcggtagcgcgctcacactgttattaaaacccattaaattattaggcagtgcatttttaggattgggtaaagccatgttagctaatcctattttgttggctattgctgctatagcgggcgcgttttatctggtttataaaaactgggacaccattggcccctacgtttacaaggtatgggataccgttaaaaaatatactgctatcgcatggcaagcgctaaaagatactattaagagtgcatgggaggccatcaagtatatattctttaattggacaccgcttgggctcattattaaacattgggattcgatagtcagctacacccaaacaacatggacgatgataaaaactaaaatttcagatgtttgggaaggaattaaaacaacacttaaaaacggttggaataatattgttaagtctgtacaagaaacgtgggaaacgataaaaaccacgatatcaacaaaatggaatgaaattgtcgaagacaccaaagcattaccggctaaatttttgcagtttggtagtgacctgattgatgccattattcaggggatcaaaaacaaatggacggactttaaaaatagcattggggaattggcaaccgcagctaaagaagcactcacccctgagtttatgaaaagtaatgatccgaaagtgcagtctgcgttagattcgtacaacagcaactttgccggtatgtatgattccggcggttatattcctcgtggtaaatttggtattgcgggagaaaatggccctgaaattgttgaaggccctgcgaatatcaccagtcgtaaacacactgcgatgttagcagctgccgcattatcgttaggcagcgccttttcgttacaggcacaaaatgccccgttgcacccacacagtttgcccgttgaaaactatcgtcctgctccggctaatgtgaatattcaacaacagcgttatcaaggcgcgccggcacattatgaaattaatattcatcctcaaccaaaccaatccgcgcaagatattgcccagcttgttatcgcggaaattgagcgccgtgagcgtgaaaaacaagcacgattaaatagccgttatcaagacagtgaggtgtggtaa

SEQ ID NO: 302580 - DNA, 621 bp, Proteus mirabilis
atgagcaaatatagtttagatatccagaaaggaaaaatcggtgataatggtttggcagaaatcgcaggttgggttaagtgttatttagctcatccaattacgcgtgaatatatgggcgcaaccatggaaaatgtcatgtttgatgtttcattatctgcgggggcttatttagatgaaccaccattacccgaaaaagaaaatcaagccgttagacgtagagaagatggtagtacatgggagattgttgatgattgccgaggtttaacggcctacaatacgcaaacaaagcaacctatcatcattgattttatggggccattgcctgaatctctcacattgttaaaaccgaatagtgagtttgataaatgggatggtaagaactggattgttgacacagaagcccaaaaagcggcactcattacacagattaagcaggagaagtcacaacgcttagatgaagcagataacataatcacttatttgcaagaagctgttgatgttgacttagccacagaagaagaggctacagcactgcaaaaatggaaaaaataccgagttttgttaaatcgtgttgatatttcaacggcaccagatatcgaatggcctcaaaagccagtttag

SEQ ID NO: 302581 - DNA, 1827 bp, Proteus mirabilis
atgagcgctaaatttttcgccttattaacggtgattggtgccaataaactggcaaaagccacggcactaggcactaccttaaaaattacccaaatggctgtgggtgacggtggcggaacgttaccgatgccaagcgcagagcaaacaaaattagttaatgaaaaacgtcgagctggaattaataccctgtttattgattcaaaaaatgcgaatcaaatcgttgcagagcaggttatacccgaaaacgagggcggttactggatacgtgagattggtttatttgatgatgagggcagtttaattgccgtgggtaattgccctgaaacctataagccacaattacaagagggaagcggacgaacgcagactatccgcatgattttaaccgttagtcataccgaatccgttgagttaaaggttgatccctcggtgatacttgctacgcgtgagtctgtagacaatgctattgaaatagcgtcaaaatccattttagatactgttgaaaaagaatatgcaacaaaagacgaagtaaaaaagaaatttgacaaccgtaatatcgtacatgaaaaaggcgcatcaaaagaaaaagttattagtcaaaaaggcgtgacagaattatttcaacccaaaggcaattatcaacccgctggtaattatgtcactactgcgacatttaatttagaaatcaataaaaaaatagataaagcaagtctctcacagcaacttggtaatgatgtaaataaagtacctagtttagatttggtgactaaagagctagggaataaacaacctaaaggtgattatgcattaaaaacatgggttgataatatttattataaacgagatgacagtccttcatttaatgaaattagtgctacagctattcgagtgaatagtgttaacgtcgcgctaaaaggggattgctatacaaaatcagaatctgataataaatattctccgaaattaccctttgtatactcttcgggtgaggagtcaaaaatcatatcaccaaacaataaaatccttatttttgttaatgataatggaacaacaggagggtatgacagggatactcaagcaacagtctgggggtttgataaacgtggatttatgacaagaggcactgtgcattttgacagaatgtcaggtgtttattcacaatcacaggtagatgctaagttaaaagagtgcctaaatttaaaaacatcatcaaaacaatttattgcaagtgatatatatgcacccactttcattacaggctcgcagtatggagaacgttcctatttagaacataaaagtgatgagcttactattacccacatatcgccaaaatcaggggcaacaaatattacttgtagaaataaaagtggtaccttagcactattgggtgatctcgaagatgttaataatatccctgttggttcccctattccgtggtcattagctacagcaccctctggttatctaatctgtaatggtcaaacatttaataaatcaacatacccaaaacttgccgttgcttatccatcaggaaaactacctgatttgcgcggtgagtttattcgtggtttggacagtgggcgcggtattgatgcggggcgttcggtattatcagttcaaaaaggtaatagcttgttatccagtaatatttttggtggattgagttcatcggaatcaaataaatggcataaagcaattaattatatcggtattacaggtactgataatgacggtggttatggagttcaccagcaaatagaaggcgctaatggaaatgaaactcgcccacgtaatatcgcctttttatatatagtgagagcagcataa

SEQ ID NO: 302582 - DNA, 537 bp, Proteus mirabilis
atgaatattaataatgtcgtatctaacttgaatttattaaataatttatcaccagaatcagtgtattctttgttttcattttatgttgaagcacacgaatcattacgtgatgaggatgtacgttttatttgtggggaaaaaaataataaattatttataggcactcttggtgtaataaatggactgattaatgatggtgtaatagcaatggatattgattatgagcaaaaaaagataaaagaattttttgtttttaagaatccatttaagaatgaaaattcagtgaaaaatgaaatatttgatatagcgaaaaggattaaagaagaagctatattaaattcatgtaaatactcacttgcaaaaagcttgttttggaatcaggagattatcaaggtatgtgatgaaatggaaaaaataaaaagtttagagccggtcgcatacattacgaaagataagaaacaaataattttttctgatagcccaaacatgatgccacaggataaaacagggttaattcccctctacgatattcgataa

SEQ ID NO: 302583 - DNA, 684 bp, Proteus mirabilis
atgaaagtcaaggtaacaactgatttattgataagtttatataacaagttaggtaacttatatccatggcaaacacgttggtataaccacaggtttgagagaaatagatatttacataaaggacgtcaaataggtagcagttatttctttgctctagagggtttgttagatgcctgtctaacaggaagaaataaagtatatataagccatgtttgtgagccagatgatgaatttatctctaatgaaatggagattgttaaatgttttttaggcatagaaagcaataatcctgtaacaaaaatagaattagataacggcgcagtattgtattttttacctgagagtcttaagtcatgggttgatatcattggtgacatttatgtttcagaatggagttggtttcaagacccttattatattgtaagtctagttaagtcagtaagtttgaataaaaaatggagaagaactttttattcaagtcgttccaagttagataatggccatattgttgataatgattattttaaacatcataaaatttttgatgaggaaacgtattgggatgttgttccatctattaatatggagtgttataactttttaaatatggaaaatataagaaataatatgggtgatgattattttaatgaaatgattttgtgtcaatttaatgggaattattaa

SEQ ID NO: 302584 - DNA, 1467 bp, Proteus mirabilis; identical to SEQ ID NO: 289932

SEQ ID NO: 302585 - DNA, 795 bp, Proteus mirabilis
atggttaggggttttcctacagaaattaaagatataattactaatttgtgccgtatcgagaaaactatagactatttttttgattttaataaaatacaatcattaacagcatctaaaagttttggtggcattcctgatggcgctataaacggtagctggttttatgatttgtatagttgggggcgcgcaatgtatcccgacgaaagaatgaaagcggaaaatgaagatgattggaaacgaaatattgcgcacattgaatctgaggggttcagaaagtgcagacctattaatgtcatatattacgaatggttaaataggtttgttgcccctaatacaggcggttctcatcatgccgcattggtagtgtatcaatcaatcagagataaaattaaatacacaagagaaactattttagaaaaggtttctcttaatagttattatatacgaatgctggataatgaatactattcattcatcattaataatgatagcaatcccaaatccctatcggaaagtgataaatttattaatgtaataacagagctaatcagtacgcatatttcaattctgaaacccgtacattattatcagaacttaatgattatctttattcctaaagaatcattaaaaatagattccgaattatttaataactggattaataaagcacatgaccagaaaaaaataatcaatctgccgaactattttagattaccaaatgaatatcatacaaaaccttatttgcatgaacttcgttatctgaaaatgccaaatccaaattctatttttcaatag

SEQ ID NO: 302586 - DNA, 2772 bp, Proteus mirabilis; identical to SEQ ID NO: 289875

SEQ ID NO: 302587 - DNA, 366 bp, Proteus mirabilis; identical to SEQ ID NO: 298958

SEQ ID NO: 302588 - DNA, 525 bp, Proteus mirabilis
atgtcttatattgcaactgcaacgaataagcacttctattacctcgatgtacggatcgaggatatagatattcaagacatcgcgacaggtttagctaatgaatgtcgctttaatggacagattgataatttctattctgttgctcaacactcagtatatgtcagttatttagttgcacctgaatatgctttagaagccttacttcatgatgccagtgaagcctatgtaaaagatctgccatcaccgcttaaaaggctattacctgaatataaggagatagaaaaaagaattgatactgttattcgtcaaaaatataacttgccacccgttatgtcggacgctgtgcatttagccgacttaatgatgttagcaaccgaaaaacgagatttagaaattgatgtgggtagcaattggctaatgcttgaaggtattcctacgagtgattttattgttaatccattaaccccactacaagccaaagttttatttttacgtagatttaatgaattaagtaaaaggagctaa

SEQ ID NO: 302589 - DNA, 450 bp, Proteus mirabilis
atgacttcttccaaaaacgagaatgaagaaaaaaaatctatgatggctgacatctatggagaagttgttttcttaattattcctgttgttgcgctggtgttcattacaactgtaaaaaattctatttccattgaaacaatcatatcttctctgctaacgacatctgattggtcgattatgtcatccgtgatatttggtcaatgtgcatacaaagtatctagggttgtaactcttctaggaccaaagactgacggaagaaggtatgccttctatctcgccagaagattatttttaattacaatctctttacttgtttatgccgctgtaactttttctcctaacttgtaccttggcgcaattcaaataatcctattctttttgtctatctattttttctttgtagatagtgcagggtcttatgtcttactaaatcgaaatagctttaaataa

SEQ ID NO: 302590 - DNA, 882 bp, Proteus mirabilis
atgaacaacgctgtagctataaagtttaattacaataaagatagaagtgaccctgaagatattctcaatattttaactggttacgttaaattttataaaagaattggcttgatatcattatcatcaattaacgaaaaagatgatgctatttttgaattagttgggctccaaaacgggtcggctatagcatggattaagtgtgtaaaggataaatgggaaagtcttatatttagatcagcaacatccctagcagacagtatgcttataaaccctgaagtatcaacgagagaggatatcgagtcctattctgatgttatttcagcaacaattattaataattcaagtgaaagtataagagtagaaccgtgtatagatctagaaatgctgggaaaaactttatctgattattcagtcttgagctctaagcttcacgaaaatgaatcggctctaatcggaattggaacaattggcgacactgactttagtgacttcaagaaattaaataataggtttgcttttaatggcaatgttgaagatattctttccaatgtaataaaacaccacaaaagaaaatctaaatttcatgtaaatgtcttagcaaacaaaggggataatatttggaaactagaagagctattaactgaaaatgtatttgcagcaaaagttgcaaataatgattggctaggtagttatcagtctggacttatttctcctattggaccaaatgatttgatggaagcgattatagaatatgatgaaatcatgccagcaaaaggaaagaaaaaaacaaaaagtaagtgtaaaaatgctaaaataatagaggttattaatatcgaaagaaatgcgggtgtacaagatgacttcttccaaaaacgagaatga

SEQ ID NO: 302591 - DNA, 477 bp, Proteus mirabilis
atgagtaatcaatcaataaaacaggtagtgaaagaaatgtgcaaagcactgccgggtggacgttctgctatggcaggggctttaggtatgtcactcgagacgtttaataacaagttatacgaaaaaaatggctgtcgtttctttgatattgatgaacaagaagccatggaagacatttcaggcactaagttgctggtggaatatcatctagatcgccatggcatgagtgcattaccaaaaatagaagcggaaaagatagatcaagtagagctatttgatatgcgaatgacattggctgctatgcaaggatcactcgccgttttaattcaagaaagccttgttgatggtgttttaacggatgaagaaatagggcgtatttatcgaaaagcagggaaagtttttgcgtatgcaattgggttcttggattcactgaaagtgttatacggtgaaaaacaggaagcgactaagaaagggtga

SEQ ID NO: 302592 - DNA, 180 bp, Proteus mirabilis
atgcgaaatgaagatcccaatcgtcttgatcgctattacagaaactctcgagggctccttgttcatgtcattcgttatgatcgagaaaaacagcgcgttatttttatgattgatggttgtgaatacgaacaatgcgagccagttcaaagatttaaagagagatatacccgagttaagtga

SEQ ID NO: 302593 - DNA, 1065 bp, Proteus mirabilis
atgagtgttaaattatctagttatgtttgggatggttgcgcccatgcaggtttaaaactcacatcagtcgctatcatggcaagattagctgatttttctaatgatgaaggcatttgttggccttctgttgtgacaattgctcgtcaaattggtgcgggtgaaagcacggtgcgcacagcaataaaacagttggaaaaagaagggtggttaaccagcgaaaagcgtagaaaaggcaatcgcaacgcaagcaatatctatcagctgaatgtagagaaactataccaatcagcaaagaacgcactttctcaaccaataaaatctgacgcgtcaaaatctgatgcatcaggagttgacccatcaaaatttgttgcatcaaattctgttccctcaaaatcgagcaaaaatagggattttgacccgccagctcctgagggcgatccatcagtaacttcaaaatatgatccatcaataaattattcttcgtcgcagaattctgacgcattcagcgaccagtccaaaaatgattttttaactcgttatcctgaagctgtgatttacagcgccaattttcaaaaatggggctccgctgacgatttgaagtgcgctaaatggctattcagtcgtaaatgcgaagtgtttcaagagatgggattaaaaacgcctaaagagccaaatttcactgattgggctaatgatattcgcttaatgacaacgattgatgggcatactcacaaagaaatttgtcagttctataaacgaattacgcaagataatttttggaaaaagaatgttcagtgtcctcgtacactcagggctcaatgggatgatttaaccttacgtttggcgggtaagaaaaaaatcacaatcgattccgtagagcgtgatgaaacattccggcttatctggggtactggttggaaacctaaaaataaaatccaagaattagccgctattcaggcaaagaaaaatggtctaggccgaatgaatgaggttgcaggtttagctgcgtggcgaggtatttggcaacaagtcgcggaacaagttgctcaggaagttttgctataa

SEQ ID NO: 302594 - DNA, 807 bp, Proteus mirabilis
atgaatggactaattgttattgatggtgttcaaattcgtcgagataccgcagggcgttattgtttaaatgaccttcatcgagtctcaggtggtgaaaaacggcatcaaccgtcgaattggagtgctttgactcaaactaaagagttggttgatgaaatttcaaccgctcctgagatcacaggagcggttcccattgtgaccattgttggtgggcttaaccaaggaacgtatgtttgcaaagaattagtgtatgcctatgcaatgtggataagtccttcatttcatttaaaagtgatccgtacttttgatgcattgataacacagcaacacgacgaaaagttagccgataaagttcaagctggagtcatattgcttgaatcgatggcaaagagcctgaatttctcaaactcttcaaaattaggggcgtatcaaaaattacaagtcatggcaggcttacccgaattagcccctgtgtatgcgattgatgcaccaattggttcaatggatggttcaagtcgtccaacagtagctttatcaacactgattagaaaacatcaattacctatttcagcccaacaagcttataagcggttggccgatctcggcattgttgaacgtttatctcgtccaagtacgaaaaccgcaaacaaagtgaaagagttctggtcagtgactgcgcggggctgccagtttgggaagaacatgaccagccctaataaccctcgtgaaacccaaccccatttctttgaaagtaaaacggatgaattgatccgtatggtgatgctgaataaacaggtgagtgcatga

SEQ ID NO: 302595 - DNA, 1026 bp, Proteus mirabilis
atgaaattattattaaccccctatattcagcccgatcttggcgttgttttattgaagcctgaagcggagttgcttgagcaacttaaacaacattctcgcgtaattattagtgatgtaccaaagagtttgaataaatggccttctggtgcattaacagggaacgaacagccattattgaataacaatgacattattggctttttgaataatgaaaaggtgctccaagctatgggtgggcaggcatcgatgaatatgtggataggcaggaatatccattgctgccagatcaacgatgaacatgacagttatcatcatcatgaattaacaaccacatggcataaagacggtgtgatacggacttgttggtatcatgataatcatattcgtaattcatcggcgggctgggttgctgagttggctcataaaaatcgtattgcttggatggtagacactattcgtagtcatttgagattagattatagccattcgctgacgatacctgatttttttgcttttgccgtgatgcataaactggttgatgaattacctgatgccatattgcgtcgtattctaaattggcctgataaacctaaagagcgcagggtgcatggtggttttcctgaagctgatattgttccaaatgaagtgacagcactatcagcaatgaatgcgcgtttagatgttataaaacccgttattaatgtagctgtcgatcctgaacctccagcctcatttcttcttaaacctaaaatgcgccgttgggagaatccccaatggcttcaatgggtaaaaacacagccttgttgtgtttgcggacaacaagctgatgctccacatcatatcatcggccatggtatgggaggcatgggaacgaaagctcatgacttattcactattccattatgtcggcaacatcatgatgagttacatcgtgatcccaagtcgtgggaagccacttatggcaatcaaatcgaattgttattttcttttttaaaccgttcattaggaatgggagcattggtttaa

SEQ ID NO: 302596 - DNA, 795 bp, Proteus mirabilis
ttgtcaagaacagatattacaagtgaatttgatatctctgaaataactgcaactagaataatatctaaatataaagaattaagagagaaaaatctctattatgataataaaagcaaaaagtttgaattaaatgaattagagtatcaatctcttgttgattttagctctgaagatgcactaaagatgctatcagaaggttttgataaaaataagttcgttagaagtcgaaatattatacgatatgaaaatatagacttcattcagtctcctttagaaaaaaacaaggtagccataataacaagagctatatttaataaaaataaaattaaaattaaatataactcaacaactagtaataataaagaaaatcgaattttatcacctctagtcattttatttgatggtagaaattggatattcagggcttaccatgaggattctgacacggaaataaaatataaaaactttaatttttctcgtataatcgaggcagaaaaaaccaatgaatcaatagattataatcaaaccttagattatgatgatttgtggaacatgaatctccctattgagttagaaattaaccctaaccttaaaaaacaaaaaaaagatgaaataaaaagagatttcggtattaatagtttagataataaagtactaatgacttcgagagcagcatttgtctggataatattaaatcaatggttggtttgttatgaaaaggatatagagtctgacaatcattataatttcattttaaaaaatacagacatgttaaagtcttacaaagctatctaa

SEQ ID NO: 302597 - DNA, 537 bp, Proteus mirabilis; identical to SEQ ID NO: 297637

SEQ ID NO: 302598 - DNA, 312 bp, Proteus mirabilis
atggtggaaaaaaataaggttatcttagatgaacagtataatttatttaaagctaaagatagctccttctatatttatatatggaattacggtgatggatatttagaagaaggaaaatacgatcgattatgttttactgaaattaaaagtaacaaaaaatgtatagaaaaagataaagtgatgtcaataatgtattctttaaatgaagaggaaattaggataggtaattctgcatatattaaagataaaaatggttcttttataaagaaagacaaggatgctaatacaactatcactgcaattcttgattaa

SEQ ID NO: 302599 - DNA, 531 bp, Proteus mirabilis
atgactaatgcagtggttatccctgaatttaattttcaacaaatggttatggcatctaatggtcaagtgtttacgactagcaagaagattgcagagtattttggtaaaacacacaaaaacgtactgaggaaaataaagcaaacaatcagtgattgccctgaggaatttgctgggctcaattttgagcctactgattacattgataaaaatggcgatattcagccaatgtataagctatcgaaagacggctatatgcttctggtgatgggtttcactggcaaagcagcgatgcttattaagataaaatttatccaggcatttaactggatgcatgagcaaattaatcgctggaaagatttaggcgaagaggctcaacatcgtcatgcattaaaagcggctaaatcagaattgaaaggtcgcctcggtagtcagttaatgaataagcggaagaaagagaagaaagcattgcaattggaatatgagcaaatactttcactcactcaaccaaaattattatttgtagatgaatag

SEQ ID NO: 302600 - DNA, 240 bp, Proteus mirabilis
atggatagaaaatctgaagagttctggttagcagaaattacaactgaagaatttgaacgcataggtggaatacctggaataaagctcaaatatagtgaagaaataagtagcatattggaaaaagtaaaaaaagaatacggtccgcttgattcctataatgtaggcgagccagtttgcgcgcctgtcggtagccccaaaaaaataggagttaaggtctggtactttaataatgaacaatga

SEQ ID NO: 302601 - DNA, 345 bp, Proteus mirabilis
atgaccgagaatgaatggttggacggattaagaggattgcctgacgaagcgatactaaaacttcattttagtcttcaagaaaagataaagaagcactataaaatgagagataaagcgaataatttaaataaggccattgagtattgtaagcaacaaatagcattgtctccgttagccatatcagcattaaagcgtaatcaagctatgtataatgacggtgagttcttcgctccatcccattatgggtataagcagtattccgttattctgaaaaagaaaaaagatttagatgaactcgatagaattaagaaaaaaatgataaatgaagggtggcgcattagttaa

SEQ ID NO: 302602 - DNA, 381 bp, Proteus mirabilis
gtgaggaaggttattttatccactctaatggtgctgctttctggttgcagtgagcaggggaaatatgatggtagttatacttgtgatgtatctcaggcagcaaatgattatccatcaataactaattccaaatatgcgttccctaagacattaaccaaagctgatgtaatcatcaaaaaaaacattatgacaataaaaggatttattttagaagattatgttagtggagagttagcagaagataaaaaagataatctaataaacgtaaaagataaagttacagtgtcaatgtcaagtgatagaaagagtgtatttttgctatacgaagaaggtgatatacctgtaatacagacacttacaagctgtgaattaaaaaactag

SEQ ID NO: 302603 - DNA, 786 bp, Proteus mirabilis
atgaataactttgttataagtttatctaaaaataatgaaaagcgtaggttgcacattaaagaacaattttcccaaaaatctattccatttgaattttttgatgctgtagataaaactaagcttaacatcgcaaatgaacttggtataaattttggcatatctactttaactgataatgaaaagggatgttttctaagtcatatctctttatggaaaaaggtagttgatgaagatatttctgtgattggaatatttgaagatgatatttatttatcaagagaagctgacaaattcttatcaaattacgaatgggttgatcctgactggcatgtggtaaaaatagaacgtgccgatgaaaaagtaaaaacttcaatatttaaattaaaaacagttaaggacagtggggatgtctttagactaaaagatgaacacttatgtgcgggaggctatattataaccaataagggggcgagattcttattggataaaatgaataaatatttaataactgaacctatagattacgaaatatttgataattatataatagacaataattatattgtatgtcagtttatacctgcgttatgcatacaagattttactctaaataaaagttatgataatttcccaagttcattatttgaggggcgaataataaaagataaaaaccaccccaaaacagtaaataataaattattacgcgaattaagcagagtaaaaaaccaattaataaaccttatttttaaaaaacgaaaagaaagaaaactaccattcaatatataa

SEQ ID NO: 302604 - DNA, 4830 bp, Proteus mirabilis
atgaatataatcttttttgaaaagaattcaaacgagaaagtacaattacaacctcatgctaagcatactataacggcgaaagcaggggatgtgtatcagttaattgattcagatactcaactttctccattagatattcaagcgcatcgtaaatcggatgatcttattttatctagtaaagaacaaaatatagaagttgttattaaagatttttggcaagaatgccaaccaggggaacaacaatgttacgccactttaaatgttttagattcaaatggtgtaatgggacaagcaactattactcaagatggtcctgttttagaacatttagttgctggtgaaacaggtactctttctgataatgatgatggaattggtctatttttatgggttgctggttcaatcggtagtgcattagcgatctttttagctaatagaaatcatggtggtgacaataataaaggtaatgaggctgatattactgcgccgagtaagccaggattaactgctgaagatgatggttctgtttctatcgatttaccaaaagatgccaataaaggtgattctgtagatgttacttttgaagatgaggatggtaattcaaatactgtcacattagaaaagggagataatggctggacatcaagtgatcctgaattaattcctgatacagataacaatcaagtcactatccctaatgataagataaaagataatagtgatgttaccgcaagtgcgaaagatccgagtggtaataaaagtgatgatgttactgtaacagccaaacctgatcccgtatcagatatacctgttttaagcattccagaagttgacgatggttatgcgaatgcagaagagctgaaagacggtttacaagcagaagttactttgcctgcgggtacggttgaaggggcggaaattaccttaacggtcactcgtccagataatactacagaaacgattacatacactgtaactaaagatgatgttgctgcaggtaagatttcgattgatattcctaaagatgcggtacaaaacggccaaaacagtgtcgatgtcagcataactcaaggcaataatccagccaaaccaggaaacaaagtagattttgctgttgatggacaaatcccgggcgatacagatggtgatggtacggtggataccacaccggtggtgaccattccagaagctactgacggtgtaaatgctgacgagctaaaagacggcgtacagacacaagtgactgtaccgggaggcagtgcggcaggtgacacactgacactcactattaccaaaccagacggctcaaccgataccgttgaacacacactgactgcagatgaagtggcggcaggtaaagccgatgtgactatccccgcagataaagtgacagcagacggtaattattctgttaccgcagaaattactgatccggcaggtaataccagtggtcaaggtaaacctactgactttgctgtcgataccgtggcaccgtcggctcctgtattaaaagcagaggacgatggttcggtttcagttgacttaccaacagatgccaataaaggtgatacggtagaaattacctttgaagatgaaaagggtgataagcacacggttaccttagaaaaaggggataacggttggacatctgatacaccggcgttgatcccagacagcaacggcgataaggcgaccattcctgcggataatgtaaaagacaacagtgaagtaacggggattgccaaagatccgagtggcaacgaaagtgacccatcaacggtgacttcgaaaacggacggtgtcgctgatgcgcctgtactgactatcccagaagtggctgacggttatgcgaatgcggatgaactgaaagacggcttacaagcagaagttaccttgccagcgggtacggttgaaggggcggaaatcaccttaacggtcactcgcccagacaaaaccactgaaaccgtaacgcatacagtcactaaagatgaagctgctgcgggtaaagtatctgttgatattcctaaagatgcggtacaaaacggccaaaacagtgtcgatgtcagcttaactcaaggcaataatccagccaaaccaggaaacaaagtagattttgctgttgatggacaaattccgggcgatacagacggtgatggtgtggtggatacaacaccggtagtgactattccagaagctacggacggggtaaatgctgacgagctaaaagatggcgtacagaccgaagtgactgtaccgggagggagtgcagcaggtgacacactgacactcactattactaaaccagacggctcaaccgacaccgttgaacacacactgactgcagatgaagtgacggcaggtaaagccgatgtgactatccctgcagataaagcaactccggatggtaattattctgttaaagcagaaattacagatcccgcaggtaacacgagtggtgaaggtaaagcaacggacttcactgtagataccgttgccccatctacccctgtattaaatgctgaggataatggctctgtttctgttgaactgccaggggatgccaacaaaggcgatacggtagaaattacctttgaagatgaaaaaggggataaacagactgtaacaatggagaaaggggataatggttggacatctagtgatcctaatttgatcccagacagtcagggcaataacaccgctattccatctgataatgtaaaagataacagtgaagtaaccgcaatagctaaagatccaagcggtaatgaaagtgctccagcaacagcaacgtccaaaacagatgtgctaccgacagtgagtattagtgttgatacaacatcagtaaatgacaatggagataagattagtgctgatgcttctgtttcgggtgaaataacagaagttcctgcaacaatagaggacaaggatgatactaccggattagtatataccgttgctctagattatgttgcagcacaggatgtgaccgtaaccataaccttaacaaatgatgcaggtcatgcaagtgcgccggattattcaacgcttgcaggctctcagcatgatgggaaaatcgccctacatggggacactggtaaagtaacctatgatggagcttcaactgtaacggttgttattcctgctggatctaagagtgtttcatttatagttgatccaacaatggaagctaaccaaaatgcatttaatgctgaaggtatggagaaagttgttgcaaccattacgggaacatctaataacgctaccgctgtaactgatacagtaaataatgcaggtgcttctgctacgggggttatttatgatggcaaccctatttcattacgtaatctggacggcgattttacactgaagtattcattatcctcatcagtggctgaaaatggggactttggatataccatcggagttgatagcggtaaaaaagatcctaagctaacgacagattacaatgatacgatttatgttggttattatcaggatggtagcgaaacttcatcatacagcaatcttgctaactcgcaggataatggacctgatggcacaaaaacagatggtaatcaaagtattacaactgttgatttaggtgctggtgatgacctgatggtgatccgcggtaatatgttaaccaatacacgagtctatgctggtgaaggtaatgatacctttactatggacggcatgaatacagcattacgttctatgtatgctggtagttatctctttatggaatctggtaatgataccgttacgattaaacgtacaggggtaaccaatgctggtcaaatctatcttggctcaggtagtgatacctttactcaaggtgatgccaatgatcaaaataataccgaattgtccggtttattagatctgggtagtggtactcaagataagtcaaatatgccaaatgagtatctttctgtttatcaggatggcagtaatttaagtttaggtaatgacaataacattgatgcggtcacagatgttaatactgtcactatttatggttctgtctccggtgaaattttaggtggatatggtagtgataatatcactatcactaaaaatctgactggtaatgtttctgttggtgataatacagacactctaactgctgggtggatttatggtggtgccactgtttctatgggggatggcaatgatacggttactgtcactgaaggtgcgtataacacaactatttcactaggggcaggagatgatgtgtttgatgctactgctggtgttatgggggattctgttagcgcgacattagtgaatggtgaagatggcaatgacaccataaaattaggcacaattggtaaaaatctgacagttgatgcgggtgctggcgatgatactgtgattttgacaaaagattatgatccttcacctataggtaatcagggatatattaatgggggagagggaactgatactttagtcttatcaggtacgattacggtaaatatggccactaagactgatgaaggtattgctaatttcgaaaaagtcgatatgacggttaacagtgagctgaaagtggacaatagctctcagactattaagttaaccgcatctgatgtgttgggaatgaatgcaaattcaacgatttatatttccggtgatgctaatgataaggtggatttaggtgccgatggtgctggaggtttaggtacatttacagctactgccactacaacaaaagcaaccgcattagatggtactgaacatacttacactctttatagcagtgcaagtggtgctaatgtctatattgataataatattatcgataatggaggcgttatttaa

SEQ ID NO: 302605 - DNA, 756 bp, Proteus mirabilis
atgaaaatattcgttataaacttaccaaaagacaaagaaagaaaagagtccattcaacatcaggctgataaatttgggttaaatgtagagtttattgaagcagtgaatggaaaaggtttatcagaagatgaaatcaacatcctaagcaaggacttccatcaacatggtatgactcatggagttcttggttgttcattaagtcatataaaaatatatgaaaaaatgataaaagataatatagatatagcattaattctagaagatgatgccttactgaatgagaatattattgaatcatataatttaattgaaaattataattataagaataaacataaacctaatgtatatcttttaagtgtagtaaatgaatatattgatacatttaaagcaaagctctccaccaaatataatttagttaatgttattgatgcagattatgcctatggatacatgctcaatatcaaagctgccaataatcttctaaattttttaacaccagtttggattgaggctgataagtggagatttatgagagagcgaggtgccattaacttaaaagcgattattccacatgtgattgatgttacccctttatcagaagtatcaacattagaaagcgaccgttcaataacgctagaaaaaagaatagcattctttaatgaacaatataaaaatagaagtttatatgtaaaactcagagcctttctttggagaatttttgttcgtagctgggttaaacgtataaaaatataa

SEQ ID NO: 302606 - DNA, 1143 bp, Proteus mirabilis
ttgaaaatattacatgtaataaatctacaaggttttggtggcgctgagcgactttttattgagtatataaaaaatagctcatttgataatgaaatattgtgcaccagcaactacttaaataaaaatttaacttcagaacttgaaggttttaagatcacttatgcaaataaagttgcttcaacatcgataaaatatccgacttttttaagaaaatttattcttacaaagaaaatagaaaaatccaaggctaataaaactatcatttgggattttatacctagattatcaagaaaacctaaaaatacagatcttatctattatgatcatggttgttcttggcaatatgatattaataataaaacattaaactttttccaaatactagattcagcgattgcagtttctcatgcatcaaaacgtataatggagctaagatttaatcccagcatagaaataaaaactgtaataaataaattatcctgcaatacaataaaaaacaccaaaacaataaaaaataaagaaaaaattgtattagggacagcatctagattagtaggaataaaaggtattggtatttcaatactcacattaaaaaaattattagataaacacataaaagcaaatttaattatcgcaggagatggtgagcaaaaagatgatttgtataatttagcagtaaagctaggaattgaagaaaacgtaagcttcattggttatcaatccaatatgagcgatttctactcaaaaatagatatatatatgagtactcctattctagaagcttttgggttgtcatgtatagaggcgctatctaatggcattcctgtaatatttcctatgtctaatggtcaacctgaagcaataaaagataagtattgtggtgtaggaattattcccgatataactacagaagaatattatcaacaaactggaattaaagctgattgttcatatgatgcttatgacccaatcaacgattgcttaacttcacctaaattaattgatccaaacaagtgtgctacagctgtgcaatatgtgataaataattatagccaactaagtaaaaattcattgaagtggtcaaaagaaactatgaattatgatttatttataaaagaatttgaactagccattttaaagtaa

SEQ ID NO: 302607 - DNA, 327 bp, Proteus mirabilis
gtgaataaatacaccgaactatctgactttgagattaataaaaaggttgctgagtatcttaaattaaacacaattgcatacgaacgtactgaaatagttttgtttgatgatatggatgcaacgcctttcgacccttgcaatgccccatctgacgcatggcgattaatactagacgcaaaattatccattcaccctgactttaataatgactgtaattcatggattgttcgtaacgtccatataccaatggtaaatgaaaataatttagcacgtggaattagtattgcttatttattaatgaaggatgcggagaatgaaaaaatatga

SEQ ID NO: 302608 - DNA, 603 bp, Proteus mirabilis
atgaaaaaatatgacttaatattgtgcgatccaccttggccttacaataacaaatcttcaaacggcgcagcagataatcattacaacaccacagatttatactccctctccagattaccaatagaaaaacactcctctaataacgctgtactctgtatgtggtacacaggcaactttgcactcgaagctattaaattagccgaagcatgggattttacagttaaaaacatgttcgggttcgcatgggttaaattaaataaaaacgcaggagatagaataaataaaaaaccgccagaagatttctttgactttatggaaatattaaacaacgagacaaagattaattgcggtaattatactcgccaaaatgtcgaaatgtgtttaatagctacaagaggaaatggattacctcgtcaatctgcaagtgttcgacaggttatttactcatgcttaggtgaacacagcgaaaagccaaaagaaatacatcatcgtttagaggaattatacggagatgttcatcgactcgaattattcgctcgtgagaaatacggtgattgggatgtatatggcgaccaagcagaagaaagcattcaattaatatag

SEQ ID NO: 302609 - DNA, 195 bp, Proteus mirabilis
atggatattatcgactcagcaaatgaaacaaacgaattatatattcaagtgtcattatcaaatcgcaaggtagcaattaaatcatatagcggaatgtgtatctggtgtcacgaagaaccggtcgcacctaatagcgcatactgcagtaaagattgtggcgatgatcatgaacagtataaaaggaagaatggatag

SEQ ID NO: 302610 - DNA, 207 bp, Proteus mirabilis; identical to SEQ ID NO: 286311

SEQ ID NO: 302611 - DNA, 465 bp, Proteus mirabilis
atgaagtattggaaattttacattgtcgttgtgatagtgggtattgttgctggtggttgtgcgctgattaatgcacaagcgaaaagaattaacacgctgacagaaaacaacaaagaactgactaccgcactcgaagagcagaaggctatcaacgttgactatcaagctcgcatcactcgattaaatcaactcgatattaaatacactcaggagttagccagtgcaaagaatgaaatcaacactcttcgtgatgctgttaactctggtaataagcgggtgtacgtcaaagccgagtgtccagcagtcaccaagaatcccaccgaaagcggaagcgatgaagccaccgcacgacttaataaagcagttgaacaagattatttacgtctcagagaaatgatagtcgagaacgaaaagcaaactttgtatttgcagaattacattaacactgaatgcttttctaagtag

SEQ ID NO: 302612 - DNA, 507 bp, Proteus mirabilis
ttgctgacaaaaggaaaagtaagatcacttcttaactatgacaaacaaaatggtcaatttatctggcttgatagtaaaaataatcaaattaagaaaggagaccaagctggatatatagatgatcagggatatcgaagaatatgtattgaaggtattgaatatagagcgcataggctggcttggttatatgtgtttggttttatgccggaaatgatagatcacattaatggtatacgttcagataatagactaagtaatttaagagaatgcaccagctcacaaaatgcaataaatagaaaaatacaatcaaataataaatcaggagttcctggtgttcattggaataaaagagaggggaagtggaaagcttacgcaaaaataaaaggaaagaacattaatctaggaacacatgtaaataaggaagaagctataaacgctaggctggagttttgtaaaaaagaatatggagagttttatcctcaatgcaaccaccgcccgacctactga

SEQ ID NO: 302613 - DNA, 381 bp, Proteus mirabilis
atgacactacctgatttaccatcagctcagaatgaataccaagcaacattatttgcgaaggcttatgcagatagcattaaaacatactctcaattgatgcaactcaagcgcaaacggatacaagcacaagaagaatcagcgcctgaatggttcttacgtatggtagatattgacatagattacatactttttcgtatagaacaacttgaactctggggatgtgatgatgaccctagagcgctagcatcaaatattgaacagcgtattcgcattgtttttgacatggtatctaactttttaaaaccatcaagaatgctatggggaagcattaagcggacagaggcgtggcttgctgaaggtgaaagggagagaacactatga

SEQ ID NO: 302614 - DNA, 495 bp, Proteus mirabilis
atggctggcactccgggcaaatctggtcgtcgcccgaagcctaccgctagaaaagagttggcaggtaatccggggaaacgagtacttaataaagatgagccagtatttacgccattaaaaggtgcatcgccacctgattggttttttgagcataaaattgatatggctattgtgatgtgggagctcacagtgaaggagttatgtgggcaaggtatcttatgtataactgatcttgtcgtgcttgagcgttggtgtgttgcctatcatctttggcgtaatttggtgattgcaatcatacgtgatggtactcgcttcgttggtgctatggggggaccagtaaaaaaccctgatttaacggcaaaaaaagaacaagaaagtgaaatggatcgtacaggcgcaatgttgggtttagatccgagtagtcgtcagcgattaattggtcttgcgggacagaaaaaacaagataacccctttatgaggattatttcatcatga

SEQ ID NO: 302615 - DNA, 1731 bp, Proteus mirabilis
atgagccgtaaatcttacccgaatgtcaatgcggcaaatcaatatgcgcgcgatgtagtacgaggcaagattgtggtatgtcagtatgtaattgatgcttgccagcggcatattgatgatatggcgcaagaaaaatcgcaaaaatttcgttatcgatttgataaggatttagcagagcaagctgcaaagtttattcaattattgcctcacactaaaggtgagtgggcatttaagcgtatgcctattacgttagaaccttggcaactatttattgtgtgtagtgcctttggatgggtacataaaggaacaaaacttcgtcgctttcgtgaagtgtataccgaaattccgcgtaaaaatggaaaatctgcgatttcggcaggggttgcgctgtattgctttacttgtgataacgaatttggcgctgaagtatattctggggcgacaacagaaaaacaagcttgggaggtttttagaccagctaaattaatgtgtaagcgcactccattgttaatagaagcttttgggattgaagtcaatgcgaaaaatatgaaccgtccagaagatggggctcggttcgaaccattaattggcaatcctggcgatggacaatcaccacattgtgcaattgtcgatgaatatcatgaacatgattctgattcactctatacgactatgttaacgggaatgggagcgagacgacagccattaatgtgggccatcacaaccgcagggtataatattgaaggtccttgctatgataaacgtcgtgaagtcattgaaatgctcaatggaaccgtaccaaatgaggaattatttggggtgatttataccgttgatgacggtgatgattggacggatcctgagatattaaaaaaagcaaatccaaacatgggaatatcggtttacagtgaattcctgattagtcaacaaaatcgtgctaaaaacaacccaagactggctagtacatttaagacgaaacatttgaatatttgggtttcggcgcgttcagcgtatttcaatatgcttagttggcgtgaatgtgaagataaaacgctaactatagagatgtttgaagggcaatcttgtgttcaagccctcgatttagcaagaaaactggatatgaactctcgggttaaagtatttacgcgcgatattgagggtaaacggcattattattgcattgcaccaagcttttatgtgccttatgactcggtttttggttcagaggttgagaatcaacgtacggctgaacgattcaaaaaatgggtacaaacggggcatttaacattaacggatggcgctgaaatcgattaccgtgtcattttggcggatgcaatcgccgataatcttagtaaccctatcgaggaaagtcccattgatcctcatggtgcaaccaatctttctcatcatttagcggatgaagggttaaaccctattactatcgtacagaactatacaaacatgtcagatccgatgaaagagcttgaagctgctattgcttctggacgttttcatcatgatggtaaccccatcatgacatggtgtattggtaatgttgttggcaaatttttgcctggtaatgatgatgtggtgagacctatcaaagagcaaaacgaaaataaaattgacggtgctgttgcactgatcatggctattgggcgtgcaatgttaaatgaccaagaagagacactttcctctattctagcctccagaggtttacgctctctctaa

SEQ ID NO: 302616 - DNA, 309 bp, Proteus mirabilis
atggcatttccaactatagaagagttgaaacatcaatgtaatatcgatggtgattacgataataatttgttacagcagtatttatctgccgctatcgctgaagtgaaaagattaacaaatcgaaatttgtatagtgattacgttcccgacaatgatcccatgggattgcttcttactgatgatatcaatttgaggcttcggcaaatggtgggtttttggtatgaaaatcgtgaagggcaatcacttccagaatcgttatgtcatgctttgcgtgtataccggatcagaccgatgcgagggcaatcatga

SEQ ID NO: 302617 - DNA, 366 bp, Proteus mirabilis
gtgactgataagcaacttgatgatattaatcatattgctaactcttggtttcgctttgaaataccagcaaatacctaccctcgccaagcagaaaaagtaaacaccattgcacaacctaatatcttaatgacaaccacaagtattgatgaccagttagtttatgaattgactaaaaccatgtttgaaaacttaccagaagttcatcaagtacatagtgctgcaaaatacatcaccaccgaaaatgcgttaaaaggtgtttctgtgccattacaccttggagcttatcgttattacaaagaaattggattagatatccctgactatttaattccacctgaagctcaaacgcaaactaataataaataa

SEQ ID NO: 302618 - DNA, 663 bp, Proteus mirabilis
atgagtattaaaacattcaatagcaattgcaatttgattttcaatactcaaacttatagattttgtggcatgaaaacgacaattgcagaacgcttaaaattagcgatgaaaacaagaggaaatatgacgcaagctgctttagcagaagcgtccggtgttgctcaaccaacaatttggagattggttaatggtaatgcgaaaggttcttctaaattagtggatatcgctaacgcattagccgtcaacattgactggttggctaatggtgtgggtgacatggaggcacctaattcaaccccatcgtttaaggctgatagatctctagaaatacctgtatgggatgaaaatggctacacaggagaagccatactgtcaccaataggaaaaccattaaaaacatataaagcttatatacttaaaaagaatagcggatgctcagaagctcccgcggggagcattgcaatagttgatactcagctacaacccggtactgatgatctggtagttgctcaaataggcgactctttctctgtttataaattccttgaaggtggcactcagggattccttgctgttgatgattcacgagttcctttaattgatatttcatctagtgtttttcttggggttattgtttttcttgtccgcgattttagaagatag

SEQ ID NO: 302619 - DNA, 213 bp, Proteus mirabilis
atgaaaaacaaagctattgaaaaagcaataagcattgttggaagccagaaaaagctagctgttttgtgtggggtgtctcaaccaacagtatggcgctggctccatggtggtggcatggattctaagtatgtcgtgaaaattgtaaaagcgaccagtcaccaagttcgtgcccaagatatttctcctgaattaggtgagttattagctcaatag

SEQ ID NO: 302620 - DNA, 432 bp, Proteus mirabilis
atgttcgatatcttcttgggtcacttggtctcgtttctcaaaaccagcctcagccttattactctcttttgggctattttttcctttttcttgggaatttggcttggtcactccctcgctcgcagaagagacaagaggaaggagttcaatgctattgcagatcccttgttcctgattcttgataaatttcgcgacgactgtgtagatggaaaaagaaacatacctcatatcactcaagataatttcagagccttgcgccctcacttgactacaaaacaaggcaagaaatataaccatgctgtagagcgtttttttgatacccttaaacgcaatgaaatttatgaggaaggtcgatatattccaatcattagatgtcccgaagaattcattccttgtatcaatgagcttctggtttttattaaacgacgttaa

SEQ ID NO: 302621 - DNA, 459 bp, Proteus mirabilis
atgagtaatcaatcaataaaacaggtagtgaaagacatgtgtgaggcgacagctggtggacgtgaggcgatggctggagcactaggtctgtctttaacatcattcaacaacaagctttatgagaaaaacggttgtcgttcatttgatttaaacgagctattagcgatgcaagatatttctcagaccgttttatttgctgaatttgtcgctcgtgaatcaaatcgcttactcgtggacagaattagccctgctgatttagatcagacagaactattcacattacgtagcaatgttgacgaaatgcaagggcatttagcgttactgatgaaaaatagtttggctgatggtgttattgataacgaagaagagcagaaaataaaaatgatgctggatggattaatttcgcagatccgcacatttatgaatgcgtttgtttcgttacatcaaaagagaaattaa

SEQ ID NO: 302622 - DNA, 1092 bp, Proteus mirabilis
atgagtttattattactaaaaagtcgccctttagtcgttattcctgaattagcggtacgtcttggtttaaatgaggcgatgctgttacagcaaattcaatattggctaactgaaactacttcaggtgttgaatatgacggttcacgctggatttataacacagttgaagagtggaagaatcaatttccttttttctctgaatcaacgattaaacgtgcttttactaatttgaaaaagcagggtgttttacgcatcgagcaaatcaataaatcgaaccatgaccgcactaattattatgcgattaactacgatcaccacttgctgaccgatgaggtcaatatgacccaatcgaatggtgataattcatctgatcgaacagttcaaaatgaccttatcgataagcgcaaattgaaaccatcaaacagtgcaaaatgcgctgttctgaacgggtcaaaatggcctgatcttacagagaatacaacagagattacttcagagagtacaacagaaacagatcattcgtcgcagaattctgacgaatccagcgaccagccgaaaaatgattttttaactcgttatcctgaagcagtgatttacagcgctaacttccaaaaatggggcgatgaaggtgatttaaaaacggcgaaatggatgtttggtcgtgttaaaaaactaaatccatctgcgctagagcctacttggtatgactgggcgaacgatattcgtttgatgcgtcaaatcgatgggcgtacccatgagcaaatttgtgccttgttcgattgggccaacaaagattcattctggtaccaaaacattttaagtcctcgtaagttacgtaaacactttgatgaactattcgttcgtagtcaaaagccaaaggatgagctaaaggttcaagttgacaccgttgaacgtgatagtgccttttcccgcttgattggctctcggtctaaacctaaaaaccgcattgaagaaattgcgcttgaactagcgggtaagacaggcattcgccgtatgagtgagttttctggtcgccaagcatggaacagtatttggaagcaagcgacagaaatgtctctggaggctcagtaa

SEQ ID NO: 302623 - DNA, 1026 bp, Proteus mirabilis; identical to SEQ ID NO: 300237

SEQ ID NO: 302624 - DNA, 672 bp, Proteus mirabilis
atgccaatttatgcgcatgacttgaaatatttaagtgatatggcatcgatagctacatcaaacttaagggcttcaacaaaaggtcagttagaagcatttgaagattttgggttaacagacacgagagcaacaccaagagttagaatacgagatttaaaattaaatggtcgttttgtttgtcgtgataccgatccaatctatgtattagaaactcgctgtcgtcgaacaccaaagccgatgatagagcctgtggattttttattatgctcatggcgtagggctatcaatgcattaagtgaagagcaacactcatggataatgtattgttatggatatagtttgaaatttgagcatcaagttaatatcagtgttcatgtatggtctgaatttgaaaaacagtataacggtaaaaagataactaaaaaggttaaagaacgactaagatcattagtctggttatcggctcaggcttgcactgggcgtaattattcacaaacagatctggctcgcttggtgggtgttaagcgtaataattggaaaatgaattatgatatatattggaatagccttttagatatatgttgtgagttagataagtcggcattactttccatgaggcgagttagaatagagctgattaataaaaatagtcacgacaacttgcaaaaatga

SEQ ID NO: 302625 - DNA, 213 bp, Proteus mirabilis
atgtatcatcattactatgttcatacatctactgataatcatggtgattatgaggttcatcaagatggttgcgaccatatgcctaacgcatcaaaccggcaatatttaggttattttaccagttgtgctcaggctgtttctcaagcaaaggctaatgggtatagaactgctgatggttgttattggtgttgtagagagtgtcatacatcataa

SEQ ID NO: 302626 - DNA, 249 bp, Proteus mirabilis
atgtacgcacttaaattaattactgaacgtgaaggacgtaaagtggaagaagtccactgcttaggtgaaatgtaccgcttggaattttatcctgaatcagaaaataaagatatcgtggcgcgggttgaacacacaaagaaagacgccatcccatcatttgatattaatagaacagatcgcgcttacattacgacagtaacaggtgatactgttcgggttatttccagaggcagaaaagcttgccagtaa

SEQ ID NO: 302627 - DNA, 135 bp, Proteus mirabilis
atgaaaaatttatttattaatctatgtataaagctatctggtaagactaaagagcaattaggtttagcttggtcatttcattattttgttactcgttctaaatataaagcttattggcgagccgtatttcattaa

SEQ ID NO: 302628 - DNA, 1275 bp, Proteus mirabilis
atgagtggaaatataattcaatttggctcgttagtagtcacacctcacaatagctatatttcacaatatgcttttgacaataatttttcatttactcaagcaacaaatataatttgtagtgagttcatgaaagataaaaataaaaagtgccctgtctgtggaaaaataaattgccctgcatttaagagtgaatgtagaagctatttaaaacaaaaaaatgaaagcgcattaaagaaagcattaagaatgcgaccttatggtcaagccctatatcatagggcaaaagaatttaatgaaagttcacctctactattattaaatatgaaacataataatattccattgacaaaagagaatatagaaaatgtatttgatgcggatattaaattaagtcagattatttaccaaaaaatggaatatataaatgggtttctttttgatattcactttagcgctcatcctgatcctatgttacaaaatattggtgaacgtttaggagattatccccgctggcaacaatcaacacgattagcattacatgctttatacgcagataaaggacccgataatattaataactttcctgaaatgctaaaagcacttagagagcaagattttaaatcggcatgtcaacattttcaccagaaaatgacttatacatatcgtaactttcaaattgccgatattttcgcccagcaagcggtcgctaaaggacagaccgatgatgaatttaaactgttacatgattctgtcaaatttacggccgatttttataaagaagtttttaaagcgtatggtgaaaaagcggaaaaattggcagaatctttagctgaaggcgctagagggaaaaatattcgtaacgttgatgatgcattaaaagcttatgaaaaacacaaggccaatattgataaaaaaattaatgccaaagatcgtaaggcgattgtggcagcattagaatcagttaatgtggatgatattgctaaaaaccttagacggtttgctaaaggtatggggtatacaagtaaattcattgatgcaaatgacttaagaatagaattaatgaaagcaattgaaaccgacaactggcgtccattttttgttaaagtagaaaccatcgccgttagttcagccaccacagcggtaactggatttactttcagtatccttttaggtggtcctattggtattctagggtacggattgataatggcagctgtaggagcattaattaacgatgatttaattgagaatatcaataaactcattggtatttaa

SEQ ID NO: 302629 - DNA, 3399 bp, Proteus mirabilis
atgggcaaaggtggcggtggaggaatcactccaaggttgctcgatgacaacttaaaaaacaaacaatttcttaatgtcatcgatttagtttcagaagggccaatagaagggcctgtgggtggtatgtcaggttttctattgaatggaactcctgttgtagatgcagatggcaatccaaatattcatggtgttgaagttcagtggcgagcaggaacgcaaacgcaagaaccattagaggactttccttttgtagaaaaagaaattcctgtcaatgtagaggtaaaaaaaagcacaccaatcttacgcactatttcagatcaggaaactgaccgcgttagattcactttgggggtttctgctcttgttagtcaagatgacaagggaaatcagtacgatgctacggtagaaatgcttattgaagttaatgatggttctggttggacgcatgcagaaacagcaaaaataaccggaaaaatcagtggccaatatttagaatcatatatcattgatgcgcctaaaaagaaacctttccaaattagagtttcacgattaacagatgatagtaaaagtgatctactgaaaaacggaacggtatgggcaagctacacagaaataactgacgctaaattctcttaccctaattctgctgtcgtcgggatgaaaatcgataaatcccaatacggtgatacacccaatcgcacctatcatatcaaagggatgattatccaagttccagataactatgatcccgagtcccgtacttatactggcatctggactggtcgcttcaagccagcatggtctaataaccctgcatgggttttttacgatttagtcactaatgagcgatacggtataggagagatgatcggctcgtttggcgttgataaattcgcgctatatgccattgctcgttactgtgatgaattggttgatgatgggtttggcaacaaagagcctcgctttacttttaatgcctacattacctctcaacgaaaagccaaagaagtgcttgatgacttagcgtctgtatttcgcggtatgcctttatgggacggacagcaattaacgtgctttcaagatagaccatcagatccagtatggacgtacacaaactcaaatgttattgatggaaaatttaaatatacatcaacagcgaaatcagctcgtcataatgctatcgaggtgtcatggataaacccgagtaatggatggagtgaagaaagagaatttatccaagatgatgatctcattcagcgattcggcggtgtaaatgttaagaaagttactgcttttggttgcactagtcgcggacaggctcacagagtgggtaagtggatattacagacagaaaagctggagaaagatagcgttacattctcaacaggaagagaggggattaactgcatctctggcgatattattgaggtagcagacgatagctttgcaggagtgaaggtaggtggtcgggttctatcagttaatggtagcgctattactattgatgcgcctatagattggaaatatgacgataaaggtactttctcatttttagggacatcaggcaggttcgagaaaatagaaattcaatctatcgatggtgatattgtcactttgcgtgaggttcctcgtggactgaaacaatatggtgtattttctattaccaaaagcatgctaataacaagattgtttcgagttattaccatttcagaaaataatgatggaaattacttatacaactgtattcagcatgaacctcaaaaggaaagcattgttgataatggagttgattttactgggaacccgccaacgcagaatgttattcgcattcctaatatagagcgtctttctattgcttacgttgatgatagccctcaagttcaagctagggctatgtgggtaacaacagccattaatagaaatatttcatttaatgtcactctttataaaaacagcaaggttgtatctactggtaataccacagatttagagtactactttaatgggcttgaagccggtgactatcttgttggggtgagaggtcaagacgctaatggaatgcttggtaatgaatcaaaagtccagatggttattggtacgccaagcgcacctagctcaataattgttgagtctggtttttttgaaataaaattaatccctcatatcgccatgccacacactctaaataccgagtttgagttctggttttctggtgaaataaaaataaataatatcaatgagatagagtcaaaaactgatttcttaagtcgcgctaagttctggacaaaagggcaattaaagccggggcgtgattactggttttatgtaagaagcgtaaatgaatatgggaagtctcattttgtagaagcaaaggggcaagctgatgataacacagaggctattctcgatgagttagacggccaattcatgacaacagaggcaggcaaacaactcagcgaagaactgaaatggaatacggagtctattgctgaacttgttaatgccacctatgaattatctactgatttactcgttagagatggtaatgcacaggctggaatcaaagatttaagaaaggttttcgcaaatcaacaggaagcatgggcgcaggaaatcaaagaaatttattctgctgttggtgagaataaatcggcgattcgggagactcaaacatcaataaccgagttaaacaaggcgttcggccaaacaactacggagatccgcacagagttaaaaacaaccaatgatgcaacaaataaacgcattgatgataccaaccagaagttaggcaatacagataaagaaatcggccgtattcgtgcagatgttgcgactaacaaagaggcgatatctgaaacgaataaagccatggctaaatccgaagagcaggtacaagcgcaattcggcaaacagcagggaatgattaaccaaaaaatgcaggctgaatttagtcaaaccggtgacggtgtagttacccattccatcaacattacgattgttcataacaacgtgaaatacaatgcagcagggcaagtaattagtgctcaggttaaaaacggcaagcttgaaagtttcataggctataacgcgaataactttgcttggtataaccctgtaaatggcaagatggaattgtttatgtatgccaaaaacgggcagttctttatcaaagaggcgtttttagataaggcttctattcgtgaaatggttctttcagagtcaataagatcagataattatgtgcctggtaaatctggatttattattgacgttaaaaataacaaactggaaatgtatggtggtaatggagggacaacattaaccaatcaaaatttatatgtaaaagacgaaactgggtataacgttgttattattggtgatatcacaaatgagcgataa

SEQ ID NO: 302630 - DNA, 912 bp, Proteus mirabilis
atgcaaaatttagataatgcgctgcaaggatttataacatataacattgataagtttaaggaaaaacactttcctgatgctgatattgtgtcttattatggtggaataaatttttggtctaaacatgcattccaaccaacagtatcttttcttggtaaagcagcccaaaaaaggagagtaaaaaaactggtaattctacttcagacgacaggtgggagtgtagaatcagttgaaaaactggtagaaataacaagatatttctacgacgaggtatattttatagttcctgactttgctatgtcagctggaacaatatggtgcatgtcaggtgatagaatttatatggattatgcgtcatcgctaggccccatagacccacaagtagccaacccagatgataaatgggttccagcattaggttatttagataaagtagaagagattataaaaaaatccgaacaaggggttgttactcaagcagagttaatgatgcttaaccgtttagaccttgccgaacttcgaagatatgaggaagcaagagaattatcaaaagaactcttgaaaaagtggcttgttgattataaatttaaagaatggaattataaagagagttcaggtgaagtcgttagtttacaggataaaatggatagagcggaagaaatagctatactattatctgataataaacgatggcactcacatggtagatcaattggcattaaaactataattgatactttaaagttaaaagttgaagattactcaggcgatgaggatttctcagctgaagttattgatatccataatttattacttcaatttgcaatgaaatcaaatcaagaaatagttgtcatagggtcaacaccatttttagatgaagaagacccacaactggagatagaaaatgaataa

SEQ ID NO: 302631 - DNA, 177 bp, Proteus mirabilis
atgaataaggctactaactcaaaaatcattacaaatgtcatttctataagaaataaagaaataaatgaaagacaagtaaaaatgattcgtgatcttgatgatatggggttgttagttacaccttcgttcaatctcaaatgctccccatcggcatattttcaacctagaaataattaa

SEQ ID NO: 302632 - DNA, 162 bp, Proteus mirabilis
gtggaagaattagagaatttaataaaagaaatagcaatagatgaaggcatcacattcaaggatgccattaaattagccattaatgtactgcgcattaatcaagctaaccagcctgatgaaaattcaacgcctgttgatggtggtaatcattttgatggataa

SEQ ID NO: 302633 - DNA, 288 bp, Proteus mirabilis
atggcaaattttattgttcgtattgagctatataatgcggattatgatgattacgagactcttcataaaagaatggaaggtattaaattttaccgatacattatgttttcaaatggtaaaaaccatgatttaccaaacggtacatactttggtaagcgtgacttgacgacctatcagttgctttcagaggttaaaagagtcgcaaaaccgctatctaaatcaaaagatccatcaatatttttatgctcctttaacgattggaatgcatcgctttatccatcaaaatga

SEQ ID NO: 302634 - DNA, 330 bp, Proteus mirabilis
atggatccgggacgattacgccattctattaatattcaaaaaccagtattagcgcctgatgccatcagtggcaatgatgtgatttggacggatcatgcgacaaaagtacgtgcagcgatcatgccttatcaagggcgggaatattttcaagcccagcaagtacaaagtgaggccacaacacgaatttttattcgctatatcgctgatattgatacttcgatgcgtattgtatggggtaagcgaatatttaatattatttcgattattgacccttatgagcgtcatcgtgagcttcaattaatgtgcaaagagggcgtgaatgatgggtga

SEQ ID NO: 302635 - DNA, 672 bp, Proteus mirabilis; identical to SEQ ID NO: 297777

SEQ ID NO: 302636 - DNA, 1407 bp, Proteus mirabilis
atggaaaagagtaaaaaaataaaatgggctatgcctgatgcctttattattatttttggcatcgttattttagcggccatcgccacctatttgatccccgcgggaagttatcagcgggaaaccgttaatggattaaaccgcgttgtccctaatagctttaattatgttgcacaaaatccagcttcattgatggatgtgttttatgcaatccctgtagggttaaaacaatctgccagtattattttcttgatctttatgattggtggcgcgattgccatttatgatcgcacccgtgctattgattcaggtattaatgcgcttattgttaaaaccaaaggtaattatcaagctcttattattacggttgcttttatttttggtatgttgtcatcccttgggcttgcggccaatgccgttattgcgtttatccctataggaatagccctttcgcgatcaatgaaacttgatgctattacgggggttgcagttgtttatttaggctattatgcaggtaatgcggttggtgtattagatccaactattttaggtactgcacaaacattagctgaagttcctcttttttctggtgttatttttcgagttgtattattcgctatcttaattgttgtcactattgcctatattgtctggtatgccagacgtattgcgaatgatccaacgaccagttatatgtatggaatagctaaagatgatcctgattatgaacagccacacactcaatcattagatagcaccttctcattgaggcaaaaattgagtttggtggtatttatagcgtttattggattgtttttatatggcgcttttgaatataaatgggggattgaacatctatcagccatttttattatgatgagcattgttgtggcggctatgtttaaaattgcccctaatgactatatcaaaacctttatgaaaggtgctcaatctttagtgtatggggcattggtggtggggatcgccagagcggttattgttattttagatgaaggacgagtgcttgattctattgtacaagccacattagtgccattacagcaaacctctcacttttggggcgctcaattactttatttctttaatttactatttaacttgctagtcacatcaggaacgggacaagcatcgattgttatgcctattatggtgcctattctcgatattcttgatcttacacgtcaaaccggtgtccttattttaaaactcggtgatggctttaccaatattattaccccaacatcaggtgtacttatggcggtactggcggtaggtaaagtgccgtggacgcgttgggttaaatttgtattccctattttaatgatttgggtcgtgataggtatggctgcaattggtattgctaccgcaataagttatggaccagtgtag

SEQ ID NO: 302637 - DNA, 696 bp, Proteus mirabilis
atgatcggttcacaattgcctactcatgagcacatcgcaaagctaactgatacaaagtttgttcttcaatcactggctcccgatgactattccacatgggaaaaaaatgccatacaaaataacttaaagatacaatctgctcgtcatgaaatggcgatagctaaacaagagattgagaagaatagaggtgaattttttccaacagtacaattttatgctgcatactctagtagtaattctgatagtaataataccattaaccagaaataccaatctgctaacgtaggtttttatgtcagtatgcctttatttaatgggggtaaaacaacggcatcaatgcgtcagtcgacagcaaaatatcagatgagtgcatttgaaagggatgcgattattcaaaatattatgcaggaattaagatatcaatatcaaatttgctcaacgagtcatattaaattaatggcttttgaacaagcagtaagttccgctaagttacaattaaatgcaacaagaaaaagctatgttggtggtcagcgaacgatggttgatgtgcttaatgcggaagagcttttatatagagcgcagcaagatttaatcaaagccaaatatgattatattcaagcttgggcattattacatcaatataccaatacactagacattgaaaaaataaaaattattgaaaactattttcagtag

SEQ ID NO: 302638 - DNA, 294 bp, Proteus mirabilis
atggatattgcctctcgaataaaggctataagaaatgctgaaaaactaagccaatcacagttttgcgaaataatggatatgccaataagcacattaaaaaagattgaaggtggtcataacgaacctgggtgggtcactttagagaaaatcactaatcatccaagattttcaaaatatacgctgtggataatgaccggtaagtcatcaccagaagctggtcaaatatctccggctctcgcacacagtgggcaagagaaagaaatatcatcccgctcagacaagaaaattggttag

SEQ ID NO: 302639 - DNA, 2529 bp, Proteus mirabilis; identical to SEQ ID NO: 301487

SEQ ID NO: 302640 - DNA, 1386 bp, Proteus mirabilis
atgaaattaaattgctatttactttctcatcactcctctattttatttttattggccttgatgctattcccttctttagcattggcaacatgttataaaataacaaccacaacgacagatcccaataatgtgtattataccgagccgggcaaaggttcagcgaaaaattggcaaggtgctagagatgattcaggatcaatgggaagtacccccaaagtaattaatgttaataacgatcagtttcaaattccaggtacattagtagcgactggctttatctctttttttgaagcaggttatgaagtttatgatcctgaacaaatattgtttcgttgcacagccgatgaagagggaaaattaagagaattctattcaacgaatggtgactatatctatgggggtagaaatttagttaatccagctttaggcttaaataatacttatattagtttagcaagagggctgggtattcgcattaaaaataccattacaggtgaatattatagtcgctattggaaatctcgtgctttaaataatttagaaagagatagccaaggatggatcttagtaaaagcaaaagacttctctaatatggaagtagagctatttaagattaactatgaaagaataagtgatatgccccccgaacaatcaagtaatgggttaattacgtttgctaaccaaccggcgggttatatcgcctttcaaagctctaacttttcttatttattaaaagatggttcagatcacgccacaaattatcatggcttttatgattcttggccggctgctgtaaatatgtctcgccgtatttacattcgtaatgcgtccacttgttttgtgcgaaatgttacgccttatgtttcattcccgctagtcactattaatgagttagaaagaggcaaaaaagtgactttacctattacgattgatttttattgtcaaatagcaccaccagcaaacgatggcatgagttatatttccagcggaactgggcctgggcaaactgcaatgggatttttacctagacctacaaatgttaataaggcaattgaattaggattaacagtacctaatggtgctgcaattacccatttagtgacagacggttatggtactgatacaaatatggcaaaaggggttggtgtaagaatatatcgcccatcaggtatgccattaaacttattatcaacattagcgaatgaaggacaaggtgaaggttatggttggtaccctattgatgatgatgcaagcgcagtctcatatgacaatggtattgtcgattcaacaaaaacattgtatgcctcattagaagcgttaccgagagaaaaaataactgccggtaaatttaatgcaaaattacaagtaattatacaggtgcaataa

SEQ ID NO: 302641 - DNA, 567 bp, Proteus mirabilis
atggtcaaattacagtttgcaggctatttacgcagatttggacgcaggttcgagcttgaggtaagtaatgcaggtgaggccttacgctgtctttgctatcaaattgatgggttgaaaaaagagattaaccaaggtcagtttcgcgttcgtatcgcaggtaatgatatgaccgaggatagtatttctgcgggactaaatacgccattaagtgaaggcgatgttattacgatcgtccctatagttggtggcgccaaatcaggcgggtggtttggcattattggtggggccgctttaattggcgcatcgtttttaataccgggcggatttttggcaacgatgacatcgaccgcattatttgccgctggtgtaggtgtggccgccgcgggattggcaaccatgttaactaaaacaccgccagcgccaagcatagaggggcgaaactcagaaagtaaccagtatttcagttcgttagcaaatagagtggggcaaggttatccggttcctatctgttatggcgagatggttgtgggttcaaatgtaatatcacaaggtttggagactgtttaa

SEQ ID NO: 302642 - DNA, 699 bp, Proteus mirabilis
atgagggatatacctcaagagatgcgcataaatgttgcagatttacagcaaaatgcaatgttagatttgtatgaggtcgatttaagtcgttttggtggtgatgtttaccggtttcatgacggcatgaatggcttattaaaacctattgtctggcagggtttacgatatgaaccttatcctgttcaggttacagggtttagtgtaacgactcagggggcatcagacagaccaaaaatgacgtttgctaactttgacggaatgttaactgcgattaacaacgactatgatgatgcgctaggcgctatcgttactcgtaggcaggttttagagcaatatcttgatgctgttaattttcccaacggaaacccacaagcagatccaaccagagaagccgttcaaaaatatgttatcgaacagcgagaaagttcagactctgattttgtgacgtatatattagcacttccaacagaaacagataacgccctgatacctagacgggttattcaggctgatatctgctcgtggcgataccgaggatttgattgtggttatgatggaccacctgttgcagatgaaaaagaccaaccaacaaccgatcccttaaaagacaaatgctctcataaatacagcgggtgcaaattaagacacaaagggaatatgccattcggcgggtatttaggatcaaataaattaggttaa

SEQ ID NO: 302643 - DNA, 330 bp, Proteus mirabilis; identical to SEQ ID NO: 294406

SEQ ID NO: 302644 - DNA, 984 bp, Proteus mirabilis
gtggatatcgaccaagggcccttagggtatcagcgagcggaataccgctacgatatcttaggacgtcggattgaaaaacggttatggaaagccagtgcgattgccaacacagtcacctatcaccaacatgagccggatgaagtatacacctttggctgggtagggatgcgactggtgtctgagcacagcagcgcagcgccccatactacggtttatcatgcttacaatgaccaaagttatacgcctctagcccgcattgaatgcacggataacccgctaaatccgcaacgggcgatttattatacgcacagcagtttaagtggcttaccggaagcgttgaccaacagtgagggtgaaatcgtttggcaagggcaatacagtgcttggggacatttacagcgtcaaacccgccccacaagcacgtttaatcgtgaacagaacctgcgttttcaagggcagtatttcgacaaagagacggggttacattataatacgttcaggtactatgccccggatttaggccgttttacccagcaagacccaatagggttggcaggggggataaatttatatgcttatgcgccggatccattgacatgggtggatccgcttggattatcttgtcgtaataattatttaggacgaactccaggaaaaaatagccggacagggcgagaagttatagctcgaatgaggcgagatggagatgtactggatgttaatgggcagacaatttttaaagcatcggatggaaattggtatccattgcgtgaagctgacatgtcacataaaacagatgctgtgacatggtggaataatactggtagatatttagggccgaaatctaaatccgttagaaattggatgttggattcgaaaaattactatctggatcattattcacttaaccgttccgccggggctcaaattggtcaggtatacttgccgcctgtactacctatacagccaccaatagtgaaataa

SEQ ID NO: 302645 - DNA, 519 bp, Proteus mirabilis
atgcatggtttaaaagcttattttagagactccgtcgggatgctagcttcggttgctgttttatcagttggtatctatttattttctgagaattattttttatctcaaggtggtgaagtgagctatttattatattttgccagtgctatttcatttcttgcaatgacagctattgcgtttgctcttgttatatcagatgcagtgaagctgtatgcccaaatgcatgttagaaaaatgaagtgcattttaatattggttgtgtttgtaaatatattcggttttataggaacgttcattgtctctgctaaaaatgtaaaccaagctacggagtatgtattggctcaatatatccctattccttcaaacttggtctctgattgccaacttcctgaagtaccaaaggaaatgacctggggtgagttagctgaatacaacattgaattgatgtcggtaataaaggagtgcaacttggacaagaaagccattcgagaaattgaacaaaaacgagcctcgcaatag

SEQ ID NO: 302646 - DNA, 321 bp, Proteus mirabilis
atgcaaatacctacagaattagtatttaaacccgctagtgagttaccaaccgaagatttagatggtagagaagtcattattatcaatccttgcgacggttggcaccttggcgttatccgcgtagaaagagatggtaattgggttcatataggtatttatccttggatgggttcagaaatgacacctcatgatttttatactgcatgggcacttttacctaatatttatgacattagccaaaagtatgatggggaacgatatatgaatcgtcactgttgcatttgtaagcgaaaagatcattcaacggcagaacataagtag

SEQ ID NO: 302647 - DNA, 531 bp, Proteus mirabilis
atgtcgagtataaagagtgtatctgatgggttaaaacttgataaaacacgagaagcttggcttcaaaattggttaactcgatttggtacatgggtacatagcggacgtatagataaacgacagagtagtatgatcgctcaatttatggaaagagtagaacgacgtgattatccgtataggcctacgtgtagtgatgaagatggtctacttattcagagagttgttgacagtatatatcacatagatattcaggcatttaatatgttacttagtcgatatgctttttgtgcatcggatagagctatagctcgtcattatcataagaatagtgaaccaagaataatggctcgtagaaatggcatgttaagagaaagaaagccatctatgtctacatgccgtagagaggtagaagaaatattaaatgctgttgaatatttattataccaacctctagtagatgcatttaaaaatagagaaaaagagatgatcgagaagcgaaatagcaaaaacgtgttgacatctttgaactaa

SEQ ID NO: 302648 - DNA, 294 bp, Proteus mirabilis
atgaataaatcaattatcaacttcctacaagaagatgatttgaataatttaaaacgatttaatgaaacttgtgaagatggccaagattacgatgtgccaaaagaaaaaatgcaacacttagctgaattaggtgtcgttcgtcgccatagcaaaagttattacagcattactagctttggtatgtatgtattaaatcagaatgacgagttatataaattaccacttaaagcacaatctgattatgatgcggaattcagatttagtttagctaataaaattagaggttcgtcatga

SEQ ID NO: 302649 - DNA, 252 bp, Proteus mirabilis
atgtctaaaaaagatgatattcctgtatttcctatatctggttatcaaatcggtccattaaaaggatatgacgcattagttatgaaacttcagtatctatcttcacccatgcaaccattagaacaagctcaggaaacgaatttctttgcccttagtcctgctgtagtaagaggcattatttctgatcttgaaaaacatttagagactctcgaaaagtccgagattcaatctcctcaaggtcagaagcactaa

SEQ ID NO: 302650 - DNA, 222 bp, Proteus mirabilis
gtgagtaatggaaacatagttgaacttaaagtaaatggcgccatggtatgctcacttaacacagaaggcgctaaatcaaatgattacctagagtttttaggtagaacagttagcgccctaattcatgataaaacacttataactgttagtgcttctgaccttgaggagattgaatctcggacttttcgagagtctctaaatgtttttcaagatcagaaataa

SEQ ID NO: 302651 - DNA, 312 bp, Proteus mirabilis
ttgaaaaagataccgatagttttagcatgtctaggtctattattaacggcacctagtttagcacgtgaaagtaaagtgttaggctcaacaacaattacttttgttggtgctattgtcgaaggcggatgttatgcatcatcagaagaaaatactgttaaaacaagttgttggaatggtaaggagatgaaagatttccaatataaactagatgctaatcagcaatttaactcgcaattaattaataataaaggttttatggatatcgaatggattaacgatcatctagcagtaatgaatattgtttataattag

SEQ ID NO: 302652 - DNA, 1404 bp, Proteus mirabilis
atgacggataacttaagcggggatatgaaaaacctgcaatctgcatgggaagatttaggtattcaaatttttgacggtattgatagcccgctacggcagatatcacaaagcattactcgtgtgatttctaaagtcggtgtgtggatgaaagaaaaccctgaattggctaagacgttgacgatgatcggtttagcgatagcgggcattattaccacgctgggtattctctcgctatccattgcggcaatgttagggccattagccgccgcgaaattaagcttgtcaattttaggcattaaaggcggtagcgcgctcacactgttattaaaacccattaaattattaggcagtgcatttttaggattgggtaaagccatgttagctaatcctattttgttggctattgctgctatagcgggcgcgttttatctggtttataaaaactgggacaccattggcccctacgtttacaaggtatgggataccgttaaaaaatatactgctatcgcatggcaagcgctaaaagatactattaagagtgcatgggaggccatcaagtatatattctttaattggacaccgcttgggctcattattaaacattgggattcgatagtcagctacacccaaacaacatggacgatgataaaaactaaaatttcagatgtttgggaaggaattaaaacaacacttaaaaacggttggaataatattgttaagtctgtacaagaaacgtgggaaacgataaaaaccacgatatcaacaaaatggaatgaaattgtcgaagacaccaaagcattaccggctaaatttttgcagtttggtagtgacctgattgatgccattattcaggggatcaaaaacaaatggacggactttaaaaatagcattggggaattggcaaccgcagctaaagaagcactcacccctgagtttatgaaaagtaatgatccgaaagtgcagtctgcgttagattcgtacaacagcaactttgccggtatgtatgattccggcggttatattcctcgtggtaaatttggtattgcgggagaaaatggccctgaaattgttgaaggccctgcgaatatcaccagtcgtaaacacactgcgatgttagcagctgccgcattatcgttaggcagcgccttttcgttacaggcacaaaatgccccgttgcacccacacagtttgcccgttgaaaactatcgtcctgctccggctaatgtgaatattcaacaacagcgttatcaaggcgcgccggcacattatgaaattaatattcatcctcaaccaaaccaatccgcgcaagatattgcccagcttgttatcgcggaaattgagcgccgtgagcgtgaaaaacaagcacgattaaatagccgttatcaagacagtgaggtgtggtaa

SEQ ID NO: 302653 - DNA, 465 bp, Proteus mirabilis; identical to SEQ ID NO: 302578

SEQ ID NO: 302654 - DNA, 1098 bp, Proteus mirabilis; identical to SEQ ID NO: 302577

SEQ ID NO: 302655 - DNA, 474 bp, Proteus mirabilis
atgatgggtgagattaaaatcagtggactgtctgagctctcgcaacgcttaaggacattggaaaataatgtgggtaaacgtattgcccgaaaagcgatgaatgcgggagcgatggaattaaagcgggaaatcaaacatcgagtgcctatccttaaggaaacggtgccgcatcggcgcaaaggcaccctcaagcgcaatatacgttctaaaacgaaagtgcagcgcaatggacaagtcaaaacgcgtatttgggtaaaatcattatcgggtaaaaaggtgtctgcctttaaacaggcaacggggaaaagtgcagcattgaacccgaatgatccgttttattggtggtttgtcgagtttggcaccgccaagatgcccgcacaaccgtttatgcgccccagctttgaagcaaaaaaggaagcgacggctaaagtgattgttcaaacactcaaagaggatattgaaaaagcaaggtag

SEQ ID NO: 302656 - DNA, 459 bp, Proteus mirabilis; identical to SEQ ID NO: 296276

SEQ ID NO: 302657 - DNA, 213 bp, Proteus mirabilis
atgtctaattcaatgactggtacagtaaaatggtttaacgatgataaaggttttggttttatcactcctaaagatggaagtaaagatgtatttgtacattactctgcaattcagagtgatgacttcaaatctctgatggaaggccaacaagtttcatttaccatggaaaatggtatgaaaggcccagcagcaggcaacgtggtggctctctaa

SEQ ID NO: 302658 - DNA, 399 bp, Proteus mirabilis
atgagagatatgcaggaagttttattgcgttggggagcgtggtcagctaatgagggaaatagtatcgattactcatcaattgccgcaggctttaaaggattgattccaagttcaagacgaagccgagagcaatgttctgatgatgatggcttaaaaatcaataaagcggtattacatttaaaggtaaataatagttacttgtttcagttggttattatgtactatgtgaagaattatcctttgcgttcaatggcttcaaaacttggtatttctcataacgaagtggctaagcgattgcagacagcggaaggatttattgagggatgtctatcggttgataacgtaaaattagatatggataaaataattagaaaataccacatttatagtcttgcgtaa

SEQ ID NO: 302659 - DNA, 270 bp, Proteus mirabilis
gtgagtaactcttttggtcgcgccatttactataaaaaacagaaagaaagtggtggtttattgcgtggtggtgatttaattttcccttcttataccctcgttgatgccgggatcggaaaaaaattcccgttggataaacttactgtttctgttgatgtagtgattaataatctaactaatgtcgaagcaagacccgctagctctcaattaaaatatttagcacctctaccaggtagaaattatggattaaacgttaaagttgatttttaa

SEQ ID NO: 302660 - DNA, 345 bp, Proteus mirabilis
gtgggtatcgacaatattactgcagctgacggtttggcggtaggtagagcctctggctttgttggacgggcaatggagcgtttgattgatggctattacaccattgatgatcaagagttatataacttattgagcttgttaaacaaagaagaagggatccagttagagccttccgctttagcaggaatgacaggggctattcatgtttctcaagctaaagattatctacaaggtttatcacttgatagtcaaaaaatgcacaatgcgacgcatttagtatgggcgacggggggcggtatggtgccaactgatgaaatgcaaaaatatcttgcgcaaggggaatag

SEQ ID NO: 302661 - DNA, 375 bp, Proteus mirabilis
atgaaaataaaatttgattttaataaattaatttatgtagctatgaatgtagcaattgttatgtctttttactttggcattatgaagaatatcgttggcttgattaatgttggatatttttggatctggttattagcgattatctatattgctattctttcacttggaaagaataaaatagctgaaatttacaagcatcaatcaacaatctggcgtgtatatgatgctttaacagacatactctatgttgctattgccgcttattttgggtggtttgtattggcttcattatttacttttggtgccatattaaaagttggcatgaaaattcagctagaagatgagttggtaaaaaaatcatgcagcaaagagtaa

SEQ ID NO: 302662 - DNA, 210 bp, Proteus mirabilis
atgtcattagtcttaggatttgattttgatgtaggtatgtttaactctcaagatcgactgataaaggtacttaaagagaaccgtggtcgttacacaataacgaaaaatggttatgttgaacttgacttatcaaatgataaggtcaaagaagcaatcaaaggacagatagaccagctaaaagatattaaagaagagtctcaaggcgaatag

SEQ ID NO: 302663 - DNA, 837 bp, Proteus mirabilis
atgaatacaattatttttgtcattgtacttattagtggctatctatatgtaaatactgcaatttcttccaaatacatatttaagcgttccgcggggtgggacgcttatttttatgtggctgtttggggtgtttgtttcactgtagcagcatggttgttttgttctatattaagcttatttggtgtttttcgatacctatataatattttattatcgaatggatatatagattcagaaaccatcaaccgtatgtttcctttatctctgtctgataaattgaaatttgcagatattaaatttgctgtctttggcttggtgtcactacttttggcttttttagtaggtcatttacaaaaatggcgagtgaatcgtgatgaagataaaaagattaaagccttagctagggcagttaataatgatccgttagaaagtatgctgatagaagcctcgattagaagtttccctgtaattcttactttgagttctagaaaaatttatgttgggcttattatttgtcctaactttgaacatggaaaaacagagtattttcaaatactaccactactcagtgggtaccgtgataaaaatgatttaacggtaacaataacaaccaattatagaaggcattatatcgatagtggtatagcgagtggtataggggatactcagctttcattatctgactttagaacattaataccaaaagaagaagttgaaggtatttcattttttgatgctaatacatattcaaaatttaaagaaaaagaacaaaacgacaaaaataaatgcacttctttgacagaatcatttatgccaaaagaagaaaaaacaaactaa

SEQ ID NO: 302664 - DNA, 555 bp, Proteus mirabilis
atgcagtggcggaatacatctactcgctatgggcacttgtcgcttcttttacattgggggacagcattaaccgtctatggcatgtttgccctaggattgtggatggtaaatttaggctattacgatagctggtatcattcagcccctgaaatacataaaagtatagggataattctatttattgttcttcttttccgagcaatttggcgttggatttctcctccaccaacagcattatccagctatagccgacttactcgcattagtgcccatgtggctcatatgctgttatatctaattttatttgccatcattataagtggctatttaatttctactgctgatggtcagccaatatctgtattcgattggttctcagtacctgctgttttcacaggggaaggggaacaagctgatttagccggtgatgtacatctttatttagcctgggcggttgttgtgttatcgctattacatgccacgggggcattaaaacatcactttatagataaagatattacattgaaacgtatgcttggcataaaaacacaataa

SEQ ID NO: 302665 - DNA, 270 bp, Proteus mirabilis; identical to SEQ ID NO: 298615

SEQ ID NO: 302666 - DNA, 252 bp, Proteus mirabilis; identical to SEQ ID NO: 297228

SEQ ID NO: 302667 - DNA, 249 bp, Proteus mirabilis
ttgcaaaaaattagtgatgctggtgctccattgctggtggcgattgaatcctattggcgtaaaaacacacaagagagttgtgtttatttgttagagaaagcgaagcaatttattcaaggacacttacaacaaacgaatacatggatatctatgtatggtcttgtgattgtttctaatgcgtcactggaagaacagttgcctgaaggtttattaacattaattcattcaaaatatgctagtctttcttga

SEQ ID NO: 302668 - DNA, 528 bp, Proteus mirabilis
atggaaacacaaggctctgctgagcattttgatactgcgggggcgatacaatctattttattacaactgatggtgccttttattatcggtcatttatctcgtccattaattggccgttgggttgataatcataagatgttagtgaatagaaccgatcgctcttctattttgctggtggtttatgttgcatttagtgaagccgtcgttgaaggtatttggcataaaattgacggttggtcgttattgactatcaccattgtcagttgtgtattactggctattgtacttgttattaatatttatagtgcaagatggcttggctttaataaagctgatgaaatcacgattgtattttgtggctcgaaaaagagcttggcgaatggggttcccatggcaaatgtactatttcccgcagcaacggtggggatcatgctattaccgctgatgctatttcatcaaattcaattaatggtttgtgccatattagctcagcgttatgccaatcaagctaaaaaacaccatcagtag

SEQ ID NO: 302669 - DNA, 1002 bp, Proteus mirabilis; identical to SEQ ID NO: 295293

SEQ ID NO: 302670 - DNA, 252 bp, Proteus mirabilis
atgcgattacaagcagattcagtccaaggtaatgctattgtttctaataataaaagtgttggctttgtggttgctaattcaagtggatctgaattaacacctaatgatttatcaagttttattcctttcagactcaaccaaaatgctgatgctaatgtcacgattaatgtttatcccgtaagtattgatggaaaaacaccaactgaaggcgctgtcacatcaagtggctttctaagagttgatttcccttaa

SEQ ID NO: 302671 - DNA, 408 bp, Proteus mirabilis
atgaggcagggtgattgtttatgcggtagagtttcgatttttactgatagttcaattcaggatatttccatttgtcattgtagtatgtgtcgaaaatggaatagttctccgtttatgtctattgactgtggcgcaaatttgaaaattaagggagaggaatatattactcgctacacatcttctgattggggcgaaaggtgtttttgcagcgaatgtggaacacatcttttttattatctaaatccatctaatcaatattacgtttctgctggactatttaagctatctgaacaaagtcgtttggctgtgcaaatttatacagattgtaagcctaatttttataattttgctgaaaaaacgccaatgttaacagaacaagatattcttaaaatgtttactaaaagttaa

SEQ ID NO: 302672 - DNA, 336 bp, Proteus mirabilis
atgattgagcgaggcatcattacacctaactataaaaattcggctcatcatataattatgtctaatgctaaagatgtacgcatgcgttggttaagacgtaaaatgaatcgtttggggattgatataaatgatgctataaatggagtctacttaccaacatcttctaaaataaaaattgatgtaggtacatccactatagctcattcaaaaatacatactgcattatataaacagaatgtatttgatagacttaaaaatataaaagatgcaacggagtttagacaggagttgaataaaattgcagaagaaatattaaatggtacatttagctattaa

SEQ ID NO: 302673 - DNA, 324 bp, Proteus mirabilis
atgaaaaaaaatattttaggggtgttatttgcattgctacctatgggtgttgcaaatgcggcatatctttctaatgattatcctgtctgtatttcagaagattcatttaacaggttatcagctgcagccaaacataaagacttggatgcgatagaaaaaatgttagcttcagaatgtacttacgtaaaagacggaacagaaattgagaaagtggtatctcaagggtggacgtcaggtattgctcatgtaaaagtttatgtttctggaaattttattgatctatggacaaattcagaaaatcttaaatcgggtacaaaagagtaa

SEQ ID NO: 302674 - DNA, 204 bp, Proteus mirabilis
atgagtaaaattgtcatttctgtactagtgattgcagtccttaacctgctttcaataaatactgtatcagcccaaaactacccttgttctggtaagaaaggcggcgtatctcactgtgagaatggtaaatttatttgtaatgatggaagcacaagcaaatcaaaacgagtttgtactgatgaaagtgatacaaagaaaaaatag

SEQ ID NO: 302675 - DNA, 708 bp, Proteus mirabilis
atggaatttctattcattgtatcaatttttttatttttaatatctgtcgtttgcataactctaggcatgataaaacctagcatcatcaagttaaaaaaccgcaaacaatcgtttattgcttttcttgttacctttgttttatcaatcattggggttcttaatttcgctcccgatactcctgacaaccaagtcaccgaaacacaagaaacaataactgattcttttgtatgtagtaataaaaatgcagtttacccttcaatttctgccatgatagaagattttaacgactatccatcagaaatgaatggctttgagcttattagcgaaaacccattaaaaattagattatccgcttttgctttagataatgattttagtgatgttaaagataatttagctaaacgagctcttgtttatggcatattccgtacatttattaacacaaacaatgatagtattactatcgtttctaatttagttgattacaacaatagttataaaaagctaaaagatagtccagaatacacagctacaattaccaaagatcaagctctaaaaattacccaaaaatatattccaatcaattcattgaatgacttaattgatgaaaactgctcattcacaaaacagtttaatgaattacgttatgacgatagcggtaaaaaaggttttgataaattctttaatgaattaacggcaaataaataa

SEQ ID NO: 302676 - DNA, 501 bp, Proteus mirabilis
ttgaaatcaggcgtcacttgtgcgcataccggcgttgggcaactgattattgcgggggaaacctatttgggcgtgggcagtttaggcgaaatcagtcagttgaaagaaaataagacaaccagccccccacaattacaacttaaattaaccggttttgataaatcgctggtaggtacagtgatgaatgagcaaagtcgagggcgagaagtgcggttgatgatggtcgccatcggtgaagagggaaaaccgcttcttgctgaggtcttatttgtcggacaaattacatcgattaatgtggtgtctggtgaagagaatgccgtatgtgttaatgtatcaaaccgatttgagcgatggtcagtcggtttacccgatcgatttaccgatgaatcgtggtcatctcgacgacaaggtgatcgcatctttcgctatgtggctcaaatggctgaacgggcgatttattggggtagcaagaaagatgcacctgcatttatttataaataa

SEQ ID NO: 302677 - DNA, 399 bp, Proteus mirabilis
atgaaacaacccaactggacacttaaattacctgaaactataagggcggcgatgagtcgccctttttcatggggtgaatttgattgttgtatttttgcctcggaatgtatttatgcacaatgcggtttctcgccaataaagccttatctcaatcactataaaacgaaagctgaagccttcaatctgatcaaatctaaatttggctccttagagaaagctgtttcacgctatttcaagcccattgagattgagcgcgttcagcgtggcgacctcgtactgtttaaaggtgaggacggtgatagtttagccgtggtctgggcgggatattattggggcgtcaccccacaaggcgtgaagcgggtacagattaagccaatcaaagcgtggagagtagaataa

SEQ ID NO: 302678 - DNA, 546 bp, Proteus mirabilis; identical to SEQ ID NO: 297504

SEQ ID NO: 302679 - DNA, 756 bp, Proteus mirabilis
atgctattaaaaaaaatatttttagtgtcttttttattccctactctctcttatgctaataccttaccaacatcaaatatagataattcactaactcccaaccatgataatcttgcccgtttttcactcggtgacaatagtcaagcatccggcagcggtgccactgctataggtatcaatagccaagccaccaatactcgttcggttgctattggttatggtgcattagccaatgaggaaaatacggtttcatttggtaatagtgaagagaaacaaacagcacgactcaccaatgtcagtgaaggtaaaaataatactgatgcagtcaatctggcacaaacaaaagcactacttagtaaaaataaaaggttaactgatagccaaataaatgtttttagaaatcaaactaataataacttaaacaccatcaaaaaaaccatccatgaatttgatgattattatcgaagacgccaagcatcaattaccgatgcaattgaagcactggataaaaaagttatttcattagaaaaaaaagtctatgcaggtattgcttcctcaattgccatgaccaatattccttatcttactcatcatacttttagtggtggcatcggtattagtaattatcgtactggcatagcacttgctggaggtatccaatatcagccaaataacgatatagcatttcgatttaactcatcaattaatagtgaacaagagcttatttttggtggcggattagcttatggctggtga

SEQ ID NO: 302680 - DNA, 1089 bp, Proteus mirabilis
ttgggtattaacaaacctactggcaacgctgaaaaagaagaaagtatcacctctaaccaattggataataccccttcggtatctagcaaaagtaccgttgaaaaggaaactaagcctaaacgttcacgtaaaaagcaagaagtagcccctaaaacagaaagttctccggtggttgagcaaactgtagaacttaaagagccagaaacatcatcagtacaacaagataattttgagcaacgggctagtgtgcttgaggaagttcttaacgctggtgatcccaacaatctacatatctggaaacgtgtgcaacgtacagacccgcgttttactaaaccgctagaaggtgttgggtttgcaggaactagcataaacagcaattacatgattatgcgcgctactgaaatattcggtcctatcggtgaaggctggagctacgaagttattgaagaaaagcttgtaccaggaaacccaataactgagcgagtatttgacgaaaacaacaaacaaattggcgttcgctttctacgcgatggggatggttctctaaagtatgaagaaaatcactctatcaaaattaaattctggtacataactgaaaaaggtaaaaaagctgaatttgaaagctatggagcgaccccttacagatatatgacaaataagggaatgaaatcagatcctgaagctattaaaaagtcactcactgatgcaatcaaaaaagccctatcaatgcttggctttagctctgatgtctttatgggtatgcatgataaccctgaatacttagcgagtaataaacttgagtttgaaattaaaaatgccagtgaaaaagcggaagacatcacacgtattcgcaaagaattagacgagaaatttactaaacatacggaagttatgcgtagtgctgttacagcaaatgaattacgaggcattgcatcgacattaactcgtgaaatatctgcacatattaaatcagctcaagaacgtcgtgacgaagattacgagaagtatttgtccggccgtttacgtcgattaaaccaaatcgaaaaagagtgtttagacaaactgaaacagaaagaagaggcaatctaa

SEQ ID NO: 302681 - DNA, 1089 bp, Proteus mirabilis
ttgggcattagcaaatctaacaacactaaaaaagaagaaattactactaagttaactcaaacagataatgcatctttagtatccaaagaaaatatagttgagaaagaaactaagcctaaacgttcgcgtaaaaagcaagaagtagcgcctaaggcagaaacagctcaagtgattgagcaaactgaaaaacctaaagagcctgaaacaccatcagtacaacacgataattttgagcaacgcgcgagtgtgcttgaggaagttcttaacttaggtgatgcaaataatcttaatatttggaagcgtgtacaacgtacagaccctcgctttactaaaccgttagaaggcatgggatttgtaggaactagcataaacagcacctacatgtttatgcgtgcgactgaaatattcggtcctattggtgaaggctggggttatgaagtccttgaagaaaaatttattgatggaaagcctcttgtagaaccagttcttgatgagcgtaataaacaagttgcaacccgttttttgcgggatggtgacggctcgttattctgcgaacaaaaccactcaattaagatccgtttttggtacatcatcgaatgtgaaacccgcggtgagtttgaaagttatggggcgactccttatcgttatcagactaactatggcattaaagttgatggcgaagttattaaaaaatcgctgactgatgcaatcaaaaaagcactatcaatgcttggctttagctctgatgtctttatgggaatgcacgataatcctgaatacttagcaagtaataaacttgagtttgaaattaaaaacgcgagtgaaaaagctgaagatatcacacgtattcgcaaagaattagacgaaaaatttactaaacatacagacgttatgcgtagtgctgttactgagaatgaattgcgaggcattgcatccacattaacgcgcgaaatttctgcacatatcaaatcagctcaagaacgtcgtgacaacgattacgagaaatatttgtccggccgtttacgtcgattaaaccaaatcgaaaaagagtgtttagaccaactgaaacagaaagaagaggcaatctaa

SEQ ID NO: 302682 - DNA, 177 bp, Proteus mirabilis
atgacaattaaagactctcttactcacgaatctctcgttcgtgataatcaccccatattacctgatgatggattagaccatacacggtgtcatattgatcgcctccatgcatcagcaagagcgagaacaaaagcaccttatcagcctaaggttaaaccacaaaaatcgacgaggtaa

SEQ ID NO: 302683 - DNA, 270 bp, Proteus mirabilis
atgaataatgaatttgaaatagaatttacatttaaatatctagaccattttgattaccagcatgaaattaaagttagacacttcatgtttgatgataataagaaatggtacgacgaaccatttaaaacaggtcgaacgaagcataatttgaaggcttcactattatgtaaatgttgctcaaatgactggcgagataatggccgtgatacaaatgaatttgagtgtaatcaatgtggaatgtttataactgtaattggagttcttatttaa

SEQ ID NO: 302684 - DNA, 339 bp, Proteus mirabilis
atggctaagtctccagcagaacgtaaagctgaacagcgtaagcgacagaaagaattaggtgtaaccaaaattgaattatttgtagatcatcaagaattagaaatgttaaagcgcaattgtgttctaagaatgcccggacgtgaaccgtatgacgttgttgaatacttacagatgcttattcgtaaagatgatgctgaatataaaaggcaagctgagaagttgtctaagcaaaagtgtaaacgctgtggggatcagttacctgttaatcagtgttgtatgacgggagattctgaatgttgggtaacgcatggatatcatgagttgaaactggttatctaa

SEQ ID NO: 302685 - DNA, 825 bp, Proteus mirabilis
atgtctactgcaacaaatctgaatgaactacaggaacaagttcgctcccgctataatggattaagtaaaaggctacagcaggttgcacattatcttttggataataaaaacagtgtagcatttgatacaatcgcgatccttgcagataaagcaaatgttcctccatcaacattaatccgttttgccaatgcatttcatttcaaaggatttaatgaaatgaaacttttatttcaacgtcatttaatgggtgaaatggataatgaaaaattaacctataagcagcaatacaaaaaggaaccaccaaacttaaatgagccagattatattctgcaagagtttgcacaagccaatagccacgctttgcaacagttagctcatcaaacccataaggatatgttaaataaaactatacaactacttgagtatgcagaaactatctatataggtggttttcaccattcttttagtgctgcgagctatttttttcacgcgctttctcatatcccttgtgaaaccgtctttgttaattgcctagggggaatgtataaagaacaacttaggaatattacacatagagatgtgctgtttggcatccatttccacccttattcagaagaaatgcaaaaaatgtgtgagattgctgcttataaagaggctaaacaaattattgtaacagatagccccataagcccattagcaagtctaagtgatgtttgtttaactgtaaaagaagcacaaataaaaatgtttcgttctcaaacctcaacattatgtttactacaagcactttcagttgcattcgcttttagaaaaaagagccattaa

SEQ ID NO: 302686 - DNA, 855 bp, Proteus mirabilis
ttggataacttccaatttgataaaattgatattacagattcagtgagtattgcgcaattatttgctgatcaccgttttgatcgagttattcacttggcggctcagcctggcgttcgttattcaattgaaaacccaatggcatatatcgatgctaatattgtaggccatattaatatattagaaggttgtcgccatcataacgttgggcatttgatttattcgtcatcaagctcggtatatggtttaaatcaaaagcaacctttctctacagaagatagtgttgatcatccggtgtcactttatgctgcgacgaaaaaagccaacgaattaatgtctcatagctattctcatttatatcagctacccacaacaggactgcgattttttaccgtatatggtccttgggggcgtcctgatatggcactatttaaatttactaaagctatgttagcgggtgagcctatcgatgtttataatggcggaaatatgacccgtgatttcacttatgtcgatgatattgtcagttctgtggtacgtttaattaatattattcctcaacccaacccaaattggaccgtagagcagggggaaacttcatcaagttctgcaccttataaaatatataatgtgggtaatgggcaacctacaaagttaatggattttattacagcaatagaaaaatcactcaatattaaagctaaattgaacttaatgccgatgcaagatggtgatgtactttcaacctgtgctgattgtagcgatttagctcagacaacaggtttttcacccaacactgcagtagagtatggtgtgaagcagtttgtggattggtatgtagattattaccagcaataa

SEQ ID NO: 302687 - DNA, 534 bp, Proteus mirabilis
atggaaagctcaacacaattaatattgatcctagctcttgccacattggctccttttattattgctgcaggaacttgttatttaaagttttctatcgttttagtcatgactcgtaatgcattaggtgtacagcaagttccttctaatatggtacttaatgctatcgctttaatgatggctctttttgttatgacaccaattactaaaaatatttgttactatgttattgaaaataaagtggatatgtcatctccagatgcgatcgagtcattttcaaatgaggcgttaggcgattataaaaaatacctatatcattactcagatcctgatttattagctttttttgaacaagcgcaagagaatagaccaaatagtgatggtgataaagaaaacatagaaaattcactcttatcattattaccggcatatgcacttagtgagataaaatctgcttttattataggtttctatctttatttgccttttattgttattgacttagttgtctcatgcattttattgaggacaaaataa

SEQ ID NO: 302688 - DNA, 546 bp, Proteus mirabilis
atgtttattccattcctcaatagtcgagttctcaatagtcaattattaaaatatattattattttttatatagcattaggaataaaacctagcatcacgataacaggggttttaagagagacttgggctattgttctaattagtgagttaattataggtctagttatcggcttgctacttgccacgccattttggatagcttctgcgtttggagaattcgttgataatcaaagaggagcaagcataggagatacaattaatcctactacaggtattgaatcgtcagaatttgcgtcattaaccggattgttttgtatggcctattttttagctacaggtgggctcgttgttttaatgagtaccataaaagagagttacgatgtttttcctattgggtatgttaataaaaatatcggttacgattttatcggtcattggctaaatgatatggttaaagtggcgattattttggtttctcctgtattaattaccatgttcttaagtgaagttgcattaggggtttattcattattttgtcctcaataa

SEQ ID NO: 302689 - DNA, 231 bp, Proteus mirabilis
atgtatactcaaaaaatcctacaacagaaaatatctaatatcacgatctggcgtaaaggtgataacagagcgccccataaaccactgttactcttattagcgctttccgagtaccgcaaaggccatccacgactatttaattatggtaatgaaattcatcaacagttattagaattattgatgaattttggcccatctcgccgtgagcattatccaaacctgcctttctga

SEQ ID NO: 302690 - DNA, 369 bp, Proteus mirabilis; identical to SEQ ID NO: 297807

SEQ ID NO: 302691 - DNA, 312 bp, Proteus mirabilis
gtgatcaaatcaaagaccaaagaagaaagacagtggctatcagatgtagcagaactgggttgtatttgttgtcgcaatatgggatttggagccagtttagcggaaatacatcatgttagaacagggcagggaatggcacagcgagccagtcatacagatgttttaccactgtgtcctccacatcatagagcgtgttacgaaaccggctttcacgcttcgcctaaatcgtggcaagaaattcatggtagtgagattgagttattagaacagactaagcaagaagtaatggagttacgagcatgtcgagtataa

SEQ ID NO: 302692 - DNA, 594 bp, Proteus mirabilis
atggcacagcatagctttatcaaaatgtctaacgatactcttgtaccggctaaccctgttacgagagattttctgcattcaaaaatcaagtgtggtgatgtgctttcagctaattttaagaaagctcgtaaccctagatttcatcgtaaatacttcgcattactcaacttaggctatgaatattgggaaccagttggcggtaccatttcacctgaagaaaaagagcttgtgcgtggttacatcaaattcctttcatattacacggataatgctgacgcgctgttatcagcatccgatatctatctagaagaagttgcacaaaatcgtgcacaaaatatctcagcaacaaaatcttttgatgcttttcgttattgggttgtagagcaagccggttattacgatacgtatgaaatgccagacggtagtttacgccgtgtcgctaaatcaatcagttttgcaaatatggacgacttagcatttagtgaactctataaagccacactcgatgtgctttggaattttatccttcgtaaacagtttcccactcaaaaagctgtagaaaatgcagtatctcaattattaagtttcacgtag

SEQ ID NO: 302693 - DNA, 318 bp, Proteus mirabilis
atgtcagaagataataacaaaaataccccaaatacaatgactagtgatattggaaaaatatttaaagatatatgcgcccaaataaatgaacagacaaaaatgataaacgcacttaatgacgctaatgccagcctaagagctaatatgcttctatcgtttcgcatatcaaatttattattgaacagcgtgttatctaaagaagagaaagatgcggcatataattcactttataattcaataaataaaggtgaaaatgatattcttgagttaagacaactagagcatttaaaccttatttttggtcgaggtgatagctag

SEQ ID NO: 302694 - DNA, 282 bp, Proteus mirabilis
atgagtaatcaagaaaatatattaatgatggatggtaacggggtcatgaaaaacagtaacggcaatgtaatagctaaaggtgtgatgattaaatctgaattactattatctacaccatcaatagaagatttagtgaaaagaattgagtcactggaaaaacagctcgctgatatgcaaataacgagctgtgaattagaggatattgataaagcatccaaagaaaacgcgcaacttatagagagtttgaagctagctatcacctcgaccaaaaataaggtttaa

SEQ ID NO: 302695 - DNA, 159 bp, Proteus mirabilis
atgaaaaaatatagtgctattagtgtattagttatcattttaagtttaatgatttattttagtttttacttcaatcaagaaaaagaaaatgtaataaattgtgaagcaaagttaattatttatgataaagagtatacattgttagatgagaataaataa

SEQ ID NO: 302696 - DNA, 261 bp, Proteus mirabilis
atgcttaaaggaatggattcttttaacaagaaaagtattctcgaatctacccgcagaacattagatagcatggttaaagatggcttgttagaaaaaatatccagctatgagagacgacaaaacaaacaccaaggctcaagttcatcacctggtgttcgctgtgtcgttagtcggtatggcttgcgtggaaagtgtcgtcttatgaaatacgaaaataacggggaggactttattgaaggtgaatgcgctcaagttgattaa

SEQ ID NO: 302697 - DNA, 180 bp, Proteus mirabilis
gtgacattagatgttattgttgaaaatagtgaagaaaatgaagaggatgagcaaaacgatgccataatagaagatagcattgatttagctcaatcacttgatttagctcaatcacttgatttaaattcaattggcgctattccgattacaatatcttttcttttagccaatgaccgataa

SEQ ID NO: 302698 - DNA, 564 bp, Proteus mirabilis
atgaaatcactattaaaacagttattaccgccgatgagttatgcgctagaagcccctcgacttgatgctgaattagagggggaagcgcactgttttctactcgctcaagaaagtgctatccgtgcccataacggtgttaccccttattttgcacaaaacttactttccgattgggagcgtgttttagatgtcacgcctgatgaaacattaagctatcagcaacgtttggagcgtgttttagttaaactcgctgaaacgggggggttgtctattccttactttattcaactggctaaaaaattgggctatcacatcactattgatgaattagatccttttcaagcaggcgtgagtcgtgccggtgataggttgacacaccctggtattttatgggtttgggtggtcaatattttcggtgctaaatcgcaattttatcgtttccgcgccggtggttctgttgcaggtgaacgcctttcattttgggcagataccatcattgaagctgtttttaatgacttaaagccggctcataccttttgttactttacttatcaggagtcttga

SEQ ID NO: 302699 - DNA, 1062 bp, Proteus mirabilis
atgtttattacgcctacatttgaacaaatccgcgataccctattacatgatctcaaaaatcagctccccgatgcggatattggcccggacagcgattattttgtgcgtgcctcttccgttgctagtgttgcagagggcatctatcagcatcagagctggattgtacgccaaatctttcctgatacggcggatagcgactatttagaactccatgcacgaacacgtaatttaacccgtaaacctgcgactaccgcaaaagggatcgccgtggtcacaggctcaaaaggtgcggtattacctgccggaagccaaattcggggcgataatgtttcctgttttaccacagctgaagtgaccttacctgaaaacgcccaggcgaccgtcactattcaagccacgcaatcaggcacaatcagtaatttatctacccccacgacaggtgaactggttaatgcgcctatgggcgtcaatagcttagtggccattaatcaactttcaggtggcaccgatattgagtctgacgccagtctattagcacgtttgctcgatattattcgtcgcccacctgccggaggaaataaatatgattaccgccgttgggcactagaagtgcccggcgtaactaatgcctttgtttatccgctacgtcgagggttgggaaccgtcgatattgcgatcacctctgctgacggtctgccttctcgtgacattatcgaagctacacaagcccatattgatgatgttcgccccgtcacagcgaaaaattctaatgtggtcgtcccgacactgagaaatgtcgattttgaggtagaaatcacccttgaaggtgttagtttagaagcggccattgcgcaagttaaaaacgaaattcaaatgaccatgagtcgtattgcacctggccagcgtttaattcgtagtgaagttgaaacggctatttcattaataccaggtattgtcgaccgccttattgttaaaccagccagtaatgttatcgcattggttgatgaatcccatcttgaatggctacgccctggccgcattgtggtgaggcaaccgcaatga

SEQ ID NO: 302700 - DNA, 351 bp, Proteus mirabilis
atggacagaacactcgatacttcaacgggcgattatacgggaacccgaacaaacagcctctctaatgccgtttatttacgtctcatgacaccacttggcagttggtgggctgaccgttcattgggttctcgattacacgaattaacacgcgaaaaagatatttcgcgtgtttatgtattagcgcgtcaatacgctgaacaagccttacaacctttactcgatgatggtcgagcacgctcgatccaagttaccctccatcgtgatggtttaaaacgggcggtactgtggattgacattattgatgccagtcatcaaccgcaaaccttcaaacatattgtcaggattgcataa

SEQ ID NO: 302701 - DNA, 654 bp, Proteus mirabilis
atgtggaatcaaattaatcaacgtattaaccaagcgttaaacggcattcgaatggcatttagggcagtattaaatgccacagaaagtcatggcaaagtccaaatcatgcaaggtgaaggtttatcgggtgagtcattacaaggtcaggaaatattccaacactatggctttacctctcaccctctccccggcacagaagcaattattttaccgcttggtgggtgttcttcccacagtattgttattgccacagagcatggagcttatcgtcttgcggggctggaatcgggcgaagtggctttgtataccgatgaaggggctaaaattgtgttaaaacgggggcgtatcattgatgttgaatgtgacctttatcgtgttaactgcaaacaatatgaagtcaacgcagaagataaagctgattttaacacgcccatggtcaccacccgagagcaattgaccgcaatgcaacaaatcacaggttatggcggtatggcaattaaaggtggcaaaggtgctaactttgaaggtaatatcacgcaaacttcaggaagctatcaaactgatggggatgttaaagcaggagacatctcccttgtaggtcataaacaccctaacggtcacaatggcacagatactggtatagcaaaatcttaa

SEQ ID NO: 302702 - DNA, 1248 bp, Proteus mirabilis
atgcttatgcccgataataccgagttaaaagataaaatcacattactgattggtgggacggcgcatagtgattggcaaacctaccgcattgacaatgattttttaaaagcagctgatgcatggcaattatcccttggcttgcctgacggttattttcctgcggatgcggtaagaggcgcgcctgttaaagtgaaaatgaatgatgatgtggtgttatcaggtcgtgttgatgccgttgtgcgtgatatttcccgtcgtggtataacactaagtctctcagggcgtgatgattcggcgattttggtcgattgtgctgcccctattttcagcgctcgtcagttaagtcttgatgaagtaattgccagcattgtacgtccattagggattaaaaaaatccgcattcaagccaagggagttactcgtaatgatcgcgtgcatattgaaccgggtgagcgagcatgggactcattaatgaaagctgctgccgggcgtggtttacacccgtggttcgaacctgatgggacattaatcattggggggccagattatactcaaccaccggttgcacatctgatcatgcgccgagatggacaaggtaataatctgatatcattgtcagacagccgtcatattcaagggtgtttttcagagctaatgatactcgcgcaaagccatgcgaccacgactagcaataaaaaactccccataaaacccgtcgaattagcagctcccagtgataaaacgcccaaagtatatacagccacatatgatgcgacagataacgacactgcggctatttcaagtgcatcaggccagcatcgtctaaaaataaaagtggtcgacccaacagtaccgtattatcgcccgcaaattctgacctcgggagatgttgataatcaagagcagctccaatatcgtgccaaaaaagccatggcggatgctcgtttatcgggtcttgatattgtagcggaagtatatggtcaccgaaccccagaggggcagttatggactcctggtcaacgcgtacatatccaaagtgagttgcacggtattgatgatattttctttttaatgggacgtacctttattgggggacgccccggtggagcagtgacacaattgcgttttaaagaggatgcggtgtggataccggatgcttttccaacacaaaaacgacaatatcgcagtaaaggaaaaggtaaagatcaaattaaacctgtcgacctgcccgctcaaacaggtcagtaa

SEQ ID NO: 302703 - DNA, 1425 bp, Proteus mirabilis
atgagttggcaaaccgatttacaacaagccagtttccgtggtgtgcgatttgatgtctacaagacaaaagacagtatttcgcgagaggtcgcaacgcatgaatacccctttattgaaggggggaacgtgatggatttagggcgtaaaccccgtcattttcgtattagtgcggtattttggggagacaattataaacgtgatatggataacctaatagcggtgcttgataagccaggcaaaggtgagttagttcatcccattcatggctctattgcgcaagttcaatgcattgaatacagcattagtcatgaagctgaaaacgttgatagttgcgccttagagttggttttcctcgaggtgaataccggcacacaactcgcacaggtacatcctgaacagctcggtgatgacatttttgacaaaatcaatcaactctctgagcgtatgagtgacctgtttgaacaagtgattgctcccatcaataaaggtgttcggtatctcgcaaaaggtaaagcgacattatcaggcatgatgaatacgttaattattatgcgcggggattttaatggctcattcagtgatggcgtaaattatctcagttatccacgtgcctttatgaatgatttgcaatcagttttagatgttcgcactcgtgccgtagccgatttgctcaatttaaaatttcctggtgtgattaagacaaaaccatccaatgacgataaaggctacagctcgccgtttatgggctcaaatatgccaccaaatggctatcttcctaatgactcacagaccatcaacgtggcacaaggagtaaatgcgaccactttattatcggcgtggagtgatagcgttacagtggttgatgaattggtgagtttacctgttgctttagtgcaagaaaagcgtgtcgccaccgttcccatgccaagcaatgcacagcctgccgatgtgcaggatttggtggtgctgtatcaagtcatgggcatggctgaaatggcggccatcaccacgcaagtgcttgcagatcctgttcaacctaaccaaatgtcacccaccgatattgaattgatggtcaatgaagtgaggagattagccttacaggctatcatcacgttacgcacggattatcagcctcggacacaatcagtcagcgctgatgctgaacctatcggtttattgtggcaaggtgtggtgttatccctcaaagaggtcgcactaggtgtacaaaccttggggctacgtgttatagaaaaacgcccgccattgacccgtaaaaccttaactgcaccggcgaactttcatttactcgcacacatctggtatggcgattatcgtcgcgccaccgagctacaccgtttaaatccacaggttcgcaacccaaacttcttacaaatcggagatgtcatcaatgcttatgcccgataa

SEQ ID NO: 302704 - DNA, 2298 bp, Proteus mirabilis
atggctaaagaatttaaactctcgatggtcatttcggcacgtgatgacgcctctaaggcaattaccaaagcgatgcgtgatagcaccaaagagagccagaacgctgaaaaagctcaagagaaactcagtaagcgccaacgcaccacctcagaagaaggtatacgtcaaaatcgggcattgggtgaagaaatcaagcgtcaaaaccgtgcccgtgaaacactaggtatccgcgctgagcgtgccatacagcgtgaaatccagcaaactattgcatcttataaccgtttagctcgtagcggtacactctctattgatgaacaatcacgcgcctatgagcgtatgcgccagcgtgttagtcagcttagagttgaaatgcaaggcatgaatagattagcacgagtctctgatatagcaggaagcattgctaaagcaggtggtgctctggtcgcaggaggaatggttgttgctccccctgttaaaaaacaaatgagttatagtcgaagattggctgatatgagtaatgtcgcctttaatgatcgtgatatccaagggcgtattgaaggtaaaaaagagttagatattattattcaagattctattgccaaaggcggaggaactaaagaagaggcagctaatcttctcggtggattgcttgcaaaaggcgtttttaaatttgaagaaatcaaagagctaatgccacttttacaacagtattcaacggctacaggtgttggcggtgaagagttagcaaaagtgaccgagtcattgaaagagtatgggatcacttctgctgatgaaatgatgaaagtgatggatgccgctatccgctctggccaagaaggttcatttgagttttctgatatggccaagtggttgcctgaaattttatctaaagctaaaggtctaggctatagcgggtctgaggatattgttaagctattagcttacagccaagggatgatgaaaaacgcaccaacagccgataccgcaggtaataactttgtcaatttactcaacaaggtttcaagtcaggaactcgcaacaaaagccaaagccattaaagtggatggatatggcattgatatggcgggcacattaacacaagctagagctgcggggattgatcctatttccgctttagttggactgactgatgtcattgcacaacaaaaccccgagtttagaaaaatcgaagcgcaactgtctaaaactgataaaaattcacctgagtatcaaaagctacttgagtcacaacgtcgaattcttgagtcctccgctatcggtcaattaattgccgaccaacaggcgcttatggggcttctcgctgcacgtgagtatcgtggttatatcaagcaagttgaaaatgaaagtaaaaaacagcttactttacccaaaggtgaaggtgagggttatatatcgtatgcggttatcgcacatgaaaatgacttcaaagtacaacaagctaaagagcaaagtgattttgctcagatggacgctgtaaaaccactgtcagattctttgggtaatttagctgataaattcacagactttagtaaagagtttccaggtctcactaccgctgtgatgggggcaaaaacaggcattgaagccatgactcaagcggcgattgcctttgctgcccttaaatttttattgggtggcagtggtggtctatttaatcgagcaccgagaacaatccccaatgttccgcctgcgacgacgacccccccattaagcggagcaaaaaacgctttttctaaaatacttcctaagggcttagggagtaaaatattaccgattatcagcacgggtataatggcgtatgaaggcgcacaagattttcccttaattcaactacaaactaaagaggaaaaactgaatgactatcaacaacgtttcggtcgcgaactcaatgagcaagaaaaagcccttttcggcacgcctgggtttaaagatgcactggatgatgtgttaaaatggttgcatccgactaaagatgaacataactcatcaccctctcaacgttctcccgcactccccccttatttgacaggcagaaatagctcaccattatttgctgtacctgattatgggcgtcccatcacaagcagtgatgcgcagaaagtggcttatcaaccttctgttaagcccaatacacatcatgctctgccatcgatacaaacaccccagcacattgagttgagaacaaccgtggaattagatggtcatgtgcttgcagaagcggtgaataaaatcaatggacaggatgccaatcgttctacgggaggattttattaa

SEQ ID NO: 302705 - DNA, 357 bp, Proteus mirabilis
atggcagacataaaaccacagatgttactggatgggattgaccacgggggaaaacgtcacctgatatttgccgttaaaattcctgtgatgcgtgacgtctatgatgcacttgatgaaacagaggaagcctgcggttcaacagaaaccaaaggggctgacttatattatcgcatggcgctcaccaaacgtgcactcacacagttgggcgatatcccccaagaggatatcaccactgatttcttgctggataacctcaccagtttggattatgacgtaattgaccgcgcgattgatgaggcaaaaaaaaagcgacgcgacgcgaacaaagacgcgatagctttcgaaacgttgtcttag

SEQ ID NO: 302706 - DNA, 375 bp, Proteus mirabilis
atgttagaagaatatgcaggtgcgattgttttagaaattgacggtcgcgaagtggaagttaccgacatggatgtgcaagaagtcacaggccgtaagcttgtcaaaaccatgaacaaaacaggacgcgccaagggattcatgcgcggcattgccacctatgaactgtctatttctgttgtgatccctttaaacggtgatatggattggggcgcgattgaaggctcgaagctgacccaatacccgattagtggctcagggggtaagcgtatttcataccttgactgttttgtgacagaggtcggggaaaaatattccaccgataacgaagcgaaacgcgacctaaaactgaatgcattacgtaaggtgattgaataa

SEQ ID NO: 302707 - DNA, 1422 bp, Proteus mirabilis
atgaccgtaacctttgataccattccgggtagcattcgcaaacctgggaaatattttgaatttaatacgcgtatggcaacgcgtacgttgcctggtaatccccaaacgctcttaattattgcccctatgttatcggccgcacaagcagagccattaatccccattgatattggtgatgatgatgcggcagctagcgcatttggttctggctcacttgcacacatcatggcgaaatcggcgattgaagcaaatagctatttacaattgcaggttatagggattgaagaagccacggcaggtaaaaaagccagcgccaccttgaccatcagcgcgcctgccacgcgtggtggcacgctctcactctttgtgtgtggtgagcgccttgatgtccctgttgaaacagcagataccgtatcgacacttaatcaggcacttatcgatatagtcaatgcgaaaacacacttacctgtcgtagcttcactgaccgatgaagccaatggcaccgtgacgctcaccgcgcgtcaatccggtgattggggtaatgatattgttattgatgtgcaatcgacggccaaaggggtgacggcaaccgtgaccgcgatggtcggcggtgaaaataatgccgatattcaacctgcgcttgatgccgtatttgcggcaggtcataacattatttctattccatttagtgataaagcctcgctgttaaaattacgcacccatttagaaaaagtcagtggtgccatggagcaacgcggcgcaattggtacggctggctggacaggcacgctcagtacaggaaccactctcgccagtgacattaatgatggtcggacatcaatcgcatggtatccaggctcagtaaaattaccgagtcaaatcagtgcggcgtatggtgctgtcattgcttcggaagaagaccctgcgcgtccactcaacacccttgaactgaaagggttagatattgcccctgtgaccaaacgcgcgggacgcaatgagcaagaaaacgccttgcacaatggcttaacaccgcttgaagtgggcgcaggtaaccgtgtgcagattgtgcgcgccattaccacgtatacccgcaatgtggaaggcgttgaagataccgcgttactggatttaaccaccattcgcaccttagattatacccgtaaggcgtgccgtgagcgtatttcgcagcgttttccacgcaacaagctcaatgagcgcacgcgcgtgaaagtccgctctgagctgttggatgtactgattaaactcgaagaggaagaaatcctcgaaaacgtggaagaaaacaaagggctattgttggttgagcgtgacggtaaagaccctaatcgcctgaatgccgctatccctgccgatgttgtcaatggcttgcatgtgtttgcgggtcgcattgatctgttcgtctaa

SEQ ID NO: 302708 - DNA, 186 bp, Proteus mirabilis
atgaacacactgttagtgaaagccgcacccactttacgggtgtcatttgaatatcagcaccgtcgctatattaccgatgttgaggcggtatctgtgcctgacaccgcttattaccgccgcctactgactaacggtgatttagtcttggtgagcaagaaagccacaaacaaaggacaaaaatcatga

SEQ ID NO: 302709 - DNA, 654 bp, Proteus mirabilis
ttgatcactcaaattgaaagcagcatcattcaacgtctaacgctgggtatggggcgtatgttacgtgaagttgccagctacagtggtgaactcgatgtggatatgggcaatatcatccgggcatttccggcggcttgggtaacgttcggcgggatcacaaacagcaaatacaccagtaccagccgacagaaagtgattgtgacaggtaaatttgtggtcatggtgggtgattataacacgcgtagtgatgctgcaagccgtatgggcggtgccaacctgaatgaagtgggtacgtatcgacatatacacggtgttcgtcgtttgttaaccgggcaggatttggggctggccatcgacccattgatgcctggtgtcgtcagaacgctttacaacacgcaagtcaatgagcgtgcactgtcaatttttgcgtgtgagtttgaaacccgttggcatgagcaggttctggcgaatggcacttggcctgaatttaccagcaaccctgacgaagccgataacctttttaatctttatcgcggcaagcttcaacagcccgaccctgatttgttgcgtgtcggattgcactatgacccaccgggtgctggcagtgctgaagcgcctgcggacttagtgccgacaaggaaacccagaccatga

SEQ ID NO: 302710 - DNA, 429 bp, Proteus mirabilis
atgtacgccacacaagatgacatggttaaagcgtttggtgagcgtgagtgcgtgagcctcactgatgaagccatgacaggacaaatcaatgctgaggtgatggtttatgcgctagagcgtgcgagcagtgaaattgacggttatcttgtggggcgttatgcgctcccctttgcagatggtgctcggatattgacggggcgatgctgtgacattgctcgttaccatctggcaacaacgtataagatgtccacgcctgaaatccagacacgctatgacgatgctattcgtttttttgagcgcgtggctgaaggcaaaattagtctggggcgttccgataacggtcaagtgatcaagtcgtcttcacaaatgaaatttgggagcagtcaacgtcagtttggccgtgactcaacgcgcggaggtgcattttga

SEQ ID NO: 302711 - DNA, 348 bp, Proteus mirabilis
atgccgattattattactgcgaaagtgaatgggtttcgtcgctgtgggattgcgcacagcgacaccgcgacggagtacccagacgaccacttcaccaaagaccagttaaacgtgttgcaatctgagccgatgcttgtggtctctgtgggtgacgcgggtacagaaaaaacacagcctgatgcgggtgcagagaaacaaatcagtgcattgaaagcggaagtgaagcgcctgacggatgaaaatcaagccttacacgcagagcttgctctcttaaatacgcctaatgcgcccatagagccatccaaaaataaaaaatcggatgataaacccgcaccgaaaggcaaataa

SEQ ID NO: 302712 - DNA, 909 bp, Proteus mirabilis
atgattgtgaataaagccaatatcagcgcgttatttgtcagcattaatatgacatttaacaatgcattaaaagaggcgccttcaacctggcaaaaaattgccatgaaagtgccgtcgacggggaaatctgaagattacagttggttatccaacttccctgcgatgaaacgttgggtcggtgaaaaagtgattaaatcactctccgcccataaatacaccatcgaaaatgacgactgggaagccacgattgaggtcgaccgtaacgacattgaagatgacagcaccggtaaatatgcggttcaagccaaaggtgcaggtcgctctgcgggcatgttggctgacgaaattgtctatgaagtccttaacctcggttttgaacgtccgtgttatgacggccaatacttctttgatactgaccaccctgtcggtaaaaactcggtttccaataaaggcacgaaaaaactgtccattgcaacacaggcagccgctatggcgtcttacggtgctgcgcgaacggctttgcgtaacatgaaagacgacgaaggtcgcccgctggatgtgaatcccaatatattactggttccccctgcgctagaagatattgcaaatgccctcatgaccgctgaccgtttagaagatggcaaggtcaatatctacaaaggcacagccgaagtcgtggtctcggcgcgtatcacctcagatacagcgtggttcttactggataccacccaagctgttttaccgattatctaccaagagcgcaaagcgcctgtgctggttgaacaaaccgacatgaacagtgacggcgtctttaagcgcaaaaaattcctgttcggtgccgaagcacgtgccgcagggggctatggtttttggcaattagcctatggctcaacagggagtgatgcgtaa

SEQ ID NO: 302713 - DNA, 393 bp, Proteus mirabilis
atgacccaagatagaaatacccctcaccgtgacggtgaattgtttgcggtacgttgcgctgctgccgtgcgtatctatggcgggcacattgtgtgtgctaatgccgacgggtttgctgtcctaggcgcacccggtttaaccgtgctgggtgtttcggatgattttgccgataaccgcgatggtgaacaaggcgatatcagtgtgatggtgcgtcgccaaaaagccttttgtttaggcaacgatacggctaagcctgtcacgcaagcccatgtaggtaaattgtgtgatgtgaaagactctgtgacggtgtgtgaggctggagaggccacgactacccctgcgggtcgtgtgttggaagtcaccgaagatggtgtttgggtctcgataggttaa

SEQ ID NO: 302714 - DNA, 1101 bp, Proteus mirabilis
atgaaaaaatacattgctgtttgtgtcgctgaaattctcagccaaaaccttaacgaaatccagctcttccctgctggcgagtttcgtgctgtcgatggtcgccccgttgaatgtgacgcttggttaatgacgcgtgaaatcgctgaaacgttgattgcacaagtcgcagcccgtcaaacaccttacgtgattgactatgaacaccaaaccctccgcgcgtctcaaaatggtaaacctgcgcccgcagcgggttggtttacggcgttggaatggcgcgaaggcgatggtctttatgctatcaacgtggagtggacggaagcggcagcagcggccattaccgccaaagagtaccgctttatttcccctgtttttaactatgacaaaaacggtcatgtgacagtcttgcttcatgccgcactgaccaacacccccgcagtagatggtatggatgaagtgatgcttgccgctgcttctcagtttgctgcactttctcaacccaccgaagaggatctcactgtggatgacgaactcatcaaagagctactcagtaatctgcgttggatgctgaatttgcctgccaccgccacggcagaagatatcaaaacagaactgcaaaaagcaattgacctgatttcaaacggtcaaggcacgaccgtcgccgccaatcaaagcttagtggatttactcaaaggcaaagaaaccttgattgctgacctgtccagtaaagcctacgacccaaccaaacatgtgccacttgcaggctatcttgaactgcaagcgaagtacaacgaagcgttgaacgcaggtcagcaacaggaagtgaatggcctgatccaggcggcacttagtgatgggcgtctcaatacggccatgaaaggttgggcggaagagctagggcgtaaagaccctgacgcacttaaaggttacctcgaaaaagctaccccgattgcggcattaacacaactgcaatccaagggtaaagcccccgcaggcgcagagcaaagtacctctatgaccacagagctgactgaagaccagttggcgatttgtagccaattcgggcttgaccccgaagaatttaaaaaacagttgggagagtaa

SEQ ID NO: 302715 - DNA, 540 bp, Proteus mirabilis
atgatcaccgtcaaaattgatacacgcgaatacgaagccgcactgcaaaagctggtcgagggtatcgaaagtcgcgcgccattgatgcgaaaattagcggggatgatggcggatgcggtagaggaaaacttcgcacaagaaggtcgccccgcgtggttgggttggagtccggcttatgcgcgccgtcgagcaggcgggagaatattgcaagacagtgggcgattagccagcagcatcggtcaatacagtgataatgacagtgccgtcgtgggcaccaatgtcaagtatgcgcgtatccatcaggaaggtggcgagattaatattccagctcgcagtcagcaagcctactatcggcagcgtaaagacggcaccgtgggtaatcgttttgttcgcaagtcgcgcagtaacttcagtcaataccacacgttacccgcctataaaatcaaaatccctgcgcgacctttcttgcaattggacgagtgggatcaataccgtatgacgttaacggtggaagattatttaagccgactgattgaataa

SEQ ID NO: 302716 - DNA, 1158 bp, Proteus mirabilis
atgccgacagctaaacaagcggtggatttacgctacgccatgagcctcccccctgcggaggcgattgcttacttcgaaagtaaaggctatgccgttggtttccattggtatgatgttgaagcgcaagcccacgccaaagcatttaccgtcgcaggcgtgctcaagcttgatgtgttgcacgatattcgccaagctttaaacgaagcccttgaaaagggggagacctatgccgactttgaacgacgcctcatccccattcttgagcaaaaaggctggctcgggaaaggcttggttgcggatatggatacgggggagctgcacggcaagcgcttaacgccacgtcgattagacaccatttttcaaaccaatctgcaatcctcgtacatggcgggacgttacaagcagcaaatggcaaccgtcgaggagcgtccttattgggagcgcgtggggattatggataatcgtattcgtccttctcatgcggcacttaatgggtttattgctcgctatgacgatccgatttggcaaaccatttacccgcctgatggttaccgttgtcgctgccgtgtgcgcacacgcagtgccgaggatgttgagcgtttggggttgatggtgcaatcctctgaggggcgcttagtagatgttgaacaagagtatggcgtgccaggtgaaacccgaaccgtcaccggctttaaaaatccgaaagacggtcaagtgtatacgccagacccaggttttggttttaatcctggacaggttagctatcaacctgaattagataaatacccgccaacggccgcgagtcaatacatcacaggctcactcacaggcgcggactttcgtttagggtatcaagaggcggtcaatgccacacaacctaaccctgcacaacgttatcccattgccgcgcgtcctcaatcttccgcacccaatacagatgcattttatgttgatgcgcccaccattaaggcactcgcccaacaggatatcacgcaagccgattacttatttgtacagcaaattattgaatcacctcaaaaaatgcgtttgggtgaggatggggttcaatactatgcaatgcaacacgaaaagcgttggtgggtagttgaagttaaagataatcaattgcagcgtgtcaccacgcaaaccgacttttga

SEQ ID NO: 302717 - DNA, 1581 bp, Proteus mirabilis
atgtcaaaaattgtggatatacacggtaacccgctacaacgtgaagtttttaaaacgtcacaaaccgtaaaattagcacggatgagtcgcatttatcctgatcatccctcacgcggactcactatccgtaagcttccgcgtatcttacaagcggctgaacggggcgacttgagtgcgcaggcctgcctctttggggatatggtcgaacgtgacggccatatctttgccgaaatggaaaagcgcaagaatgcgttattaacgctagattggtcgattgagccaccgaaaaatgccaccaaagccgagctagacatgaccgcgaacgtgcaagcctggtttgatgcgatgcctgaaattgaagacattatcctcaatgggatggaagcggtggggcatgggtttagttgccaagagttggaatgggatcgtcttgataacacgtggttacctaaagccttgcacctgcgtccccattattggttccgcaccttacctgagcaacgcgacgaaattcgcctcaacaccgatgaaatagatggctctgagctatggccgtttggttggctggttcatcgtcacaatgctcgtagtgggtttattgccaccagtgggttattccgcgtactcgtctggccgtatctgtttaaaaacttttcgttgcgtgattttgctgagttcttagagatttatggcttgcctgcacgaattgccaaataccctgcgggcacgtccgatgaggacaaagataaactgttagatgcactggttaacttggggcatgatgcggttgcaacggttcaacaagggacagacatccactttgaaagtgccgcagggggtggctctgacccgttcatggaaatgattgcctgggctgaacggacacaatccaaagtgattttaggggggacattaacctcacaggcggacggaaaaagctctaccaatgccctcggtaatgtgcataacgaagtgcgtcacgatttaaaaaccgccgatgctcgccagcttgaaggcatgtttcgccagcttattcaaatgttattggcactcaatggctatcaagacgtgaatccgcgtcgtttaccgcgttttgtgtttgatacccgtgaagcggttgatttaccgcagtttgctgatgcggtgggtaagttggtagccgcaggtgtggagagtatccctgtttcttgggtgcataagaaagccgctattccgcaagcccaaaaggatgaacctgtattgcaagcgcgtcaatccctgccgttgttacccacaccattaagctatggtcgttcacgtcacggtttgggcgtgctgagtcaaatggtagaagcagacggaatagatccagcacaaatcaccctcgataatgcaccgccgcagtctgacaccattggggcagccatgagccaactcttaacgccgatggtggccgcactcaagcaaggtaaaagtgtggatgacgccatgaatattattgcgcaaggttacccactcttggatgacagcacgcttcaaacgttattgagccaggctatctttgtggcggatgtgtgggggcgtctccatgccgacagctaa

SEQ ID NO: 302718 - DNA, 1632 bp, Proteus mirabilis
atggcgaaaaaggtttccttaaaagcgtttaaagcctcattacaggactacatcaccgaactgcgccaaaccattgaggcggagtgcttaggctttgatgctgaccccgaggctgctgaggcaaggcgatcgcaagtagcagatgccgagaacggctacagcttctttgtggaaacctatttcccacattatgtgcgtcacccttcccgtagtcagttgcatgattatctttttagtcgtttacctgccattgttgccagttcagatgctgaaagtgacgccatcgccgcaccccgtggtgaggctaaatcgacgctcgtcagccaactctttacgctgtggtgcattatccgtgagttgaaaaaataccctgtcatcattatggacagtattgaccaagcgtatcctatgctcgaagccattaaggccgaactggaatataacccacgactgaaaaatgattaccctgatatttgcggtcaagggcgtacttggcagatggggactatcgtcacacgcaataatatcaaagtgacggttgcgggtagcggtaagaaattgcgggggttacgacatggcccatatcgccctgacttagtggtgctcgatgatattgaaaacgatgagatggttcgtaaccctgagcagcgcgagaagctgcataactggttaaaaaagacggtgatgccactcggtgaagcaggcggcaaaactgacattgtttacatcggaaccatcttgcactatgactcggtactctctcgtaccctcaacaatgccatgtggcggacggcacggtttaaagccattctccaaatgcccgccaatatgaaattgtgggatgaatgggaaaccttgatccacaataaacaaattgatgaagctgagcgcttctaccatgagaatgagcctgcgatgttagagggggccattgtctcttgggcggcacgcccactgttaaccctcatgaaaattcgtgcgcgtgatggtcatgatacgtttgactccgaataccaaaatgaccccgtgagcggtgaagatgcgatttttgcaggctgtattacatgttggtcaaaccatctctctgattggattttttacggggcatgtgacccaagcctcggtaagcagaataaaacccgtgacccatcagcgattttagttggtggatttaaccgcatgacaggtattctcgatgtggttgaagcggatattaaacgccgtttacctgaccgcattatctctgatgtgattgactatcagcgcgaatacggctgtttaacgtgggcgtttgaatccatcgccttccaggagtttttacgtaccgaattagtgaagcgttctgcgatgttaggaatacccgttcctgctatccctgtcattccaaacagtgataaagccctgcgcattgagtcattacaacctcatatggtcaatgggcttattcgtttacacgcaacacaacacacgctgattgaccaactgagacactttcccaaggctgaccatgatgatggtcctgatgccttacacatgctttggtctttggcggtttctcgtgcaggtaacaccgatattcaaactcgcccccgccgacctgaaggtcgacgctttgggtcgggtgcttggtag

SEQ ID NO: 302719 - DNA, 213 bp, Proteus mirabilis
atggatgaaattaaagaacaattaaaaaactatcaatatcaaatacgtggtttttttgcgacggaagcaaccgaagaggaaaagcacctgttagcggaagcagaaaaagagacacaagcgttcatcgctcagttacaggagcgctaccctaattatttaggtttaatgggcggtgctattgcagttcttgatacgatgatgagttgggaataa

SEQ ID NO: 302720 - DNA, 555 bp, Proteus mirabilis
gtgtgtggtcagtacggcggtgattttaatccgcgcgaaaatgggcttgtaattatggcgtatccgcaagagacacgcgataagttacggcgcgcctacatttttagccagctttccctggaggtggcggcgagtcaaattggcgtggcctttgcgaccgcgcggcgctggaagaaggaagcccaagacaaaaatgacgattgggacaaaatgcgtgccgcgcacatgttggcaggtggcggtgtcgaagatgcaggtcgtgcggtattgatgagccttgttgtgcaatgtcaagccgtgacagagaaaatcaatacaaaccctgatattcctgccgagaagcgtgtagagctattggcaagccttgcagatgcttttaataaagccacgtccgccagtaaaaaaatactgcctgaaacggataaattggctacggccatcgatgtgatccaacggttcgggcagtttatcagtgacaagtacccacaacacaacgtggtgtttgtggaaattttagaagcctttgccgaagaattggagcgtgcatatggatga

SEQ ID NO: 302721 - DNA, 249 bp, Proteus mirabilis
atgaaaaaacgcccacaaaaaggacgtaaaaaagacgttttactgtcgattaacagccagttaaatcggattgaacatcgaattgaacgtcaaatggaaaacatggatgagcaaattgacctcattcgtgaagaggcaaccaacggggctattcgccgtggttatgtggcaggcgctatctcaggtggtgtcaccgcgtgtgtggtcagtacggcggtgattttaatccgcgcgaaaatgggcttgtaa

SEQ ID NO: 302722 - DNA, 228 bp, Proteus mirabilis
atgaagatgacaccgttattacggcgctgtatgcccgtgttagtcgttgccgcttttctggtgtacttggttattttcctgagtacagggttttggttacgtgttgtcagtacctgtgaccgcgcgcaagccctcagtaatcgacccacttatttagacggccttgtttgccgttatcacgatacccatgaggctatcaagcctccatcctcaaggagtttaagatga

SEQ ID NO: 302723 - DNA, 558 bp, Proteus mirabilis
atgaactcaatcacagaaaacacattaccccgctcattgaaaattgcccttattgtgggggcgtggctgttatttgcagcgggtgcatttgcgggtgtcatgctggcgcgttatcactacaacaccattattcagactaaccaagcgacgcatgccagccagttaaaggctatctcggatgaggcatccgccgcaacacgtcaagctatgttacgcatggaagacgcccagcgcgaaaaagcccgattagatacgtattacacacaggagctagcccgtgaaaaagcccaatctcaagccttgcgtgatgatttgtctactggccgtcgtcggttgcagttcgcccgcgccgaccttgcaacctgtcagctcaccgcaagccatcattccagcgcccgcaccgtgggcgatggagccgaaatccaattctctgttgaagctggactccttgttgaagatatccgagccgatatcaaacgagatcaggacaaactcgactacttacaaggctatgtaaaagacgtcgttaaagagtgccgcagagaggtcacaccatga

SEQ ID NO: 302724 - DNA, 564 bp, Proteus mirabilis
atggacatgaagcagcgttatctaactgccgccgttgtggcattgattgtgggtggagccagtgaaagccagatatttgaccagtttatcaaagaaaaagaaggtaacttcaccactgcttatcaagatgcaggtggaatttggacagtatgccaaggtatcacccgtattgatggccgtgctgtcaagccccgtgaaaagctgactgaggcgcaatgcgcacgcttaaatgctattgagcgagataaagccattgcctgggtgaaaaaacatgttcctgtgtcactcacaccgcctcaaatcgcaggtattgcttcattttgcccttataacatcggtgcgggtaaatgcttttcatccaccttctaccgcaagttacaggcgggtgacatcgagggagcctgtaaagagatcccccgttgggtatttgatggtgggaaagactgtcgtaaaactcaaggtcagcctggtggttgctacggccaagttatccgccgtaaccaagaagctgaactgttgtgttgggagttaatgcaggtgaataccacttggacaacgccatga

SEQ ID NO: 302725 - DNA, 309 bp, Proteus mirabilis
atgaacccgatctctttccttgaaaaggacagatgcatggatgaaaaaatagctcaatttagcacgcagtcatcatattggtttgctggattgggattgttttttagtggcttatcgctgtatgagtgggcggcaatcatcggtgtggccgtcagtattttattaggtattgcgaaccttgtcatatctgcctattacaaagctaagcaaacccgtctgatggaaaaatacctggctaacgctgataagcccgatgaagtcgccagcaaggttatttcagtctccaccaagttccccaaggaattataa

SEQ ID NO: 302726 - DNA, 459 bp, Proteus mirabilis
atgcaaaccacgattgacgaagccgaacttgcacggctcgaaacgctcttaccagattcagctaaacagcttattgatgttattggttataacgccacatcacgactcattagccgctttggtggtgtgacattagcaggtgtcagtggtgaggccgcagagcgcacggggggcgtgcatcgcctattgcgcgaagtgttaaacgaagacgaatgcaagcagctcttgcattacattggtaaaaccgcattttatatcccacggtgtgaagaagcttttcgccaaatccgcaaccaacgctttatcaaagagttgctaacgttaggcgagcaaggccgttcacgccgtcaggcaatggcgttgttatgccctaaatacggttttagtgatcgcattgggtggaagctattgcgtgaccttgatgcagaagaagccgcacaagaccgtttatttgattga

SEQ ID NO: 302727 - DNA, 447 bp, Proteus mirabilis
atgaaaaagtatttactaagtattatgttaccattacttatgactagctctttggtgagtgcaaataatgatactgatgcacaatacattaagctaaagcctatagcagaggatatttttaagcgttctgttgctttagcagaaagctcctatgaggggtatcaaagttttaagtatgcagacgataaaacagtatggagaaaagctcgtgatgagcgaaaggcacttagtgaagatgctaagaaactaggaaaaccattagcatcgccattccaatattgtatcgcactatccatttactctactgaactatggggtcaagcaatatcagagggtaaaattgatgtatcaacatttaactcatatctaacagctaaaaaagattgtgaccatcagttaaataacgttcctgaagataaatctaatttacgcgccgttgacctctaa

SEQ ID NO: 302728 - DNA, 432 bp, Proteus mirabilis
atggatctcaaagccgttgagcacttacttcctgacacattacggtatattgcggggttaattgggtattcagacacattaaaactaatcgaagcctttggcgggacaacgtttgttttcacgaagacaacggatacagaacgctttaagcaactattacatgttattggtgagcataattcagtcacgcttcagtctcatttttgtggtactgagatttatattcccaatgcctcagccgctatgcgtgaatggcgaaatcaacgatttatcagtgaatataacacccttttaaagggcggtttatcaggtgttaaagccgttataaaactgtgccctaagtttggttttagtgatcgccatgcatgggacttattatcacgacataaacaatctgctatcctaaccgcaaaacaaccgaatttattttga

SEQ ID NO: 302729 - DNA, 441 bp, Proteus mirabilis
atgacacacttaagattgtcgcccaatacaaaaaaactgattggtatcatcaaagcggcacagcagtatttgcagattgatgatgatacctatcatcatatattgatgcggttaactggtaaacggtcggcaacaaaattaacgctacaggagttagaaaccgttcgcgaatactttcatgagcaaggttatcctcgtaaagtggctaaaaagcacggtcgtaagccgaatgtgtctaaaactaaaaaaatggttttaagtaagattgaagcattacttaccgatgcagggcggccttggacttatgcagaagctatggcgaaacggatgtttcggcgccaagcccttgaatggttaaccttagatgagctttctgacttaatgaaggcgttaatcattgatgccaaacggagggagaaaaatggatctcaaagccgttga

SEQ ID NO: 302730 - DNA, 150 bp, Proteus mirabilis
atggggatcgccttgggatttgggctttctttaggggggttattcgcgcttggctttcatcttttttcaaatgcggcagccggtgtttttttggaaaaagtgttctatcccattgcagataaatatcgcctttggaagttcaaaaaataa

SEQ ID NO: 302731 - DNA, 438 bp, Proteus mirabilis
atgatgacaatcaatccaacacaatggcgtattattgaagaaaaattaaaatctgatttcgtacacatagaatttcaatataaagaccataaaatcaatgtggtacgtagtagtataaaggaaggaaaaacggcgctactggtttatcttaatggcaaaatcaaagccgaatggtgccgctcagaagatgaatatattgaacccttagttaagttattttggcatcaacgccataagtctctttatccgcctcaaatcgtgaaggaattggagaaaatgtggggaaaacgtcgtgttcaacgcgaatataaaaatcttaatgaaaaaataacctactactccccttattttaataaagcttctgtactcgttcgtcaatttaaacgtatcgaaggaatatcagtaaaacaaaatgaatggataacgcttcaaggctaa

SEQ ID NO: 302732 - DNA, 294 bp, Proteus mirabilis
atggctaagttttattgtcccacatgtaaaaaagtcttacccaaagcgttatttcctattcacgtgggtgacaaagtgacgtttaccgtccagataatacatgaaacgcctaatcgtatgtcgataaggctttcgactaagacaggcaaagtgatggcgatacaagacgatgtcgccatggtcgaatatagaaaacagtcttattcagtcatgctttcgtctctttccttagcttccgccccaagtgatctgatgcgtttaatgattggggaatgtaactgcatagcatcctaa

SEQ ID NO: 302733 - DNA, 639 bp, Proteus mirabilis
atgcacactaatcccaaacaatttacacaatatgacgttattgagaactattggcgcgacgcgaaaggtattttaaccccagtagggatgataaaaccgattgatatgcagcgtgatgcactcgtcggcgaattagtgactcaagccctgcaactcagtcacttattacgtcagttcaaaatagccgctttcggtgatattgaggcctttattgcactatctgccgagcaatacggtgttaatgtaggcgggaaaaaaggcaatgtcacgttatattcatttgatgggcgttacaaaattcagcgagcaatacaagatcgcattgcttttgatgaacgtttacaagcggctaaggcattaattgatgaatgtttaaaggattgggtgaaaggtgcaaaacccgaaattcattccattattgaccaagcgtttgccgttgataaggaaggtaatattaatacgggcgcagttctttctcttcgccgcttagacattaaagatgaacgttgggttaatgcgatggaagcgattggcgaagcgatccaaatcgtcggtagtcgtcaatatgttcgtatctatgagcgggtgggtgatagtgaccaatatagacctatatcgcttgatatagctggggtgtga

SEQ ID NO: 302734 - DNA, 192 bp, Proteus mirabilis
atggcagcgaaaattacaattattatttcagaaggtaaatatgaccatgtcgatgttgaaattaccagacacaaagcagaaccagaaacaacgatggatgaaatggcaatgtctgctgagttagtacaagaagttgctttagcactttgtaaaatgaaatcagctcataaggaaaaacatcatgcacactaa

SEQ ID NO: 302735 - DNA, 276 bp, Proteus mirabilis
atgaatgtaaatatcaatattgaaaatcaatctgttatgtctgacttaattcgtgtgggtgctgttgttcagcaattggaacaacaaggtgtaactgtactgagtgtagttgctcgtcaaggtaagccttgcattcacgtagcccgccacagttattgtgatgcgctcattcaggaaggtaaggctgcttaccaatattttaacaattataagggtaaacaaggtttctttgatactgaggggtgccgtgtttactggtctgaatctattcattag

SEQ ID NO: 302736 - DNA, 894 bp, Proteus mirabilis
atgtctatcgttaatgaacttaccatgatgatgaataacaaaggctggtcacaagctcaagcggctcgcggcataggtgtcagcacggcggtaattaatcagtttttgcaaaataagtacaacggcgatgtcaatgcggttgaagaaaaagtccgtcagttcatatctcgtgagcaagagcgtgataaatcacgtcgtattaagcctgtctatgttgatacgttaatggcacgtaaagggcgtgatgttatccgtatggcgcacatggatagtgatattaacgttatctatggtgatgcaggtatgggtaaaaccatgattattcgtcagtacgccaaagaaaatttaaatgcagtgcttatcgaagctgacccaggttataccgctcgtgttgttttggaggagttgtgcaacaaattgggtttaagtaagcgtggcaacatgcacgaattgagcgaatccattatacaaaatctgcgtgattcggggcgcattatcttagtcgatgaagcggaaaacttaccgtatcgcgcattagaaaccttgcgtcgtatccatgataaatcaggggttggcattgtattggcgggtatgcctcgcctgatcctcaacctaaaaggtaagcgcggtgaatataaacagttatatagccgtgtgggctttgcgttacgcatgggtgaagcactcccagaagaggatattactaacatgatcacaaccatgttgcccgaagcgtccgaacccgaagtattaaatgccctttataaagcgtgtaaaggtaatgctcgtcgcctgtttaagttcttacgtggaatatctaatggtagccagattagtggtcagccaattgatgttcaaatggttcacgagttctcggaaatgctgattaattag

SEQ ID NO: 302737 - DNA, 2040 bp, Proteus mirabilis
atgtacgttgtcgtaaaggaattaatgggcatacctggaataccttcgacagcgaaaggtattcgtcaaaacttagataaagttgctaacggtactagcttaaagcgtaagcgtgaaggcactaacgcatttgaataccacattgattgcttgccagaggcggcgcaggaagttatcaaacaacgtcattttaatgcagttcttgagcagaaaaaaacggataacgcactcgaaaaaacggtatcaaataccagtgttaaacccgttgatgagttggctttaatgcgccagtgccctgcattgttagagcgtgaggtttcatcgttaaccgcagatcaaaaaagcattgctgacgcgagagcgacattagccttagaagtgctttctttgatttatgcaggcgatacacgcattggagcagtgactcgtatctctgaacaatctcgcaaaggtgttttacctatgacgttacagcaagctgcggataatgcgaatgcgcgtaaagggacaacccgccgaggtgtgagcatccgctctttacaggaatgggtcacattgtatcagagtaccaataatggtgatgaacgattggcgttactggcacccggtcaccataaagagacacgccctgagcaggtctcatggttaccaatgttcttatcgcatcatcgtaatgtgaatggcccatcgttgatggcagcgtaccgcacattcaccgaagagtggcaggagcactatgcagaccagcctactatgttggatgttatgccctcatattatgcagttcgccgtgtcatggataaattaccaaaacgtgagcgtgctcgcgggcgtgtaactggctcggcagctcgtgcattagaaacttatcaaaagcgtgactggtcacagatgccagtaaatggttgttggatatcagatggtaagtccatgaatatgaaagtggctcatcctattcacggacgcccatttacacctgaattaacgttggttttagatggtcggacacgctttcttgtggggtggagtttggacttatcagagaacgtgatcgccgttgcatcggcttatcgccacggtatgaaataccacggcaagccattatttacctattcagataatggtggtggtgagaaaaataaaacattagatgctgatatcacgggtatttttccacgcttaggtattaagcatatgacgggtatcccgggtaatccacaagcacgtgggattattgagcgtctcaatgcggtcatcccccgtcgagttgctcagcagtttcaaacttacaatggattaggtgcagatagagaacatgtacgtattaccagccgtcgtattgagtctgctgtaaaagctatcgagagcaataaagaacttaatccagtgcaaaaaggtgcattagctaagcttccgagttggcagcagctacttgatgctattgaggttgaggtacagcgttataactatgagcatgagcacagtgaattacctaaacgcaacggtcgccatttaacccctgcggcttaccgcgaagaagtgttagctgctgaaggcgatgaaatcgaatatctcactgaaattgaattacgcgagatgtttatgcctgaagtcattagaaaggcacagcgcggttggattgagtttaataacaacgagtattttgccgaagacttgatcctcgttgatggtgacgaagttcgtgtggcttatgacattcatgatgcgaaagaagtcattattcgcaaactggatggaacctatgtctgcactgcaatatggaacggtaacaaagtggccgctgtaccaactacacaaatggataaagccattgaagaccgtcgtaaacgccgtatgactcgtgtagaagacaagatacgtgagattgaggctgaggctcgcccactaattgacactaagcctacgcctgattttggtggctttattcctacggatgaacctatcacgacaccaagaaaacccattacgtttttacaatctgaatatgaatacttatctgcgaaagcaggtaaccaataa

SEQ ID NO: 302738 - DNA, 258 bp, Proteus mirabilis
atgatgaaaaaaaatgaagtgaaacaatctgattggcaccctgcggatatcaaagctgaaatttcaaagcgtgggtttacttttcgtgatttgtctatcgcggcaggttatgcgccagattcattaaaaggcgttttaagaacgccaagtgttccttatgaaaaagtcatttcagatgttatcggggttccggctgaggagatctggcctagccgttacgagttacgtaagcgcggtcagatgaataaggtgtcttga

SEQ ID NO: 302739 - DNA, 465 bp, Proteus mirabilis
atgaaaaaagaaccagaaggtacttttcacgaaaaaggaaaagaaccaactattgaacgtatcgctcagttaatcaaaggtcatccatccagaagcgccgctgctagagcctgggggataaatgtgaatactcttaatagttattttaagaatgttgagaacccaccaactcctcgtgatagcgtgttacaaagaatagctaacaatgaaggagtgacaatagaatggttattaggaaagagtgataaattaacaggtgaaataccaaaaacaccagaaaatgaccagctgcatgaaatgttatcatttttaactaacgaagagagagcacgcttagccgtagtacttgccagaaaaggggttgaatccacacttgaattgatttttgagtttgccaatttatcgccaagtgaatttgatagagccatccgcttagccaagcaaattagagaggggggcttctga

SEQ ID NO: 302740 - DNA, 2799 bp, Proteus mirabilis
atgtatcgtaagttactgattatctcagtcagtttatcacttctgggttgtgcaacaggcaactcgtctgagcataccaataatgccctttcactgcgccccgatattcgccattttacgcttgataatggcttaaatgtctatttgctacaacgcccacaaacgggggttgaaatgcgtttactggtgaaaagtggctcggtacaagaagatgaaaaacaacttggctttgcccactttaccgagcatatggcttttaaaggcacgactcattttccgggaacaactgggtttaaacaacttgaaagcctaggaatgaagttggggagtcatgttaatgcggcaacgagcttaaactcaacaacctataaattatccctgcctaatgccaatccgacccaaataaaaacagggttgaggatcttgtccgattgggcctttggcatgacatttgatcccgttgagtttgataaagagcgtccggtgatcgtcgaggagtggcgattacgccaaggtattggttttcgtattaatcgccaacttgaagagttacgttattatggcagtcgttatctagatcgtgatcccattggggacttagatatcgttaagcatggtgatgtcaaagaagcaaaacgttattacgatacttggtatcagcctgaaagaatggcattggtgttagtgggtaattttaatcaaggtgatgcgattgctgatattacccagatgttcaatgcaaaaaatagtgaaaacaaaggcgttgactctccatcatggcaccgctttatcgacaataaagatttattagtaaagacgatttttgataaagagcaaggctcacgcattgtgcaattcactctacagcgtacactgcctgcaccattaaatagtcgccaaggtcaatatgatgatttaatggactccttgtggctctccatcttaaaccagcgcttttcaaccattgttgataatgggttagtgccttccgtcagtgccaatacacaaggtgcgatgttagatgcccgtcgctcacaacaattgatgattgcccatcctaaaggggatgattatcaaggtacattagatattctatttactgaggtacagcgtttagcctcacagccagtatctcagcaagagttagataatgctcgcaatgcgctgttaaaacgtcttagccaacaagctgctggtgaagagcgctatgagcatggttatttagctaaccaaattactacggcacttgaattagaaatgccaatccaaagcaaaaagcaggcgttaaacttaagttatcaactaataaataacgttacacctgataccttaaaacactattttgcccaatacctaacacaagcttcaccacgagtggcaattatcggcccagatagtgatagtcaggtatttagtgccactaaagcctcgcaacgctggcaagagattagacaatctgatcccggtgcgtttacattgaaaacccatgcggtggtattagatattaaacctgagcaaaccggtactgttgtcaccacacaaacacttccgattgaaaaaacacagctgtggacactgagcaataacgtaaaagttattattaaaaatgaccagtggctaaaagataatatccaagtatcactgcgtattcccggaggtgtttctctggaaacaggacaaagtttaggcttggtacagtgggcattaaacttaccagaagtgagtggatatgggcattacaacgcaagagagttagcgttatttagtaaacagcatcaaatcagtttgcgtccatacagtgagttgttattccacggcttgcgtggcgaagcgcctattgatgagttagacaccttgttggccttattgcatttaaaagtgacagcaccacaatttaatgggcaaaaattagagcaacaaaaacaagcaacggcattagggatcgccaaaacaccagttgaacgtattttcttagatcatattaataaagagagctatcaaaacggtgagcgcttagtgatttcgccacaaggcccttggcaacagtttaccgcacaacaattacaacaaacgaatcaatcacttctaggacagcctgccgatatggtattggtgattagtgggcctattaacctaaatcaggccaaaccgatgatcgaacgttggatagcaacgctgccgacacgttcatcgcaacgtctattttgggctgatccggcgattaatcccaaattaagctcatttaataaaacctaccctattgccagtagcgataagagtatgatcagtattcaatacgcagccaaagcccaatggtcacaacagcaactgttagcacttaacttgcttgataccgttgtcagccaacgtttaagacttaatcttcgtgaacgagcgggcgggatctactcgctaggcttttcggagtcattaaccaagctgccaagtagtttttataccggacgtttaaactttaccgcatcaccacagcgggcagatgaattaattgcacttgcgcgtaaagtggtcaatgacgtaaaacaagcgggtattaccgataaagaattacaagaggcaaaaaatatttggttaactgaatatgggcaagccaaagagagtgctagctattggactgatgcacttgctcaagtggcaacagatgaccaacaatatcaacgactattaactgagactgctattgtcaacggaataagtgtcagtgatgttaatcaagttgctcgtcagtggttgggtgaaaatgaaaaaatcttcaaactaacaccaccaacaaagcaataa

SEQ ID NO: 302741 - DNA, 1194 bp, Proteus mirabilis
atgcgtattgtctttttctatatgctttttttggtattaagtgcagatggtctaatggtttttttgacacctgttattgtttatcaattaacaacaagcattgaatatgcgggattgacatacgctttatggtggttaccacgtatttttttaataccgcttattggtcaatatattgatggtctaggtgtccgtcctgtttctgttatttccgatagctgtaaaattatcggttgtttatttttattaatagtagatttttcctctgatttagttattgcaattagttttggattagtgggtagcttaatttctattggtaattcacagacactgatttcatatgaaaaaattattgccttgatgagtcgccataaagaacatcatattaatataatgtctcgaatggattttttgggcatgatcattggcccattaatcggtatgttatttattgattatggttaccattatttactgattattccctgtctattttatttcattaacgccgtgttctttttgttcttttacttagtgccaaaacagcgccaatctgccactcagttacatagcctaacagagacattacaggtgacgaaaaggatagtggtgatttttacgtctcctattttggttttttctattttaattgctatcggcaataatatgtttgatggattaattgagtcgagtggggcggcgttgatcgaccaatcgatgaatttacccattaaatattatggctttattgatatttctgcggggatctgtggcgtgataggaacttatttatatggttatctaacccattatttaaatcgaaaattattaatgtctctatcaatttgtatcatcacaataagttcttttctattggttatttttcaacatgatatcacggcttttattctcttttatgctctatccattattggtaaagttttttcagggaatattttacggatgttaagaatagaaattattcctatggcacaattagctagcatttcctcactgattattttgtttaatcaactgattttgcccattgttgggggattgctctttttctctacagggaatatttcgacagtatatatattgatgataattgctatggcgatcaccttggtgagtggcgtaatgcttattatgcggttaaaccataaaaaagagataatcataaaataa

SEQ ID NO: 302742 - DNA, 759 bp, Proteus mirabilis
gtgaaattaattccagaaacatcttactataatcaaaaaatttataaccttgttcactcttggtacaaacaaggaagagtgcgatttattactcaagctaagtgtcttaatcaaaaagcaattgatttatatggcttagataaaaatgttccaatcgattttgttccaaacccaattgacattgactataaattcgacgttacaactcaccctaaacaaaataatgttgtttttttagggcgcattgcatccgttaaacgaggttggattttctgtgaaattgcaaaaaaaatacctgaatacaatttctatgttttaggtaaaatatttagagctgatgacaaaaatcatgacatcatgtctgaatatgaaaacattcctaaccttcattttgtaggacatgtcgaaggtgaaaagaaaaataaatatttacgcgatgcaaaagtactagtgaatagctctattcatgaagcactacctgtttcattccttgaagctctatcttttggtacattacttgttagtaatagaaatcccgacgatttaacatctaagtttggtatccatgttggtgaggtgctaggtaatggttttgataaagtagacctatttgtgaatgcagttagagaacttattgaggatgatgaaaaaagaaaattattatcaatggaagctattgattatgttaaaaaagttcacaatgttgataatttcataaagcacacacatgctatcatcaaagatgagttaacaaaataa

SEQ ID NO: 302743 - DNA, 708 bp, Proteus mirabilis
atggaatttctattcattgtatcaatttttttatttttaatatctggcgtttgcataactctaggcatgataaaacctagcatcatcaagttaaaaaaccgcaaacaatcatttattgcttttcttgttaccttcgtcttatcaatcattggggttcttaatttcgctcccgatacccctaacaaccaaatcaccgaaacacaagaaacaataaccgattcttttgtatgtagtaataaaaatgcaatttacccttcaatttctgccatgatagaagattttaacgactatccatcagaaatgaatggctttgagcttattagcgaaaacccattaaaaattagattatccgcttttgctttagataatgattttagtgatgttaaagataatttagctaaacgagctcttgtttatggcatattccgtacatttattaacacaaacaatgatagtattactatcgtttctaatttagttgattacaacaatagttataaaaagctaaaagatagtccagaatacacagctacaattaccaaagatcaagctctaaaaattacccagaaatatattccaatcaattcattgaatgacttaattgatgaaaactgctcattcacaaaacagtttaatgaattacgttatgacgatagcggtaaaaaaggttttgataaattctttaatgaattaacggcaaataaataa

SEQ ID NO: 302744 - DNA, 252 bp, Proteus mirabilis
atgaacaaagttattattccaacattgataattgctcttcttagcttattttcaattaataactcattcgcaagaaacactccttgctcaggtaaaaaaggggggatatctcattgcgaaaatggcaaatttatttgtaatgatggaagtacaagtaaatcaaaacaagtttgtccagaaagcaggtacgggacagcagataacgcgaataatgatgatagcaatgatgctaatgactcgaagaaaaaataa

SEQ ID NO: 302745 - DNA, 348 bp, Proteus mirabilis
atggaatgtgcaaaaaatatcaaagtagagtgctcatcaaacgaattgatgacgttttacattcaacaaatgtattcagtcggtaataacggactcgctaaggcgctaggaatacacccttcaaaatccagtcgagataaagccagaatattcgatttagcttgccagttggtaagtaagttcggattaccccctgactctgtaaatatcagcgataagccaacgaaagttgttcttgaaggtgattatgcagaaagggttattcaggctcttgaagggaagggaaaggttaaaagaaaagccccagcagtaactgaggcttctcaacaaatggacttaaccatttag

SEQ ID NO: 302746 - DNA, 288 bp, Proteus mirabilis
atgagaataataggaaaagaaaagattattgccttttacacaaaacataatcaagcaaaggctcctttagaatcatggcacgatgaagctgtaagatctaaatggaaaacctcgcatgatattaaaaccaaatattcgtctgctagtttcttagctaaaaatcgtgttatttttaatataaaaggaaatgattttaggcttttagttcaagttatctactcaaatgatatggtaataattgaaaaaattggaactcatgcagaatacgataaatgggggctaaaatga

SEQ ID NO: 302747 - DNA, 660 bp, Proteus mirabilis
atgaatgaatttacacctcgactcataaagaatgataatgatctgcagtcatttatgacgaggattattgagcttgcagagagaaacccaatagaaggtactaaagaattcgacgagcttgaattgctaggaattcttatagagcactatgaaagcaagcattaccccatttcaaagccagatcctattgatgcaataaagttcagaatggaacaacaaggattaacaaataaagacatgacgcaattcatgggttctttatctaaagtttctgaagtgttaaatagaaaaagaccactaagtttatcgatgataaggcgactacatgatggccttggcataccagctgatatactaattcaagacatgaatgacgttgagtggcttgaaatagatgcaaaattaacatcagaaaaatttaatttcgctataacacctgaagtatctgatcaggataactatgaaaattcattatctcgaatgagaaaatttggctcatcaataaaaaaatatgtaaaggattatatttttgatgaatgctccgaaaagcttaccttcaatgagagtgataagattgtaataaaagcttatcgtcaggcaagtgtgccagaattaaaagaaactgaatctgttaaaagtgactattgttttgtgggatag

SEQ ID NO: 302748 - DNA, 417 bp, Proteus mirabilis
atgaagataaaacttactaataagagagtgcacaaactctctatagagccgattgaaaaagaaaataaaataaagaaaaagaaaaaagaaaacctacaacaagaattttctttcgaggatcagctttttgtaaataaaaatgacaaaaaaaagataagaatcagatatatagttaatttaagtattgaaagcatttttgctttatatttagaatatgattttgacttcgatattgatggcgaagtagatgatacctttaaggattcgtccgagataaaaacatcaattcctagttacacatatccttatatcaaaacttttatagaaacggtaattactaactgtgactatccaaaaatacaaatccctacaattaatttttacgatttagatgacaatattgaaatagaagattaa

SEQ ID NO: 302749 - DNA, 312 bp, Proteus mirabilis
gtggaaatttactatcaaccaccaaaaaaatttaaaggcaacccaacaccagttagcgttaagaaagttaacagcaactcattcaaggctaggcaatacgctagatatgcatctttcagagctaacaaactgaaagaagaagaaattgctaaagctaactcagtgaaagagaagaaagaacgccctgttctctctctcaaaccaacaaagcattatccaagtggagataactgctgcttacctaatgtagcagtattttcaggagttaaaacaaaacagccgagcagtgagttcggggtgacggcaagataa

SEQ ID NO: 302750 - DNA, 156 bp, Proteus mirabilis
atgaaaactaactattacagcgctatgcgtgattgcatggcggtgcgtatcactacgcctcaagcacgtaagaataaacgtacaagcccatggctattcagtttagccgtggtcattgtgacaaccgttggcgtaataccgacatttgtaaattga

SEQ ID NO: 302751 - DNA, 1026 bp, Proteus mirabilis; identical to SEQ ID NO: 297310

SEQ ID NO: 302752 - DNA, 1092 bp, Proteus mirabilis
atgagtttattattactaaaaagtcgccctttagtcgttattcctgaattagcggtacgccttggtttaaatgaggcgatgctgttacagcaaattcaatattggctaactgaaaccacttcaggtgttgaatatgacggctcacgctggatttataacacagttgaggagtggaagaatcaatttccttttttctctgaatcaacgattaaacgtgcttttactaatttgaaaaagcagggtgttttacgcatcgagcaaatcaataaatcgaaccatgaccgcactaattattatgcgattaactacgatcaccacttgctgaccgatgaggtcaatatgacccaatcgaatggtgataattcatctgatcgaacagttcaaaatgaccttatcgataagcgcaaattgaaaccgtcaaacagttcaaaatgcgctgttctgaacgggtcaaaatggcctgttcttacagagaatacaacagagattacttcagagagtacaacagaaacagatcattcgtcgcagaattctgacgaatccagcgaccagtcgaaaaatgattttttaactcgttatcctgaagcagtgatttacagcgctaatgggcagaaatggggggatgaagatgatttaaaaacggcgaaatggatgtttggtcgtgttaaaaaactgaatccgtccgcgttagagcctacttggtatgactgggcgaacgatatccgcctgatgcgccaaatcgatgggcgtacccatgagaaaatttgtgccttgttcgattgggctaacaaagattcattctggcacaaaaatattttaagtcctcgaaaattacgtaaacactttgatgaactcactatccgtagccaagagccaaggaatgaaccaaaagttcaagttgacaccattgaacgcgatagtgccttttcccgcttgattggctctcgctctaaacctaaaaaccgcattgaagaaattgcacttgagctagcaggtaaaacaggcattcgtcgtatgagtgagttttcaggtcgccaagcatggaacagcatttggaagcaagcgatagaaatgttacaggagactcagtaa

SEQ ID NO: 302753 - DNA, 459 bp, Proteus mirabilis
atgagtaaccaatcaataaaacaagtagtgaaagaaatgtgtgaggcaacagctggtgggcgtgaagcgatggctggggcgttgggtttatctctgacttcattcaataacaaattgtacgagaaaaacggctgtcgttcgtttgatttaaacgagctattagcgatgcaagatatttctcagaccgttttatttgctgaatttgtcgctcgtgaatcaaaccgcttactcgtggacagaattagccctgcagatttagatcagacagaactattcacattacgtagcaatgttgacgaaatgcaggggcgtttagcgttattgatgaaggacagcttagctgacggcgttattgataacgaagaagagcagaaaataaaaatgatgttggatggattaatttcgcagatccacacatttatgaatgcatttgtttcgttacatcaaaagagaaattaa

SEQ ID NO: 302754 - DNA, 498 bp, Proteus mirabilis; identical to SEQ ID NO: 302342

SEQ ID NO: 302755 - DNA, 687 bp, Proteus mirabilis
atgaaaaaattgctatttagtcttgctacgctgattgtaatgtcaacaccagcattagctactccaccaggcgctaacttaaaaataaacggtgatattactccccctacttgcaccgttaatgctggtgataatgatattattattgattatggtgtaatatccccctcttttattcctgctgaggaaaattacgcactaggagctaagagtgccaatatcaaaatatcctgtgatgcaagcaattatttaacacttaaggtatcagatacttataaaacaagttcaacagattcagcgaaaattagcgtttttggattagttaatgcaaaaaatacagaacaagagattggtggatatataattgatttcattgatatcaaagttgataataaacgagcttatttaggaagagtggcagataagatttggactggctcgtccgcaactatttttaaagataccttaacagcgttaactagtgaacctcaagcccaggttgataaaaacaatttaaaacttatagctggaaaagtgtttaatgcaaaaatacaaataggagcttataacgaaagtaggtatgcgtatattttatcaagaaaaaaattggcacaaaacaatatcgatttaactgatggaattgattatataggtgaagctgtttttacttttaactttggtgtctaa

SEQ ID NO: 302756 - DNA, 1497 bp, Proteus mirabilis
atgaataaaactattagtgaacatgtagatgtcgcgctcattggtgctggcattatgagtgcaacacttggcacacttctgaaagaactagagcctaatttaaaagtcgcaatgtttgaaagacttaatgattgtggtcaagaaagctctaactcatggaataacgcgggaacaggacatgctgctaactgtgagctaaattatacgccaccaaatcctgacggcaccgttaatatcagtaaagcgttagaagtgaacaccgagttcgatttatcgcgccaattatggtcttatttagtaacaaaaggaaaaattgccgatccgcgtgattttattcatgcttgccctcatatgagttttgtttggggtgcagataacgttaaattccttcatcaacgctatcgccaaatgtctgccaatcactgttatgaaaatatgcaatacagtgaagacaaacagcaaattgaagattgggcgccattaattatggaagggcgtgatccgaatcaacagcttgctgtcacccgagtagctactggtactgatgtcgattatggcgcattaacacatctattagttaagcaactttctcaacaagataattttgagttgcactataaacatgatgttattgatatcaaaagaaatgagactggtggttggaatatcgaagttaaagatctcaccacccatgataaatacctcattacagctaaatatgtatttgttggtgccggtggacgcgctatcgatttactccaaaaatcaggtattccagaaggtaaaggctacggtggtttccctgttagtggtatttggctacgttgtgatgaagataaaatcagctctcgccatcatgccaaagtttatggaaaagcagatgtaggctcaccaccgatgtctgtcccccatcttgatactcgtattattgcaggtaaacgctccctactctttggcccctatgctggtttttcaagtaaatttttaaaacacggctcctatttagatttatttgaatcaattcgccccagcaatattgaacctatgctagatgtcgcgaaagataactggtcattaactgaatatttaattggtcaagtattacaaacgtcagcacatcaatttgaaatgcttaaacagttctatcctcaggctcaacatgaggattggcaagaagctgttgcaggtcaacgagtgcagattattaaacccgcagctaaacatcatggcgtattagagtttggtactgagctaattagtagcgcagataaatcattttcagtgttattgggggcatcacctggcgcttctacagcagcatttattgccatcaatatcattaaatcttgctttaaacagcaacttgaaaatgagggttgggaagatcgtcttaaaacgattattccaacttatggtattgatctcaaaatagatgccgatgcttgtcgtaatattcgtgcatcaacggctaagatattaaaattagaaacaccttag

SEQ ID NO: 302757 - DNA, 393 bp, Proteus mirabilis
atgctagctattttcggcgttaagctaccagagattttacaaaactcagtgaatgaaatagggaaaacatctggtggtgtagcattatttttcttaggactattaatttcagggctcaaactcaaagttaatactgaaattgtttttaatgtgataataaagaatgttgtacaaggggcattaattttaggaacgggatttgcacttggattagaaactgaattattaaaagccgtctttctaattggtgtattgcctactgcaacagcggtgcctgctttagctattacaaataaggcctatgctgatatggcaacgggcactgtattattaagtacgctatgttcattactttctattattggtggtatcactattgtagaaatgatgtaa

SEQ ID NO: 302758 - DNA, 537 bp, Proteus mirabilis
atgttactacaaaccattttagcagcgctggggcccattatcttggggcttttagttggctggctttccggtaaatatggatttattaaaagagagtattcacaagcctttgctgattttgtcgttaaaattgctctgcctttttcactctttttagcggcaacccaagcttctccgtcggttttctttaatatcgactatctattagctctcgcggtaggattaattgtttcttatcttattggttttttaggcggcaagttcttttttaaacatgataaaaagaactcagcaatgcaggcattatcggtttcatttcctgatatggcttattgtggaccaccagtattactggcaacagtcggctcatctggtttgattgctatggtggtgggaaatttgatctacacggtaattattttaccttttactatcatgatcattagtggtgccaaacaaggaaaaagcattttacagtcattgcttaatgctatctctcagccattagttttcctgcctattttggggctatgctag

SEQ ID NO: 302759 - DNA, 261 bp, Proteus mirabilis
atgatttcgatgaatacggcatttcttctcatggctgaatttgggacatcacaaataccattagcagatatcgcagagaaatatttaaaaatgagtcaaacgacagctgaaagaaaggctaatgcgggggagctaccaataccaacatacagactaaacgatagccaaaaatcccccagaatgatccatgttaatgacttggctaattacatagataagcaacgtaacgatgcagttgttgagtttaatcgtacgagataa

SEQ ID NO: 302760 - DNA, 318 bp, Proteus mirabilis
atgattacgactgatcctgtcttaattaaattaatttcagacaacattgctgatcccggtgatataactgatgccgtctggaaagctggttatcgtaaaacagattttaccactgagcagatcattgatattacggtgagtatgacggatgactctatccttttaaagctacctcatgacaccttgcctaagactttagatgacattagcaaatatcagttaaacgatatcatttgtgatgctcattgggataactcacccgcaattattgcacagtccattatggagaatgagtataggaaaggaggtgataaatga

SEQ ID NO: 302761 - DNA, 534 bp, Proteus mirabilis
gtgattattcaaacacatttacttcgtgcggctttagtttgtgtggctaaacaggatcctcgttactatctgcagggtgttcatattagcaacaagtacatcgaagcgactaacggacatgtcgctgtgcgtatggagcatggcattaaaacacgccgtgatgcaatacttgagttcagaggttctattcctgcaaaagcaaacacaacagaaattaaatttactgaagagccttttgctattcatcgcgacaaaaacggtcatcgtgtggggttctctgcacttgtttcgcataaaagcgcacgatttcctgatttagatcgcatcattccgactaaacatgaactctgtttgccatatatgcaggctatttatctttcttacccggaaaagatgttcggcaaaatacatggctataacatagtttctcttcatcctgcaggtatgacagaagcatgcctgttcaaatttagtgaaggggttaatgccacgtttggcaatcctcaatttattgtaatgccctgtcgagcttga

SEQ ID NO: 302762 - DNA, 486 bp, Proteus mirabilis
atgaaacatgaaaatatggcggtaactcaactaatagaaattctaaaagaaaaaataccagattgtccggcttggatgcttgatgaatctcgtatgaattatgaagcactaacacatcaagaactgatggagttcgctgaattcgcggttaagcgccagcgttatattcaagccacaaagtaccttatttactgcaaagagcgatttggccttgatgcaaatggagactatcagttttcttataaaaactttgacgtctacttggatgttgaagtgattgaaaccttattgaaccatcaaattgagcaaccgctattagctgaaaatccagaggaaaaatatattgccgtgtggcgtttttatacaaataacgaagctaaagaggctgagactggtattacatggctgcttgatttcatagatgacgtttttattaaaggctttcagcttttgaattcacctgtttcaaacaatttagttcactaa

SEQ ID NO: 302763 - DNA, 291 bp, Proteus mirabilis
atgaatcacctgacatacaatgtaaagaaaataaatgaaattaataaaataaaaactcctcacttagataaatacattgatgaatattaccaacatcacggccgatgggaatgcagaatatataaattaaagggagatgctaagaatataagcgatatcaactatacgctaatagattgtttttttgattatgaaaaagcatctcatagtaccaaagaaataatgaaacaacaccctaaaatgaaagaacgtgtaattgcatttttaaacataaggatagcagatgaataa

SEQ ID NO: 302764 - DNA, 564 bp, Proteus mirabilis
atgataacagatattttaacctcaagtgacgttgagacacacaatgatatatgcgatcaagtaaatttaattattcaaagtgtagatggaactttaactaaaaataaatctcaacgcagactcttagaacatgatgcattattactgtatttaagagataacgtgattcccaacttaataaaggataataaggcgttatttattattcaaacttggctttatcatcttcacaaaccattgttgcttgagcgttcagattttaaaagtgagaaaaatgataatggtgatttacttttaaatactgagactgatgataaatactcaaacctactcagagttgcaagtaattctcagcgatatacaagagaactaagagaagaaattaaacctttattatcacgcttatttcttcattacccaaaacaagcaggtagtttaaaggggtatattgacgaaatcgatttaatgacgtcggtaacattggcaaaggtacaaggcttaattaaatctattcgagaaaataaaaatgaatcacctgacatacaatgtaaagaaaataaatga

SEQ ID NO: 302765 - DNA, 519 bp, Proteus mirabilis
atggatattgatagcttgttgttaaaatctaaacaactaacatctcaaatgactggagtttatgaactttctatgtctagtttttctcatgcagatctaaccgaaatggttggggtggcactaaatctttgctcatctctgcataatgatattcaaaacaacattgatgagctgaaaaatacaggtaagccaaccacaaaatccaaacctcaaattgagcatgaaccaacaggggaaaacaaagttgaaactagtgatttctctcataagcattcattaccaggcacgtttacagaacgcttaaagctggttttgtatgaatcaggagtaacccaaacagaattagctaaatgcatgggggtatcacagagccttatcagctctttagttacagggaaaaggaatgggattgaatatagcactgctatatcaaacgctttagggataaacaaatggtggttggcttacggagaaggtgaaatgacagatttttgcacctcaaaaacagaggagttataa

SEQ ID NO: 302766 - DNA, 672 bp, Proteus mirabilis
atgaacatgaaaactatcgatcagatcagggcagaaaatgccagaaaactaagggactccgtgggtggaaatgcagcgtttgcgatgcacattgatcgcgagccaactcaagtcagtcgtttaattggaataaacccaactaaaaaaattggcaacataatggctcgccatattgaaaagtgttttggtttacctaaagcctggttagatcaggagcatggagataacaaaaccaacccaccggaaataaagtcccctgtaaaagaatctaaaatcagattagttcctttactaacatgggtgcaggctggagcttggactgaatgtgaaccaattgatatcgatgaggattttataaagaaatatccgtgccccgtaccatgtagcgaaaggacatttgctctaagtgttgtaggtgaatctatgtacccagaatacatgcctggagaaattatttttgttgatccagaggttcccgcacttactggcgatgacgttgtagcaatgcttgtagatacaggacaaacaacatttaaacgtcttatcgatgatgggtattcaaagatgctaaaggcacttaatccaaactggccaaatcaatatattcctatcaatgggaactgtaatttgatgggtaccgtcattttctctgggcgggcaaggaaaaaataa

SEQ ID NO: 302767 - DNA, 234 bp, Proteus mirabilis
atgtacgacttttggaaaaaattatcaaatgaagaaaaagtaagcttcgcttccaagtgtgaatcgtcagtcggttatttgagattggttttttctggacataaaaaacctggatacaagatgtgcaaacttattgaaataaattcaaaaggccaaattcggaaaagtgatttaagacctgacatttaccttatggataactctcatgcaccagatcaacataccgatgcctga

SEQ ID NO: 302768 - DNA, 135 bp, Proteus mirabilis
atgaagaattcgatggattctaaatatccagctatagctgatttagttaaagctaaactttacaccgagcacgataagttgtcagaagaagagcgcaaagagaggagcagaagctttaattctcctgagttctaa

SEQ ID NO: 302769 - DNA, 513 bp, Proteus mirabilis; identical to SEQ ID NO: 103757

SEQ ID NO: 302770 - DNA, 342 bp, Proteus mirabilis
  misc_feature (325)..(334): n is a, c, g, or t
atgactattcaaaaaaaacgcatgagtattcaattaaaaaatataaattgtttctacggttcgcaccaagcactctatgatattaatctagaatgttctgctggtgaaacaatggttctgttaggaccaagtggtgcgggtaagagctctctaatgcgagttctaaacttattagaaatgcctcgttctggtgaattagacattgctggtctacattttgattttggccagcaaccgaatgcgaaagcgattcgtacattacgccaaaatgttggcatggtttttcagcaatataatttatggccacacttaacggttcttgatnnnnnnnnnngttcttga

SEQ ID NO: 302771 - DNA, 1575 bp, Proteus mirabilis
atgatatacacaacaggcactgttagcacagtgtcagggtctgctattgtctctggcacaggcaccaaatggacagttaataatcccgctattcgctcaggcaccattattttaattaaaaatggtaacgctaattttatttacatggtggatagagttaatagcgatacagaattagtcatttcacaaccggctacatttaccgtaaaaaataccagttacagcattaatctcactgagccgaactcatacagcgacgctaataatcgtatgaccgctattgcatcagatacgacgtattttctgcgagcaatggaccaatggatgatgaataacggtgtggtgacagtagagctatctaatgggcaaaaagtaacgttagatagtattaagaagatgcggggggatattgccaataagctagatattaaaacaggaggtaatattaccgctagagtatctgcagatccaatatcagtgactagagatggtaatgactatttaaatatttatccacccaaagtaggggatggtaaggacttaggattctttcagtataatttagataagacatggaatggcgttttacttataccgagggttccagttggaaaaacaagagaattggctgtaaaagagggaaataacatattagtttatggctcacagcactgggcaggcttaaggctatataaagctagcggtgagtatgcgatgttggaaactaattcatcggataatgagattttatctttagcttatagagattctaaaggctctaatgttagtgttcttaggtttcctaggcaagacggtcaggtaatggttcaaggggattatggatttgctggaaatgggagaagtgaaggtttagatgaaagtaaattaacatctaaagtttttgattccaatcattctcaaatatttagatcttcttcaaacccaggaaaatttggaacaatttattcccctatcctatttttaactacaggcgatacatgggcgacaatatccactagctacttaacaggaaacgtcactgttgcgtctagtaatcgaaacagatcaaaccctataaaatttaacaatttgtggggcacatctaacactacaactgacagtaatggttttattaaacgagcttctcctgtaattaacatcaatcccgacggtatattcaccactaacgacgaatcagaaggtgctacagttactcgagtagctcagggtgaatatcttatcgaaggtgtactcggctttaactcagatgcaggttggggcggtgttgatggtggtattgaaattccactcgatgttaataaacagccgttgatatgggtagactctgaagttatggaggacggttctatcctcgtgagaacgtatcatcgaactcatcctaatgcacctaaattcgcccgtaatgatattgatggttacaaagacggcgacccaattgatatccctgatggtcgttttatttccgttcgtgtacagatgccagagcaatccatctataatgtgagaatgcgtgagatggaagaagcacagaaagcggaagaaaggccccaataa

SEQ ID NO: 302772 - DNA, 264 bp, Proteus mirabilis
atgattaagactcgctctatggggtattttcataatacaaacatacgaagctacatagaccctgacacgtgggatgaagtttggacattcaaaagatatagcgagcgttatgtcttggttgatgatgtgggagggttaacatttgagtatcgatacgagttcttaggagaagaggatggttggataagtatgcctccgagtcgagaaggttctggattaatggaacaagggcttatgatagacgtttcaatgttagaagattaa

SEQ ID NO: 302773 - DNA, 990 bp, Proteus mirabilis
atgaacttttctcattttaataaggtagtgtttgctgcctctcttcttgctactggcttttcttatgcggatagcgatcgccctctgctctctttaagtgtaagccaatctggcggcactgcgttaaatagcgaaggttcgttagatacccgtactcctgcaagccaatcgcgcgtattacctatttggggtgatgaagctcgcgcccgtggttatgatttaccagagccatttggtgcaagctatagctatatgaatctacgtcaagatattattgtggataaaattggtttttcatcaccagcactaccccaacttagtgatatagtcaaaattgatgttggacatacacgtgaaaagagtgaaactcatatgctcaaattagatagttgggttttgccttttttcaatgtttatggcttatatggtaaaacaaaaggtacatctcgttcagtcttaaaaaatgttaatgttcaaatcggccctttggttatccctgttgctaaaaatgaaatatttaatttagattttgaaggaaaaacctatggtgctggttttactttagcgggtggttataaccaattttttggtacttttgatttaaactataccaaaacaagtcttgatattcttgatggggatattaaagccttagtcatttcacctcgtgttggctatgaatttgtttttcaacctttaatcaccggccaaggtaataccaagctacaagtgtggacaggtgccatgtatcaagatattacccaacgcttcaaaggtgacgtaagtaaattaagcttaccagctaactttgaagatatggttaattcatttggtggcaatattaaattcgacgttgaacaacatcttgctcataaatggaaccaaacggtaggggctcgtttagaagtcacccgtaactttaatgtgatcaccgaagtgggctttaataatcgtaatagtttctttgtttctggtgagttccgtttttaa

SEQ ID NO: 302774 - DNA, 399 bp, Proteus mirabilis
atgaagcaaccaaactggacactccagttaccagaaaccataagggcggccatgagtcgccctttttcatggggtgaatttgattgttgtgtttttgcctctgaatgtatcaaggctcaatgcggattttctccaataaaaccctttcttggaaaatataaaaccaaagccgaagctttcaatcttatcaaatctaaatttggctcacttgatagagcagtttcccgccactttgaatctatttctattgattctgtacagcgtggggatcttgtcatgttcaaaggtgatgatggtgacagtatggccgtagtatgggcgggtaattattggggcgttacttctattggtgttaggccggtgcaaattaaccctatcaaagcgtggagagtagaataa

SEQ ID NO: 302775 - DNA, 462 bp, Proteus mirabilis
atggatccattctttattgtgtacatcattcttttaataatctctattgtgttttggtttttcttaaatagagccagtgttagagccgatagagtagtggaattattagaagctattgataaaaaaaaccgcaggcaagttgaattactaacgtcattattagaatcaacttctattacacttagcaatgaagaaaaagaaaaattggtcattgattactttcgtgaagcacaagttatcggagataatattctttcaagtgatggtaagttaaatgaatcaatgattattaaatttgctaaatttggtaacaaatatattgaaagacaaaaatcaaaaggtgatgacattagtgaggctattgatttatttactatgttgaaaaatgaaaaattttcattattaccacctaaaaataagaagatagctaacgaattatttaagcaaaatataaatttttaa

SEQ ID NO: 302776 - DNA, 582 bp, Proteus mirabilis
atgcaatatcatccattttctgacggtatggtaaaagcaatcaatgaaggcgcttatatcgtgcttgctgctcggctggatttgaaatcaggtgtaacttgtgcgcataccggtgttggtcaacttgttatcgcgggagagacttatttaggtgttgggagtcttggtgaaatcagccaacttaatgaaaacaagacaacaagcccgcctcaattacaacttaaactagctgggtttgataagtccttagtcggtatggtgatgaatgaacaaagccgagggagggaagtgcgattaatgatggtggcaattggagaagacggtaagccactattagcggaaatattgtttgtcgggcagatctcatcaattagtgttgtttctggtgaagagaacgctgtttgtgttaatgtttctaatcgatttgaacgatggtcaatcggtttgcctgacagatttaccgatgaatcatggtcatctcgaagacaaggtgatcgtatctttcgctatgtagctcaaatggctgagcgcgctatttattgggggagtaagaaagacgcacctgcattcatttataagtaa

SEQ ID NO: 302777 - DNA, 597 bp, Proteus mirabilis
atgaatattttagcatggccagacgatgtatgccccattaatgaggattggcaattactcagcaatagtaaaacgttcacttcaccgtttaatggtagcagtcagactgttcgttttccggggagccgttggcgctgtgagttaacgtttagtaatttaagcgaagaaaaatcacgtaaattagaggcgcttgttgcaacactcgatggtatgtcaggaagagtgaaaatatcgagctggatcagaaaagggaaagaagggtacggcactcctaaaatttcatcagcggggcagtctggtagtgttttacaaacatcaggctggaagagaaatatgcgcgttttacagcaaggtgatcgcctcacgatagggaatgaattgaagatggttgtagccgatgttgtaagcgataacgaaggacgagctgtcatttcaatttcccccatgctcagaactccacctgcattgaacgaagaggtgatcattaaagctccttttggggtttttcgattatcagataatgagcaggggaagtttcaacaccgccgactaggatactctaatgttactctttcttttgaggaggtactgtattaa

SEQ ID NO: 302778 - DNA, 3270 bp, Proteus mirabilis
atggctggtgcattgggaacattaaatattgatttaacgctgaacacggctagtttcaccaatgcaatcaaccgtagtcagcatcaaacagaacggtttaatcaaagtgttcgtttgagtttgcaatctattactgttcaacaagagcgaatggcgtcacagacagccaaatccgctatgtcatttgctaactttgctaaagtagtgacaggtgcgctttctattaatcaggtgatcaattacgccgacagttggaccgatctgcaaaataggatgaaattagttacaaacagcactgaagcattaaacaaagcaaccaatgatgtctacaccattgcccaaaaaacctaccaatcgctcgacgcaacagctcaggtttatcagcgtttttcagataatgcagaacgcttaggtattaatcagcaaaaagtcgctgagttgactgaaacagtatctaaagctgtctctctttcaggaacgagtgcagctgctgcagcgacaggtttaacacaatttggtcaagctttagcagcaggtcaattgcgcggacaagatttaaactctgttattgagcaaatccccggtttagcccaagccattgcagagggaatggggatcagtatgggggaattaaaacaaagagcgcaagacggtgaaacctcgatagataaaattattgaatcattagaacgagtgaaagcctctgttgatcaaaaatttgctactagtgttactactgttagccaatccttcactaatttacagtctgcaatgacgaagtttgttggtgaggcaaaccaaagcactggcgcaactcaactattaaatactggcttatctgtattatctaataatttttctgaagtaatgaaagtagtagaagcattagcggttacggctattgtgataaaaataacaaaatggactcaagctacttatgcacaaaccacagcaacaaaattaaaagtccaacaagacctgattgcagctaaagcgacgcaagcaaaaatgactgcagagttagaattggctcgtgttgaaatgcgctctttgcaagcgcaacttcagttagctcagacagaagctcagcgtagtagtattagaatgcgaatgaaagcgcaatcttcaattattgtgtcggctacaaatgcagaaacgctagcgacacaacgattgaacgcagcacaaagagctagttcaacattaggtcggggatttgggggagcacttgcttttcttggtgggccattagggatcgcgacgggcttattgactgcaggtgcaatggcttattatgaatggcaacaacaagcagagcaatcaagacaaaaggctcttgagtatgccgaatcattagatgttgcaacagagtcattaaataaacttagtgatgcggagcgtcaggcgtcaataggtaaattatttgatagttttgacgctcaaattgaaaaaatagaagaactaaagaaaaaacaagaggagttaaaaagattatcggatttcggaggggccaataaggggatatctttttattatactggagattatgaggcgttttcagcggaggtagtgaaagctagaaaagatgaaattcaggtaactgctgatcttgaagaaaaaaatagagaattagaagctatacgtaaaaaaatggcattattgcttgatgctgaagttcaaaaaaacgggatggtttcgaacgcgtatgcgctttatgcaggtcgaatttatgatgcatctgttaaatctgatgaactaattggtaagcttcatctacaaggttctgcttttgataatttagcgcaatctattcgctctgccgctcaagaacaacaacagttttcagctaattctttaattatagtatctgctgacgctcaaaaatcaatagatgcctctcttcgagctattgagaaagccaaagctactggcgaagcattggctaagcttaatgcagaggatgtcctcgctagcagaaaagtaacgcctgatatgcaaggttatgataaagcgttacaggctgaaattgatgctcaacttgctttacaatctaaaaaaattaagccacccaaaacacccaaatcaagcattgattatgctaagcagtacacaaaaatcctttctgatttacaagaaaaacaagcctcattaattgcagatggacaaagtattcagttgtatggcactacatcttcatttaatgaatataattctgcacttgctgatatcaaaaagaataaagaaaaattcgatgcaatattaaagattgatccaaaagcaatcgaaactattaaagagaaagctaaagccattgatgatatggctcgcgctaattctgtcgcgcaatttgcttatgatcgcggtaaagaagttgagcaaatgcagtttgaaacctctctaataggaaaatcaagggcggaacaggaacgattaaatgccttgaggcaggttgatttgctttatcaacaagcaaaagttgatttaggagataaagaactcgcaaacttacagaacaatgtcgagcttacaaagcaaaaaatcgaggctgaattacaaaaacgggagttaatgaaattagatccagtagaaggactaaatcaggggctttcagattttggtgattctgccaccaatgtgatggaaaacgttaaaaatgtaaccgctaatgctctgaataatatgtctgattctttagctgattttgttttaacaggtaaaggtagttttaaagactttgcgaatgctgtgatatcagacattactcgaatggtgatgaaaatgctggttttcaaagcgattgaagcaggaaccagcttttttatggggggtgcttctggcggtagtgatgctggtggaggaccaggagggctttttgcttatggcggatatacaggacatggcggaaagtttgagccaaaaggtattgttcatggtggtgagtttgtcttcaccaaagaagcaactgcaaaattagggatcggtaatctttaccgattgatgaattcaacacaaggttacgcctctggtggttttgttggttcattagctggaaaaatgccatcatctccagtcacaacatcatcctcatcaggagttaatatcacagtagtgaatcaaattactgtaacaggtaatggtgactcggtacttgttcaggccatgaaagaagccgcacaacaaggtacagatgctggtgcacaaaaagcgagagcaatgatattgcaagattttcagagtaatggtactgcacgtagaacgttaggagtatag

SEQ ID NO: 302779 - DNA, 273 bp, Proteus mirabilis
ttgtcgttggcattaggtaaaaccctttcagaaatagaacaaatgccagaaagccacttatgtgaatacgaggccttttatcgcaaacagccttttggtttatggcgagaagattaccgaatggcgcaagtggcccatcttttagcaactgcaaattgcgatccgaaatctaccccacctcaattaattgacttcatgccgatgtggaagaaaaagcccacagaagctgaagagtgggatagtgttactcagaatgttttagctcatcgttag

SEQ ID NO: 302780 - DNA, 414 bp, Proteus mirabilis
atgtcaaatgcattattacgtgaattagtattaaatcaagcacttaaaatcactccttttacctatctagacaataccttctatgttaaagagctggatgttggcacaatgaattacattcagcgaaaattacgtcaaataaaaatgaagcttgcagaagaacaagatatttatttagacgaagaagatagtgatcaattcaatgaagcaatgaaccgtgtttatgacgagtttgatgtggcacgtatgctcgcctttaaactctgtgatgaaaaaggggagttactctttgatgctgaaaatgaagaagatctaagagggcttaaccgactaggtcaagggttctctaatgctgtttttaatgcggagggaggtaacggaaaaaactcacagaccgacgacaattccaaataa

SEQ ID NO: 302781 - DNA, 702 bp, Proteus mirabilis
atggcaaagccaaaaaatcataaagcaaccccattccttggcacaaagctatttgttcaaacagggttgggtgaagaggtgagcattactgctgcgacactctctcctgccacactcacaattgaagggagtaaattaaaagctgacgacatgattgtgttatcaggtttaggtgaactcgatggacgttttcctgtcgccagtgttgaaggtgataaggtgacgttgtgtgatgaagtggattggagcgagaaaacattacccaccgatttcaccgaagcaaaagcacaacgaattcaatggtcaaataatttctgtgccgtaaaaagctttagtaaagatggctcaaccactgaacaaatagatgtgacaacaatttgtagtgacggaaaagaatatgagtctggggacactgaatacggctcaattaaattgacgttcttcttgcagtatagctctagtgctgttcagcgactattgcgtaaatacgagaatagcaaagaaaaatttgctgtaaaaatggtgctcactcgcgatgagggcaccatgttctacttcggttcgatcgagacagggatgaatatcgaggggagcgttggacaaatgatggattcaggtgtgtcaattaagttatctggtcgtgactatctaaacgtccctttaccttctgtacaaaaaactaaccttagcaaaacgaaataa

SEQ ID NO: 302782 - DNA, 342 bp, Proteus mirabilis
atgatttatcaattaaaggaagctctttcaccactcgtcgatggaagggttttttttcaggtattgcctgagagtaaattggtttaccccactattgtgatccaattttccagtatcacaccaaataatgcgcttgctgagatggatttagatgattatcgcgtccagctcgatgtgtacgatccaaacccgcaaaacctaacaacaatgcgtaagaaaataaactcagttatggttgaaagcattcctttttctcagcgcattaacacctttttcggatatgaaccagatgtcaaattacatcggctcattttggaatttattatctcatcagataaatag

SEQ ID NO: 302783 - DNA, 471 bp, Proteus mirabilis
atgggtgaaattaaaatcagtggattgcctgaaatacagcgaaaaatgcaagacgttgctcgaaaagttagaaaccgtagcgcacgcaaggcaatgaatgcaggggcatctactttgaagaaggaaatcaagaaccgtgttcccattttaaaagaagaggttcctcatcggcgcaaagggacgattaaacgtaatattcgttccaaaacaaaagtacggcgtaatggacaaaccaaaacccgtatttggataaagtctttgccgggcaaaaaaatcactgcattcaaacaagcgacagggaaaaacgctgcattgaacccaaatgatcccttttattggtggtttgttgagtttggtacttcaaaaatgccggctcaaccttttatgaggccgggttttgaggctaaaaaagaaactaccgcaaaagtgattgttcaaacgttaaaagaggaaattgagaaaacaaggtaa

SEQ ID NO: 302784 - DNA, 330 bp, Proteus mirabilis
atgaatcctggtcgattacgtcataatataaaaatacagaaatcaacattagcacccggcgccattagcggtaatgaagtgatctgggaagatttcttacctaaggtacgcgcgtctattgcaccttatcaagggcgtgaatactttcaggcacagcaagtccaaagcgaagccagtacacgtattgtgatccgttacgtatcaggaataaatacatcaatgcgtatcgtttatggtgaaaggatattcaatatcatctcaattattgatccaaaagaacaacacagagaactacaactgatgtgtaaagaaggagtcaatgatgggtga

SEQ ID NO: 302785 - DNA, 303 bp, Proteus mirabilis
atggatatcttagatgtagtctcacttccattgttaaaacaacatattgagtatgacgataatgatcgcgatgaacaaattacattttatgctcaatgtgccctcgattattgtttgagatggtgtgatgagccagcatggaaatcacctgaagatattcctcatccagttaagtcggctatgctcttagtacttggagatatgtttgaacatagaaccagtcaaagtgaaattcaattatatgaaaataaagcggcagaacggttattatttcaatatcggaattggcgaggtactgaatga

SEQ ID NO: 302786 - DNA, 1173 bp, Proteus mirabilis
atgtctgatttaacccaaattcaaaaagctatcgaagactcacaaactaaagttaaagagttatttgatgagcagaaaaagcaaattgaagaaacgggaaccatttcaaagcaattacaggctgatttaacaaccgtacaagaagaactaaaaaaagcgggtgaacgcctgtttgatttagagcaaaaaggcgcgacaagtgctgatgacccaaatgctaaaaaggatttctcagagcgtgcgtcagaagagcttattaagtcgtggaatggtagtgcagggttttatgaagtgaaaacattcaataagtcactgggcagtgatgtaggttcagcgggggcgttaatccaaccgatgcaagtgccaggcattgtcatgccaggtatgcgacgtctcgttgttcgtgatttattatcgcaaggtcgtatttccagcaattcactagaatatgtgcgcgaaaagctatttactaataacgctgctcctgtgaaagaaaaggctcaaaagcctgaatctgacctgacttttgaaaagcaaactactaacgtgatcactattgcgcactggatccaagcgtcacgccaagttatggacgatgcggcgcaactgcaatcttacctgaacacacgtttattatacggtttagcattagttgaagaaaatcaaatgcttaatggtgacggttcagctgataatctgacaggtattaaccaagttgcaactgcgtacgacatcacgttaaatgcctctggggacacgcaagctgacttgatcgcccacgctatttatcaggtaacagaatctgagtttagtgcatcaggaattattttaaacccgcgtgactggcatgccattgcactaatgaaagataaagaagggcgttatctttttggtggtcctcaagcatttacttcaaatatcatgtggggattaccagttgtaccaacaaaagcacaagcacagggtgagtttactgttggtgcattcgatttagcttcccaagtttgggatcgtatggatgcaaccattgaagtgagtcgtgaagatcgcgataactttgtgaaaaatatgctgactatcttatgtgaagagcgtctagcgttagcacactatcgcccacaggcacttatcaaaggctcttttgcaacagcggaaggtaagtcaacaaaataa

SEQ ID NO: 302787 - DNA, 669 bp, Proteus mirabilis
atgtccgacattaaaaaaacactcgcctttgatgatgcagagattaaattcaccggtgatggaacccaaggcatttttgaagggtatgcatctgtattcagcaataccgattcagatggagacattattttgcctggtgcttttaagggagttttagcaaatcagaaacgcaaagtagccatgttctataaccatcgtgcatgggagttaccagtaggtaaatgggaacacatggaagaggactcaaaaggattgcttgttcgagggcaactgacacctggtcatagtggcgctcaagatttaaaagcagcaatgaaacacggtaccgtggagggtatgtcagttggttttggttgtgttcgtgaggattttgatgtgacttcctctgggcgtatttttaaaaatatttctatactgcgggaaatcagtatttgtactttccctgcaaatgaacaggctcaagtttcgtcactaaaaagcgtcgatggcctatccactattcgtgatattgaagattggctgagagagtcagtaggtctatcaaaatcagaagcgattggcttcatctctcgcttcaaatcagctattcggagtgagtccgatggcactcaaaaatctcaagtagattccattattaaccaaattaattcatttaatctgaaaggataa

SEQ ID NO: 302788 - DNA, 1269 bp, Proteus mirabilis
atgacagataaacaatattcaatagacttacgcactaatcatggttggtttgcgcgtctggcttctttctttgttggcggaagactcgtaacacccgaacaaggttcacaatcaggcgttatttctgcacaaggaacacttggtgattcctctgtaaatgatgagagaatattacaaatatcaactgtttggcgttgtgttagcttgatttcgacgttaactgcctgcttgccattggatgtttttgaaacggatgagcaaggaaatagaagcaaagttgatttaagtaacccattggctcgattactacgatattcacctaatcaatatatgaccgctcaggaatttagagaggcaatgaccatgcagctttgcttttatggtaatgcttacgcactggttgagcgaaataaatttggtgacgtgattagtttgcttcctctgttgtctgccaatatggatgtccgcatggaggggaaacgtgttatttatagatatcagagagatcatgaatttgctaaatttaaacaacaggaaatttttcacttaaaagggtttggttttaatgggttggtagggttgtcacccattgcttatgcatgtaagaccgcaagtacggctgttgcgatggaagatcaacagcgtgaattttatgctaatggggcgaagtcccctaaaatcctgacaacgggtgataaggtattaaataaagagcagcgtagccaacttgaagagaatttcaaagaaatcgcaggtggtcccgttaaaaaaagattgtggatattggagggagggcttaaggccgaagatattggcgttagccctcaagacgcagaaacaatggcatcgcgtaagtttcaggtcagtgagttagctcgtttctttggtgtccccccacatttagtcggtgatgttgaaaagtcaacgagttggggaactggcattgaacagcaaaacttagggtttcttcaatataccttacaaccctatatctctcgatgggaaaattgtgtttcaagatggcttttaaaaccgagtgatattggtaaataccatgcagagcacaatcttgatggtctattgagaggggattctgcttctcgtgcgaccttcatgaaagcgatgggagaatcaggcctaagaactattaatgaaatgagacgactcgataactacccgccacttgaaggaggggatgttgcatatcggcaagcgcaatatttaccaataaatcaacttagcaaagagcctcacgaaagtggggcttaa

SEQ ID NO: 302789 - DNA, 540 bp, Proteus mirabilis
atgttgaccccaactaaaaattctgcactcgaatacttaaaaagtcatccatctactaaagaatttcatatagaaactattgggcaattttttacttatctcaaagattctattctttcattgtttaatagtgatcataaatttagctatttaggaaagatgtctgttgcagatttcaacttaatgtatattagaaaagacttgcatacttttttaactaatccatttctcaataaatcggaacataaagacaaagtaggcgctcttcagtactcatttgattacttgcagaatcaagctcatattacacctaacctttacaatgtttatcgctctggaaattttgagcctaacgaattgatttcacaattaattaattacggcaataagcttatcaaaaataatttaagcaccgaagaagcacaacatggtaaatatgttatagaaacattaaaagaggtattgaataatttagaaaaattatccaatacagaaaaaatgagactcagaatattaagtatcgttaatgaacggaagtaa

SEQ ID NO: 302790 - DNA, 243 bp, Proteus mirabilis
atgttacttagtgttctttatattattggtattaccgcagaagccatgacaggggcacttgccgctggtcgccgtaaaatggatgtttttggcgttatcatcattgcatcagccactgctattggtggtggttcagtaagagatattcttcttggtcactaccctttaggttgggtcaaacaccctgagtatattgtcacagtagcttgtgccgcggtgatcactatttgggtcgccccatga

SEQ ID NO: 302791 - DNA, 381 bp, Proteus mirabilis
atgactacaaatgaagtggtagaagcaataagaactgtatctcgtgactacaatcatagtcagcagggtgggtctgatactgaaactccagatttatcagatatatttgaacctaacgcatacgaaaatagaatagctgatatattggagaatatagatgaacacactgctgtgaaaattttaaacctaatgtatatcagacgtgaaatagaagaagatgaagatttcagtacatgctatcaacgtatggtaagagtattaaatcaaaacagagagcatgcaattctgaaagtatctgaaaaattacctgtattagatcaatatttatctgacgcattagaattagctaaaaaagatagagtagatatagagaaattataa

SEQ ID NO: 302792 - DNA, 474 bp, Proteus mirabilis
atgtctggaccacctaaaaccccaacacacctacgtttagttagggggaacccatcaaaacgaccgattaataaaaaagaaccaaaacctcccaaaggggtacccccaactccgaagcatttttctaaacaagaaaaatattggtttaagcgtatggctgaggagttagatcaagttggcgtaattactcaccttgatggaatggccttggaattaatgattggagcatatgttgaatggcgccatcatcgagatgtgattgctgaagttggtgagtcttataaaactacgacaagtacaggtgatattattattcgagcgcatccacaagtagcgatgagggatagagcatttaataacatttgtaaaatgatgtcagaatttggtattactccagcttctcgagcaaaagtcacgatgaacactcccgccgaagaagatcctttcgaggcatttttgaaaaagcgcaaatga

SEQ ID NO: 302793 - DNA, 1734 bp, Proteus mirabilis
atggcaatcgtagcagatggaattcagtacgccgaacaggtggtgactggagaaattgttgcgtgcgaactggtacgtttagcgtgccaacggtttttgaatgatttagagcatgggcctgagcgtggcatctatttcattgaagatcgcgcacagcacatactcgatttttacagttttattcctcatgtcaaaggagcattagccggtaagcccattgatttaatgccttggcatgtttttatcttaattaatatttttggctttgttattccgttaattgatgaacaaacgggcaaggaagttgtggatgaagacggtgatgttgtctttgtccgtcgttttcgcacagcttataacgaagttgcacgtaaaaatgcaaaatccacattgtcatcaggtattgggctgtatatgaccggtgctgatggtgagggcggtgccgaagtttactctgcagcaacgacacgtgatcaggctcgtatcgtatttgaagatgcgaagaacatgctgaaaaagtccaaagcgacattgggacgtttatttgagtttaataaactcgctatctatcaagaaagaactgcctctaagtttgaaccgctttccagtgatgccaacaaccttgatggtttaaatattcactgtggcattgttgatgaactgcatgcacacaaaactcgtgatgtgtgggatgtattagaaactgctaccggtgcgcgtctgcagtctcttctttttgggatcaccacagcggggtttaataaagaggggatttgttacgaattacgggattacggtattaaagtgcttcgtggccaagtggatgatgattcgtttttcgccattatttataccttagataaagacgatgatccctttaatgaaactgtgtggcaaaaagcgaatccggggctgggggtttgtaagcgctgggatgatttacgccgtttagccaagaaagccaaagagcaggtttcggcacggattaacttcttcactaaacacatgaatatttgggttacggctgaatcttcatggatggatatgatgaagtgggatgatgcgcctcaattagcacctaaacaagaattacaaacttatccgttatgggtcggcgttgaccttgccaataaaattgatatttgtgcggccgccaaggtctggaaacagcccgataacggtcatgttcatgctgattttaagttttggttacctgaagaccggcttgagcgttgttctaaacaaatggcggagctttaccgtaaatgggctgatatgggatatctcacattaactgatggtgaagttgtcgatcatgctcaaattaaagaagaaattattgaatgggtgacgggtgagaacttaaacgaactgggttttgacccgtggagtgcgacacaatttagtttgtcactcgctgaagaagggctacctcttgttgaggttgctcaaacggttcgtaacttttccgaatccatgaaagagattgaagcactggtttatgcaggtaagtttcatcatagccaacaccctgttatgaactggatgatgtcgaacgtcacggttaaaccggacaaaaacgacaatattttccctaataaatccacacccgaggcaaaaattgacggccctgttgcactatttacaggtatgagtcgattattggtgaatggggggagtgataaacccgatatctcaggatttataaataacccaatcatagtaggtatctaa

SEQ ID NO: 302794 - DNA, 189 bp, Proteus mirabilis
atgaaactaattatattacgagccatttattttggtggtgtcgttgttactgaggggaaagagattgaaaccttagaacaacatgggcgtgagttaattcaaaaaggctatgcaaaagaaaaggaagttgtacatcctgctattgagcctgagcctaaaaaaaacaccaaagctaaaaaggagaaataa

SEQ ID NO: 302795 - DNA, 228 bp, Proteus mirabilis
atgaaagatcttcctccttccacacaggaaaggcttatatcacaaggaacacataagcatacagtattcagtttagataaccgtaggttatatgcggcaaaagaggctggtatagagaaaattccatctagatgggcaacacttaaagaattaaaagaaataaaccttgatcgtagattttctacagaagatggcggtaaatccattcaaattaggaaatgtatttaa

SEQ ID NO: 302796 - DNA, 339 bp, Proteus mirabilis
atgaaaaaacgcaatgtctatggtggtcgatgggcaaaggtgaggttagcttttcttaatgagaacccgctctgtgttatgtgtcaagagcaaggtcgtattactgcagctactgtcgttgaccacattattccgcatcgacttagagaagcaattcaatctggtgataaggcgctcatcacaaaagcacaaaccttattctgggataagaagaactttcaaagcttatgtgaccctcaccacaactcaacaaaacaacgaatggaaaagagtggcaaggttgtcggttgtaatgctgatggcattcctcttgatcctaattctcactggaacaaataa

SEQ ID NO: 302797 - DNA, 378 bp, Proteus mirabilis
atgtcagataaaaaagagataggcgagttgatctacaaagtctcagtagatacaagtgagttagataagttagaagaacaactcactcgcattaaacaactgatgcaagatgtaggtatgaatcctaaatcaattcctcaattttcctatccgcacgctggtaagttttttattaaagatgcccttattaattcggctgtgttcaatggtgtgcttgttagtaataagtcagagcagagcgttaatgctcaactagcagatttacgtatgcgagcggatcgacaagataatgatatagctgaactcattagattaagacatgcagatcaacaggcatggtctgatgctattaatcgaacatggtgtagtcagagataa

SEQ ID NO: 302798 - DNA, 471 bp, Proteus mirabilis
atgaacctaaaacaaaaagtgacagctgttgcgagtgctggtgctgtaagtattgcactaacagtgattggctattttgagggcgtgcgttatgaaccttaccgtgatgttgctggagttctgacggtttgttatggccatactggaaacgacatcattcaaggtaagacctatacacaacaagagtgtgatgaattactgcagaaagactttatcagaacgcaacagcaagtcgatattctggttaaagtgccggtcgatgataaaacaaaggcgtctctatattcctttgcctttaatgtgggtaccacagcttttgcacgttctacactactaaagaaattaaatgcaggtgatcagaatggcgcttgtgaagaaatgaaacgctgggtttatgcgggtggaaaggtgtggcgagggttggtcagtcgtagagaggcagagtcagcattatgcaatggaaatctttaa

SEQ ID NO: 302799 - DNA, 288 bp, Proteus mirabilis
atgatggatagtgatggggtaatgaaagatagtgacagtaatgtaatagctaaattcgcgacgcttaaatctgaattactattatctacaccatcaatagaagatttagtgacaagaattgagtcactggaaaaacagctcgctgatatgcaaaaggcaacgagctgtgagttagatagcgccattcaaaatgtcttattacaaggtgtagaaaatggtgcaaaaaaagcaaaggagcttattaaaaatcaagatttttatcaaaaaccaaagcagacttcaagatag

SEQ ID NO: 302800 - DNA, 573 bp, Proteus mirabilis
atgacgataaaacagacaattgggataaaaaaaatcgctagtttgagcttattactgctcttttttctactctcttcttctgcggttgccaaagagtggactattggtgtgttagcgttgcgaggcgacgcctcaacacaaagacattggcaaccgcttatcgataccttagatcaacaaatacccacagatagctttctgctgttaccacttaacttgtcagaaatgaagcaagccgtggcggacaagagagtggattttctattgacgaatccagcgcaatttgtccagcttgatagtgcatatccgctacgttggttactctctttacgctcgggttatgagccggataacacaacaagaaatgtgattggtagccttattttggtgcgcaaagacagcgtaatcacatcgattcatgaattagtcggaaagcgtgttggcgccattgcaccagatgcctttggtggatatctgttaggttacaaagcactgcgtgaagaagggattgatcctgagcaggattttacattacgttttagtggttttccggctgatgcgttactttactga

SEQ ID NO: 302801 - DNA, 2250 bp, Proteus mirabilis
atgaaaactcaattaacaaggaaaatacttggctcttgtattctattttctggtattcattctctggtgtttgcggctgaaacggaaaaaacagttcaatttagtagtttaaaagtctcatcggcacaaaaacaaacaccagagcaaaaagcgttagctaagccgggggcttatagcgctattggtgaaatcaataatcttagctcggtagaacaagcattacgatctacaccgggaacttacacccaaatggatgccagtcagccgggggttggggttaatatccggggattaagtggttttggtcgagtcaatatgatgattgatggggtgactcaaacgatgtatagcacgtcacctagccaatatgcgcatggtggacaaccatacaaccagtttaatagcatgatcgatcctaactttattgtgcaaattgatatttctcgtggtcaacaagatggtgaaaatagtattaatgcgttagcggggagtgctaattttaaaacaataggtattgatgatgttttattttctaatcatcgttggggaataagaagtaaagcggctcgagggactaatggattaggttataacggtatggttgcgattgcaggaaaacagccgatatttaatcatgatggttatattggcgctatgtttgccataagtggacataatattgaatcttcttataaaaatggggcaggttttaatagtcatgagtttgcaaccactaaagactttaaccaaaagccacattctgaattagcaaaaatatcgtttaaacccaatgattctcatgaaatagaattaagtggtcggttttataataataaatttaatcgaagaaccatagagagccaagattattatgctaaatatcgttataccccgctaaacgatctttttgatagtgaaatattattgagtagaagccaagcttcacaaaaatttgccggtgactctttaatgtcattacgcaatggacatgcgaaaaatatttccaatgcacttgtcgctaaaaataccagtcgatttaattatcatgagctggatatggcactaacattaggtactaaactgatgtcgattgattataatcgagaagtgacagctccttcgagcgatccatggcaatcacaaaatatgattgaatacaatgtatttgctccgcaaggaaaaaacgacatcagcagtcttttttcacaaatgaaatttgaatacgatatttataccctcgcattagatttaaactatacggattatcatattaaaggatataaacccgcttgtgatcccaaagcagcgtgtttccctgaaggtgcgatgaatgttaatcgccacgaaaaagcgtgggagccgggagcactcttttctgcacaaattatccctgaatttgaaccatttatcagttatgcccatacgacaagggcaccaaacccacaggaaattttctttgctaatgaaggtggggcatcgatgaacccctttttaagaagtgagaaagcggatactttccaaataggttttaatagttatcgccctgatttaattgttgccggagacagctttcgcttaaaagcactttggtatcatactaaagttaaaaactatatttccagtgattcttataatgtttgtaaagggggtaaacgttgtaaaatcgatggcacttttactgacgatgactacagtggcatggaatacgatggaaatatctatttatacacaaatagccttgatcctgtgacgatgagaggctatgaactacaagtaaactatgatgctgatgtattttataccacactttcttatagcaatgagcgcacctcacaacccacttctcttgcgatgggggattttgggcaaagtcctgcatcagaacttcccaaatactacgcaacgattgatgctggtgtgaggttattcgatgaccgatctctcgaattaggcaccatcattcaaattaccggtaaaagtcgtaaagcttcagctgaagggtttgattttgatacaggcactattcccatggtcgaacaagaaaaaatccctaccgtgatcaacgcgtacgctaactatcaaatgaataaaaatgtgtcattaaaatttgcggtacataatctcatgaataaaaattattcaaatgcacttgatagaagtaattcagcgccaattatggatgaacagggacaaaataaacaaacggctagaggcagaagtttcctgtttggtggagaaattcgtttttaa

SEQ ID NO: 302802 - DNA, 477 bp, Proteus mirabilis
atgacccgactacaaaaattgacggcgttcttacgtgcaaatttgcctgaacccgtatttgcaaccgaatttagtagtgagatggatgatattacatttaaacgcgctcacaatgatttaggcgaaaaacaatatcaaattttaacgcaagaatatgatgcggtaattgcgtgggggcgttggccttatcgtgaaattgatacacgttatatccccgtattaattgaggcatggtatcaagatttagaaacggattttaccgaacctgatttcgatgatgaaccaccgactattgatgttgatgtgattgacgatgatatcgcgatggttgtagtcaccctgaaattaagtgatgccattgtgttaaaagaagatgaaaaaggcctcgtgccatttgacggtaaacgttggtcactggctaatcctgaagtgttatttgctgaaaatattgatgtgatcccccgtggtgtgaaatga

SEQ ID NO: 302803 - DNA, 189 bp, Proteus mirabilis
atgtcaatcgagaaagacactaaaaacaaactaactaatcttcttcttcaagtaaaaagcataaaagaacccattacttgtgaagaagctcttgatttaagaaatttagcatcagagctttcacgtgaaatttacaataagttccatacacaacaaaaaggtagcgttgatattattgattgcttttaa

SEQ ID NO: 302804 - DNA, 270 bp, Proteus mirabilis
atgagtcaactaattaaatcagaagataatgaaaaattagaaatactaatttcagaagtgaagaaatatacgttatcacttcctaaaaaagagaatgggctaggaaaagaagaaataaaatcattaggcacagtatctagaatgactttaatgttttcaatattaaacgccataagggaggttaatcccactatgacgtctttttatattggagatttacaagctgtgtttgatgcaattattgcactgcatcgacgtaactcattttaa

SEQ ID NO: 302805 - DNA, 291 bp, Proteus mirabilis
atgagtgagaagaacgcagaaagttatatgcaggtctattacccagttgatgccgtgccttatcaaaaatttgcggagttaattggtaaaactccaaccgcagttaaaaatatggttgataacaacaaactaccgcttatcccttggcaaaatccagataacaaggcaaacgcaaaaactcgtggtgagaattgggtttatatccctgaatttaatcgtgcaatgagagacgcatttgaaaatcgtccaagagaattgcgtgacgcatggcttttatgggtagggctataa

SEQ ID NO: 302806 - DNA, 306 bp, Proteus mirabilis
atgaccaacacgtcaagacttggagataaaattcgcttaatacgagaagcggaagggcttaacagaaaagagctatcagaattgctaggtatctcttatggaactctcaataactatgaaaccaaaggaattcagcttacggagtcgtcaatagtcaaatttactaatcatcctagatttgagaaatacactttatggcttctaacaggaaagaccaacgaatccattggacagattagcccgtctctctcccctgatggagcagattcaacaacattaccccaatcagagaagaaaactggctag

SEQ ID NO: 302807 - DNA, 972 bp, Proteus mirabilis
atgcctattaaaaaaaccgatgatggccgttatttagtggatataagacctcttggacgacaaggatatcgaatcaggaaagtctttaacaaaaaagcagaagctattgcatttgaaagatacacaatggctaatgcgaatatttccgatacaaaacaagatcgccggacattaagcgaattattagatttatggtggttatatcatggcgctaaccttaaaaatggtgatattgaaaaacgccaattaaacaagactattgcttccctaaaaaatccggcaataaaccgcctaaataaaaaagtattgcttgaacacagaacagagagacttagcaattccgttagtgcttcaacaatcaatcgtgacatgtaccgcttatccggcatgttaactgttctgaaaaaatttgagttattcaacggtgacaatccaattaaaggattaccaccattaaaagaaaaagagccagaaatgacttttttatctcgagaggaaatacgtcagttattaaatgtattagatggggatgaaaaacgagtagcactactttgcttaagtacgggcgcgaggtggagcgaagcggctaatttaaaaggcaagcaagtcatgcatggacgagttacctttttaaaaaccaaaaatggtaaacagcgaaccgttccgatctcagaagagctggagaaactcctaagaagtgaaacatctggtgctttatttaaagttgattatgaatctttcagaacgaaactaaaggcggtaaaaaacgatctaccgagaggacaggcaactcatgtattaaggcatacatttgctagtcattttatgatgaatggggggaatattgttgcactacaacaaatattaggccatgcaagcataaaccaaacaatggcatatgctcatttagcacctgattatttgcaattcgccatttcactaaacccattaaaaggtaaagtggaaatttag

SEQ ID NO: 302808 - DNA, 1074 bp, Proteus mirabilis; identical to SEQ ID NO: 297765

SEQ ID NO: 302809 - DNA, 519 bp, Proteus mirabilis
atgctctctaatatgaaaacagtaagagtccctatcgccttagtgcaaagtgttatgcgtacactgcgtgaaaaactgcaacaggccaataaatatcttaatacagattacccagaacccactctacaatataaccagagaggaactattgcaggcagtgcctattatgcaaattgggaaatccgtcttaatcctacattattgattgaaaataaacaggattttattgaagaagttattcctcatgaattagcacatctgctagttagtcgccattttggtcgtgtggcacctcatggcaaggagtggaaatggatgatggaaactgtgttacaggttaatgcgaaacggacccaccattttgatatcagcaatgtaacagcaaaaacgtttagctatgcttgtcgctgccaagaaatacaccagttaactcttcgccgacacaataaagtacaacgaggagaaacccagtatcgttgtcgtcattgtcaggcgattttacaattaattaaagagtaa

SEQ ID NO: 302810 - DNA, 1341 bp, Proteus mirabilis
atgcatcaatctgatgtagcggatcgctcacttttttcccttagctggcctatttttattgatatttttcttcatcttgccacgctattgattaacacttacatgataagtcatgtctctactgcctatttagctgcaatgggcgtaggtaaccaagtttttgatctttttatcaccatatttaactttattagtgtgggatgtagcgttgttattgctcaatatttaggcgccggtaagcgcgataaagccagtcaagctattcatatttctatcgcctttaactttttgctgggctttagtagtgccattattattctcttttttggctacaacattctaaatgtaatgaatacgccagagcatttagtacaagatggctataactatctccatattttggggatttgtcttattcctgaagcaatttcaattatcttagcagcctgtttgcgggtttatggtaaatcgaaagcggcgatgtatgtgacgttaattgccaatattgtcactgttatcggcaatatgattgtactatatggtttctttgggcttccacaatacggtttagtgggtgttgcatggtcaacagttgtcggtcgtattattgccgttgtcttattatgtggtcttttattctatggattaagaattaaattcgatataagactattagtgatttggtctaaaaatatgttagccaaaattctacatattggtttacctgctgcaggtgaaaacctagtgtggattttacattatatgaccgcctctgcctttataggcttaatgggagaagttcctctcgccgcacaaacactctatttccaactatcattattcttaatgttatttggcattgcgattagcattggtaatgaaatattagtcggtcatttagttggtgcaaaacgatttgatgatgcatttacacggggttttaaaagcctaaaagcaggtgtgctatttactattggcgtggtgattatttattggtttatgcgtgatcctattttgtattctatcaccgaagatcaacgcattatcgaccaactgttgcctttatttattttatcggtctttttggagcctgggcgtacatttaatattgttatggttaatgcgttacgtgcagccggagatgccaaattcccactcattacagccgtttgttttatgtggggagttgctattcctattggctatttccttggtataaaaatggaaatgggtttaattgggatttggataggttttctttgcgatgagtggctacgaggcttaacaaatgcatggcgttggcgctctcgtaaatggcaagctaagcgcttagatatttga

SEQ ID NO: 302811 - DNA, 1077 bp, Proteus mirabilis
atgttacagttcaatataaactcacaaaatggctcaatgccacatattcgtgtagagaatattcaaaagagatttaatcaatttattgctttagatggtgtttctttagagattaaacaaggcgagttagtctgcctattagggccttctggatgtggaaaaaccacattattacgttgtattgccggattagaaacacaagatcacggtagtatctttaattacgataacaacatctcacaccttccccctcaagcccgtgactatgggatcttatttcagtcctatgcattatttcctaacctgacggtacagcaaaatattgcgtatggtttagccggtcagcctcgtaatgtgattaaaaatcgcgttaatgaaatgctggagttagttggtttacaagatcgaaagaaaaaatatccaggagaattatctggcggtcaacaacagcgcgtggcattggctcgtgctttggctcctgccccttctttactattactggatgagccaatgtcggcattagatgcacaagtgcgtgaacatttgtgtgtggagctacgtaatttacagcaaagcttaaatatcactacgctaatggtcactcataatcaagatgaagccatgctgatggccgataggatagctgttatgaataacggcaaggttgagcagtacggcagtagtgaagagatttacaaccatccacaaacaccatttgttgcagagtttgtaggaaaaggtaactggttacctttcaatagaaatcagcacggtgaggcgatgattggctcacgagaagtccaattaaaacatactgcagtacctcataatcaagggcgtctcttttgtcgacctgaatcaatcaaaattaacccaatacaaaacaaacataatcaatacgatgccaatatacaaaatgtggtgtttttgggaagtcgttgcattatgaagtttgaattagaccatttaccgggacatttattacaagccgagatctctgctgctgagctacatagtattcaaaacggtaaagttaaagtgactttaccggctaatgaactacacatatttgcgtaa

SEQ ID NO: 302812 - DNA, 2394 bp, Proteus mirabilis
atgccagggcgctacgaatttgttgttcgtataaataataatgaacttcccgatatctacaacattaattatgttgtacctgcagatgatcccaaaggaagtgaaccttgcttacctcctgaattagttcgtcaattaggactaaaaccagagtggcttgataaaattcgttttaacgataatcaaacttgccttgatacatcatctattcccggaatgacaataaatgccagtttaggtagtggtaatttattattaacgatacctcaagcttatttggagtattcagcaccaaactgggatccgccttctcgttgggatgacggtatttcagggatactttttgattataacgtcaatgctaatgtgactgatcctgctaaaggaaaacaacgtcagcaagtgacggggttaggtacgttaggggcgaacttaggtgcttggcgttttcgcgctgattggcaagcgagctaccaacatacgacagggatccctcaaagtacagaaaacagctggaaatggaatcaatactatctctatagagctatccctcaatgggaagcgcgctttgtcatgggagagacttactcgcgctccgatatttttgatagtttccgttttaccggggttcatctcgcaactgacgacaatatgttgccacctaatttacgtggatatgcgccagaagtcacaggtgtagcaaaaaccaatgccaaagtgacaattagccaacagggtcgagtgatctacgaaacgcaagttgctccaggaccatttcgtattcaagatattaatgatgcggttagtggcaaattagatgtacgtgtcgaagagcaagatggctctgtacaagagtttcaaatggatacggcaagtattccttatttaactcgaccaggacgagtgcaatataaattctcggcaggtaaaccttctaatattgaccataataccgaaggccccgtttttggtatgggggaattttcatggggggtgagtaacggttggtcactttatgggggctcaattgttgcgggtgattataacgccttgtctgcgggtatcggccgtgacttaatggcttttggtgctctctcttttgatgctactcactcttgggcaaaaattcctcgtgatgataagcgttataacggtggctcttatcgattaagttattcaaaacgttttgaagctattaatagccaagtcacctttgctggttatcgcttctcagaacgcgactttatgaccatggatcagtatttagagcgtcgctatcgcgatggtaatgctgataataacaaagaactttataccattatgtttagtaagcaatttcctgactggggattgagtacttacttaaactatagtcaccaaacatattggaataagccaactaatgataattacaacttatcgttagcgaaaagcgcggatattggtcgttttaaaaatatcaattttagtctctccgctttccgtaataaatttaatggcaccaatgataatggcgtttatatgaatgtcagtatgccttggggtgatcgtgcgaccatcagttacaacactgtcattaataagagcggtaactctcataatgtcagctattacgatcgaattgatgacaatagcagttatcgtgttggcgctggggtaagtagcaatggtaaaccttcagccgatgcttattttatgcattatgctgatgcggccttagtcaccgccagtgcaagtcatatcaatggtgaatatacctctgccactttatcgctacaaggtggtgccacacttacgccgaaaggtggagcattacaccgcgttagtcgtacaggtagtactcgcttacttattgatacagacggtatcgctaatattcccgtgaagaattttggtgcgatttcccataccaatatgtttggtaaagcggtattgccagatattaatgattactaccgtagtagcgcgagtatcgatcttaatcgattacctgaaaatgtcgaagcattacgctcaattcagcaattaaccctaaccgaaggggcgattggttaccgtcgatttgatgttatcgaagggcaaaaagccatggcggttattcggttaaaagatggaaccttcccaccatttggcgccagtgtcacaacagaaaaagggcgtgagttaggcatcattaatgatggtggaaatgtttatctaaccggtattaataccggggatgtattgagtgttcgttggagtggtaaagagcagtgcaaagtacttattccaacattggtggagaatgtgcaaatttcatcactgttattgacctgtagtgatgatggcacagcaacctctactttcaatcaaagagaagtctccttacctaaaacgaagtttctatctcgttaa

SEQ ID NO: 302813 - DNA, 1458 bp, Proteus mirabilis
gtgtctgaactatctactctatccccacaaccattatgggatatttttgcaaaaatttgttcaattccacacccttcatatcatgaagaagccttagcgtcccacattatggcttgggcgacagaaaaaggtttatctgttgagcgcgatgcggtaggaaatattttaatccgtaaacctgccaccaaaggtatggaagatcgtaaaacagtcgttttacaagcgcacttagatatggtgccacaaaaaaataacgataccgaacacgactttaccaaagatcctatccaaccttatattgatggtgaatgggtaaaagcgaaaggcaccacattaggtgcagataatggtgttggtatggcttctgcactcgctgtattagctgacgatactgttaaacatggccccttagaagtattgttaaccatgacagaagaaactggaatggatggtgcttttggactacagcctggctggttacaagcggatattctgattaatacagactcagaagaagaaggcgaaatctatatgggttgtgccggtggtattgatgttaaaaccacggtagacctcacttatgaagctattcctgcaaaccatatcgtcaaaaaactggtactaaaaggcctaaatggtggccactcaggtggtgatattcatttaggtttaggtaatgcaaacaaattattagcgcgtttccttgctgaacatgcggatgaattagcactaaaattaattgatttccatggtggtacactgcgtaatgctatccctcgtgaagcgcatattatttttgctattcctgcggataaagcgactcaattaaatagcattaccacagaatttgaagcgctattaaaaagtgaattagccattgctgaaaaaaatctagctatcgaattaacagatactagcaccgaaaaaccagtatttactgctgattgtcaatctcgcactatcaatttacttaatgccatgccaaatggtgttatccgcatgagtgatgatgtggaaggtgtggttgaaacctcattaaacgtcggtgtagtgagtattgttgacgataaagtagaaatcctatgtttaattcgctctctgattgatagtggtaaaacttatgttgttagcatgctgacagcattagccaaacttgctcaagcagatatcgaaaccaaaggtggttatcctggctggaaacctgatgcggattcaccggttatgcacttagtacgtgacacttatcaacaactatttgataaagtgccaaatatcatggtgatccatgcaggtcttgagtgcggtctatttaaaaaaccttatccagatatggatatggtctctattgggccaactattcgcggtgcacactcaccggatgagcgagtacacattaagagtgtaggtcaatactggcaattactgactgctattttaaaagcgatcccagctaaataa

SEQ ID NO: 302814 - DNA, 438 bp, Proteus mirabilis
  misc_feature (423)..(432): n is a, c, g, or t
atggggatcccgcctagccatattgatcatgtaaaacaatttaatcttggcactgtttttcgattaattgatgaacatggtcctatttctcgtatctcattatctaaaaaagcaacacttgcgcctgccagtattactaaaattacgcgagaattagttgaagcacaccttattcatgaaacagaatttcctgggttaggatttcgaggacggccggctgttggtttaaagttagagagcaaagggtggcaatttttatgtattcgagtaaataatggtagtctactttttagtttaagagagctagataatcaattagttgttgaagataccttcgactttcctaaacaaaatagtgatgcttttttgcatcatttccttgctgcaatagatacattctttcaacgttatcaatcaagagtnnnnnnnnnngagtag

SEQ ID NO: 302815 - DNA, 993 bp, Proteus mirabilis; identical to SEQ ID NO: 297993

SEQ ID NO: 302816 - DNA, 348 bp, Proteus mirabilis
  misc_feature (206)..(215): n is a, c, g, or t
atggcgaaagagtcgcaacaagcagaattaaagcgcggtcttaaaaatcgacatatccagctgattgcgctgggtggggctgtcggcgctggtctgtttcttggtatcgcgcaaaccattaatatgactgggccatcagttatattaggctatgcgattggtggttttattgcgtttatgatcatgcgccaacttggtgaaatggnnnnnnnnnngaaatggttgccgaagagccggttgcgggttcatttagtcactttgccaataagtattgggggccatttgctggctttttatcaggttggaactactgggttatgtttattcttgtcggtatggctgaattaa

SEQ ID NO: 302817 - DNA, 1083 bp, Proteus mirabilis
atggcttattatagtgttgaaaaacgccttagatcagatggtactataagatatagatgtaccgttggcgtaaagaaggatggaaaatatatttttagagaaaataaaacatttagtaaagtgtctgtggctaaatcttggggagttcgacgtgttgctgaaattgagcaatctgggttacctaaaaaggaatcacccactaaaataaaagtatctgaattaatacaaatgtatttagatgaacctgggttgggaggtaagtcaggtaaaacaaaaaaatacgtccttaattcactaaagtcatcttctttaggaaatatttatttgtctaaattgtcagttaatgacgttattgagcattgcaaattgagaagatcagcaggaacagggcctaataccgtaagtcaagatgtaagttatttgaccgtggctttaaactctgcaaaatctgtatttgatatcgagtacacagacaatcccgcaagagatgccaaacccatactaaaccaaatggggatcattgcaaaatccaacgtaagaagcaggcgcccaacgaaagaagaaatacaattaatcctcgatgccttaaccaaacgtgaatctcgaaagcaatgcagaataccttatcgcgatatttttatgttttctatcttgtcttgcatgagaataggagaaatctgcaaaatactttggtctgatgttgactattctaatcgctcagtgatagttcgtgacagaaaagatccaagaaaaaaatcagggaatcatatgagcgttccacttcttggcgaggcatgggatattttaaatagacaagataaaattaatgaaagaattttcccttacagttcccagtcagtatcaaagggtgtccataaagttagagacgctttgggtattgaagatctaagatatcatgatttacgtagagagggagctagcagactatttgaggctggattttctattgaagatgttgcccaagttacgggacacaagtcacttacaaccctctggcaagtttatactgaattgttccctcaaacattacatgacaaatataacaaactcactaataaataa

SEQ ID NO: 302818 - DNA, 264 bp, Proteus mirabilis; identical to SEQ ID NO: 297828

SEQ ID NO: 302819 - DNA, 1590 bp, Proteus mirabilis
atgtctaatcctatttttcagcaagaagttgctcgtcgtagaacttttgccattatttcccaccccgatgcgggtaaaacaaccatcactgaaaaagtgttgttattcggacaagctatccaacgtgcaggaacagtaaaagggcgtggctcaaatcagcatgctaaatcagactggatggaaatggaaaaacaacgtggtatctccattaccacttctgttatgcagtttccttacgctgattgtctagttaacttacttgataccccagggcatgaagacttctctgaagatacgtatcgtactttaactgccgttgactgttgtttaatggtcattgactcttcaaaaggggtcgaagatcgtacccgtaaattaatggaagtgactcgattacgtgatacgccaattttgacctttatgaataaattggatcgtgatattcgtgatccgatggaattaatggacgaagttgaaactgagctaaaaattgcctgtagtcctgttacttggccgattggctgtggaaaactgtttaaaggggtttaccatatcttaagagatgaaacctatctttatcaaacaggccaaggtcatactatccaaaactcacgagtaatcaaagggttggataatcctgagttagatgaagcgattggtgatgatttagccgttcaattacgtgatgagctagagttggtgttaggtgcatcacatgagtttgatcatgaagctttcttagcgggtgaattgactccggttttctttggtaccgcattaggtaactttggtgttaatcacatgcttgatggtttggtgaagtgggcgccagcgccaatgcctcgtcaaactgatatgcgagaagtgacagcggctgaagagacattcacgggttttgtctttaaaattcaagctaatatggatcccaaacaccgcgaccgtgttgcttttttacgggtggtgtcaggcatgtatgataaagggatgaaactgcaccaagtacgcacgaaaaaagatgtggtgatttcagatgcattgacctttatggcaggggatcgttctcatgttgagcatgcttatcctggtgatattattggcctgcataatcacggtaccattcaaattggagatacttttactcaaggtgaaatgttaaaattcaccggtattcctaacttcgctccggaattattccgccgtattcgtctgcgtgatccactaaaacaaaaacaattgttaaaaggtctggtgcaattatctgaagaaggtgcggtacaggtgtttagacccctagctaataatgatttaattgttggcgcagttggggtgctacagtttgatgtcgtggttgcacgcttaaaaggtgagtataacgttgaagccatttatgaatcagtgaatgtatcgacggctcgttgggttgaatgtagtaacgaaaagaaactcgaagaatttaagcgtaaaaatgagcaacatctggcattagatggtggtgataacttaacttatattgcaccaacgatggttaacttaaatttaacccgtgaacgctatcctgatattgagttccatcaaacgcgtgaacattaa

SEQ ID NO: 302820 - DNA, 804 bp, Proteus mirabilis; identical to SEQ ID NO: 297909

SEQ ID NO: 302821 - DNA, 285 bp, Proteus mirabilis
atgtgcaaccgcctgaaatacgcaccgaaattattaagcctgtgttcactaacctttgtgttagtgatgattttgtcaggatgtacaacgaagcaatcgacagtgccgaacgtaccctatcaggaaaatctactgacaaaatgcccgacaacattaccaaagttaaacggtaatactggggcggatttagccactgcattattagaatatgttgaaatttacggaaaatgtgctgtgaggcacaaccaattaacggacgaaattcgtcaaaggatggaaaaatga

SEQ ID NO: 302822 - DNA, 336 bp, Proteus mirabilis
atggaacaggcgaaatatattgatttactgataacagagcgtgatttcacgctcaatgcgggctttgagccgatattgtgtaataaccgccaaagtattacgcaagatattgcgcatgcgattattgagagtggtttagccacccaattagtggcagaacgtagcccaaccttgcgcgctgatattcgtatgcagattgtgttactggttgaagatgatgagcgactcattccaggcaccattattgttgatgaagaaaacgtaaaaaaattatgggtgaccgcagacacctatgattttggccgtattaatgtcggggtgaattatggcgaataa

SEQ ID NO: 302823 - DNA, 603 bp, Proteus mirabilis; identical to SEQ ID NO: 297838

SEQ ID NO: 302824 - DNA, 2043 bp, Proteus mirabilis
atgacaactcttaatagctcaaaaaaaccacagaaagacaagctcaattctgttgtttttttcgcttccgcaacgctgattttagcgttctcctttttcactattttaatgacagataccgccaatgcgtggatcattaaaacactaggttgggtatcaaaaacctttggttggtactatttattagcagcaactttgtacattgttttcgttattttcgttgccacatctcgctttggtaatattaaattaggcccagagcagtcaaagcctgaatttagtgtattgagctggtctgctatgttgtttgccgcggggatcgggattgacttaatgtttttctcagtcgctgagcctattacccaatatatgctaccgcctactggcgaaggtgaaacaatagaagcagcccgtcagtcgatggtgtggacattattccactatggcctgacgggctggtctatgtatgcactgattggtattgcactcggatattttagttatcgttataatttacccttgaccatccgctctgcactttatcctatctttggcaatcgtatttatggccccatcggtcatactgtcgatattgctgccgtattgggtactatttttggtattgccaccaccttaggtattggcgtagtacaacttaattatgggttgaaagttctcttcgatttaccgcaagggttaggtgtacaaggtggtttaattctactttccgtaattatggcggtgatctcagccacatcaggcgtcaataaaggcatacgtattctttccgaattaaatgtattactcgctttagggttaattttatttatcctatttgctggcgatactgaatttttattaaatgcgttagtacttaatgtcggtgattatgtaaaccgattcttaggaatgacgctaaatagctttgcttttgatagaccaacggattggatgaatagctggacacttttcttctgggcttggtgggttgcttggtcaccttttgtgggcttatttttagcacgtatctcaagggggagaactatccgtcaattcgttataggcaccttgatcatcccttttgtattcacgctattatggttgtctatctttggtaatagtgcactttatgaagtgatccacggtaatcaaacctttgctgaaacagtattagcctcaccagaaaaaggcttttattctctacttgaactctatccgggattcggtttaaccgcttccgtagcgactattacaggattacttttctatgtaacctcggcagactccggttcattagttttaggtaacttcacttctcaactgagtgatataaataatgatgccccaaattggctacgcatattctggtctatcgctattggtctattaacattaggtatgttaatggcagacggggtttctgctttgcaaaataccacggttattatgggattgccttttagctttgttattttctttattatggcaggactatataagtcattaaaagtagaagattttagacgcgtcagttcattaaacaccaatgcgccagcacctctttatggtaacaccaccatgaactggaaacagcgtctaggtcgagtgatgaattttccaggtactacctatacccaacggatgttagatttagtttgtaccccagcgatgcaagatgtggctaatgagctgtcattacgtggtgcaaatgtctcgtttaatctttacccgctggaagaagagcctcgtttaaaccatttagaattagtggttgatttaggccaagagcagcattttatttatcaaatatggccacaaaaatattcagtacctgcatttacttatcgtgctcgtcgaggtaaatcccattattaccgactagaaacctatttatgggaaggttcacagggtaatgatttaatggactataccaaggagcaagtgatcagtgatattctcgaccaatatgaaaaacacttaaactttattcacttaagtcgtgaagcgcccggtgcaacattaacatttccagaatcaaattaa

SEQ ID NO: 302825 - DNA, 810 bp, Proteus mirabilis
atgttatctgtttctgtacctttaggacgctctgattattcaccaatgctgtcactatcctctagccactctagtaatgattcgaattaccaaacgaacttatcggggcttttaggggaagataaaacactttcttatagtataaatgcagattatgacacacaaaatagagtggtaggtactggtttgcatttaattaaacaacttccttttaccacgttatcaggcagcatttctaatagtaaacaatacactcaaggtagtgtgggcattcaaggtgcgttagttgcacacagtggcgggataacattagggccaagtattagtgattcttttgctttagtggaagccaaaggtgcaagtggagcgactgtgagtaatggaatgggggcacagattgacccttttggctatgctattgtgccttctcttgtcccttaccaatataacaatgttagtttggatggaaaaaatattagaaataataatattgagctattagaaaatactaaacaaatagcaccatattcaggttctagtaccaaaatcgtttttaaaacccaagtcggataccctgtattgatttcagttaaaccttcaaactcattggcattaggtgaaaatgtttatgataaagatagaaatattgttggcatggtaggacaaagtaaccagatttatgtcagagtcgaaaataaaaaagggacactaactgtcggtaaagatgaagatagttgccaaatcaattactcaataccagaagaaaaagaagacgataaactcattttattatcaggtcaatgcttatga

SEQ ID NO: 302826 - DNA, 1092 bp, Proteus mirabilis; identical to SEQ ID NO: 298020

SEQ ID NO: 302827 - DNA, 1569 bp, Proteus mirabilis
atgacgatatttcctcatcaacaagaagttatcacagaaattttacaattggcttcagatttcgcagaccttacttttactagagtacctatacaaaaaaatgccaatttaaagtttggctatttcaatcatttttacaaagattcaactactttttttatgacgagaggaaatggaggctttgctcaatatcctaactataacggtacacctataaaagagatcgggccaaatgaagattatgatatccctggaaccatatttattaatttagctacacatgaattttataaatgggaaaacggggataatattgataaatatatagaaaatgaggccaatcccggtgatttatataattaccatgataataatcaagttgctataataaaaagtacggatttgttactcaacgaaacaatgaaaagtaaacacaaactaggatcatatgaatatctttgttttatacatgaattaggtcatgcactcgggctaatgcacataaatgtatatttaaaaaatataaaaaatgatgcaattttaacatataaatattcagttatggcctatcaatttgctgatattaaagatgcagattttgctggcctttatcctatgacctttatgctagtagatatattattgttacaatatatctatggcccaaatatgaccacacgtcttgaaaataatacctatggttttcattccaatacgggacgcgccgcttactctttaaatagcatagaagataaattagtgagctgtatttgggatgcaggtggaattgatacattagacttttccctatataccgttaatcaagtcattaatctcaatgaaggctgtttttcagatattggaggattacggagtaatatctctattgcctataacactattattgaaaatgcgattggtggtaaaggtgatgacactctcataggaaatccttttgataataacctaatcggtggtgatggcaatgatttattctatggcggtgatggcaatgatttattctatggtggctctggaaacgatgttatatacggagaaatgggaaatgatgtgctctatggtgatgatggagatgatatgcttattgattattatggtgctaatatgttggatggtggtaagggtaatgatcggatctgtgtagcctcaacagatagagggcttccaggtagaaatatcattctagggggagaaggtgatgatgaaatatatttgggcacaggaactcatcgtataacaggtggacaaggaaatgatacctttaattttttctgctatgagagcgttgaaagcaatagtttcatttgggattttgaaaaaaacaaggataaaataacgttgatcactagggattatagaaaaatagatatatcaaaaatgaaaaaagttgataagttatcaggaagtaaaaatgaattttcattaaatcataacaaaccagccaacaaaaccatcatagacgtttcaacatcttctaacgatgataagtccattgtacatatagagattgtcggtatatttaaccatgatgaactctttgcagtataa

SEQ ID NO: 302828 - DNA, 1422 bp, Proteus mirabilis
atgccggtatttattggtttctcggcggcgaaaatatttaattgtaaccaatatttagctgctatggtctgtttagcgatggtcagccctgaatggacaagcttagttaaagccggtgagcctgtcgaatttatgcatattcctgtcgctttggttaaatattcatctcaactgatccctgccttaattactgtttggatgatgtcttatattgaacgctttattgttcgtattgtgccagaaatggttaaagtatttatggtgcctttattggtgattttagtttcgacacctattgcgttgattgcggtcggtcctgtcacttcatggttcgctcaattaattgctgatggggtgatcttaatccaagagcacactggttttattgctattccattattagtggctatttatccatggttagtatctattggtatgcataaagcacttagtcctgtcagtattatgttagtggagcaaaaaggttttgacccgattattcgtgtgatggcgctatgctccaacatgtctcaggctgctgcttctttagctgtttctgtacgtactaaaaataaaaccttaaaacaattagctttttctgccagtattaccgctttttttggtggtataactgaacccgctatgtatggggtgaacctcaaactgaaaaaaccaatgtacgcttgtatgattggtggtgctattgcaggattatttgctggtattgttaagttaaaagcgtttgtctatgtcactccggggttattaagtttaccaatgtggatatctgatacagataaccaagtagtaaatgcaataatcaccttattgattgccagtgtagccacttttattgcaactcttattattggttttgatgatcctactgatgacccaatccgtgacgaagaagaaaataataaacaagctgcatcaaccaacaaaaaaccacaaatagcgaatagtaaattacctgttgggttaatttcacctctgcaaggtaaaacggttgcactttcagaggttaatgatgaaacatttgcctctggcatcatgggacctggcatggcaattatccccacaacaggaaaagtgattgcacctgcagatggcgttgttgatattaccttttcttctggtcatgcgattggcttaacactggttaacaatattgaaatgctgatccatgtggggattgataccgttaacttagcgggacagcacttcacatgctgtgtcgttaaaggtcagaaggtgacaaaaggtgatacgctaattgaatttgatttagatgcgataatagccgcaggctatgatccaacaacgatgatcatcattactaatgatgatcataaactagacgttgttcagaccgataaaaaacatgtcgaccaaaatacagttttactaaccgtgggttaa

SEQ ID NO: 302829 - DNA, 471 bp, Proteus mirabilis; identical to SEQ ID NO: 297226

SEQ ID NO: 302830 - DNA, 213 bp, Proteus mirabilis; identical to SEQ ID NO: 297970

SEQ ID NO: 302831 - DNA, 687 bp, Proteus mirabilis
atggcggctaaaaaagccttagcacaagaaatgccggtggtttcggttatcaaaaaccataaacaagcctgcttaattactgcagcattaacatggtctttatctacagctattgttgttactattttgatgacacccagtgtcattgttgaagggatctacaaaatagacagaacaacatcgttagaagcgaactgtgttgccaccttaacgctgaccttaggatgtatcttctggggctggttgggtgataaattaggaacccgtgcatccatgaccttatcatggggtggattaattgttactgcattccatttttatggaagcttagatgccaatatgtctggtatccaattagcatttaactatggtttgatgggcttttttgtcggtgcaattgccacaaccccaattgtgagtactagagcatttcctccttcaattcgtttttctggcctctcttttgcttataatatggcctatgccgtatttggtggcttaacgccaatgttaacgggcgcttggttggaaaaaacggcaatggcaggagcttattatgttgcagctgtttctgcattagccattgttatcgcattcttacctttagcttataaaggctggatcgcggtaaacaccagctcacgggaaaaagagatagcgttgcaagttgataaagtcgctagttaa

SEQ ID NO: 302832 - DNA, 630 bp, Proteus mirabilis
atgaacagcgtaatacaaaaacgaacatcacaacaattatcggtagagagagtggctgttctagaaagaatgactgttcttacaaaagaattggttaatgaattagcagagaagaaaagtttagcaagtgctttaaaaatgagtgataacgaattggctcagttaatttttgaaactcaactgatacgttcgtctgcaatttcaccaagagaacaaagtaaaatagcccgtttaaacgaaggcgctattaagttttctgaacggctaaaagagcttggaggcacatgtagagctagccaagctgcagctattttgggagtaaaacgtcaaacgattaataatcggttaaaggctaataaactattagcggttaaagtgggaggagaatatcgattacctatttttcaatttgatggtaatcgattagtggatggattagatgagatcttaattttattggatagtttaagctcaacaacaaaagtatcatttttaacgagtatgtatttttttgaggatgaacaagatattaatgttattgatgcgcttaaaaaatatggacgcatgagtgaacaaatgcaagaaattattcatcaagctaaactttttggaaaacatatttcaaactaa

SEQ ID NO: 302833 - DNA, 804 bp, Proteus mirabilis
  misc_feature (788)..(797): n is a, c, g, or t
gtggagcctggtgattatgatgttgacatctacattaataatcgttttattgaaagaaaaaccgtgagttttcaattaaatgataagggtaaagtcacaccttgttttactcaaaaacagattgaggaaatggggctcttgctagatatcgagccaaatcaagataataatcaatgtttaatattgagccaatttaataaaaacatcgtagactcgtatgatgcttctaactttagaataacgattacagtgcctcaaattttattaaaacgaaaaccacaaggttatgtcaatgaagacgatttagatgcgggtaacaccatgttattcagcaattactctggtaattactataagaataaatcgaacggacaaacttcagactatggttttggtagtattaatatgggcgtaaatctaggaacttggcaatttcgacaacaagcatcttactcttataattcatcaaaatcgggaagtaacagtgaatttaattggataagaacttatctacaaaaaccattactgacattaaagtcaatgttagttgtcggtgatatttatacagcaggatcacaattttctagtctggcatttaaaggtattcaattaatgtctgatgaaagaatgttgccggattctcaaaaaggttatgcgcctgttattcgcggtattgcaacaacgactgctcgagtagtgataaaacaaaatggtactgaaatttatcaaacgacggtatcaccagggcaatttgaaataaatgacctttatccaaccagttatgaagnnnnnnnnnngttatga

SEQ ID NO: 302834 - DNA, 288 bp, Proteus mirabilis
atgaaaataatacttcgcacttttatatttctatattttatttttttattaatattgattaatattctttccatatctgactatgaatggatgattggtgaaggtgatattgataatctttgtcaactgccactcaatggtagatatgttattgagcctatattgatattaataccttgtattttattactttttttagaaaaaaataaaaaactaagatggggttatgttacaatcactgttatatatatcatatggtcattttatttacgttttaatttttgctaa

SEQ ID NO: 302835 - DNA, 1212 bp, Proteus mirabilis
atgtcagcaggaaatacgcaaaatgaagctcgagtgcaagggctttctgaagtgtttgaacgctatgtcaaaaatagaattatcagcgaaagaattagcttgcctaaaatcccccatgaagttttagctcgttatcctgctgttattgaagctattacgacattagaaaaagaaggcttccctatttttagttttgatgcatctttagggggacaattccccgttatttgcgtcgtgctgtttaacccacaaaatgggacttgtttcgcttcttttggtgctcatcccgattttggtgtggcattagagcgtactgttactgagttattgcaaggccgtagccttaaagatctcgatgttttcaatccaccgagttttgatgatgaagaagtcggtgaccacactaatcttgaaacccactttatcgactctagtggtttaattagttgggatctgtttaaaaaagatgcagactatccatttgttgattgggatttcagtggttcaaccgaagaagaattccacacattaatgtcactgtgccagcaatgtgatgcggaagtgtatattatggattatgaccatttaggggtttatgcttgccgtattttagtccctggcttatccgatatttatcctgctgaagatctgcaactagccaataacattatgggtgtccattggcgtgataccattctttctttaccaacaagtcatggcacaaaagaagagtacctctcacttattggtcaatttgatgaagatggcttagatgactttactcgtatcagagaaatgattggtattgcaccgggtaaagataatggctggagtcatttacgtgtaggtgaattaaaatcaatgttagcactcgctggtggcgatttagaacaagcattagtttgggttgagtggacacaagatttcaacgcatcattatttacaccagcgcgtcaaaattattatcgttgcctgcataatcttttactcctacgtgaagagcatgatcgtgagcctgcacaatatatggaggctttttctcgtatgtatggcgaggaaacactgcaagctgcattaaatgcaattgaaggtaaacaacctttttatggcttgcaacccattgatccatcattagcgaatttgcctgttcatcaatctttattagccgcgtatgaaaaattacaacaagcaaaacgtcaatcgaataaataa

SEQ ID NO: 302836 - DNA, 789 bp, Proteus mirabilis
atgcggggatactctaatcgttcttttggtattatcgtcactcgcctggattcttatgcggaaaatcaagcggttagtgccatattaccgatcctttatcaaaacaacattgaccctattattttagaaagccaatttagccaagccaaagtagaagaaaacttaaaaatgctcgcccaccagaaaatcgatggcgtaatattatttgcattttcagggatcaatgcggctaacttagcaagttgggaacaaaaaatggttgttatagcaagaccactagaaggttttgtttccatttgtcatgacgatgaacgagctgttaacgctttaatgcattatttccatcgagacaaacattatcaacatataagttttatcgggatccaaattaatgatgaaacaacgggtttattacgttatcaaacttatcttcaatattgccagcaacatcaattaatatctcaagctcaacttggtgaacttaattatcaaagtggctatttacttgccaaacaagcattagcaagcaagcctcaagctattttatgtgcgaccgactcactggcctttggtgtacaaaaatatttagccgaacagaaaatagatcatattgaggtggcctgtatcggtcgtaatgatctactcacctttttatttcctcaaactaaattctatcgattaggttttagagaaagtggacaagaagctgctaacatattgatacaaatgctagaaaaaaatattcctgcacaaaaaatcattatatcaagtcatgacttaaacccatga

SEQ ID NO: 302837 - DNA, 1032 bp, Proteus mirabilis
atgtcaataactaaacaacctaatggtcgctggcgtttagatttttatcccgaaggaaaaaaagacggaaagggtaagcgcatccgaaaaacatttaccaccaagggggaagcgatagcttatgaacgttacattttagataacgttgataaccaaccttggttaggtgataaagaagatagacgtaaactcagtgagttaatagatacctggtataattcccacggtgtaactatcgatgatggtaataccagaaaatcagctatgatttatgcatctgattgcatgggttcacctttagctactgagtttacagctaaattattttcgtcttatcgtgaaaaacgaatttctggaaaactaagacgtacagaacgtttagataaagtttccccgcgaacaatgaatctagagctagcttattttagagctatgtttaatgagttaaagcgactaggggagtggaaacatgaaaacccagtcgaatctattagaccttttaaaaccgaagaagctgaaatggcttttttgaatcacgatgaaattaacttattacttgaggaatgtgcgaatagctcaaataagcacttattaaccgttgttaaaatttgcctatctacaggtgcgcgatggtcagaagcggaatctttaagaggttctaacattagtaaatttcgaatcacttatacaaatacgaaaggcaatagaaatagaaccgtcccaataagcgaagaactctataacctagttgtagagggaaaaacgagaggagctttatttaattcttgttattctgcattccgaacagccttaaaaaggacaaaaatagtattgcctgatggtcaaatgtcacatgtattacgtcatacgtttgcatcacattttatgatgaatggtggcaatatattagtgcttcaaagaatactggggcatactgacatcaaaatgacaatgcgttatgcacattttgcacctgaccatttagacgaagcagtaaaactgaacccgctagcattcggtgataacaaatag

SEQ ID NO: 302838 - DNA, 204 bp, Proteus mirabilis
atgtcatctcagttcaatggacttatcccttccaattctttatcttcgtttaatatagaagtgattaaagaacttctgctctggatcgaggtaaatctagaaaagccgttattacttgatgatgttgcgataaaatcaggttatacaaaatggcatttacaacgggtgtttaagcaagcaacggggtctggtaaagtgatctaa

SEQ ID NO: 302839 - DNA, 231 bp, Proteus mirabilis; identical to SEQ ID NO: 302689

SEQ ID NO: 302840 - DNA, 369 bp, Proteus mirabilis; identical to SEQ ID NO: 297807

SEQ ID NO: 302841 - DNA, 924 bp, Proteus mirabilis
atgcgtatttgttctttgttgctatgcaccactttcttagtatcatcaataacatcaagctacgcagaaataagcacacataaactgattcgccaagataatagcgaactgatttattatctagataaacaagctgaacataacaaaacactgttagttttaatgcaaggttctgactgtaatagcataaaaaataatacttttattcaagaaacctttggtagatggctaccgagtagtgatgttttaatggttgaaaagtatggtattacagcacaattgacttattctgacgataatggtgaaagagaagattgccctaaaaactataaactgcatgataatcctagccaaaggcttgctgattatttagcagtgctagataaattatcccctaattacaccaatattgtattacttggaggaagtgaaggcgcaacaatggttcatttagttgttgctgaacgtcatgatattagcgctgcaatcgcattaaatggcggtggtcgttttttccttgatgatgtactgtacaatatacgcaatacaacacctaaagagcatgtggaagaagcaataaatagctttcaacaactcgctaatgcaataataacgaatcaaattggtgatgagcaatttgttagtgaacatagcaaattatggtggcaacaatatcttgctattgatctacttgaggtgattaagcgcaacacgcaaactccggtattaattgttcaaacattagatgatatcaatgtagatgtggctgcattccatcaattatctcaagagataacgcaacctaatgtgacatttattaaatatgataaattaaatcatggtttttataatcaacaaggtgagcgattaaccggaaaagtcgttcaagatatacagcaatggtatgcgcaatataataaataa

SEQ ID NO: 302842 - DNA, 723 bp, Proteus mirabilis
atgaaatggcaacgtaagcgattcgcgctttcgggcgatttaacgggcattacctgttcattattacccgttcacccgtttatttatggtgtcgggcaaaacactgccacaggcagttatttaagccccaccaatgcaattcattatattgcgaataaaattcagggggcgggtgaggttgatattgtggtgacgatgatttgtgcccgtacccatgacgagtttatcaatgcaattcaaggcttttcgggcgtattgtctttgcctgtatttagccaagttgaacgtatggccaaaaccgccgaaagcctaaatattaccaaaatgcagataccggctaaaacgatagccggtattccagacccgcaaacattatcaaccaataacagccgtgcggtaatcaatgcgggattaatcgaaaaggcaaaaagtgaagcctcaagcggggctagtgtggcagggttactttctagcgtaaaaggatttgctgaaaatcgaaagaatatcttacaaggcatggctgattcattgacgggattactgggaaaatcaaccaccgtttgggtgttccagggaaaaggtaacggcgcggaattagccgataaaatgaaaaaagaaatccctgaacaagatgcggtttacaccttagctacgctttttgcgggcgatattgatgcaatcaaaggaatgatgcatgacacagacaccactttacgaaaataa

SEQ ID NO: 302843 - DNA, 297 bp, Proteus mirabilis
atggccagcgcgattaattttcgtcttggcacattcaccaatggcattgatgcgtcaaagatggacggtaaacaagcctggcaagtcacctttactttacgtgagcatttatccgtacccgaaaaacgcgaaagtcgttcagcagggcaagttaaagccaaaacacaaaatatgggtaataaaccgaacgctaagggtgagggaacggcagagcaagaacaaaaattaaattggtttgaacgcagggtattaaaaccgttaaacgaggcattagggggaagtgatgaaacccattaa

SEQ ID NO: 302844 - DNA, 210 bp, Proteus mirabilis
atggaagtgttaaactatggtgagatgggtagctctatatctaattatatttatgactcaggaaaacttatagaaatagatataaaacaaaaagaacataataaaaatgaaatagcgaaatataaagtctattttgagtataaggatgacattttaaatagaatagtagataaacatcctaatggatacgaagagcagcgttatccatag

SEQ ID NO: 302845 - DNA, 279 bp, Proteus mirabilis
atgcctaatgctgaacctaaccccgtaatcgctaaaggagaaatacctggtatccaaatcagtaatgctcccgccattaatgacaccgctgaacctaaaataacgcgcccaataaaaagacgtagtgtaataggttcactccctgacatcattttaccaatagctatcaatgcccctaagataatcagtgaaatcagtgttttattatgttcttccatgaacatgtcctttattacagtttgtctgttaattcagactctaagtatggaataccgttaa

SEQ ID NO: 302846 - DNA, 567 bp, Proteus mirabilis
atgaagcaacgtaaatttcttacacgttttgaagtgaatgctattttaaagcaagctaaggaaggtaggtatcccgaaagagattactgtatgtttttaatgtgttttttacatggttttcgtgttagcgaactatgtaatttaacattaagcgatattgatctagaaagtagaatactctatgtcaggcgtttaaaaggtgggctttcaacaacacaacctattattgatgaggaatatgaagccttatgcaactggttgaaaagtagagaaaactggagagaatcagattctgaatgggtatttttatcacaaaaaacgggaccaatttcccgtcaacaagtttatgggctattacgccgtttaggtaaaaaagccaatgtttctattagtccacaccctcatatgttacgccacgcctgtggctacgcactggcggatttaggcagagatacacgtttaattcaagactatttaggccatcgtaatatttcccatacggttatttatacagcaagtaactcaaaacgatttatcaatatgtgggaaacgcgaaactcacaatag

SEQ ID NO: 302847 - DNA, 678 bp, Proteus mirabilis
  misc_feature (84)..(93): n is a, c, g, or t
atgaagctcgaaactcgtatgcgtcagtcgattcaacaccgtcgtggagttgtactgactcgttctgatctggctccattgggnnnnnnnnnnagcaagacccaagttacacacgcattgagtgtgttagtgaataatggtgaacttcttcgtctttctcgaggaatttatgctaaagcccaaaggatggggaataatgtaaaagcgcaaggtagtcttgatattatcattcgtgaagtagccaccaaattaggcttccagcttcgccaaaaagacttgtgcttcgagaaagtaaatgcctcacaagatgaaattattgttgaagtggatgctccaagagttaagcgtaagcttaacatcaatgggaaaattatttgctttcgtagttatagccgtaagtctgctactaaaaatacagcattcaaattggcaaagacacctcctactaaaggggttgctcgttatgtagcagagctggctgactattacaaaatatcttattgctacaatacgatggatcagtgggctgatgctgtaactcgccttgcgggtgatgaggtggtaaatgatactgttgaagaccttcttgtagctctaaaacgagcagggaaaatcaccaagcaagaagttgcgatactgtcagttaattatctgcgggagcaaaaacaaagtgtttga

SEQ ID NO: 302848 - DNA, 459 bp, Proteus mirabilis
atgaagggtaatttttatcaggttgatataccttacaagttggtactggcaattgatgataatcaggttatcggacatgtagctgtttatttacgagatgtttacctagattcatttcctgaaaccattggtatattgagttgtgtagtggtggctcacaaataccgaggaaagggcgttgcggcatcattaataaaaagggctcatgctatactgaaagaatattctgttaatttttctattttatttgctgtttctcatgcttattatctctcctctggatatattccgatgaaaaatctcacccgttttattgagaataatgagaagaaagaatttatatatgacggtggtatggtgtgtgaattaagtagtcaaaattggaatgtaaatatattgtacaacttggtgataatcaaagaagaagcgaatttaccaaagaagaggttagctttatga

SEQ ID NO: 302849 - DNA, 471 bp, Proteus mirabilis
atgtctctcaaacagaaaatagcggtgataacaacagcaggagcaacagccatcgcgttagtagtaatagcccattttgaaggtgtacgttatgaaccttatcgtgatgtggcaggtgttctaactgtttgttatggacatacaggcaaagacattattcaaggcaagagatacacacaacaagaatgtgatgcgttattacaaatcgattttattaagacacaacagcaagtcgatgcattaatcaaagtatcactcgatgactacaccaaagctgctttatattcctttgcttttaatgtgggtacaaccgcatttgctcgctcaacattactcaagaagctaaacgctggtgatagagcgggtgcctgtgaagaaatgaaaagctgggtttatgctggtggaaaggtgtggcgagggttggtcagtcgtagagaggcggagtcagcgttatgcaatggaagtctttaa

SEQ ID NO: 302850 - DNA, 207 bp, Proteus mirabilis
atgaatcgtcgttcatttttaacatcatcaagcttagtgatcgggggactttcattaagttcgtttgttagcgctacctatgccgcagaaacttcaaaccgtaaacgtatatttaaccgagttaaggacagcgcatacatttatcatcgaaaagttacaaaatacgtatttatacatattaaaggccttacattattttctgtatga

SEQ ID NO: 302851 - DNA, 333 bp, Proteus mirabilis
atgacactcggtgaaaaacaacgcaagtttacgcgcatgattgcagacttgattatctttgcttatgacaacggctatgagctgacattctcagaagcgtatcgcacaccagaacaagcaaagttaaatgctaaatcaggcattggtattaaaaacagcttacatactcagcgattagccgtggatttcaacctgtttaaaaatggtgtttatctcacaaagacaactgaccatcagccccttggcgaatattgggaatccattggcggtacgtggggcggtcgtttcaatgacggtaatcactactcattagagcacaacggtgtgaaataa

SEQ ID NO: 302852 - DNA, 333 bp, Proteus mirabilis; identical to SEQ ID NO: 296254

SEQ ID NO: 302853 - DNA, 525 bp, Proteus mirabilis
atgctaaaaacacgtattatttattcatcagattcacgctttgaagttttaaaatttatgaataacgatgaaattccttacattatgcaaatatgggcggataaagacaatcctaattcgactccagataatgcagatgctccttttattattcaacctccagtctttcgtatcgatcctaaaacagggagagacatacgattaatttatactggtgaaggttgtccaacagcaattgtttctcagctaaataatatcgagaaacaaatatcattcttaaaagaaaataatggcaatataaaagttaaaaatgactcacctttctttgtgtcattcgcacaatttgaggctactaatgcatcaggaaaaaaatttatatttaaatcaactatggttcctccgttatcaatggaagttttagtcgctgaaaatggtggaaagcttccattttcgcctgataagatgacctataaataccttaatgatctaggtgggcaaaacagcgcaataaaattaattcattaa

SEQ ID NO: 302854 - DNA, 426 bp, Proteus mirabilis
atgacacgcggaattcgtaataataatccaggcaatatccgtcatggtgcttctaaatggcagggaatgtctgcagagcaaaatgatactcaatttgtgcaatttatctcgcccgaattcggtattagagcactgatgaaactattgcagacttactcaaaatacaacggtaagcaaaatgtgggttgtgggaaaatagatactattgaagaaattatcgaacgttgggcacctgcatcggataataatcacactgaaaactatatccaacgtgtgtgcaaagaaaccggatttaatcgccaagcgtgcttgaatttatacgacaaagagaccgttatttctttagcaaaagcgattgtacaggttgaaaacggtgaacagccttattcagacaaggtttttgaaacggcgtttaatcggatatga

SEQ ID NO: 302855 - DNA, 390 bp, Proteus mirabilis
atgttaaaattaaataaaattcatcatgtggcgattatttgttctgattataagatcagcaaacatttttattgtcaaatactggggcttaccctattaaatgaaaaataccgtgaagaaatacaatcttggaaagcagagcttgcgttaggtacagtctaccaaattgaattatttagcttcccagatgcgccagcacgcttaagttacccagaagctcgtggtctacgccatgtggcatttgcagtggacgatcttgatgcttcagttgcttatttacaacaaaacaatattcaatgtgagccaatacgtatagatcctagtagccaaaaacgttttaccttttttcaagatcccgatggcttacctttagagctttattcaatatag

SEQ ID NO: 302856 - DNA, 426 bp, Proteus mirabilis; identical to SEQ ID NO: 302854

SEQ ID NO: 302857 - DNA, 333 bp, Proteus mirabilis; identical to SEQ ID NO: 302851

SEQ ID NO: 302858 - DNA, 363 bp, Proteus mirabilis
atgctattaaaaaaaatatttttagtgtcttttttattccctactctctcttacgctaataccttaccaacatcaaatatagataattcactaactcccaaccatgataatcttgcccgtttttcactcggtgacaatagtcaagcatccggcagcggtgccactgctataggtatcaatagccaagccaccaatactcgttcggttgctattggttatggtgcattagccaatgaggaaaatacggtttcatttggtaatagtgaagagaaacaaacagcacgactcaccaatgtcagtgaaggtaaaaataatactgatgcagtcaatctggcacaaacaaaagcactaaaagaatggtga

SEQ ID NO: 302859 - DNA, 189 bp, Proteus mirabilis; identical to SEQ ID NO: 299239

SEQ ID NO: 302860 - DNA, 126 bp, Proteus mirabilis
atgtctaaatcggcaaaaggtacgacagaacggcctggacggaacgtaaaagctaaatctggtttaaaccgctcaatactggagcagggctggtatgaaatgcgccgtcagcttgagtacaagtag

SEQ ID NO: 302861 - DNA, 264 bp, Proteus mirabilis; identical to SEQ ID NO: 302772

SEQ ID NO: 302862 - DNA, 135 bp, Proteus mirabilis
atgaaaaaacgaacaaacagtgtttatactactggatttaagcaagaagcggtcgcattagtcagcgaacaaggttatagcatcccaaaagcggtagcttctttagggatcaccgataaattactttataactga

SEQ ID NO: 302863 - DNA, 201 bp, Proteus mirabilis
atggaagaaaaacgagttgaaataactcataagcttaaattctctgcaccaacacctagaggaaaacggactgaggaagataccaccaaaacacctatgtacgtgggtaaaggcggcaagttgaccattatgcaagaagatcaaggtcaattattttctttacaaggtcagcccgatggtaaattaaaagccattaattag

SEQ ID NO: 302864 - DNA, 126 bp, Proteus mirabilis
atgtctaaatcggcaaaaggtgcgacagaacggcctggacggaacgtaaaagctaaatctggtttaaaccgctcaatactggagcagggctggtatgaaatgcgccgtcagcttgagtacaagtag

SEQ ID NO: 302865 - DNA, 1266 bp, Proteus mirabilis
atgcctaaacttactgataaagagataagggcatggatcaaggctggagaacgatttgagggaaaatcagacggcaacggtttgtatctatgctatcgaaaaacgtataagcaccccgtatggcggtttagatataaattcgcgggattgtcacgagtgatgatattagggtcatatatagacctatcacttgctaaggcgagagaactaacaaaagaattatctgcccgtgtatcgctgggttatgacgttgccagtgaaaagcaggagaggaaagccgaagctttagcaaaacttgaagctgaaaaaaatgcaatcaaagttgctgacctagcggcagaatattttgagcgtcaaatactgccacgttggaagcaccccgatatactccgaagacgtatagacaaagacattaatcctcgcattggccacatgaaaatagaggacgttaaacctcgtcatattgatgaaatgctcaaggacatcgttgatagaggtgcgccaacaatagctacagatgttctgcgctggcttagacgaatgtttgactatgccatcaagcggcagatgattgaaattaacccttgttcagcctttgaagttgctgatgctggtggtaaagaaatatcacgcgatagatggctaaccagagaagaattaatcatattctttaaggcattgagaactgcaggtattagccggcagaacgaaatcagctttaaaatactactagctctagggttgcgaaaaatggaattatgcgcggcccgttggcaagaattcgattttaaaaagaacgtatggcatttcccagccgaacgcagtaaaaacggtgatgctatagatattcctttatgccaacacgtagttgattggtttatggagttgctacctatggcttgtggtagtcagtacgttttacccgctagaaaaatgcaaagccgcatgatcccccatattcaagaatctactctacccgttgcgctagcaaaagtaaggcaggttttaccacctaaaatgcctaactttactattcacgattttagacgtacagcgcgaacccatttagcaaaactaggagttgatccatttgttgctgaacgttgcctgaatcaccgaataaaaggcgttgagggtatttataaccgacatgattattacgatgagagaaaaaccgcactagcaaaatggtgtgagttacttgtcgcattagagaaaggcgaagattacaacgtgatccctatgggtacacgaaaagcaaaataa

SEQ ID NO: 302866 - DNA, 876 bp, Proteus mirabilis
atgaagaaattatttaaactaaaagaatggtttacattagaagaaacagccagaagattaacaggatcatttgaggaagatatatctgtagctgactgcttatcattagctttagataagcgaataacaatttcagcattatttagtaaatcaatttatggggtaagaagtgaaataaaactaacgtctatgcgtgagcagtttaatttttgcattaaatcaactaatagtgaaggcgcattcttagacatgttagcaggcgagcgattttatacaaatgaacagctagacgctaaatacgaaacgataaaaagaacaggtggcgtgtttcgccttgattacgaaatatatgatctgccaatgataggggctgaacatttagatgttatgtatcaatttgatttagcgcaggatagattgcctcgtgaatatgtcaatattgaagggccatttgttaatacagaattcggtatggttaatgtattgaatagctttcatgaattgattcttaagtttgatggtactgaatcaaagttatttgatcccattctagataaatatgttgattttgataactatgatgagtttttctatccagcagatggtttgggtgatgttgagtttatttttagaagggagaatatagaaaaatttgaacagtcagcgcttgaagatgataattctgctttaactatagatggtagcttgcttgttattggttctatattgtcagcattgaaaaaagtaaaaccagcatctaaaagatggacccaagagtccctaaaggctgagctagagggattttgcccgatgaaatctagagagcttgatgattatttttctgaggctaataagcgttttaaatcaatcggttaa

SEQ ID NO: 302867 - DNA, 246 bp, Proteus mirabilis
atgataaagaaatcacctaagcgcaaacctcgcactaaaatcagcacgccataccctatggatggctacgcccgtttacgtcatacggccgactttctaggcatctctgactctacccgttatcgctgggagcgtgacgggaaattacctaagtcatttgagattgaaaaaggcttttttgtctatgatgcaaaagagatacgtgcatgggctgaggctaaaaaattacaacaagggggcgcataa

SEQ ID NO: 302868 - DNA, 465 bp, Proteus mirabilis
atgaaaaagttactgtttggctttattttttctttgatatgttcaactcctgcattagcagagtgggaatatagggatgtttacgataaaatgagagattctcactcttattctgcacttctgttttctgaggggagttcagatgaggcgtttttacttattctaataaatggtaaaaataaagaagttgctgataacgcatctcttgttataaatggctataattttgactgtaaagacctaaaaccctgcaaagggctggttaagtttgataataatgaaatacaagagttaataatatattctaaaaaatatagtgaattagcgatcattgataatgataaaaactttgttaatgaaattaaaaattctaagattgcttttgttgaactccctattgaaggcaagggaacacagcagtttaaattcaaaacagccggcttaaaatgggaagtagagcaatag

SEQ ID NO: 302869 - DNA, 132 bp, Proteus mirabilis
atggaaatctacgtttatgctgattggattgaatcaactgaccctgtattagttggtacattacgatcatcagaaattagaggcaaagaacatttcagctttagtttatttatattgcgcttatttctataa

SEQ ID NO: 302870 - DNA, 777 bp, Proteus mirabilis
gtgatagagaccaaacagcatgaacgtttgcgtcgccttagcgaatgcataaaacgctcaggccgcatccatctcaaagatgccgcgaggatccttgaagtatctgaaatgaccattcgtcgtgatctcagttcagatgttgaaaacccctatccgatgtcactgcttggtggctatattgtcgcgttggcacaacctcatagtaacctaatcacatcgactagtgatattatcactccggatcaaacccaagaattacatattcctaatcttgctgcgggcatggtgtctgaaggtgatgtactattttttgataatggccaacttattccgacattaattgagcttattcctgagagtttacactttactggtatttgttattcgcaccgcgttttcctggcattaagccgaaagaaaaatgcgaccgtactactttgtggtggcgaatatcgccctaaaagcgactcattttataatcccctccagccttgttaccttgataacataaatccgaaaaaagcctttatttccgcagagggtgtccacctcgattttggtgtttcttgctacaacatcgatgatcttcatatgaagagaaaagcgatggataaatcgattcgcaagatcttactcaccaaataccacgccttcgatgaaactgccacaggcaatatgggcgatttagcacaatttgatgtcgtgatcaccgatagaaaattaacagatgattacgaagcctattgccgaaaaagctcagttaaaattatttattaa

SEQ ID NO: 302871 - DNA, 300 bp, Proteus mirabilis; identical to SEQ ID NO: 302231

SEQ ID NO: 302872 - DNA, 1017 bp, Proteus mirabilis
atgaaactaaaaaaaattctccagatggactttattaaggaatttcatgaaaatctggatactgatttcgagaaacaactcttcatcgcttgtctcagaaattattgttctcacggcaatccattaaggtttaacaatttcgcttatgccatacgcgaacttataaaccatgtcctgtctcgaatggctccagatgaaagggtgatggtagccccatggttcaccaccaacaaaaacaatgcgaaagtaactcgtaaacaacaggctaagtacattgctcaaaaacatatacctgatgaactcttagatactgaagcacttcagaagctggatgaaggtatcgcctggttcaacaaaaattatcagtcattgaattactacacccatattactgaagagtcgcttgaaagccaaccaaaggatttttttgaaaaaacgaaactactgattgagctttgcaacaagatatttgttaactttggtgatttagaacgcatactaactgattccatcattgatgaggtcagcgaccacgtaaacgaaattacgagaaataatactcctaatgaagttgatatactatcgtcacagacgattgtaaatggttgcattgttcaatctatagaacctctcgaacttacagaagattatatttacctattagttaggggaagacttggaattacgcgccaatatggacgaggtgatgattacttagctcaaggggactcttatccgtttaaattcgctgtatctgtacgtgctagcgattttgatgatattagacctcttgttagaaccgctattgttgatacaggttcatggtatgacgatggtaatggttcagcaatggctgataaaatttacagtacacggcggtttcttgaaatgatcgcacaagttcacataaaaccagcaagattacgaagcctcttcccagagctgtgttatacaatacctgacgatgaaccagatgaaatggttcaggaactcaattgcatcgaaattgatttttga

SEQ ID NO: 302873 - DNA, 390 bp, Proteus mirabilis
atgtctaaatcggcaaaaggtacgacagaacggcatggacggaacgtaaaagctaaatctggtttaaaccgcgcaatactggagcagggctggtatgaaatgcgccgtcagcttgagtacaagcagctctggcgaggtggtcaggtactggcaataccaccagcctacaccagtcagaagtgcgcttactgtggtcatacagcaaaggaaaaccgccagtcacaaagtcaattcgagtgccttgaatgtggatatacagcgaatgctgatatcaacggggcacgtaacattttagcggcaggacatgccgtgcttgcctgtggagggagggtgcagtcagaccgcccgtcgaagcaggaacccgccgaggtgattcagacatcagtctga

SEQ ID NO: 302874 - DNA, 945 bp, Proteus mirabilis
atgaaaaataataccgattttcgtttcatattagtgatgcgaaaaagtcgcttacaagaattaattgagcgttttaacacttggtcacaagccaaattctatttagaacataaccatgttgaggtaacagattatcttaatgaacataatctctatcaaaaacaactcacagaagctgagcttattttaaaatcatttgggcgttttcagctcttggaaagaggattattgcctagttatcaattttcctctcatgatattgtagtggtaataggtcaagatggcctcgtcgctaatactctgaaatatcttaatcaacaacccgttattgctatcaatccagatccttcaagatgggatggtaagctcttgccctttgaaatagggcaattgaaagagattataattaatacaataaatcacaaaatgccttttaattcggtcacttttgcacaagcaaaaaccaatgatggtcaatcactgttagcggttaatgacttatttattggccctaaaagccacacttccgcacgttatatcttacaatggggagactctcaagaagtgcaatcctcatcaggcattattgtatcaacgggacttggctctacagggtggtttcaatctattcttgctggagccatggccatcaccggaaaagcatcacaccctcttttacaagggtttagctggagtgataaaaaattacaatttagtgtaagagagccatttcctagtagaacaacaggcaccgctttaacttttggcacgattgagccggactctccattgcaattaggatctttaatgcccgaaaatggtgttattttctcagacggcattgaagaggattatttacattttaatgctggctgtattgtgcaaatcaatatcgcagatagacaagggcaactcatcgcccctaaggggcgtcagcctatttaa

SEQ ID NO: 302875 - DNA, 1197 bp, Proteus mirabilis
atgaataaatcaattattatcatactgcttgtcacagtattagatgccattggtattggccttatcatgccagtactaccaacactattaaatgagtttgtgagcgaaaacagactcgccaatcattacggtatattattagcactctatgcgacgatgcaggtgatcttcgcacctattttaggaaaattatcagataaatatggcagaaaacctattttattattttcgctattgggtgcggcattagattacctattaatggcttgctctacctcattatggatgctctacattggacgcattattgcgggtataacaggagccacaggtgctgtatgcgcatcagcaatgactgatgttactcatcctcatgaaagaacacgttatttcggttttttgggtggtgcatttggtgtgggtttaattattggccccatgttagggggattactgggtgagatcagcgcccatacgccatttatctttgcggctatttctcattcgttattatttatattttcattactttgtttccaagaaactcaaaccacaaaaatatcgactgaaatatccgcattaaatcaggatacagcgcctcactctgccactggttttattaaaaagagtctctgtttttggcttattgcctattttattattcaactaatagggcaaattccggccaccatttgggtgctattcacacaagtgcgtttcgcttggcacactactgaagtaggtttatctcttgcatttcttggtgtattacatattttttttcaagcggttctcgcaggaaaactggcgcaaaaatggggagaacgcaacacggttatcatcagcatgtctattgatgcatttggttgcttattattagcctggataagccatgtttgggttatgctccccgctttaatctgtttagctgcgggaggaatgggacaacctgctttacaaggatatttatcaaaatctgttgatcatcatgttcaaggacaattacaaggaacgttagtcagtctaacgaatataactgggattgtcggcccgttactcttctcttttatttatagttacagcgttgaatattgggatggcttattgtggtttattggttcaatgctttacagtgggttacttgtagccagttattttaaacagaaatcaccaatattaaaaaaatttccctcataa

SEQ ID NO: 302876 - DNA, 2373 bp, Proteus mirabilis
atgccgatatttcgttttactgcgcttgcaatgacattggggttattatcaaccccctatcatgttattgctgccaccagcaatcctgcatttgatcccaatcatcttatgcaatcagaaatctatcattttgcacaaagtgatccattagctgatttttcatcagataaaaattcaacactaactttatctgataaacgtagcattatgggaaaccaatcccttttatggcaatggaaaggtggtagtagttttactttacataaaaagcttatagttcccacagataaagaagcctctaaagcatggggacgcgcttctacacctgttttatcattttggctttacaacgaaaaacctattgatggttatctcactgttgatttaggggaaaagctcaatgccaccagcgaagcccaagctggctttaaagtaaaactaaatttcactggctggcgtgctattggtatctctttaaataacgatcttgaaaatcgcgagatgactttaaatgcaacaaatacatcatccgatggtactcaagatagtattggtcgctctttaggtgcaaatgtcgacagcattcgttttaaagccccttctaatatcaatcagggtgaaatctatatcgaccgtattatgttttctattgatgacgcccgttaccaatggtctgattatcaaataaaaacacgattatcagagccggaaattgaatttcacactgtacaacctcaattacctgtaacaccagaaaatttagctgcgatagatcttattcgccaacgtcttatcaatgaatttgttggtggtgaaaaagagacgaatcttgctttagaagagaatatcagcaagctaaaaacggattttgaggcactgaatattcgccctctttcggatggaggaatgcaaggtcgacatcttatcaccgataaacaaactatcatctatcagccagaacagcttaattctcaagacaagcaactttttgataattacgtcattcttggtaactacaccacattaatgtttaatattagccgtgcttatgtgctcgaaaaagatccaacacaaaaagaacagctaaaacagatgtacctcttgatgaccaagcatctattagatcaaggatttgtcaaaggtagtgccctagtaaccactcaccactggggatatagttcacgttggtggtatatctctacattattaatggctgatgcactaaaagaagctaatctacagacagatgtctatgattctctactttggtattcacgagaatttaaaagtagttttgatatgaaagttggcgcaaatagctctgatttagactattttaataccttatctcgtcaacatttagcgctattattacttgaacccgatgatcaaaaacgtattaacttagtcaattcttttagtcattatatcactggtgccttaactcaagtaccaccggggagtaaagacggtttgcgtcctgatggtacggcatggcgacatgaaggtaattatcccggctactctttcccagcatttaaaaatgcctcacagctgatttatttattacgagaaacaccttttgctgtaggtgaaagtggctggaataacctaaaaaaggcaatgatttcagcatggatctatagtaatcctgaagttggcttacctttagcgggaagacacccctttaactcaccttccctacaatctatagcacaaggttactattggctcgcgatgtctgcccaaccagcgccagataaacagttagcatctatttatttagcaattagtggtaaatcgcgaaatgaatctcccactatttttggtgaagagataacgccagcgtcccttcctcaagggttctatgcctttaacggtggtgcctttggtattcaccgttggcaagacaaaatggtgacattaaaagcctataataccaatgtatggtcatctgaaatttacaataaagataaccgttatggccgttatcaaagtcatggtgttgctcaaatcgttcgcaatggatctcaactttcacaaggctatcagcaagaaggctgggattggaatagaatgcctggcgccacaaccattcatcttccgcttaaagaacttgatagccctaacccacacaccttgatgcaacgaggtgagcgaggatttagcggcacatcagcccttgaaggaaaatatggcatgatggcgtttgatcttctttatcccgctaatcttgcgcgttttgatgctaactttaccgctaaaaaaaccgtcttagcggcggataatttgtcggtagcaatattaatagcagcgataaagatcaccctgtggaaacaacgttattccaacatgctattacgcctgagttaa

SEQ ID NO: 302877 - DNA, 2598 bp, Proteus mirabilis
atgtcaaccatcgattatccagagaaaaaagcgtcccgctcgataaggcaacaggctactgtgcagccgcatatcttaacccgttattacaaattttatcgtcataatggggcttcattcagtgcggctatcgtgaatgagcttttctgggtattaatgtggctctttttgcgtatggaatcccctttttggcagaaaatagcacaaaaacaacaacaactatttcctcatattaatccgcgtcgccctaaattatgcgatccgatccgatacttattacaaagtatttggcttatttgccattatttgatgctcaccttggtgaaaaaaccgattcaatttattgtctatattagacagtattatcaaaatctctttgctcgcttatctcctgttgcgcgagatatgatccatcataagaaaaaaaacacgccactatggcaatacgctctattatcgctcgttgctgtttttgccatttttattatcttattaagtattactcaaccttttgatttaaaactacaatttgtttttgttctcgtgatttggctgatagccttagctatccgcgatatccctggccgactgtcttctattaccattattattttatcgctgactattgcttgccgatatatttggtggcgctatcaatacacactctactgggtggataatctgagccttttctttgggatcttactattactggctgaaacttatgcatggattgtgttatttcttagttttatgcaatgtatttggccactccatcgacaacctatttcaatgcctcaagatacaacacaatggcctactgtcgatatttttattcccacatataacgaagcgctacaagttgtaaaaccaacactttatgcctgtttaaacattgattggcctaaagataaattaactatctatttattagatgatggctctcgccctgagtttgcggcttttgctaaagaaattggtattcggtatatcactcgcaaaaaacatgattttgctaaagccggcaatatcaaccatgcattgagcaaagcctgcggagaatatgtggctatttttgactgtgaccatattccgacgcgctcattcttacaatttactatgggctggtttctaaaagacgaaaaaatggcattggtacaaacaccacaccactttttctcccctgatccctttgaacgtaatttaggcaatttccgcgaaacaccgaatgaaggcacgcttttttatggattagtgcaagatggtaatgatacttggaatgcagcttttttctgtggctcttgtgctgtattacgtcgttgtgctttggatgaaattggcgggctggcagttgaaactgtgaccgaagacgcacatacctcattacgcttacatcgtcatggttggacttctgcttatattcgtatccctcttgccgcaggattagcaacaggatcactttcagcacatattggccaacgcatacgttgggcaaaaggaatgatacaaatatttcgtttagataacccgctctttggcaaagggctgacactgccacagcgcttttgttacctcaatgccatgttgcactttttatcaggcataccaaggatgatcttcttattagcaccactaacgttccttatctttcatgcctatattatttacgctcccgccatcgctatcgctttgtatgtcgtgccttatttattacacatttggttagccgcgaccaaattacaaggtccttatcgccactcattttggggagagatttatgaaacgattttagcttggtacaccacttgccccgtattaagcaccctattctcaccttataaaggtaaatttaatgtcacagagaaaggggcaattatgaagaaaagttttgtcgattggcaaattaatcgcccctatattctgtttcttaatcttaatttgctaggaattctatttgctttctggcgtatcgcaacaggcgatcccgatgaaaggttagccgtactcatgtgcttagtttgggtatgctataacttagtattactaggtgttgccattgctgtttctgtagaagcaaagcaagagcgacagttcccacgggtacgtctaaaagtgcccgcaatactattactccaagacggttcgctttattcttgtcagctcaatgacttctctgataatggctgtgccattgtattaccagataattttacagttcccttatcttgtcaccaagagatcaccgttattctcaaacaaaatcaacgtgaatatgcttttgaagcacgtattttacggattgataatcgcattattggcttacaactgcttaatatggatacacaaaaatccattgattttaccgcctgtacttttgaacgagccgacacttgggctaattggcaacacgctctccctgccgataatccactgaatagtttaagaaatatcatttatatcagtatgcgtggctataacaccttacttaaacgcgccccgtatcttgtttacctcttatttcgtttattagggcagtgtttattgtggctattatcgctacttccacgacgtgtcaatgtttcacaaatatttcattaa

SEQ ID NO: 302878 - DNA, 390 bp, Proteus mirabilis
atgatagaagttgatattaaagctgatctggaacgtattacgggattgttagcttatccgttaaaactcccatccgataaattagaggggattatctatcaacgaattagcgaccccaagatagacgctggattagcccacacctcacttgttcaagcccgttttcaaatcgttattcaaatacctgatgattatcccaaagcgctgatgcttgaatctaaactttgtcgcgagtgggagtctgttgtgcatggttatattggaaattatcccatacaaaccgttcagcggggtaactttcagcaggacatgatcgaacaaacagaaaatcgcaaaatttatcgtatttatcgtgatttcattatcacctatcccgaggacgcatcatga

SEQ ID NO: 302879 - DNA, 327 bp, Proteus mirabilis
atgctatccggtgaactcaataaacgcatctctctttctcactatgttactgaacgagatgatttagggagtgagaaagtcgtttcaaaaaaagtggctgaggtatgggctaaagccgaatcgatgtcgaaccgtaagatccgtaccgcagaccaagatcaggtaattgaaacctatcatttcactattcgccctcgttatgatgttgatatggggtggctggtgggctatcaggggcgactatttactgtacgcgctgttgaccgaaatcaggctgatagaaccattattaccacggaggcgaatatacaacatgatagaagttga

SEQ ID NO: 302880 - DNA, 471 bp, Proteus mirabilis
atggctggaccgcctaaaaccccgtcacatctgcaattggtgagggggaacccatcaaaacgaccgattaataaaaaagagccaaaaccgccaaaaggggtacccccaactccgaaacattttactaagcaaggtaagtattggtttaagcgtattgctgaagaacttgatgcaatgggtgtcatgagtcagatggatgccaaggcattggagttactcgtcgaagcttatactgaatatcgacatcattgtgatgttctcgatgaagaaggctatacctacaaaaacaatacagaaagtggattgatgataaaggcgcatccatctgctgcaatgaaggcagacgcatggaaacgtattcgcgccatgttaagtgaatttggtatgactcccgcttctcgaacaaaagtcaccatgaagactcctgcagaagaggatccatttacagcatttttaaaagcgagagattaa

SEQ ID NO: 302881 - DNA, 351 bp, Proteus mirabilis
atgccacctcgcatacctcgcgcatgtcgtaaacagggatgcgccaagacaacaacagaacgtaacggctactgtgcagatcatcaaaacctaggatgggaagcccaccggcgcggtaagtctcgtcatcaacgtggttatggtacccaatgggataaactgcgagtacgtatactcaagcgtgataagtatctctgtcaagaatgcttaagggcaggacgagccaccgaagcgaaaacggttgaccatatcattgctaaagcacatgggggtaccgatgcagaagagaacctgcagtcgttatgtattccatgtcatagaactaagactgcaaaggagagaacgttatga

SEQ ID NO: 302882 - DNA, 309 bp, Proteus mirabilis
atgtcagataatcagattaactatgaagcagtaggtcgttgtaagatactactcgaaaaaatcaaaacacaacacattgaaagaactaaggctataagtaatttacgtgctgtgatttattcactacatcaaaaaggaaacattaattacgttcctcctgaagttgtcgttttcgatgctgaaaacttaactcgtctggttgataaggttggactagctgatagtgaacttatgcgcacgattagtgaatataataattggtgtcatgaagcaggtgagaaaccagtcaagctgattgaaatagaataa

SEQ ID NO: 302883 - DNA, 384 bp, Proteus mirabilis
atgagagatatacaggaagttttatcgcgttggggagcgtggtcggcagataatacagaattggttcaatggtattcagttgcagcggggtttagtggattaataccaagcaaggttaaagctcgtccccaatgttgtgaagatgatgcaatgattatttctagttgcatggcgcaattgaataaaaagaatagtgatatgcatgacttactgcttgattactatttattcggaatgacatttatgcaactagctaacaagcacaactgttctgatggacacataggtaaaaaattacaaaaagcagaaggaataatagaaggtatgttaatgatgctagatgtctcattagagatggatcgatacgtagaaaaaattacataa

SEQ ID NO: 302884 - DNA, 309 bp, Proteus mirabilis
atgaataatcaagccattgactctaaattaagtagaaatagattaagaatagtaaagcctaatgaaagggctgaggatttttatactactacctatggtggcgatggtggaggtggagatatggaattacgagtagctaaattagagtctgatgttgaatacattaagcgcgacatcagcgaaattaaagacgatataaaagatattaaaaaggatgctaaatccgatttccgtatgttatttggtgcgatcatcgctgttgcattaggtttggctggattaatggctaaaggatttggttggttataa

SEQ ID NO: 302885 - DNA, 726 bp, Proteus mirabilis
atgagtgagatcactttaacaaatagttttaacactgtcacgaacaaaactatcgatacccagaagttattatcaatgattaacgtggctcgtaagtcatgtggtgaaaatcaaattcgtaataacgtattgattgaaagagtaaaagacgaattagatggcgagacctacaaaatttttgtaggtcataaaaatggcgctcaaattgaaataattgaaatggatatcaaacaagcgcttcgtgtagccgctagagaatcaaaagctgttcgtcgtgttctggttgacaagctggaatcaatgcatgtagcttctcaaaaaagtggcaaaagccaatcaggtttacctgaataccgccaagctagaacgcttaaaatgtcggttgatgccattactaacttattcgacttaatgccgaacctgagtgatgaggcaaaacagtgtgcagcagctaatatcgtcaatccgattgttgggtttgaagccgttcctttgccagcacttgaacaaaagtattataccgctggtgaggttggcgaaatgcttgaagtgtctgccaataaaattggacgcttggctaataaacatggattaaaaacagaggaatatgggaaatatttcttagataaatctgcttattcttcaaaacaggttgaagcattcagatataacgacaatggagtaaaagcattacgacacgccattcatggcgctgaggtagcttaa

SEQ ID NO: 302886 - DNA, 564 bp, Proteus mirabilis
atgaaattattgcaaccattaaagtaccttacaatcaagcatgaagaaaagaggtggtacgatatctggtatccattggcggcttcattgattgtggtactagtttattggttcattgataagccatttagcattcttggcaaaaacggactaatccctcaaattaatggactactgcaaatactcattgggttttatattgcatcgttagctgctatagctacattttccaataaaaatatagatagtgttatggctggcactccacccacagttaaagaaaaggttaatgggaaatatcgagcaatcccattaataaggcgtagatttttgtgttacttgtttgggtacttagcattagccggttttattttgtttggtgttggactgattatgatacttttttcacctcagttagagcacagtgtatcaatgatacattacgatagttctttgaaaatatttaagactttatttgtttggggttacacctttgcgttagcaaatatagtatcaacaactttacttggtctctattacctgacagtcagaattcatcaataa

SEQ ID NO: 302887 - DNA, 927 bp, Proteus mirabilis
gtgctatcagaacataatagatggttatcattttatgagtttattattacaccaactcatgaagatgcgccattaataccaatgacggagattgctccaaagttagagtccttattttattctggtgatgctataagaatgtatagtagtggtaatagagccatgagaatctctgattgtagatatgacagaggcaatgggatattaacattactaatacaactggctgataaaagagtttcagaccctgtgtttagtgatcttcaaagtgggacgctgagagtcgagcctaaacttgacggtgaaggtatagctgtgtcttgtcatgttgtaataaaaaccgaaccatcaataacgtcagttaatttctataaggctattgtagaagttgtcccaggtataactagaagtgtttttgagccattccttaaagcaatgttaaaagatgcatataaagaggaagtttttactagcaatattaacaatagagaataccagcttagaccagcactaaaagttgtatctcttgtatctagaacactcgaagaaagcttggctggctcatctttagttggaatgcgattagtgaaaaccagtgtaagaaatgaaatggatcaaaacccttataccgaagtaagggagagatcgcttaagttaggaataaaaaggcaaccagatagaggggaaagaggtcgcttaatagaaacgataaagggagcagctctagaagatggttataataaattaattattaactatcgaaaagatggtagacaatcaagcttagaccttgaaattagagaaaatgcagcagatcaattgttcactaagcttgagaaggtaatactgccagatggtatagcgcagtgtgaggaatctatccacaatgatatagcagcaaggatgatctcacttataaatacataa

SEQ ID NO: 302888 - DNA, 207 bp, Proteus mirabilis; identical to SEQ ID NO: 298561

SEQ ID NO: 302889 - DNA, 807 bp, Proteus mirabilis; identical to SEQ ID NO: 301218

SEQ ID NO: 302890 - DNA, 192 bp, Proteus mirabilis
atgaaagaaaagcagtatcaatgccatgactgcggagatgaaacaaaaataatccaatcttatgatcagacgtcaaatacatacggtttcataattcaatgtcttaattgtggatatgaggctggtctattcgacaccattgaagatgcggagatggtgattaagtgtaactcgcagggatgcaatgaatag

SEQ ID NO: 302891 - DNA, 555 bp, Proteus mirabilis
atggataatacacaattatgtatagaaagttactctcgacataaaaaccttaagttagttggcatggagctaggtataccgtggcaatcggtatatagcacgctaaggaaggcggattatccagtaactggtgataaagctagatatgggtcagttacagatagaatagcggttattggtgagcaaaagtttaagaaggcagttccaatagccatagataataatgacttgaagtatcaagcagatattgatttcaccattggaaatataacgatagatgttaaaacgtcaagaataaggcgaaaacagcaagggaaaggcattaaaaatgcagccccaagatggggttattgcataaacaaacaaaaggataccgctgacttcttcgttctatacgcccttgatgataacaatgaaactgagcatgtttttctgatgccgaatgaaattgtaactgccgtctcaatgatttcaatacctgaaacactagccagtaaatgggcagattacaaaatagaagaaggtgaattactgccattcttccagtctttgtga

SEQ ID NO: 302892 - DNA, 450 bp, Proteus mirabilis
atggctaacggatcagtaaacaaagtaattcttatcggcaatttagggtgtgatcctgaaattcgctacctgccttctggtggtgctgttgccaatttagctgtggccacatcagagaaatggcgtgacaaacaaacagatgaaaatcgcgaaaaaacagaatggcatcgtgtcgttctgtttggaaaactcgccgatatcgccagtggctatttgtgtaaaggctcgcaagtttatatcgagggccaactacaaacgcgcgagtgggatgataacggcgttaaacgctatacaacagaaattgttgtaaagattggcggttcaatgcaaatgctaggtggtgctagtaaatcagcaggttcacaaccggcacagcaaaacccgccacaacctcaagcacagagtagtcaaccaccaatggattttgaggatgatatgatccagttttag

SEQ ID NO: 302893 - DNA, 828 bp, Proteus mirabilis; identical to SEQ ID NO: 302343

SEQ ID NO: 302894 - DNA, 375 bp, Proteus mirabilis; identical to SEQ ID NO: 302344

SEQ ID NO: 302895 - DNA, 1695 bp, Proteus mirabilis
atgattattttaagtaatgagctcgcccataattattttcgcttattaagccatagtgataaacaaaatattctctctattattgctgaaaaaagtagcaatatagtggatgtggtcactaataatcataatcatttgcaaattagttttgtgaattcacgttatcaaaatgaagatgtggcgatttgcgtattagtagatatcagcgctcgtgttaaaatggaacgctctctacaaaatatggcaacggccgcagaacaagcaaaccaagctaaatcaatgttcttagcgacagtcagccatgaattgcgtacaccactgtatggcattattggtaacttagaattattacaatcattgacgcaaaatgaagagactgccagattattaaaaacaatggataactcttcatcgctgctactcaaaattatcagcgatatccttgatttctcgaagatagaatcgaaacaattaaaaattgacgttaagccattcaattgtcgccaagttgtctcttttgttatctctaactatttgccgttaattgctaaaaaagatttagctatttactgctttattgaaccggatgtacctaaaatcgttaataacgatccggttcgtgtccagcaagttatctctaatctactaaataatagtattaaatttactacgacaggatgtattactttgcacctgtatcgagatgaatattatctctatttcgatattcatgataccggcagagggataaatgaaaaaatgcttcatcagctttttgaacccttctttcaggtctcgcaaaatacagaaagtgcttcagaaggtacaggattaggattagcgatttgtgaaaaactgattaacttgatggatggtgatatcagtgttgtttctcaagaaaatgtaggtagtcgttttactgtgcggatccctttatatggcgcactaaattcgagtgatggacaaaccaaatataatctctataaagagagtactattcgctgctttatcagtattaaaaatctttatctagaaagctttgttgaacgatatttaagttatgtgggcttacattgtcaattattcacggaagtgactcaggtctctgagaatgattttattatcaccgatcatgatgaatgtttagataactcttgccaatttatccgtatttatgaacactattttgagcctgcaaagaaaatctctgagaataattggttatgtagtacatataaattaaatgaattaattaagattatcctacaattaccacaaacaaaattagagtctgatgactcagagaataatgcgttaatgacggatcacgatctacaattattgacagtactcattgttgatgatcaccctatcaatcgtttattgttgaccgatcaactgaaaaaaattggttttaataccgcaacggcagaagatggttgtgatgctttagcctttatgcaagaaaatcatgtcgatattattttaaccgatgtcaatatgccaaatatgaatggctatcaattagcgacaacagtgcgtgaattgagtcgcactattcctattattggcgttacagcaaatgcgattgccgaagaaaaacaacgttgtattgatgcgggaatgaatgattgtgtttccaagccagtctctcttactgtattaaaagacgtattactcacctatgtggcataa

SEQ ID NO: 302896 - DNA, 1194 bp, Proteus mirabilis
atggcaacaaaaaatatagttattattggcggtggtacggggggtactattctcgctaatatcttagctaaaaaattaaatgatgaaatattttcaaaaaaaataaaaattacgcttatttcagataatccataccattattacaaacctgcatttatgtatattgcatttaaccttttcttaaaagaagagttaatgcgatcacaaagaagtttattaagaccagaaattgaatttgttatagataaagctgaaagtttcgattttaataataaaacagtttattgttgttctaagaaaaaatatcactatgattttctggtattagccacaggatgtgttcctcgtcttgatagaattgaaggtttagctgaagctggaaatcatttttatcaatatgaagctgcacgaaaattagcagataaaattgctaccattgaaaaagggcgtgtatttatcacggtaacttttcctgaaacgccaaatgtacctcaccaatgtggtattgcgccaatggaaacaaccttgatgctggatgaatttttacgtcagcgacgggtaagaagtaatatagaaattgtttatacctatcctaccgtagctcaactattaagaaattgtctttttatgcagcaagaagtttgtgaagtacttcctgcggtcttttctgaacgagatatcaaagcaaagcgtggttttacattaagtcatgttgatcctgataagaaaatcgcctattcgaaagaaggagaagcagagccttttgatatcttaatgagcacacctcctataacagcggtagaagccattcgtaatacaggattaagtgaatataacaatggtgaaggctggctaccgaccgatcctgaaacattacaggtatatgggttaaatcaagtttatgtgttaggtgatacggttgatttgcctattagtaaggccggtggtagctgtcataaccaagcgggtgttatagctaataatatttgtggtgaactgcgttatggttatccggctgcaatttatgatggtcgagtacaagctgttgcccaaatgggattatcagcgggtatgccattacagtatgactataaacatgatgttattccaacacctccaacaaaactcggtggcatgttacgtaacggttataaccggggcttatattgggcaacggtcagaggattattgtag

SEQ ID NO: 302897 - DNA, 2250 bp, Proteus mirabilis; identical to SEQ ID NO: 301172

SEQ ID NO: 302898 - DNA, 348 bp, Proteus mirabilis; identical to SEQ ID NO: 297686

SEQ ID NO: 302899 - DNA, 1032 bp, Proteus mirabilis
atggaaaaagatactggtgtccatgatactattgatgatactgatgtttatgtgtacataggggacataacaagggctggatacaacaaattatcaacagaaattgaaaatagaataactgccaataaaaagcgtgaacatgtaattttatgtatttctacttatggcggcgatcctgatgcaggatatagaattggtagagctctgcaacattattatactggaaatgtatcagttcttgtgccaagcttatgtaagagcgcaggaacattagctgttatttctgctgataacctaattattggtgaccgaggtgaattaggacctcttgatatacagctaagaaaagctgatgaaatgggagagtctagctcaactcttgatatctttaaagctgtagatcaattagaatcacgcactttatcggcctttaggcaatatctcactgatataaaatatggcagaggaattagcactagactatcagcagacatagcatcagaattagttagtaatttataccagccaatagctagccaaattgatccacataaaattggtgaacatcaaagagctatgggaattgcattatcttacggtgagcgattaacaaaaaaatctaataacctaaaagaaggatcactaactaaattaatagttaactatccatcacatggatttgtaatagatagaagtgaggccaaagatcttttcaataatgtaaactgtcctgatggattgtcagccaatgtttataatatgattagccaatggatcataaaagacccaaatataattggtggcacacctttcgtatcagattttgaaagttttctaaaaagaactgctgacgaaacaccaaaaaccgagaatcaagaaaatgacaacagaaataatgacattgaatcagacgctgtcgagagcgaaccaaccggagatagatctggtgaaaatagtgagcactcagaacaaggaaatgaatcaggaactgaagaaagccgaaaaccgagaagtaaaagaaaaacttcatga

SEQ ID NO: 302900 - DNA, 819 bp, Proteus mirabilis
atgaagcccggtatctattacgacatttcaaatgaggactatcaccatggattagggatcagtaaatctcagttggatttaataagcgaaatgccagccgaatatatttggagcaaggaagctcctgttgatgaagaaaaaataaaggcattggatttcgggactgctatccattgtcttttgttagaaccagatgaatacagtaagcgatacaagataggccctgatgtaaatcgtagaacaaacgcagggaagcaagaggaaaaggaatttctcgaaatgtgtgaaaaggaaggtatcacacctattactcatgacgataacaggaagttaatgctcatgagaaatagtgcaatggcgcaccctatcgcaagatggtgcttagaagctaacggagtagctgaaagtagcatttattggaatgatgaagatacggatattctttgtcgttgcaggccagataaactcattcaagagcaccactggattattgatgtaaaaagctctgccgatattcagcgattcgatcgctccatgtacgaatatcgttaccacgtacaggactctttttattcagatggatataaatcattaacaggcgaagctcctgtctttgtctttcttgttgtaagcacgactatcgactgcggtagataccccgttagagttttcaatttagaccaacaagcaaaagatattggtcggacaacctacaaacaaaatttaagaacgtatgcagaatgcctaaaaacggacgaatgggcaggcatacgcacattatcactgccctactgggctaaggaattaagggatgagtaa

SEQ ID NO: 302901 - DNA, 507 bp, Proteus mirabilis
atgaaagagcatggaattatttttaatgcagaaatggtgcgcgctattttagatgggcgtaaaactcaaactcgtcgcatcgttaaaaatgtaatacctgataatggaatatggctaaagaaaccgaccaaaacaagaagtggcacaactacacatatattggatgctacaaaacataatttgtgccccctaggtaaaattggtgatcgcctttatgttcgtgaggcatttaaagctggagtatgcactgaatcaacaattgcatataaagctacacataaaccatctgatttagaagaaggatggtatgaagaaattaagtggacgccatctatacacatgcctcgtaaatattcgcgcattacgttagaaatcaccaacattcgtgttgagcgactgaatgatatcagtaacgatgatgctaaatctgaaggttattggtatgggcgtggaggtggagttcccgataaggctattacacctagcgatcaatttcctactttatag

SEQ ID NO: 302902 - DNA, 507 bp, Proteus mirabilis
atgaaaaaaagacaaaaaagagcttatcgtaaactattctcacacacatcatatggtaagtatgacatacatatgctatcagatgaattacatagaaggaataagtataatttttactttatatcatcagcatctctctcgctaatttctgctactttttttataggattacttagtgttaatacagctgctgttagtttggcatcacatgtagaaataattatatctatgtttttttttgcaatttctctttcagtaaactcattttcaccggctagcgatgagatcgataagactgaaattctaataatatttcaatacagattttttgctattattaaattaatatcatttctatctccttttttcggaatgatttttcttatagcgtatttcaatgagtacatatctatagtttcttttataattttcattttgttatttcattacaatggaaaagtatcaaaaagggcaaaaagaaaatcaaataatatattaaataaataa

SEQ ID NO: 302903 - DNA, 2523 bp, Proteus mirabilis
atggtgaatagtatgatatttgaactcaatcagttaaggcaagtcgtattattgacaatgagtattagtgtgttttctgcttatgctacagaattcaatatcgatgtgttagatgcagaagatatacaaaatatcgatatgagccaattttccattgctggctatgttccccctggtgattatgtattaacagtttttgttaatggacaacgtttaggtgcacctcgcgatatcacggttttagagcaaaaaacgcaaacacaagctatctgtatacctgctgacttacttgattctattggtttaaaagagtctgtaaaaccaaaagtgactgtataccctaatagtcaatgccttgatctttctgttttgaaaggaatgcaaacagttattgatctcccaacactatcactcaaaataacgatcccccaattatggatggaatatagagatccttattggactcctcctgcattatgggaagaaggaattaatggtgctttccttgattacagcgctaatgtttcaatcaccgaagaaaaagagggggataaacgtacttatttgtccactaatggtactgcgggtattaatttaggtgtttggcgctttcgtggtgattatagtgccatctatcaaaaaaagcggggtggcagacaatcacaagaaatacacgattttgattttagccgtctttatggttttacctccttgaaaaaattggcttcaattttaactattggagaaaattatttttactcagatgtttttgaatcatggcaatacagcggtatttcattagaaagtgatgatcgcatgctacctcccaaattagtggggtatgcaccagagatcacaggtgtagcagataccaatgcaacagtgattgttcgtagccaaaatcgagtgctccttgaaacaacagtaccccctggaccatttcgtattcaaactttagatagtggtgttcgagggatactcgatatcacaatccgcgaagaaaatggagaagagaaaaaatttagtatcagtactgcctcattaccttatttaactcgccctggccgtctgatctataaattagtgatgggtaaaactcgttatgatggacatcatttaacaggtaaacccgtattcagtggtgaattctcctatggtctatctaatgcttggtcgttatatgggggaacacaatttaacagcgattatcaggcaacggcgattggtataggacgggatctattttcttttggggcattatcacttgatattactcagtcttttgcacgttttactgataaaaaaataaaagggcgttcttatcgtcttaattatgcaaaatcttttgatgcactacgcacggatattacttttgctgggtatcgatttgctgctagagattatcgcacattaactcagtttatggatcaacgtcgtactggttatgatattcgctctccaaaagagaactatcaaatttatataaacaagtattttgataattttaatatatcactaaattatcaatatagtacctattggcaagataaacctcaaacacaatatggtttatacacaagtactaatatcagtattccaatgttatctcagcaaaatgcgaatatatctttatcagcaaccagaactgaacgagatagtggttatcaagatgatgctattaatctgtatttaacaataccattatataaaggccatagcatttcattttctgaatcatattctcgtattggtaaaagtaatcaatatagccatagagcaagttatagtggttatagtgatcgcgataattatagtctgaatgtgggctatagtcatggagaagaaattgatagccaatcaagtatcagtggttattattctcgcgacttttctcaagctaacttatctgctaacgcaagttatgtaccacaacaatatcgtagtgttggtgcatcaattaacagtggtattacagctacaactcaaggtattgcgttgcatcgttcagctaatggtgatactcgtttaatgattgaaacaccaggggttggtgatgtacctctagatagtggcgttatcaaaactaatcactttggacttgcagttattcctaatgttaatagttatcgtaaatctacggtttctattaataccagtcagctacctgaaaatatagaaacgctagaatcaacaactgatattaccttgactaaaggggcgatagggtatcgcagtttatcagtaatgaaaggggaaaagttgtttgccattatatccctaaatgatggtaagaaaccgccttttggggcaagtgtacgtaatgcggataatcgtgagttgggtattgttggtgaagatggtgtgacatggctagtaggcatttcatcaaaagaaaaactatctgtttattgggcagggaaaaaacaatgtgagttgtcacttcctgaagatttagcatcgccaactagcatgttattgctaccttgctcttcacctactatatcaaaaattacagaaaattaa

SEQ ID NO: 302904 - DNA, 573 bp, Proteus mirabilis
gtggctatttatcgacgtataggattgcaagtaattagcagtcttttgtcacttatttctagtacagcattggctttcgatcctaaagttattgagcatgaaggaagtacttatctagtgggtagtgttatctcaactccttgttctattgtaatgtcaaatcgttatcaaacggttgatttttcttctttaactttagctatgttatcaagcaaagaaaaacgcgaacagcagactttaccatttgaaatagaacttcgtgactgtggcagcatttacacgtcaattgacagcaaaacatggatgatacgttttgatggacagagcgtaagtaatatcaatgcatttatcttgcaaggcacatctaaaggtttaggggtttctgttctagataataataaaaatgcattaataccaggagaaacatatcctttattcgatagcgtattacgacaagataaatcgggacaaatcctctatctgcgttacttccttaggctagaactcaccggagaacctttacgagctggagattaccaaggactggttcgtttttttatccattatcaataa

SEQ ID NO: 302905 - DNA, 1230 bp, Proteus mirabilis; identical to SEQ ID NO: 302488

SEQ ID NO: 302906 - DNA, 1101 bp, Proteus mirabilis
atgagtaaattaagagtcgctattatttttggtggaaaatcaaccgagcaccaagtttcattacaatcagcaaaaaatattatcaatgaattagatcgaacgaaattcgacctttgtttaattgggattaatgaacaagggcaatggcatgaatatgctgaagacaattatttaattaatagcgataacccctcaactatctcattaagccaacctttgcgtccagtggctattattcctggcagtacccgtcagcaatttatctctttaactgatgggcaacctcttgcacaaatagatgttgtatttcctattgtgcatggtgcttatggtgaagatggcaccctacaaggactattacatatgattgatatgccatatgtaggccctaatatcatgagttctgcagcatgtatggataaagatatcactaagcgcttactggatgatgcaggattagcggttgcaccatttattacactgatggctcaccaattaaatgatatttcctataatgaagttgttgaacaattagggctccctttatttattaaaccagcaaatttaggttcttctgttggtatcagcaaagtcaataatgaagccgagtttaatgctgccttatccatggcatttgagtatgaccttaaagtgattatcgaaagtgctattgttggccgtgaaatagagtgtgccgttttaggtaatgaagagcctgaagttagcccttgtggtgaaattgtgttaaatgatgctttttatgcttataacacaaaatacattgatgacgatggtgcaaaagtagtagtacctgctgatttagataatgcgattagcttacatattcgccaaacggcattgaaagcttaccaagttttaaactgtttaggtatgtcgcgcgttgatgtgtttttaactgaagataatcaagtcattatcaacgaaattaataccttaccaggtttcactaatatcagtatgtatcctaaactgtggcaaagtacgggattagattatcaatcactcatcacgaaattaattgaattagcgctagagcatcataaaaaaacagccgtattaaaaactaagtgtgagctttaa

SEQ ID NO: 302907 - DNA, 804 bp, Proteus mirabilis; identical to SEQ ID NO: 302260

SEQ ID NO: 302908 - DNA, 303 bp, Proteus mirabilis; identical to SEQ ID NO: 296533

SEQ ID NO: 302909 - DNA, 2010 bp, Proteus mirabilis; identical to SEQ ID NO: 301200

SEQ ID NO: 302910 - DNA, 2376 bp, Proteus mirabilis
atgcgtttaaaatcaattaatgcttttgtgttatccttgttagtaagtccattttatgtttgcgcagatttaaatatggacttcttacatggaggagttcaactgcaagctgctggtgtatttgatgaaaataccaattatcctgctgggcattatattgttgaggttattttcaatcgaaaattaattagtaaaaaagaattaattatctcaccagaagataatgaaaatttatgtttaaaaaaagattggattaatgagttatcgcttccaataaaattaaatttatttgaattatattatcatcctgagcgcgattgttatgatattagccgttatcctggggctcaggttatttttgataattcgaagcaaactttaacatttagtattcctcaaattgcattagatgaatctctgcgccggcaggaatgggattatgggataacaggtattaaattaaactattcgggctatatttctaaaaccagttcttcacaagcacaaatttatggtgattttgatttatatgctaatttaggtcgttgggtcgcttatgttcgtagtagttaccaaaggaactcgggtacagaaacatcggaggcaacagtttccacagcaattaaatcaatacaaggaagttttaccgtaggtaaaacaataacctctttatcaatattacctaactttgctttttatggaatgtcactgcgctcggaaagggatatgcgcccatgggaaaaacgaggttatgcaccggttatttctggtgttgcaaactctaatgctaaaattactatatctcaaaatggatatgtattaagttcacaagttgttcccgcaggggcttatcaattaaaaaatatagcaccagtaagtaatggaaatataacagtgacagtagaagaaagtgatgggacaaaaacagttcgctattatcctgttgccacactttcttccttattacgcacagatgaaataaattacaacattgctatcggagaaaaagaaacagtaggtaaaagagaaaatagtttattttttctaggtgcatttgactacggattaactaatgttacggttcatgctgcgggaattttgcataataattataaaagtgcagcattaggaatgagtaaagattttggacgatttggtgcaatgtcatttactgctaatactgctgtaagtgtatttcaaaaacagacaccaacagcacccgaagttaggcagtctggtatcagctattcgttacaatatgcaaattcattgactgataatactaatttacagctactcgcatatcgctatactggtaaagattatgttgattttaatgaatttaattcaaatgctttatatcatcgcagtaatcgtaaagagcgttatgaaacgatattgtcccaaagttttgatggtagctttgttagcttatctgcttggatgcaaacatatagaaatagtattagtaatgaagttggcgcaaatattacttacaatacaacaattaaatctgtcgatttctcattatcagcggattatcaaaaattaaacgattatgagcatgataattatattatttctgttggaataaatattccctttagcttatatgataaaaatcatttttgggcaaattctgttagctacgataggaaaaataaagctagttttaattctggtgtttctggaagtattaatgaaaaaataaactatagtatcaatacaagtaaagatcgtgataactggtctaattctgcttattttggtattgatcatagtattattaatacgggatatgcgatttctcagaatggccatcaaactaccagttctattaatgcttcaggaagtttattagccaccccagatacaggattattattcagtaatgtcagaagagatactgtcgcaattgcaaaaattaaaaatatagagggtataacattcaatgactcaccgccaactgacaaagaaggaaacactattgttggggtatcaccatacattgaaaataatttaaaaataaatacagaagaaattccgaataatgttgaattacttgattctgttcaaaattttactccagtagataaagctattatttatcgcgagtttaaatattcaacaattcaaaggtatatattaagaataaaaaataaaaatggtgattttatttctgctggaagtgctgttagaaataaaaatgatgaatatataggatttgtttcaaattctggggttcttttattaaatttattagataagcctaataagctattcgttatatcacctaatggtgaaaaatgtactttaaatttggagaaagtagaatctaatgatcataaaattatggaaattgaatgtaatgaatag

SEQ ID NO: 302911 - DNA, 1614 bp, Proteus mirabilis
atgaaattaagcagtaacaatgctgaaactatggagagccttcgcagtgagcggaatcaatatcgtatacttgtcgatattacaaattctgtattagcgcatctagacatggatggcctcatttctgaagtatctaaagaaatacatcgttttttcggacttaatcatattagtctgatgttatgtcgtacttcatcacaaaatagtcatgaaggtattctttattctagtcgttatcagacaggaaaatctgtcattcgtcaacaacgtaagttcagtagcgccaataacaaagccgaagaaattattcatcaaaacaaacccgttttaatcgatatcaataaagaagatcaagacgatgttttgattaaacgtctcgtaaaacaaaatatgcagacggctttgttattgccactggcttttaaccgtaaaccgctaggtttattaatcctagcgcatgaaataagtagtgtttttactgaagaaacttgtcaattattgcaacaaattgccgcgcgcatcgggattgcaattgaaaatgccgccgcttatgaagagataactcaccttaaagatagccttaagaacgaaaatatttggcttaatgaacaaataaatagaaatggtagttttagcgagattatttatcaaagcgatgccatgcataatgtactagaacaaattgagttagtcgctcaaagtgacagtactgtacttatcttaggcgaaacaggtactggtaaagagttaattgcacgagcgatccatcgtttaagtcatcgtaaaaataagacgatgataaaaatgaattgtgcagcagtaccttccggtctgttagaaagtgacctttttggacatgataaaggcgcttttacgggggcaacacatgcccatgtgggtcgatttgaaatggcagataaaagtacgctttttctcgatgaaattggcgatatgcccattgaattacagccaaaactattacgggttctccaagagcgtgaaatcgaaagattaggtggtaataaagttattcctgtggatgtacgcttaattgcagcgaccaataaagatttatgtgaactgacggatgaaggggaatttcgagaagatctctattatcgtctgaatgtttttcctattattatcccgccattacgggagcgacctgaagatatccccttattggcaaaatattttacgcaaaaaattgcccgccgcatggatagaaaaatagactgtattccaacacatgctttggagcaattaacccattatccttggccgggaaatgtacgagagcttgaaaatattattgagcgcgcggttattttaactcgaggctctacgctaaatttgcaactaaaagagttaaatatcaataaaccatctcgtttaaaacaagtgctttcgcaaccatcagccatagaaaaaaagatgcaaactagcgcacctgaaagtgatgatgaagagcgtgagcggataatacaagcccttagagaaactaacggtgtagtggctggtgccagaggtgcggcattaaaattaggattaaaaagaaccaccttattatcacgtatgcaacgcttaggtatttccattcctgaaattctttag

SEQ ID NO: 302912 - DNA, 165 bp, Proteus mirabilis
atgctacgccacatgggttggacagaagccgctgacttaatcattaaaggtatggaaggcgcgatcgaagcgaagaccgttacttatgatttcgaacgtctaatggacggcgctaagttgctaaaatgtagcgagtttggtgacgcgattatcaaacatatgtaa

SEQ ID NO: 302913 - DNA, 861 bp, Proteus mirabilis
atgttagcatttaatactagtattccttttagtaactttatgcgttctgataatgattctatatggcaaaatgcgagtttaagtactaactcctcgcataacatgaagaaacgttttaacaatactatcggattaaacggtaccttattggaagataaaaacttaagttacaatattcaaacaggttattctcatgaagaagaatcggactcaacaggatatgcctcattaagttataacggttcttatatgaatagcaatataggttataactataccgatacatcacatcaaataaattatggtatgagtggcagtattttagctcactcaggtggtataacacttagtcagcctatatatcaaacagcggtgttagttaaagtacctgaagttaaaaatataaaattagaaaacaatagtggcatcacgacagacagtaatggttatgcggttttaccttatgtttctgaatataaagaaaaccgtattgcattggataccaattcattctctaacaatattgaaatagataatgcggtgaaaagcgtagttcctactcgtggggccattagtgcgatcacatttgagcctagtgttgggataaaagcaattacgacattaacccataaagggaaaccagtacctttcggggctatcgttgattcaggtaataatactgggattgtggcagatgaaggaaaagtttatttaacagggttatcaccttcagggcaattaaaagtgaattggggtagtaagaaagagcaacaatgcttagtaaattacacattaccaccacaagatccagataaactttatgttgaatatagtgcagagtgccaccctattaaggaataa

SEQ ID NO: 302914 - DNA, 309 bp, Proteus mirabilis
gtgaatggttttcaattatattcagatagtagctatcaaaacagtaagttgacagttcctattactgggatgtctgaaaaaccggctaccgttgaagtcacacaaaataatcgattgttatatagaacgataatacctgcaggccctttccaattaaataacattagtggtgtatcatcaagtcaaccattacatgtcaaagttattcaagatgatggtactattcaagaatttgatgttattacatcaaataaagacttaaaaaatccacagagtagtaccatcatcttgaataactttgacatgtaa

SEQ ID NO: 302915 - DNA, 423 bp, Proteus mirabilis
atgtcaaaagagataagcgaattacagtttagtcttcactatgcctcagaaacagacagtgaaaagaatacctccatcattttaacggcgaatatccatacggctgatggtgaaactcaacaactgacacaattaatttgcacgacatcttccgcaggtaaaaagcaatatcgaatcggcttgcaaaaaattagtgatgctggtgctccattgctggtggcgattgaatcctattggcgcaaaaacacacaagagagttgtgtttatttgttagagaaagcgaagcaatttattcaaggacacttacaacaaacgaatacatggatatctatgtatggtcttgtgattgtttctaatgcgtcactggaagaacagttgcctgaaggtttattaaagacacttaaagtatcaatccccgcctaa

SEQ ID NO: 302916 - DNA, 1128 bp, Proteus mirabilis
ttgaaaacgataactattaaaatcagtctttttgttttgtcactgtttttccctctcctaacaaaagcacttgttattccagataatggaacggggtatataggtgaattaacgcctcctcaatcatatatgtcacttcgtagtagtggtaattactatggagcggctgtaggtgttaataatgttgtagattattgtagtaaaaacagtgcgcaatggcagaattttttattcccattcccaggaagtcaagagggggagtacggattaaaattatataataaaaacgtaagtgaagaggaaaatagggaaaattatttagttgcagctatcaatggaatagtatctatcgatgcgttgtattatcagaatggattaccttccccgacaagaattaccctgcgccgaggaaaagaaatttctagaacagaggaatattctaatcaatttgtctatcgtcacccaatgtgctggtatggtaatttatcacgtgtaagtaatactagcttgagaataagctcttattctatttatgcagtaggccatgttaaacccggtatttacgattttgtagctccaatatattttactacagctcaaacagcaacctcaggcggggctaatccagatctatcttcagttcctttttcatttggtaatggtcctattcacgtcttaaaaacatgtaatgtttctcctgctagctcaacaaatatacaatttgccgctcaactagcacaaaattttaagtcagccaagttacttgagcaaagtgtcgctagtatgcttgtctcttgccctcattcaggaaatatgtacgtgacattaaaaccctataatgagctagtcaatgcaagtaaaacggggatgacaatgtctcccaatatccctttgaaagataaagaagtcgcaccttatatcacggtatctgatgcagctaaaaaaataactaatgcagtatgtaataacaattctgccgaggccttagagttttatgcaggacaatctttgggaaaatataatgggggaactgtttataagtcattatcattcaacctttgtgccaatggaaatatacctacgaatacttataaaggaagtattgatgtatcgttcctgattgaatga

SEQ ID NO: 302917 - DNA, 585 bp, Proteus mirabilis
gtgcagctccctttacctgcgggaattgataacgtcaaagtattagaacgtattcatcctgataaagatgttgatggcttccatccttacaatattggtcggttgtgccaacgtgcacctaagctacgtccttgcacccctcgtggtattgtcacactcttagagcgttgcaatattccaatgaatggcttaaatgcggtaattattggtgcttcaaatattgttggtcgcccaatgagtttagagctactgcttgcaggctgtacaacgactgtcactcatcgttttactaaagacttacgttttcatgttgaacatgctgatttggtggttgtggcagttggtaaacctaactttattcctggtgaatggataaaacctggcgctattgtcattgatgtcggtattaatcgccttgaaaacggtaaagtggttggtgatgttgatttcgcacaagcctctcaacgcgcggggtggatctcccctgttccgggtggtgtaggtccaatgactgtagcgactttgattcaaaatacgttgcaagcctgcgaagaatatcacgatcctgatataggaaataattaa

SEQ ID NO: 302918 - DNA, 177 bp, Proteus mirabilis; identical to SEQ ID NO: 302283

SEQ ID NO: 302919 - DNA, 177 bp, Proteus mirabilis; identical to SEQ ID NO: 302223

SEQ ID NO: 302920 - DNA, 273 bp, Proteus mirabilis; identical to SEQ ID NO: 300589

SEQ ID NO: 302921 - DNA, 285 bp, Proteus mirabilis; identical to SEQ ID NO: 298418

SEQ ID NO: 302922 - DNA, 180 bp, Proteus mirabilis; identical to SEQ ID NO: 297313

SEQ ID NO: 302923 - DNA, 144 bp, Proteus mirabilis
atgagaaaagttgttctacttttatccgatattgataatttagagactcattatttaaactttgctcaagaatatcataatgcaggctatgatttttttattattgatgcttcaacagatattgatgcaggtgaaaaagcataa

SEQ ID NO: 302924 - DNA, 180 bp, Proteus mirabilis
gtgagttttgctgatagtggtgatgcgcagagttttgcccaacaaattaaattactaagagaagagccacaacgtaccagtgagaaaatcaatcacgcccgctcattagttgaaaattattacaactgggataaacgggcagagacgattttacataccatcaataaactgattagctaa

SEQ ID NO: 302925 - DNA, 273 bp, Proteus mirabilis; identical to SEQ ID NO: 302551

SEQ ID NO: 302926 - DNA, 5769 bp, Proteus mirabilis
ttgaataaacaaactcttggtggtgttgcttgccaaatttatcaagaatttgatggcacccctaaatttactccggaaagtctagagaaagcattagtattattatcaaaacgtcatcccatgttgaatatagtatttcaccaacagggtacacaattttggtctcctaacccaaatagaaaatatgttacatatcatgattttagtaaattaccaaaagatgagtatgagaaaaaacttttacaattacgggaaaaattaagccatcaggtactaaatgttgaaagcggtcagttaattgattttcacatgatatcgctacctaacaacagatatcgtttatgtactaatattgatatgttgattgcagatggtacaagttattcattactctttactgaactttgtttattattgagcggagaaatactgcctcagttagatgagcactatgacttttaccattatttacaagataaaaaacagtatgaaaacaaagaatcagcatatcaatattggaaaaataaaatcccaaacctaccagactctcctcttctgccattatatatggatccagaaaaaataaataaaataaaaattaaacgccttagctggacatttagctcaaaagaatggaaaaactttagtaatttggctaaagaaaataatattacaccttccattgcattagcaacctgtttctcatctgtacttgcaagatggactggccaaaatagcttattactcaactttacattatttgatagaaagccattagcccctgcagttaataatattatagctgattttactaatgtcattcttttagaaatgaaaacagacaatcgaccattaatttcattatctaaagacaatcaaaatacatttattgaagcttggcaacattctgattattctggtattgatatcattagagaccttcgtaaaaatggcacccatccttatgggtgtcctgttgtctttactagccatattaatcaaccacttattgataaaaatatagaatctgtattaggttctataggatggggaatatcacaaaccccacaagtttggcttgatcacatggcaattaacaaaagtggaaatattgttttacagtgggattataacaatgacttgttccggaatgatgttataacaacaatatttgatgtttatatttctcgtatacgccaacttgccaacgatcctaatgcctggattgaaacccaacctgatttaattcctaaaaaacaattaaaaaatagaatatcagttatcaaaaaagataattcactattaccacatacactgcataagtctattttccataattattcaaattcatcaaaaattgctgtcattgatatcgactctcaggaatggagctacaaaaaattattatctaaagcaacaatactcagtgatcaaataatacaacaaggttataaaccagaagacagaattggtgtatgtatgccaaaaggagtagggcaaatcattagcgttctggctattttattaatggggggaacttatgttccgattgatgtactacaaccagaagaacgtataaaccgcattgctaaaaatgctcagctttcattactcatcgtatctgatagcgatccatcctattcaatctatgctacattttgtaacaggattgtttggcaaaaagttcaaccctccgagaataaaccactacacaatatagatatatctcctcatcaagcagcttatgttatttatacttcaggttctactggagagcctaaaggtgttgttgtatcccatgccagcgcaatgaatacctgccttgatctcaatcggcgatataacatttcagacaaagatcgggtacttgccatatcagcactacattttgatctgtctgtttatgatattttcggtgttttaaatgccggagggactcttgtattagttaaagaagatgagcgccgtaatcctgatgcatggttacgacttattaaccaacataaaataacactttggaacagcgtacctgcactgtttgatatgttactaacctatgcagaaggaatagggtcatccattccacaatcgctgctattaatctatctctctggagattggattgggcttgatctcccgacacgttactataatttctgccctgatggacaaatagtcgccatgggaggtgccacagaagccgctatttggtctaactattttaatgtcacaacattagacccatcctggagctcgataccttatggatatcctttatccaaccaacgttatcgtattgttaatgctagaggagaagattgccctgattgggtatcaggagaactttggattggtggtgcaggcgttgcgttaggctacctaaacgatcccgaaaaaacagcacaacagtttgtaaaacaaaatggtgaaaattggtataaaacaggtgatatgggaagatatctccctggcggtatacttgaatttttaggaagacgtgaccgccaagttaagattggcggataccgtatagaaccaggggaaattgatgctgcattcaataagcttcagggtgtgcaaaatgcgattacactatgccttggtaatggtaataaagaaaaagcattacactcttttgtgatactaaattcgggtaattaccaggatattatcagttcaaatagcaccttttctcccctctactatctgcgctcaaccccaataaatgtacaacaacaatcccaagaaacggcaatcatagctggatttttatatgattatcttactgaacaaaatattgatttcgacaacctcttgtcagaaaaaaaatcagcagatgaccatagcattatcgctagctatcagtcattaatggctaattggctaaatttaatagcacaatatccacaaactacactcaattcccccccaactaatagtacccagcgaacgctaatagaaaatttgcagcgccacaaaaacaatttaacagacatactcaaaggtaaaaaatcagctctaacactatttgatgatccctattggtcaccagaacaagtcactatgcgtattgatggaatgcactactccttagaaaatttactacaacaaataagagaacttcatcattcactaaaaaggccaataaaaatcattcaattaggtgctagaagcggtatttcagcaaattatattctgcaacgattacccactaatatggttaccctactgctaactgatgagtctctttcaatggtaacgcaagctaaccaaaatttatcagattatcaaaatagttatgctgagcctcttacagaagtatttcttcataaaaatcgatatagtgcagatatcatttggatgaacaattatcttcatcgattagacagcccacaaaaagagatacaaaaattcgtttcactctgtgctccgagtggaatgatttttatacaagaagtgttacatgcccctgcacaatcactgataagcatctctttattacaacaaaatggtagtgatcctgctgatgaattattaacagcaaaaaaatgcaaagatatctttagcgcttctactgcgacttataaaagtgaaggagttaacggcgaaatattgacacagttataccaagcaccagaaaaaatttatttaccagataaaaataagctagagcatgatttgcgccaatttttaccagactatatgatcccaaaacatatttattttctaactgagttccccttaaccgcaaatggcaaaatagataaccaatcattaaaattgtattgtcaggaataccaagaagaatacctaaatcaacaacctatcaatggtaaagaacagatcatcataacaatatggcaaaagctccttggcaccaacaagatacaccgtcacagtcatttctttcgtgaagggggagatagcctagttgctattcgattgatctctgatttaaaccatattggctaccaagttgaactggagcatatctttgcttatccgatcctttctgattttgcacaaaatataaagcagagcgaagttttcgaaaaacagccagcaatttcacataacgaggcgtatagatacaatccatttccactcactgatattcagcaagcttacttagttggacggcaaaataattttacacttgggggtgttggtacacatttttttgtccattttatagcggaaaatttagatgtacctaaattagaacgtacaattaatcagttgatttctcgtcatgatatgttacgtggtgtcattattaatggacaacaacaagtacttaaaaaagttccttattattccgttaaaacgcattatatccctacagaaaaaagtgacgcttttctagtattacgagctcaacttgctaacattgtttatgatccagaaatttggcctttatttactattcaagttatcaagaccaaagaacaaccagatcatatttttattagccttgataacttattccttgatggaatgagtatgcagatatttttcagtgagctaaaaacactgtatatggagccaaatcaccaatttatccctctagatattacttttcgagattatattgattgtgatgcctatccgattaacacacaaaatgattgggaatattggttaacgcgtttaccacaattaccaccagccccacaattgccactaataaaagatccagcacagattgtgcaacctcgcttctcgcgtttacaaacatcattatctacttctgtttggcaagcactacaacaagttgctcagcaaaataatgttacgccagcagcacttttgattgctgcttattgcgccacattatccgcatggagtaaaagccctgagttaacaattaatttgacattatttaatcggcatcctgtacatcctcaaataaatgaagtacttggtgattttacctcattacaattactcgattggtatacctgtgatctttggtcaaacagtatctcaatgatgcaaaaacgtttacataaagatatgcaacatcgtagtgtttcagccattaaagtaatgcgtgaaatggcaattcaacgacagatgtctcatatagagatacctgtcgtttttacctgtgcattgggctataaacatgatgaaggttttctttctcatcattcatggctaaaacctgtttggggaatatcacaaacaccacaaacatggctagatcatcaagtatatgagtcagacggtgaattatatttaaactgggattttgtcgaacaattatttgactacacaaccattttttccatgttccagcaatatgaacatatactcactaaactggctactgaaccacaatcttggcaattgccactaaataaacttataccaagatgcaataatctcgtcatcaccccagttttcaatgccaaaaataatcaaaacacacattataaacaatctactgatacacaaaaaacaggtcagacaatacaaaaactacaacaacttgttaagcaagttattggaataacgttagcacctgaaacaaattttttcgaagcaggtgccagctctttacaattggttcaacttcatgcagcactacaaaaaaatggctatagccatattacaattactgatctgttcgctagtccaaatctaagtacattagcgcaattgctttggcaaaacacttcaccaacatgtgagcaatattccgaccgagacaaacacaaaaacaagagaaagaaacggttacaactacgaactcatagtagataa

SEQ ID NO: 302927 - DNA, 1878 bp, Proteus mirabilis; identical to SEQ ID NO: 294198

SEQ ID NO: 302928 - DNA, 366 bp, Proteus mirabilis; identical to SEQ ID NO: 294197

SEQ ID NO: 302929 - DNA, 390 bp, Proteus mirabilis
atgtctaaatcggcaaaaggtacgacagaacggcatggacggaacgtaaaagctaaatctggtttaaaccgctcaatactggagcagggctggtatgaaatgcgccgtcagcttgagtacaagcagctctggcgaggaggtcaggtactggcaataccaccagcctacaccagtcagaagtgcgcttgctgtggtcatacagcaaaggaaaaccgccagtcacaaagtcaattcgagtgccttgaatgtggatatacagcgaatgctgatatcaacggggcacgtaacattttagcggcaggacatgccgtgctagcctgtggagggagggtgcagtcagaccgcccgtcgaagcaggaacccgccgaggtgattcagagatcagtctga

SEQ ID NO: 302930 - DNA, 369 bp, Proteus mirabilis; identical to SEQ ID NO: 297807

SEQ ID NO: 302931 - DNA, 483 bp, Proteus mirabilis
atgagaattggacacggttatgatgtacataaatttggcggagaaggcccaattattattggtggtgtgagaattccttatgaacaaggtctactagcccattcagatggcgatgtggtactacatgcggtgacagatgccattttaggtgctgttgcgatgggcgatattggtacattatttcctgatacagatccggcttataaaggtgcggatagccgagtattattgcgcgaagccttttcaagagtgatggctaaaggttaccgtattggtaatcttgatgtcactattattgctcaggcacctaaaatgctacctcatactccacaaatgcgtgtcaatattgctgaagatctccattgtcatgtcgatgatatcaacgttaaagcgaccactactgagaaattaggttttgtaggacgcaaagaaggtatcgcttgtgaagcggtggtgttattaatcaaagagtctttatcttaa

SEQ ID NO: 302932 - DNA, 1815 bp, Proteus mirabilis
atgagcaatcaacccccattattatcaatgcttccattaacacaggagcaattgaataaattacaggatgtgacgaaagacttaactccagcccaatttgcttggctttctggctatttttgggggcaattcaatcagcattcatccactaaagatgagctggtaagtgtacaaagtcaggttccccaacaagaaaccatcaccgtgatatcagcatcacaaactggcaatgcacgtcgtttagctgaacaattacgcgataaattggttgataatcaacttaatgttgagctctatagtgcgagtgaatataaatttaagcagatccacaaaacgacaaccttaattattattacctcaacacagggggaaggtgaacctcctgaagaagccattgcattttataaatatttgcactctaaaaaagccgcgccaatgaaacaaacggcttatgctgtactgagtctcggcgatagtagctatgaacatttttgccaagcaggtaaagattttgatcatcaactggcgcaacttggcgcgaccagtctattagaaagattagatgcagatgttgattatcaagctgacgctgataaatggataactcagctgactgatattttaaaaatacgtgtacctgagcaaaacactcaagtattgcaacaaacacaatcaggaacaaccgacagtgtcgataccgcacgctaccatcgtgatgcaccttttagtgccactttattaactaatcagaagatcaccggtcgacattcagataaagatattcgtcatattgaaattagtctagcaggctctgaattgcaatatcttcccggagatgcactaggagtatggtttaagaattcggaagaaaaagtggatgagcttattaccctattatggttaacgggggatgagcaggtaaatgttaaatcacaaacattaacgttaaaagaagcattattgcatcatgttgaattaactcaaaatagtgcaccaattattaaagcgtatgcccaattatcccgccacgaagagttattatcgctggtggctgataaaagcaaacttcagcaatatgcgcaaacctacccaattaatgaaatggtacgtcaatatagtgcgcaacctaatgctcaagagtttattgatatattgcgcccattaactccacgtctttactccatcgcttcatcacaacaagaagttgatgatgaagttcatcttaccttaggtgttgttcgttataacgtcgatcagcgtgcttatacaggaggtgcctcagggttcttagctgatcaacttcaagaaggcgatacagtaaacgtttttattgaacgtaatgatcattttcgtttacctgaagataatcaagtccctgtgattatgattggcccggggacggggattgcgccttttagagggtttatgcaacaacgtgaaagtgaaggtgcgacggggaaaaactggctcttttttggcaatcctcactttgtagaagatttcctttatcaagtggaatggcaacgttatgtcaaaagcgggttgttaacacgtattgatttagcatggtcgcgtgatcaagccgataaaatttatgtgcaagataaattacgggagcaaggtcaggaaatttggcaatggttacagcaaggtgcttatctctacgtttgtggtgatgcatcaagaatggctaaagatgttgaacaaacattgttagaaatagtaatgacccatggcaataaaaatattgaacaagcagatgattatttaagtgagctacgtttagcacgtcgttatcagagggatgtttattaa

SEQ ID NO: 302933 - DNA, 1368 bp, Proteus mirabilis
atgcaaaaagagaataaactttcacgaggactatcagggcggcatattcgtttcatggcgctaggctctgctattgggacagggcttttttatggttcagccgcggcgattgaaaaagcaggccccgctgtacttcttgcttatcttattggtggtgccgcagtatttatggttatgcgcgcattaggggaaatggcagtccatcatccagtggcgggttctttttcacaatatgctagccattatatgggaccattagccggatttttaactggctggaactacgtttttgaaatgcttatcgtttgtcttgccgacgtaaccgcatttggtttttatatgaaactttggtttcccgatgtcgaccaatggatatgggtattaggcatagtctgttttattggtgccttaaatttatgtcatgtgaagatatttggtgaaatggaattttggctctctatcgttaaagtgactgcgattattgccatgattatcggtggtgtagccataatgatctacggctttggtcagcaaacagaacatccaattggtatttctaacctatgggagtttggtggctttatgccaaatggtatagaaggcattattgcctcactcgccattgtgatgtttgcctttggtggtattgaggttattggtattaccgccagtgaagctaaagatccagaaaaaacgatccctaaagctatcaatgcggtgccatttcgtatcttactattctatgtactgaccatttttattttaatgtgcatcttcccatggcaacaaattggccataacggtagtccatttgtacaaattttttccaatctgggtatcaattcagccgctaacattcttaatcttgtggtgatcaccgccgctatctctgcgataaacagtgatattttcggtgctggtcgcatgatgtacggcatggcacaagaagggcaagcacctaaatcctttatgaaactgacgcgtaacggtgtgccttggatgaccgtattagtgatgtcagtggtgctattattaggggttgtgcttaactatcttattccagaaaaaatcttcgtacttattgcctctatcgcgacatttgccactgtatgggtctggttgatgatcttactttctcaagtggctatgcgtcgccaaatgagtgctgaagaggcgaaaaaactaaaatttcctgtaccattttggccaatagcacccgccattaccattatttttatggcatttgtgatagcaattttaggctactttgaatcaacccgaatggcattaatcgttgggttagtatgggtggctattttaactgttggttactatattggtatcaaaccaagaataacgcagaaataa

SEQ ID NO: 302934 - DNA, 1182 bp, Proteus mirabilis
atgacgcaaagtaataagtgttttaatactcaagcaatacattatggctactctccgttagattatcagggggcattggtgcctcctgtttttcaaacgtccacttttgcatttcccacggctcaatatggtgctgattgttttgctgggaaagaaaaagggcatttttatactcgtatatctaaccctacattggatttattagaaaaacgattagctcagttagagcaaggagacgcttctgttgttttttcttccggtatgggagctatcacttcaacatgttggtcattattgcagccaggagatgaactcattgctgatatgaccgtttatggttgtacttttactttctttaatcatgggctggctaaatttggtatcactatcaaacatgttgatttaaccgatcctgaaaaattagcagaagcaattacagatagaacaaagcttatcttctttgaaacaccggctaatcctaatatgcgggttagtgatattgaaaagatcgctaatattgcgcaccaacatgatgttttagtcatggttgatagtacttactgttcaccttatttacaaaagccactaaccttaggcgctgatattgtcgtacattctatgactaaatatttatcaggtcatggtgatgtgatggcgggcgcaattatcactaattatcaattagcagataaaattcgcgttgagggcttaaaagatatgacgggggcttgtttatcacctcatgatgcagcactcgtcttaagagggataaaaacgcttagcattagaatggaaaaaatttgccagaatgcgcagcgtattgcgcaatttcttgaaaatcatcctaaggtggcaacgatttcatatcccggattaaattcttttcctcaatatgaacttgccaaaaagcagatggcgttacctggtggcatgataagtatggagttgaatggtggaataaaagctggcagagaatttcttaatcgcttaatgctttttactcgagcggtgagtttaggtgattgtgaatcattggctcagcatcctgcgactatgactcatgcgacatacagtgcacaagagcgtcaacgccatggtattagtgatggattaattcgtttatcaatcggtcttgaagacgttgatgatttaattgctgatttaacccaagcgctcgcttaa

SEQ ID NO: 302935 - DNA, 399 bp, Proteus mirabilis
atgagtgaaaataatttaagcccaaatgaaaaaccgttgttatctaatgaagataaaattcatttagaacatttactagaaaaaataaggcctttattagcattaaagcgcctagataatattgttgatttattatccttagcctcagataccgtcgatattatggataacgcaacggtagaaaaattggcggttgcttttgaagaaacattaattccggtttgggaattaactacggcctttaatatggctaaaaaagaatctctttatcaggataaaaaatataccttaggtgcgactttttcattattaaaaaatcctgacaccttaaaaggattaactattgtattaaggacattacaaattattggggaaaataatcagaaaatagaagtttaa

SEQ ID NO: 302936 - DNA, 294 bp, Proteus mirabilis
atgaacctcgcaaacctaactcaagaagaaaaagacaagattaatgtcgatttgaccgcaagtggtgtcgcatataaagaacgactcaatatgccagttgtcgcctcagaagttgaacgacaacaaccagcacatttgagagcatactttaatgaacgattagcgttttatcgtgagagaagtaaggcgctacctgacagtaaatcggtgcattatttgaaaattgagcaaattataagactttatttattgataacgtcatattgtaaactccatcaccgttcattcctctga

SEQ ID NO: 302937 - DNA, 1878 bp, Proteus mirabilis
atggctgacgtaataccaaatgtcgtaatttcaatgcccaatcaattatttacgttagcgcgtaaatttcaggctgtcagcaacggtaaaatttacatcggaaagatagattctgaccccacgctacctcagaaccaaattcaggtttatttagaaaatgaagatggctctcatattcctgtgcctcagcctttaattatcaatcaggctggttttcctgtttataacggtcagattgctaagtttgtaactgtggaaggtcacagcatggctgtttatgatagttatggagcacaacaacactatcaccctaacgtattaaagtatgatcctgatcaactgagacaggagttattatcacctatcggcgcctcactaattggcactcacgatggtaataacgttcaagatgagctggaaatccttaaacttggtcaggtgaaaataactgattttggtgctattgctggtcaagattgctctgacgcgtttgagctagcatttaagacaggtaaaacagtaatcgtccctgacacttcttacgataagccgtggataataactagaaatatacagttaccgcttgtcgcgaaaataattggaaactcgccggcattcccatttggttatgaggaaagatttgaatttaatgggccatatatacaattcaagggagggagtttcatttgtggcgatggggttatatcacgcgttttcttatattgcaaaaacttgatgttgatgggtaggtacggcgctgacattaatgataaatctattctagataatgctggtgtagcgttcaatggaacagctggaggatatttggacaacatatcatttgctgggttacagtacgcaatgattaatgatcattcatatttccttaacatgtcaaacatcagagcaaataataattattgggtgtttaagttgaatggcttcaactcaagctctattgaaaactattttggttcttataatacaatacatatagatttaggagaggacgcggcgagaagttcacttcgtaacatcggtataaatatgaataccggcacgaaggtgggagtgcgatttgagggtggcgttagcttagatggatacatttactttgagaacttcggaactcctgcatctggtagcgtttgccttgctgttaattttgggcgatacagtcagagaagcatcaatataagtaatgttttatttcatgcaaatttgtgtgattacgcaatgacgatcggagctaccacaaacaataacgttagaatatcaggtaaatttgattgttgtgattggtatgaacctaaaatagcaaaaataggatttggtgcaactcctaggtttaatggtgaaccaacgtacccaactgctgtcattaaagatatcaactttgatactcacgctggtttgtctttatctgatattcaaaaaccatccaactctccatacagaaaatgggtgaagtcaccatttggttcgtggagagagacaaagaatattgatatatctgggccctcttacaaaaatatacaattatctagtgataatctcgttgatagtaatgttttgtttgattacgacgaagggaaaataataattccaaatgatggtgtgtataatatttcactgtctgcaacattatcaaatgttaaatcagagtatcaccgtggcgctaggatagatattcttctaaatggatccatcatctcatcaagtttaacgtcaataaacagacctgattctggggcgtcatattctaatatcagtgcttctgtttctcggtatatcacatcaggtagctctattcatatcagaggaatgaacggtgatggagtttacaatatgacgttatcaataaataaagtcttataa

SEQ ID NO: 302938 - DNA, 543 bp, Proteus mirabilis
atggctggacataaaaacaaaataacccaagagcttgccagaaagttatttagatatgatgaggaaactggaattttgtatcacagaaatcgtgataaaagcatgttctcaaacaacgctcagtatcttaactggaatggaagataccctgatacacaagttggctcaaagacaaagactggatacctctgcacaagaattaataaaactgattactacgtccattacattatatgggtttattgccatggtgatttttctaacatggaaatagaccacataaacagaaataggagtgataacaggatatcaaatttaagattgtgctctcctttgcagaatgcgcataacagaagtaagcacaggagaaaggacggaagaaaaggcatttacaagagaaatgattgcaatacttggagagcgataatcactgtaaatggtaaaacagtaaatattggtagttataagacagagcaagaagcaattgatgcatataaaaaagccagcctaaaggctcatggtgaatttagcattttcaattaa

SEQ ID NO: 302939 - DNA, 171 bp, Proteus mirabilis
atgacaagtatatcaactattaacgtaccattccacggtaacaatttatgtatcgtaacccatgacggggagccatatgtaccaatgaaacctattgtggaaggtatggggttagattggaaaagccaattcagcaagattaaatcaaggttttctaaaggaatggcgtaa

SEQ ID NO: 302940 - DNA, 165 bp, Proteus mirabilis
atgaaaggagcgagaaaactaccacaacttaactttagatggcctgaaaaggatattgatttagttaagcagtgggcagagaaaaatggaagatctttaaataatgaagttcacagaattgtgatggattttttgaagagagaaggcgaaaaaagtgccaattag

SEQ ID NO: 302941 - DNA, 252 bp, Proteus mirabilis
atgagcagagaatatccacagttcaaattaagaatgccaccagaaacaagagataaattaaaagtaagagcagagatgaacgggagatctgttaactccgagctgttaaaaataatagatgatgcgctatcgtccccaccctctattagtggctataaaaatgacaccgaaaaactagcagatcaccaagcagaagaagttaaaaagatggtgttcgatacattagttaaactatataatgataaaaaataa

SEQ ID NO: 302942 - DNA, 465 bp, Proteus mirabilis
atgagtaatggaacttcggataaaatttatagtgacctaaaagtattcttaaagaaatttattaaatttgcacttgtgcttattgttataattattgcctcaggtgtctcatattatttatatgtcgaacatgagagaaatcagagagagtctcaagtaattaataaagcgctaccttttactcaatcaccagcaccatgggtgtttgttagggatgattttggaacaaaaaaaataattaagttgtggatggtggaagatactaataaccatgcaattgttcaggttgatggtaagtattcggtatttcgcacaagaataaatagttataaaaatattgaattttaccatgaggctggagatgcctgtaaattcgttgatgtaaaaatagaaaaaggaaaagggataacctccatatcgtgtgactttaaagattattatggtggacttgttaagagaaactaa

SEQ ID NO: 302943 - DNA, 477 bp, Proteus mirabilis
gtgaaaaaattaattatcttttcattctttctgctaactggatgcgcaaaagttagtgattatcaagcaaagtgtgaaatgcaaagtgatcagctttctgttgttgctgactgtttaaataaatcagtattatcagactcaagaatgagcgattctccactaacaaaaatgtatgttcttgcagctaaataccttggcgaaaaagttgatgcaggagaaattagcgattctcaagcaagattagagttgcaaaacttttatatgaagctacaagcacaagaaaattacaattcaatggttcaatctcaagctatacagcaaggattattgaattaccaaactatgcagaccatgcaagcaatagaaaataaggctaatagaccagatccttactacccaccagttcagcaacatggaaacgtatcaaccagctgctataagcttggcaataacgttcaatgtaatagctcatattaa

SEQ ID NO: 302944 - DNA, 378 bp, Proteus mirabilis
atgagtattggtaaatgggttcttttaattggctctgtgatttgtgttttttcacttcaatacttagttgtaaaagttggcgagttgagtaaagaaaaccaatcactcaccgagcaactctcacgccaaaactcaatcacagaaaacgccaaccgtacattcaggattatcaacaatgtctcatcacttaatagcgaagaacggaataggtcagccgtggattctgaaaaagttaaaacggttatcaagactgttcttgtcaataatgattgcgccaatactgctattcctagtgatgctcttatcaggatgcacgactattcagaaagaatacgtgccagtggaacacatagcgataccggcacatctaaccgctga

SEQ ID NO: 302945 - DNA, 318 bp, Proteus mirabilis
atgaatcatatgaaagaaaaccccgatttatgggctcaaatgcttaacctcatcgttatgaataaagagcaaggtattagtgcaattctagctggctcaatggcagttcttcgaggtcgatacaatggcggtggatggggcaagactcttattgacggattaatgtgcgcattcttcgcttggtttgtaaaagacctattaactcttcttggcattaatcatgagttggcatatctagccagtgtattcattgggtatgtcggcgttgatgcgttaagtaaaatcattaaaggcagagcgggggtgaaaagtgagtag

SEQ ID NO: 302946 - DNA, 123 bp, Proteus mirabilis
atgaactgccaatcatgcaatagacagctaacagatgatgaggtttatgtgtgtgctcagtgtgctgatgaatacgctcatttggaagtgatggataaaatcaaggaggaaaagagtggctaa

SEQ ID NO: 302947 - DNA, 1530 bp, Proteus mirabilis
gtgaagacaataaatacctatttttatcttgatgaaggtaaagagatttataaacgcctgatagtgagtgaagacaataaatacctattaggtgcggtattggttggggacacggaagattatggcaatctgttacagttagcattaaatacaattgaattaccagaacatcctgacacattaatcttacctgctcatgctggaagtaaaccggcaatcggggttgattcattacctgaaacggcacaaatttgctcctgttttgatgtaagcaaaggcgacattattcaagctattgaacgaggttgtcatacggttgcggcgattaaagcagaaacaaaagcgggaacggggtgtgggggatgtattccgcttatcactcaagtattaaatgcggaactcacaaaacaaggcattgaagttaaccatcacctttgtgaacactttcactattctcgccaagagctttatcatcttattcgtgttgaagggctgaaaagctttgatgaactattgaaaaaacatggtcaaggctatggctgtgaaatttgtaaaccgaccgtcggctctctgctggcttcgtgttggaacgactatattttgcgtgatgacttagttgcgctacaagatacgaatgataacttcctcgccaatctgcaaaaagatggcacttactctattattccacgctcccccggcggtgaaattacgcctgcgggtattattgcgattggacaaattgcacaagaatacaatttatacaccaaaatcacaggctctcaacgtatggcgatgtttggtgcacagaagcaagatttaccggcgatttggcagaaattaattgccgcgggttttgaaacaggccatgcctatgccaaagcgatccgtatggtaaaaacttgtgtaggaaacagttggtgtcgttttggggttggcgatagtgttggattaggtgtctttttagaacatcgttataaagggatccgcacgccgcataaaatgaaatttggggtatctggttgtacccgtgaatgctccgaagctcaggggaaagatgtagggattattgccacagaaaaaggctggaatctctattttggtggtaatgggggcatgaaaccacgtcatggcgatctattcgcggcggatttagatgaagaaacgctgatccattatattgaccgctttatgatgttctatatccgtactgcagacaaattacaacgaacctccgtttggttagaaagcctagaagggggcgttgaatatttacgtgaagtcattattcacgacaagttaggcttaaatgcacagttagaaaaagagcttaaagttttacaagagcgcgtagcctgtgagtggcaagaaacccttgattcaccacaagcattgaaacgttttgcgcactttattaacaatccgatgcccgatcctaatatacagatggtaaaagagcgtgctcagcatcgtcctgcccgcgtgcatgaacgtattgatatcaaaatggtaacagaggagacgcaatcatga

SEQ ID NO: 302948 - DNA, 1503 bp, Proteus mirabilis
atgtggtggccgtttaagaggcgaaaaacagaaccactcgcaccggttaaacggtcagctttcacaactgacttatatcctgcactggcgcgagaacagggctttgatgggattaatttaccccaacccacaattgcaggtgttgcgatggatagcattgatagctacgtgccctcatttaaaggtgaacaagtttacggtgtgccagagtcacaggcctcatggtatgcctcacaaatgtttatcggcaacaatatgtgtgcggttatcgctaaacattggctggtggataaagcctgcaatatgcctgcgcgtgatgcgatacgtcagggttacgatattgattgtgataacgacgatgatcgcgctatcagtaaaaagcttcgcaaacgagataaaaaataccgcattacacatcagcttaaagagctggttcactttgggcgtgtatacggtggtcgtttagcattattcgttgtggagacatcaaacccgaaagagtggtatgaaaacccgtttaatatcgatggcgtgaccaaaggcatgtacaaggggattaaacagattgatccccaatgggtaacggctgatttaacggacgcgaatgttcaagaccccgcgagtatggacttctacgagccaacatattatgtgattggtggacgcaagtatcacaagtctcactttattaagtttgtaccgttcccggtgcctaatgtgcttaaaccaatgtacaactactttggtgtatcagtgccagagcgcatttatgagcgtgtctatgcctcagaacgtacagccaatgaagcaccacaactggcaatgaccaagcgtttacttacgatggggattgcagacccagaaagcgctgataaggacattattcgcgaaaacatgctctattttatggagatgcgcgataactacggcgtacaaatgaccggtagtgaagatacggttcaacagttcgacacctcattagcggatttagatgccacgattatgacgcaatatcagctggtggcatcggcttccaatgtgcccgcgacaaagctattaggcaccacaccgaaaggctttaactcaacgggggaatacgaagaagctaattaccgagaagagcttgaaagtattcaatcaaacgaccttgaagagctattacagcgtcattacgacatgttgatgcgtagcgaggatttacctgtgacagaaatctctatcacatgggcaccgcttgatagcccaacggctattgagagtgcggatattgagcttaagcaagcacaagccgactcagcctatgcaacaacgggggcgattgatgggctagatatccgcaagaaactggccagtgataaagcgtctagctattacggcattgaagtgaacgaggcagattatgtcgaggcgaatacgagtacgaacgaagcgagcgcaatgggcaacctctcgccaagcagtaatgaaagggaagcccctgcagtattcggtagcgccctctag

SEQ ID NO: 302949 - DNA, 1146 bp, Proteus mirabilis
atgaaaaaagaaactcgttttaaatttaatgcgtacctcacgcaactcggtaaaatttacggtgttagcgcacaagcgtttagtgatacaaaggttcaaattgaaccgtctgccgcgcaaacgctggaaaccaatattcagcagtcagcagaatttttaacacacgttaatatcgtgcccgttgatgatcaagtgggtgaggccatcggtttaggtatcggctcaactatcgcaggcactaccgatacaacagcaaaagagcgcgaaacaagtgatccgattaagctgaccaaaaatagctatcattgccagaaaaccaattacgacacccaccttgattacgccaaaattgatatgtgggcgaagtttaccgactttcaaacccgtatccgcgatgcgattatccgccgtcaggcattagaccgcattatgattggttttaatggtacacaccgcgccgataattctgatcggacaaaataccccttactgcaagatgtgaattcaggctggttacaaaaagtacgcgagcgtgcaccagagcatgtgatgggcagtgaaacgaaagacggcgcaaccacagcccagcctattctggtcggtaaaggacaagcttatcaaaatcttgatgcattagtgcaagatacggtcgatactgcgattgatcctgaatatcaagatgataccggtcttgttgtgatttgtggccgtaaattattagcagataaatattttccactggttaataaagaccaagataacagtgaaaaactggcggcagataccattattagtcagaaacgtattggtggtttgccggctgtacgtgcgccgttctttcctgacaatgcgttttttatcacccgccttgataacttgtcgatttatttccttgcggattctcgtcgtcgtcaagtgttagataacccaaaacgcgatcgcatcgaaaactacgagtccgtcaatgaagattttgtggttgaagattttcgcggtgtggcactggtcgaaaatattgtttttgaagatgtaaaagagacatcgccagaaacaaaaaaagagggggtagcttctgaaaatgaagtcgtcaaagacgacaaagcagtaacagaagaaacaccaactgaaaataaaaaggcgaaataa

SEQ ID NO: 302950 - DNA, 282 bp, Proteus mirabilis
gtgtcattaaatgaaaatcaggaacgtttgatacctgaatttaaagcctttgccgaaaaaatgggattggatttaccgcctgactcaatgtggtcaatggtgatgaacggtatgcgcttgagttatggcgatgaagtgatttggtttgagaacgggaaggttcaaatttcatcgacgaatagtgaaaacgttaattttgaagaagtaaagcaaaagaatatctcaaatacacgagatagggtaatggctaaggttaataaattgagaggaataaatgattaa

SEQ ID NO: 302951 - DNA, 165 bp, Proteus mirabilis; identical to SEQ ID NO: 299452

SEQ ID NO: 302952 - DNA, 336 bp, Proteus mirabilis; identical to SEQ ID NO: 302566

SEQ ID NO: 302953 - DNA, 1134 bp, Proteus mirabilis
atggctgcccgaccacgaacccataaaattattatccctaatctatatcgaaagctagataagcgtaatggcaaaatttattggcaatataaacatcccatcaccggtaaatttcatagcttaggcaccgacgaacaagaagcgagagaaaccgccattcaggccaatacaattattgctgaacaacatactcgacagttattaagtattaatgaacggttatcaaaaattaagacaaacaagtctgaaatatctgtcgatatatggatggataaatatttagatattcaaaaagaaagattagatatcggtgaattaaaaattaattcttatcgacaaaaaatgaaacctattaatttattccgtcagtattgtggtacgaaaatattaaaagagataactgctttagatattgctgaaataatagattccgtcaaagtattagggcattcaagaatggctcaggtcgttcgcatggtgcttattgatgtatttaaagaagctcaacatgctggctatgttccgcctggttacaatcctgcgaaagcaactaaacaaccacggaaccgagtgaaaagagaacgcatgacattggacgaatggcgcactatttaccagcaagctaaaaaccaccctccttacctgcaatgcggcatgttgctggccttaaccacaggtcagcggatcggtgatatctgtaaaatgaaattctctgatatttgggatgatatgttacatatacagcaagagaagacgggcagtaagttagccatccctctctcactaaaatgtgaagctatcaatctctccttaaaagatgttgttgctcaatgtcgtgatgctgttgtaagtaaatatctcgtgcattatcggcataccaccgcacaagcaaaacgaggcgaacaagtcacaccaaatacattaaccacaacatttaaaaaagcacgagataaatgtgggttaacttgggaaaaaggtacggcacctactttccatgaacagcgatctttatctgagcgactttatcgagaacaaggaattaatacacaaaaattattggggcataaaacacaaaatatgaccgataaataccacgacgatagaggaaaagaatggcaaattattgctgtttaa

SEQ ID NO: 302954 - DNA, 231 bp, Proteus mirabilis
atgaataaattatttaaactattaataacagcttttttattaataacaatgttttcgcttattgttatgccaatgagtgctaaacaacaatatatatttggaataattaatattctgctgttatttattattggctctaaaaaatcaaaaaaaacgattattaataatgatttttttatcattgttaatgtctacacgttatctgtattggcgagcaacccacacacttaa

SEQ ID NO: 302955 - DNA, 906 bp, Proteus mirabilis
atgtctaaaaacaataacgatggatccctacagcagatgcgattatttcctgttgcagaggtgattgctgacgatatccctatgggggttttgaatgatgggactccgtacctgacattatatggattagctaaattatgtggtattgatgacactccacttagggtatttacatcaaattgggaaaccgaaaaatataaaccaagaggtcaaaaagtatcatcatatttaacttccagaggatatgaaaatgtagataggctttatactagagttgtaaactcatcaggtatagagacccacgcttaccctgactacgtatgtatggcggtactacgttattatgccttcgatgcttcaaattttgataacagcatagcaattgataactttgtcaggttagctgaatatactttaaaaagaatgatttatgaaaaatcgaactacaaaccaagtagctctattgatatttcattcaacaactatcgagatcgagtcatgatgaatgaccagattccagtaaattacttttctgttttcagggaatgcgcagacatagtaattcatctaataaataaagggttcccaattaacgacaccacaatgccagatggtagcgttggacaacattggggtaaatattggaatgagaacaaattgtttgatgagtatggagaaagaattaagtttagccatacatttccagacagctatcgacaatcaaaagcaaactcatttgttaagccatgggtttaccctatagaggctttaggtgaatttagaaaatggttatataacaattacgcaatggataagttagaggattatctaaagcgcaagaaatttaacaacatagatagcctattagaagcagtaagaaaaccagagcttcccaacaaacattag

SEQ ID NO: 302956 - DNA, 246 bp, Proteus mirabilis
atgaaacggcatcagaaaatgcttgtcaggatatttagtagcaacattcttacatttctatttcaacttatcgcttggtgttcggtatcgcttttaatcgcgatagataaattaggcgagtttaatcttcatgtttatctaggggcattaccaatagtgattattcaggcgttagtgatgacatgtctatgcaggtgggtgtttaagttttgtacgaaaaatattgatattaaaggaggcatctaa

SEQ ID NO: 302957 - DNA, 228 bp, Proteus mirabilis
atgcagggaactgagtggaacaatacaaacatggaattgccagaagatggtgagccagttttacttatcagcgatggtgaaatattagccggaatttacaggcttgaatggaactctgtagaaggtgaaatgcagtggtttcttgatgatgttgtggcgccactaccaatacctgatgcagattactggatgtatttacgcgatttgccaatgccagagggtgaatga

SEQ ID NO: 302958 - DNA, 1200 bp, Proteus mirabilis
atggcaattaaactcgaagtaaaaaacctatataaaatatttggtgagcaccctaaacgtgcctttgaattattaggatctggtatgaacaaagaccaaatctttgataaaacagggttaaccgttggtgtgcagaatgccaatctggccattgaagaaggcgaaatatttgtcatcatgggattatcaggctctggtaaatctacattagtgcgccttctcaatcgtctgatagatcccactaaaggcgaagtccttattgatggtgaaaacatcaccaccatgtctgataaagatttacgacaagttcgacgtaaaaaaatcagtatggtgtttcaatcattcgctttaatgcctcatatgaatgtactcgataatacagcatttggtatggagcttgcaggcattagcaaagaagagcgctatgaaaaagccatggcagcattagagcaagttaacttaagctctcatgctcaatcttggccggatgagttatccggtgggatgcgacaacgtattgggcttgctcgtgcactggccaatgatcctgatatcttattaatggatgaggcattctccgcacttgacccattaatccgaacagaaatgcaagatgagttattgagcttacaaggtgataaacaacgcaccattgtgtttatttctcatgatctggatgaagccatgcgtattggcgatcgtatcgcgattatgcaaggtggtgtggtggtacaaatcggtacccctgatgaaattcttaataatccagccaatgattatgtacgtaccttcttccgtggcgttgatatcagtcatgtatttagcgctaaagatattgctaaacgtcgcccagaaacactactgcatattgcgccaggttttggtccccgttcagcattaaaagtactggaagatgaagatagaaactttggttatttaattgagcgaggacggaaatttgcaggtattgtttctgtcacttctcttgaagaagcattaaaagcgaagcaacctattggatccgctattttaactgaaccttgtgcgattaatggtgatacaccattaaatgaactgatttctactgttgcgcaatctccctgtgcgatccctgttattgatgaaaaaaaccgttatatcggtttaatttcgaaaggaatgttgttacaagcactggataaggagacaccaaatgagtaa

SEQ ID NO: 302959 - DNA, 921 bp, Proteus mirabilis
atgagcatcccaaaagagcaatataattttaacaaattacaaaaacgcttacgccgtaacgttgggcaagctatcgctgattttaatatgattgaagatggcgataaaatcatggtgtgcctttctggcgggaaagatagctatactctcctatctatcttaatgaatttgcaaaaaagcgcgccaatacaattttccttaattgccgttaatttagatcaaaaacagccgggcttccctgagcatattttacctgaatatcttgagcaactgggtgtagagtataaaattgttgaagagaatacttacggtattgtaaaagagatcatcccagaaggtaaaaccacctgttcactttgctctcgcttacgtcgtggtattttataccgtacagccaccgaagttggggcaacaaaaattgctttaggtcaccatcgtgatgatattttagaaacgctgtttctgaacatgttttatggtggaaagctaaagggcatgccacctaaattaatgagtgatgacggaaaacatatcgttattcgtccattggcttatgcccgagaaaaagacattgagcgttttgctcaagcaaaaaatttccctattattccctgtaatctttgtggctctcaacctaacttgcaacgccaagtgatcaaagagatgctaagagattgggataaacgttaccctgggcgcattgaaaccatgtttagggcaacccaaaatattgttccgtcgcatctatgtgatacccaattatttgactttgctaatatcaaacagggtgatgagattattaacggcggtgatctagcatttgataaggatgatattccaacaagccctattctttccaatgatgaagatgagcgtcctgattttagccaagctagattggatgttgttgaggtaaaataa

SEQ ID NO: 302960 - DNA, 1212 bp, Proteus mirabilis
atgaaacagtatgctggcttcatttatattgcgactacgcttgatactaaaagcgctgaaattttttatgtcagtgaattaataaaaaaagcaggccttcctgtcaaaaccgtagatttgacaaccaaacctacagcattagaaagagaagctgacgtcacagctgcacaagttgctagttaccatccagatggaaaaaacgccgtgttttgcggtgaccgcgggaaagctatcgcagcaatgtccgtcgcttttgaacgttatttaacccactgtgacgatgtcctcgctattttaggattaggcggctcagggggaacggcattgattacaccagcaatgcaatctttgcccattggcgtacctaaattgatggtatcgactatggcttccggtgatatctccggatatatcggcgctagcgatatttcaatgatgtactccgtaacagatgtatccggcttaaaccgtatctctcgtaaggtattgagaaatgcggccaaccaaattgccggcgctgtttatttttaccaagaagaaaatagtgttgataaaccggctgttgcattaacgatgtttggtgtaactacgccttgtattcaacaactaactaaaaaacttgaaaataattatgactgtttagttttccatgcgacggggagtggcggtaaagccatggaaaaactgatagacagccacttacttcatagtgttctggatctaacaacaaccgaagtatgtgattatttatttgagggtgtccttgcttgtgatgaagatcgttttggtgccatcgcccgcactaaaacaccttgtatcgtctcttgtggcgcgttggatatggtgaactttggtcgccctgctaccgttcctgagaaatataaagatcgtcatttctatcaccataattcgcaagtcaccttaatgcgtacaacaccaagggaaaattgtcaaatggggatctggatcgctgaaaaattgaatcagtgtgaaggcccactgacgtttatttttccacagggcggtttttctgctttagatattgaagggggaccattctgggatcctcaagcaaaccaagcattttttgatgcatttataacaacatttaaagagaccgagactcgtcaattagtcatcagtccatatcacataaattctgctgaatttaatcagcaagtttatgatttacaccaggaacttatttgttaa

SEQ ID NO: 302961 - DNA, 777 bp, Proteus mirabilis
atgcatgaacttcctcttgtcttttttactgttttaggctctagcgcagcaggtctgtttctgatcgcttatatcagtaaaaagttaggtcaaattgatgaacaacaactgcgtaatgccaatattcttgctctgatattaatgcttgtgggcttaggtattggtggattacacgtaggtcagccactacgctttttcaatatgttattaggcgtaggtcgttctccaatgagtaacgaagcttttctaagtggtgtatttactggttttgcttttgcaacagtggcactcactattatgaaaaaatggcggggattacgtgaaatttgtaatctatttaccgttatttttggtttagcttttgtttggtcaattccgcaagtttaccatattccaacaattgctaactggaacacagattacaccacattacagttttggatgacgctattaattggcggtggggtacttgcgatggtcagtggtgcaagacgtttaggggcattgtcctttattatcggtgccataattacctttgcagcacgctccggttatgtcagtttcctaagctttaatggcccagaattaagtgctgagcaatcactgttttggggtttccaattagcagtattagcattaggtattgtggttgtcgggtttagcgcattaaaagcgcaaacctcaaaagtgaccttagcaacttgtgccgcagcggtcgtaattgctgaattatccggtcgcattgccttttataacttatggcatataaccatgtaa

SEQ ID NO: 302962 - DNA, 207 bp, Proteus mirabilis
atgtctaaagaaagtgatgtaaccgatttaattaaagccgttcgagaagatgaaagaaaatctcgggcggttcttttttctgcccgtttacgcaaattagcatcaaaagcactaagtgaacgaatggagccttcacaagtatttcaattattagaaggtgaagccgagtctatcgaacatcaagcgcaggaatggaattatgtctaa

SEQ ID NO: 302963 - DNA, 2019 bp, Proteus mirabilis
atgcctaatataacactacaaagacaacccgttattgcctatttagagagtattgaaaatgtagtaggcagtgaaataggtaatgatattatttatggtgaccaaaaaaataactatttaaatggcatgggaggagtagattcattatatggattagctggagatgatacgctggtattacgggaaggttatgcacaaggaggggcaggaaatgatagttatactattctaagagcatcaaatacagataataatgttaaacaacttgaaactattattgatgaagagacgcatacagaagctagtcttatccagttaaattatacttttgatgaaattgctgctatttctcgtcgtgaaacagatattgtttttacgcttaaagttggtaatgataaagatcctgatcaatttatcgagcatttaattgcattaagtcatgtataccaagataaaaatagtcaattattagcccatcgatataccattgtgactatggatggttttatacttactattaatgaaaataataatcaaccaagagaggtatcatataactttagttatttagaaaagtataatcagcaagagaagcttcaacagctttctattaatgacgataaacacacattgtctattcaatctgaaaataaaactaaacttattcaattattacctgagctacaatacagtggtttctcttctggagaacatttaaagcttaatctacagggtaatagcgaaaataatcattatgctggaattgcggctcattcatcaattaaactgagtcgcggttatgacaattatcaaataagctcattgctagctaaaaatagaaatgaaaagatcactatttctctgagtgataatgataaacaattaacatctgattgtactagtcatttctttttatccgatgtgagtggatttgatttgatgtttagtgatggcgttttatctcatcgctataatcctgatgctcatattaaacttgttttcgatacggaaagtgttagtgctatttttaactcaggaatgacacttcaatttattgataaagataatcgagtttttcatttgcctaagccagacagcggtcagcgtttactgatccccactatcactttggatgttaggttgagtcatcaaagtgatgttctgatgatcccaccctccctacgtttaaataaagaggcattatcattgtatcctcagtatttttatagagaagaaccatcatcacgttcaacgcaattacagcgtattatatccactcaaacactagagccttatccattaaaggtaacagaattactgagagatgatattgccgttaatgataatcaacctgttaattctattttgtctctcaataaactattttcaaacagatcacaagatatattctctcaagccatagatttattaccaatgatagaattaatggatggtgatgatattgttgttaatcataatcaaagtagctcagtgattgatgggggtaaaggtgatgatcatattgttgtcaatgaagggcaccatattttaattgctggagaaggtaatgataatcttaatggcggaagtggacatgatctgtttatttcaacctcaggaaatgattatctaagtggaggaattggtaataatgtttatatagtacaaaaacgtcatggtgaagtgacggtgtatgatgaaggtgaaatgagccatgtttttgtatcagggttatctgagcatgaaaagttaatatcttcccaagtaggtgaagataaacagtatcgaactgctgataatcaatttgtcttgactgttaaaacaaaccgagtagagaaaatagaaactgatcctgtgaaggttatcgaaaaagaacagacattatcaatgggatcccttgcgacaattattcaacaaatggctcaatttaatcagcaacaactatcgacgatgcaaggcagtgatgttattccctcatcaaactggtcgcctttggctgtggtcgttaagcatttataa

SEQ ID NO: 302964 - DNA, 792 bp, Proteus mirabilis
  misc_feature (182)..(191): n is a, c, g, or t
atgctaattactatttcaccagctaaaacactggatttcgaatcgcctttagcaacaacgcagttcacccagcctgaattgctaaaatattcccaacaacttattacagaatgtcgaaaactgtcgtccagtgatatcgcaagcttaatgaaaattagtgataaattggcaggactaaatgnnnnnnnnnntcgctttggtgaatggcaacctgactttacacccgataatgcgcgacaagccattttagcgttcaaaggtgatgtttataccggaatgcaagccgctgaacttttcactgatgacgactttcaatttgcacaacagcatttacgtatcctttccggtttatatggcgtattgcgcccactcgatttaatgcaaccttaccgcttagagatgggcataaaactgaacaataaaaaaggcagtgatctataccagttttggggtaacacaattactgaaacgttaaataacgcccttgaagctcaaggggataatatcttggttaatttagcctctgatgaatattttaaatcagtcaacccaaaaaaactcaatgctgaaattattaaacctgtttttcttgatgagaaaaatggcaaatataaagtgattagtttttatgctaaaaaagcaagaggtttaatgagccgttttattattcaagaaagattaagtgataaggcacaacttaaagaatttaatctagagggttatcaatttaatgccgccgagtctgaaggcaatacccttgtctttaaacgtgcagaacatctagcaaaataa

SEQ ID NO: 302965 - DNA, 564 bp, Proteus mirabilis
atgtctttaattaataccccaatcaaaccattcaaaaacatggcatttaaagacggtcaattcgtagaagtgactgaaaaggacgtcgaaggcaaatggagcattttcttcttctatccagctgactttacctttgtttgtccaacagaattaggtgacttagctgatcattatgaagaattccaaaaaatgggtgtagaaatttactctgtttctactgacactcattttactcataaagcatggcatagcagctcagaaactatcggtaaaatcaaatatggcatgatcggtgacccaactggcgcattaactcgtaactttgaaaatatgcgtgaagcggaaggtctggcagatcgtggtactttcgttgttgacccacaaggtatcatccaagcaatcgaaattactgctgaaggtattggccgtgatgcagctgacctgttacgtaaagtaaaagcagctcaatatgttgctagccacccaggtgaagtttgcccagcaaaatggaaagaaggtgatgcaactttagctccatcactggatttagttggcaaaatctaa

SEQ ID NO: 302966 - DNA, 2616 bp, Proteus mirabilis
atgaaattaaagcagagtgcttgcctcgcttttatgatgtttccggcgctgtcttttgctaataatgagtttaattttgtcattgaagattttgaccgttatttagaagcacaacagcccgttgatattaagcctgaaccctctgcaacaatttcatcttcatctactcccgatcagcgtagtggaacggtgcgttccactgtgacattaaaggaaaagccaccacaaaaaccacaacaaaaaattcagcctaaacagcctgttgtacggaatgaacatcaaaccgtggtacgcaatgagcatcggccagtagtggcgactccctctgtacctcaggtgactttgtctgaacaatgctctgtggtatctacaaataccaacaaaataaacagtgattacactcattatttaacaccactgctttcgtttgtaccgattaaaccgcaatttacccctgaggacttgaatcggtattatcaaagtaaatccgtggtctataatcctctaatgctttatacgcgtaagcgttatccagggcagccatatcagtctactgataatactttattagatttcattccaaatacagtgtattcagtgactgaaataccttttcattttttatatcaatttaaacgttctttgcttgaccataagcaacctctctttaataaagagctattaaatcgtttagcaaatactcgcgaaaaatatcaacgtctgtatcagaaatttactgaacaaaccgcgttattaactgaaagtttaactaaactgcaaaccgcagaagaaaaagttcaacaattaacagcggaattggcaaaaacgcaagataaactggctgtagcgaataatttacttaatgatgatagcctaaaacagtctgtggctaagttacaaaatgaattagcacagtctaaaaaagagcaggataccttgcttgcacaattagctgaaaaagatcagttgctgtttgatgcgacagaaaaaaataaagtattaactaaacagcaagaagattttgatattcaggcacaaaaattaaatcaattgactacccatgttgctcaacttgagcaacaaaaacagcagctacaatcacaatatgggcaggctcaacggttattaacaaataacagtgctaaaaaagagattgaggtactacaaaattctttaactaatttatcagcagtgcgccaatctttagaaaatcaattagctaaaaacaaagcctcttttgaagctactctagctaagaataatcagttaattgatacccaacgccaacagatagctcaacttaacgatcacataaaaaaaataaaccaagagcaacaacagttaaatcattcgttagtgactcttcaacaacaaaaagcacaagcagatgatcaattaacacagatcccagcgttgaagcttgagttacaaaataaggttaatgaattagctgagctgaaaaaaagtttatctacgggtgagaaagcttttgatgctttgatttcagaaaaaaatggtgtaatcgctaaattagagaaagctcaggcagatcttgccaataagtatcaagcattggatacccaatttaaagagaacaataccaccattgggcaacttaaagaaagcaaaatagcgaacgataacgcttatgctcaattagagaaacaactagcagaaaaacaatcgcttactgataaattaacgacacaattaacacaagctaaagatcagttagcaaaacaaaattctgaaagtaaccaactaattgcttcattaaaacagcagcaagtagaatcgacggctcaatttaagcaacaagaaagtgttttagcgaattctcaaaaagagtttaatgaagtctctaagcagcttgaagctcagcgtgcgctaacgaaaacacttgaagaaaaagaattaaaattaagtgagcaactaaaagaaaaagagagtgaaattaaaaaaataaatagcgaaaatgcgaatgctcaaaaagagtttaatgaagtctctaagcagcttgaagctcagcgtacgctaacgaaagcattagaagaaaaagaattaaaattaagtgagcaactaaaagaaaaagaaagtgaaattaaaaaaataaatagcgaaagtgcgagtgttcaaaaagagaataaaacattaaaacagcaattggataaagctatgggagaagggcagattattgcaagtcagcttgcatatgcctattcaattatcggtaaagataatgcccaacgaaataaatcaattctgtcggaaatacaaaaacagaactatgtgcaatacgatgataacacttactttaaaatcctaaaacaagggaaacctgtggattcaattgcaggtaaaacagttgttttcgctatgcatgaacaattaaccgatggtacagtaacacttaattatgacaaagctaagccgttaattttaccataccgtcaacttccactgcctcttaatacttttgttgctaaagcaggcttaaatggcaaagctaaaatttatattaaacctgatggcgggtatgggaaagatggtatcccagggcaagtacctccagaatcgatgtctatagtgacaattgaaattttagctatcaaatag

SEQ ID NO: 302967 - DNA, 1101 bp, Proteus mirabilis; identical to SEQ ID NO: 297984

SEQ ID NO: 302968 - DNA, 2439 bp, Proteus mirabilis
atgccctctacatttgcagatgattatgaatttgatccttctttactattaggtattaaaaataacatcaacattaatcagcttcatgatagtaattatgtggagcctggtgattatgatgttgacatctacattaataatcgttttattgaaagaaaaaccgtgagttttcaattaaatgataagggtaaagtcacaccttgttttactcaaaaacagattgaggaaatggggctcttgctagatatcgagccaaatcaagataataatcaatgtttaatattgagccaatttaataaaaacatcgtagactcgtatgatgcttctaactttagaataacgattacagtgcctcaaattttattaaaacgaaaaccacaaggttatgtcaatgaagacgatttagatgcgggtaacaccatgttattcagcaattactctggtaattactataagaataaatcgaacggacaaacttcagactatggttttggtagtattaatatgggcgtaaatctaggaacttggcaatttcgacaacaagcatcttactcttataattcatcaaaatcgggaagtaacagtgaatttaattggataagaacttatctacaaaaaccattactgacattaaagtcaatgttagttgtcggtgatatttatacagcaggatcacaattttctagtctggcatttaaaggtattcaattaatgtctgatgaaagaatgttgccggattctcaaaaaggttatgcgcctgttattcgcggtattgcaacaacgactgctcgagtagtgataaaacaaaatggtactgaaatttatcaaacgacggtatcaccagggcaatttgaaataaatgacctttatccaaccagttatgaaggagatttattagtcgaaattcacgaaagtaatggtaaagtttcttctttcacagtgccatttaccgcattacctgaatcagtgagggctggtcgctttaaatacaactttaccgctggtgaggtgaataattttggttcagaaaatagttatttttcagatattgctttacaatatggtatgaataatacggtaacgttaaatactgggatacgtgtaggacatcaatatcaggcaatatttgtcggctctgttattgctacaaaattaggggccataggttttaattcgacattttcaaatgctgaagtggctggtaaaaattatcaaggtggacgattaggtattagttatagccgtactctcagtctaaccaatactgttattacactcgcaggttataaatactcaacagagaatttccgtgaatacaatgatgttttggggttgagaaaaagtgcaagtaatgacatagaatggaattccagcagttataaccaagaaagtcagtttacacttagtgttaatcagtctcttgataagtgggggcaactttatgtttcgggctctatcagcaactattatggtaataaaggacatgatgcccagtatcaaattggttattcaaatacctataaagatattgcttatagtcttgtctatagtcgccaaaaaacagggaaaataacggcgaataatacttttacaccaataactactgatccaatatcggaagatatggtgatgttatctgtttctgtacctttaggacgctctgattattcaccaatgctgtcactatcctctagccactctagtaatgattcgaattaccaaacgaacttatcggggcttttaggggaagataaaacactttcttatagtataaatgcagattatgacacacaaaatagagtggtaggtactggtttgcatttaattaaacaacttccttttaccacgttatcaggcagcatttctaatagtaaacaatacactcaaggtagtgtgggcattcaaggtgcgttagttgcacacagtggcgggataacattagggccaagtattagtgattcttttgctttagtggaagccaaaggtgcaagtggagcgactgtgagtaatggaatgggggcacagattgacccttttggctatgctattgtgccttctcttgtcccttaccaatataacaatgttagtttggatggaaaaaatattagaaataataatattgagctattagaaaatactaaacaaatagcaccatattcaggttctagtaccaaaatcgtttttaaaacccaagtcggataccctgtattgatttcagttaaaccttcaaactcattggcattaggtgaaaatgtttatgataaagatagaaatattgttggcatggtaggacaaagtaaccagatttatgtcagagtcgaaaataaaaaagggacactaactgtcggtaaagatgaagatagttgccaaatcaattactcaataccagaagaaaaagaagacgataaactcattttattatcaggtcaatgcttatga

SEQ ID NO: 302969 - DNA, 597 bp, Proteus mirabilis
atgcatgataaaataattaacgatatccttgattggatagaagataatctgactaaaccaatttcaacaatagatgtaataaaaaaatctggttatagtcaaagatattttcaagatctatttctgcataaaacaaaatcaactattgctaaatatattttgtctagaaagttatctatgtcagcaattttgcttaaattaactcggtattctatatcagaaatatctaatgattactcttttacttctcagcagaatttttcaagagcttttaaacgatattttaaggtaacgcctgaattttatagaaagagtaaattttgggattttagatattatcgacctcaacataaagtatttgattttaaaaaaataaattgtcagttaatttatttatcaaaagatagattgcttgataataattctgatgattttaagttttttgatatttctattccttttgactttaagtcaaatattgcaatagaggggctaggctataaaaataaaaaacagattgaaataataaaaagtcttgttgattcatcaaatgataatttgtgtgtatcttataatctgtctcttatacacatctga

SEQ ID NO: 302970 - DNA, 1716 bp, Proteus mirabilis
atgaacataaaaaataaaatttactgtatcattggaattatcattttttatagcttctttttgccaactcaagcggcagaaggaaaggttatttatacacatcaggttaaaaaacctgatgtttttgttgcggtaaatacacatattgaacagtttttcctagtgctatcagataaattaaataaaccttttattctaagcagcgcagtaaaaaaagagcggatcagtggaaaatttgatatttcttcacctgaagacgcctttgaattaatggtaaagcgtttgtcattactttattttaatgacggagaatctatttatatttatcgcgataatgagatacagcaacagctatttcaagtgaaaaatatcagcttgagtaaactgaaagagtatctacaagatgttggattatatgatctccgctacccattacgtgcaggtcacgatcagcgtactttttatctctcaggtcctcctatttatattagcctagttaaggctgctgctgagcttttggataatgatgtacaagaacaaattaatgaaaatatcaataatcaagttccaaccggaagctctcgttatggcgatgagtttgtgcagatatttccattaaaaaacacttttgtacaagatagaacctatatattacgtgatgaaaaagtggttttaccaggtataacaacggttttgcaacagctatttatgccatcgggagagaaagaaaaaacagtcagaagagcgcgtgagattatcgaagataatgataaatatcaggatgataaaattaccaacgatatacaagatactcattcaccgattatcactcaaatgggcaaatataatgttgaactcgttcctttacctggatcaaatagcctgttggttaaaacgagtcgagaaggtttagctttagttagctcacttatttcacaattagataaaccgaaaagacaagttgaattgtcattatggataattgatatttctaaaagtaaagccgatagtttgggggtgaattggcaggggagttatggctcgggtaaaaatacatttttctttaataccgctagcttaagtgctgtatctggttttagttttttaagtaaaatcaaagcactcagtgaggaaggggaagctaaaatggtttctcgtcctattttgttaactcaagaaaatacccccgccatatttgataataacaccaccttttatacacaaattaaaggtgagcgagttgcttcattagaatctacaacattcggcactatgatcagtgtgttgcctcgtattagtaatactaaccaagagattgagatgattatcaatcttgaagatggcgccgagaaaaaaagtgatgatgaagatagagaagaagggattgaaaaattacctgttattaatcgcacaaatatcagcaccgtggcccgagtttctgaaggcggtagtttattaattggtggatatacacgagaagataacataaaagcagaaaacaaaattccttttttaagtgctatacctttagttggccgagcatttagctatcagtcagataataataaaaaaatggtgcgtatttttatgttacaaccgcgtttattagataaaactgatacgcacggattggactctttaactgaacacccatttttaccgatggataaaaaaacatctcaagcgctaaaacaaattcaggcatttatgaggtga

SEQ ID NO: 302971 - DNA, 183 bp, Proteus mirabilis
atgaatattgataaatacaaattacgtgtagcccaaagtaaagctggaattgctttatttctcacggacgaggacggatggagcgaagcaaacgaaacattaaaaacagcatacggagtacagcatgaacgcaaagcagaaacacataaaacatcagatattcgcactattgcgagagtctga

SEQ ID NO: 302972 - DNA, 177 bp, Proteus mirabilis; identical to SEQ ID NO: 301478

SEQ ID NO: 302973 - DNA, 255 bp, Proteus mirabilis; identical to SEQ ID NO: 300844

SEQ ID NO: 302974 - DNA, 213 bp, Proteus mirabilis
atgattaaatatttaattttgttttatttattggtatcggtaactctttttatatacaggactattaaatctaaaaagagttatcacgataaatatagtttgggtgaagcgatagattattcaatgctatggccattttatattttgattgcatcctattttttccttgcagagagatatagaaaatttattggtatgagtgaggaaagataa

SEQ ID NO: 302975 - DNA, 459 bp, Proteus mirabilis; identical to SEQ ID NO: 296276

SEQ ID NO: 302976 - DNA, 483 bp, Proteus mirabilis; identical to SEQ ID NO: 296723

SEQ ID NO: 302977 - DNA, 1620 bp, Proteus mirabilis
atgcgcaaaatattcgttatatcatgtgcacttgtcgttcaaggattgctcatatcacaggctaatgcggcagtggtgccatcaggaacgatactcgacaaaaaacaggaagtagtgcgacatttaaaagatgaacccgcatcacttgatcccattaatgccgtaggtttaacggaggctcaagttcaacgagacttatttgaaggattagtgatagaagatgagcgagggcgtcccattcctggagtggcacaatcatggcgaacagaagataaccgggtttggatttttacattacgtgataatgctaaatggtcaaatggcgaaaaggtgacggcttctgactttgtttatagttggcaaagattagttgatccaaaaaatctttctccttttgcttggtatgctgccctagcttctattgagaatgcccaaaaaattattgatggtaaattaaaaccaaccgcgttaggtgtggaagccattgatgaaaaaacgttaaaagttaccttagaacgacctgttccttatttccctagtttagcgaccaatttttcactttatcctgtacctaaacacacaatcgaaaaatacggttcagaatggatcaaagtaggtaatttagtcggcaatggggcttttatactaaaagatcgcgttgtgaatgagaaaattgtgttaacgccaaacccttactattgggatcaccacaatacggtgttaaccaaagtcacttttgtgcctattaatcatgaatcacaagcgactaaacgttatttagctggggatattgatattacagagtcttttcctaaacacttatatcacaaattgatgaaagatattcctgatcaagtgtatatccctgagcagttaggtacttactattatgcatttaatacacaagcagggcctaccaaagatattcgggttcgcaaagcgttagctatggcaattgatagaaaaattattacagacaaagtccttggtactggagaaaaatcagcgaatcgctttactcctgatgtgacggctaattttacgcctgagccaacactatatgatgaatacagtcaggatgaattagatagccaagcaaaaatattgttatcagcagccggctatggtcctcataatcctttaactctctctctgctttataataattcagaaaatcatcaaaagatcgccattgctgtcgcttctatgtggaagaaaaagttaggcgtaaaggtaaacttacgcaatcaagagtggaaaacttatattgatagtcgtaattcaggtgattttgatgtgataagagcgtcatggataggcgattacaatgaaccctccacatttttatctttattaggttctaagcatgctggaaacatcccaaaatatcagagccagcaatatgatgagattttagtccaagccaatatgacgacagatgaagaggaaagaaatcgtctctataatcgtgcagaacaggttattgcggaagaggcgcctattgcccctatctatcagtatactaatggtcgtctaatcaaaccttggctaaaaggttatcccattgagaatcctgaagatgtcgcttatagccatatgctgtatgttataaagcattaa

SEQ ID NO: 302978 - DNA, 222 bp, Proteus mirabilis
atggaaagctcaacacaattaatattgatcctagctcttgccacattggctccttttattattgctgcaggaacttgttatttaaagttttctatcgttttagtcatgactcgtaatgcattaggtgtacagcaagttccttctaatatggtacttaatgctatcgctttaatgatggctctttttgttatgacaccaattactaaaaatatatgttattga

SEQ ID NO: 302979 - DNA, 300 bp, Proteus mirabilis
  misc_feature (270)..(279): n is a, c, g, or t
atgattatgctcaatattaaaaaaataaggatctttgtcgctttggtcattagtattaattctatgtgcacacatgcaacagagtttaataccgatgtactagatgccgtagatgttgaaaatattgatattagtcagttttctaacgtgggatatattatgcctggagagtatgagctttcaataataaaaaatggacaaagcttaggtgaacaacagaaaattaaagtgatacctaatatagatatttttcaacaaccatttcatgcnnnnnnnnnntcatgctatttgtttacctaa

SEQ ID NO: 302980 - DNA, 1308 bp, Proteus mirabilis
atgttattagttgatttctcatttatctttattttcctatttgttatggcttatttgtcattaaagttaacattaatctttcttgccaccatcccactctattttatcttagctaaattaattgcccctaaaatagaaaaaaccgtacaacagctttatcaatattcagcaacaaatagtgcttttttaacagaaaccctaggaggtatagaaacaataaaaagcctttcattagaaccacgttttacacaacagtggcatacgcaaatccatcaactgactaatgaaaatttaaaattacaaaatattgataacttatcgcaatacattgtttcatttttacaaaaaataacgacagcgatacttttatgtctaggtgcttttgaagtcatttcacttgcaatgacaataggtcaactcattgcttttaatatgctattaaaccactgtctacaacctttaagttctgcaatagaagtttggggaaagtatatccgagccaaaacggctatttataatttacaagacattcttaatctcccaatagagcaagaaaaagccaataagaaaatgaccttacaaggtgaagtgagttttgagaatgtcagttttagttatcaacatgatgccccccctgttgtaaggcaaatttcatttagaataaataaatatgaaactattggtatcgtcgggacgtctggatcagggaaaagtacattagcgcgcatcatcgcagggctttatatcccacaattaggtcaagttaagcttgatggcattccggtttgtgaaattccccccgcagtattacgtcaacaaataggttttgtcttacaagagaattttttatttcatttaaccgtgctcgacaatatccgtttaacgcagccatcagcctcattagatgatgttattcatgtagctaaattagcaggtgctcatgagtttattttgaaacttcctttagggtacgacacactcattgctgaaaatggcagatctttatctgggggacaatgccaacgtattgcaattgctagagccttactctcatcccctaaaattttaatttttgatgaagctaccagcgcattggatggtgagtctcaagccatcatcgaaaaaaatcttccccttattacccaagataagaccgtcattatgattgctcatcgcctttccacaataaaaaactgtgaccgcattattgtattagaaaaaggccagataattgaagaaggcaaacataatgaattgattagaaaagatggcgcttataagaaactttggcaacatcaacaaggataa

SEQ ID NO: 302981 - DNA, 750 bp, Proteus mirabilis
atgccccccgaacaatcaagtaatgggttaattacgtttgctaaccaaccggcgggttatatcgcctttcaaagctctaacttttcttatttattaaaagatggttcagatcacgccacaaattatcatggcttttatgattcttggccggctgctgtaaatatgtctcgccgtatttacattcgtaatgcgtccacttgttttgtgcgaaatgttacgccttatgtttcattcccgctagtcactattaatgagttagaaagaggcaaaaaagtgactttacctattacgattgatttttattgtcaaatagcaccaccagcaaacgatggcatgagttatatttccagcggaactgggcctgggcaaactgcaatgggatttttacctagacctacaaatgttaataaggcaattgaattaggattaacagtacctaatggtgctgcaattacccatttagtgacagacggttatggtactgatacaaatatggcaaaaggggttggtgtaagaatatatcgcccatcaggtatgccattaaacttattatcaacattagcgaatgaaggacaaggtgaaggttatggttggtaccctattgatgatgatgcaagcgcagtctcatatgacaatggtattgtcgattcaacaaaaacattgtatgcctcattagaagcgttaccgagagaaaaaataactgccggtaaatttaatgcaaaattacaagtaattatacaggtgcaataa

SEQ ID NO: 302982 - DNA, 582 bp, Proteus mirabilis
atgaacgtaccgggtgaaaacgagtaccgtactcgcggtgtaacatactgcccacattgtgatggtcctctatttaaaggtaaaagagtggctgttattggtggtggtaactccggtgttgaagctgctattgacttagctggtttagtggagcacgtgaccgtactagaatttgcctcagaaatgagagccgatgctgttttacaaaagaaactgcgtagcttaagtaatgtcgatgttatcttaaatgcccaaacaacagaagtatatggagatggtactaagttaacaggactgaaatataaagatcgcactaacgattcaatgcatgatattgccttagcgggtattttcgtccaaattggtttactaccaaatacacaatggttagacggaactgttgagcgtaataaaattggtgagatcgtggttgattcacgtggtgaaaccaatattaaaggggtatttgctgcgggtgactgtacaactgttccttataaacaaattattatcgccgcaggtgaaggcgcaaaagcctcattaagcgcctttgattacttgattcgcacgactgcaaaataa

SEQ ID NO: 302983 - DNA, 600 bp, Proteus mirabilis; identical to SEQ ID NO: 296655

SEQ ID NO: 302984 - DNA, 531 bp, Proteus mirabilis; identical to SEQ ID NO: 301485

SEQ ID NO: 302985 - DNA, 492 bp, Proteus mirabilis
ttggccaacattcccgtttttagatttgggggaggtggtttctttattcgcgcaccgattaagccgggtgatttcggttggataaaagccaatgaccgtgatattagcctgatatttcaacgtggagggcttgaagaccaacctaataccgcacgcctccattcatttagtgatgcaatgtttttccccgacaccatcaaaggatgggtgattgatggaaagaatattgatgccttagtcattcaatcaatggacggttcggtttgtttttcattacataaagataaagcggttttagatgcgcctaaattcatttctaacgcaccagaaaatgagtttaacggtaacgtgacggtaaatggtaatcatggcgtaaacggtaacagtgaatcaaacggtggcacgatgaaacataacggaaaagatatcggttctacgcatcaacacagtggtgttgagaccggtcatggaaattcaggagcgcctctatga

SEQ ID NO: 302986 - DNA, 345 bp, Proteus mirabilis
atgagaacattttcaatcgataaaaataatgatctctttatcggccctgatggaaacctccaattcagtgaaaaagacgatgcggttaaaaacctttgtcagcattttgctaaagcggttcgtggtgaaatgttacataaaaaagataaaggcattccgttctggccaacaacctttggtcgccaagctgatatcccgatgtttgaaacggcatttagacaacgtatgagcgaaattgaagaggtggttgaagtgacgcattttagcgccacagtggaaaacggtgaattgaagtaccaagcgacaattcgcacgatatacggagggtttacattgaatggctga

SEQ ID NO: 302987 - DNA, 1089 bp, Proteus mirabilis; identical to SEQ ID NO: 302680

SEQ ID NO: 302988 - DNA, 1089 bp, Proteus mirabilis
ttgggcattagcaaatctaacaacactaaaaaagaagaaattactactaagttaactcaaacagataatgcatctttagtatccaaagaaaatatagttgagaaagaaactaagcctaaacgttcgcgtaaaaagcaagaagtagcgcctaaggcagaaacagctcaagtgattgagcaaactgaaaaacctaaagagcctgaaacaccatcagtacaacacgataattttgagcaacgcgcgagtgtgcttgaggaagttcttaacttaggtgatgcaaataatcttaatatttggaagcgtgtacaacgtacagaccctcgctttactaaaccgttagaaggcatgggatttgtaggaactagcataaacagcacctacatgtttatgcgtgcgactgaaatattcggtcctattggtgaaggctggggttatgaagtccttgaagaaaaatttattgatggaaagcctcttgtagaaccagttcttgatgagcgtaataaacaagttgcaacccgttttttgcgggatggtgacggctcgttattctgcgaacaaaaccactcaattaagatccgtttttggtacatcatcgaatgtgaaacccgcggtgagtttgaaagttatggggcgactccttatcgttatcagactaactatggcattaaagttgatggcgaagttattaaaaaatcgctgactgatgcaatcaaaaaagcactatcaatgcttggctttagctctgatgtctttatgggaatgcacgataatcctgaatacttagcaagtaataaacttgagtttgaaattaaaaacgcgagtgaaaaagctgaagatatcacacgtattcgcaaagaattagacgaaaaatttactaaacatacagacgttatgcgtagtgctgttactgagaatgaattgcgaggcattgcatccacattaacgcgcgaaatttctgcacatattaaatcagctcaagaacgtcgtgacaacgattacgagaaatatttgtccggccgtttacgtcgattaaaccaaatcgaaaaagagtgtttagaccaactgaaacagaaagaagaggcaatctaa

SEQ ID NO: 302989 - DNA, 237 bp, Proteus mirabilis
atgaataaaaatgagcttcaagtattaatcgattataccaaaggcatgattgcagataataaggagccagaaaagaaggtcattattgcattgtgtgatgagttggagagaattattagtaaatatccagtcggttttgcttctgaaaaagaacttagaaatttaaatattaaatttactacgctatatccattaaaaactagcaaccataatataccactctatcgtttagattaa

SEQ ID NO: 302990 - DNA, 657 bp, Proteus mirabilis
atgaacgttcaacaatttgagttccattcagacctattaaaagcgatcctctggcagtatgaaaatgcagagaatttaaagaaactcgccagttttaaagcctctcattttgaaaagtcgatggtgtcattttggcaaaactggtaccgagatgtgtttaatatcgatacggcgaatgactttgggttgtcgatttggtcacgcattctggatgtacccttaggtattgatattccaccgagcgataaaaataaagtcgggtttggttttggcaaaaagaaagccaattttaaatctaacttccgacgtaatgcggattacaccttgtcactgaccgttgatcaaaaacgcatgttagtacgaatgcgctattttaatctgacacaaagccccacggtcaccaatattaatgagtttttaaaacgtttcttttggcgtgatgacagcaaagtctttgtccttgatccgctagacatgacttatatgtattacgtttttaacttcaaccctgacgaacgtctacgggttcttctcgaaaacttcgacttaatgccacgcccttcgggtgttggcgtcaaatatcgcattgtgaccaaaaaagcctttggtgttggtcagtatcgtaaaaacttcttaggcagtaacttcggagcataa

SEQ ID NO: 302991 - DNA, 816 bp, Proteus mirabilis
atgaatatagaacttcgccatttacgttattttattgctgttgctgaagaattacattttggtaaggcagctgagagattaaatatttcccaacctcctttaagtcagcaaatacaagccttagaaagtgagataggggctcgtttactcgaaagaaccaatcgttctgtttcgttaaccccggcaggacaaatgtttttaaaaggatcctatcaaattatggcacaagttaaggcggtagcgacacgagcatcaagaatggaaaaaggagaattaggtgaaatttcaattggttttacctcaacaacaccttttatgcatttggttacgttaagtttgcgtcaatttagggaaaattatcctgaagtcggtattcatatgcatcaaatgaataccaaacagcagatatcaccattattaactggccacattgatttgggaattatgcgtaatacggtgttacctgataatttgcaccaccagctcctatttcgtgaaccttttattttggcagtttatgaagggcatcctttacttgaatacaaagaaacaggcgtaaatattcaagatattgggcaatatccttttgtattttttgagcgagatgtaggaacggcgctttatgatgaaattattcaattgcttagccttgcgggaattacaccaacgatagcacaggaagccggagaggcgatgaccatcttggggcttgttgctgccggattaggtatttctattgtgacaaaatcatttacccgcatgaaagttgctgtctcttatacacatctgacgctgccgacgatctactctgtgtag

SEQ ID NO: 302992 - DNA, 702 bp, Proteus mirabilis
gtgaaagtactgagtggtgaaaagtcaaaaatgaccattcaagtcggtactaatgacaatgaagtgattgaattcaatttagataaaattgataacgacacattaggtgttgctagtgataacctgtttgatgctaaaacagagaaaaaaggggttaaagcaacaggtgatgctatcgatgcaaacgctctgggcatttcgggcggtacaaaatacgcgactggtgtttcagtaaaagagtataaagtagatggtaaggtttctgctaataaagttgtcttaaaggatggtagcgacgagtacgtagtaagtaaatcagactttacattaaaatcaggtactactactggtgaaattgagttcactggtagtaaaaccattaaatttaaggcagatgcaggtaaagatgttaaagttttaaatgttaaggatgacgctttagcaactttagataacgcaattagtaaggttgatgaaagccgctctaaattaggtgcgattcaaaaccgtttccaatctactatcaataacttaaataacactgttaataacttatctgcttcacgtagccgtatcttagatgctgactatgcgacagaagtgtccaatatgagtaaaaatcaaatcttgcaacaagcaggtactgctgtactggctcaagcaaaccaagtaccacaaactgttctgtctctgttacgttaa

SEQ ID NO: 302993 - DNA, 567 bp, Proteus mirabilis
atggtcaaattacagtttgcaggctatttacgcagatttggacgcaggttcgagcttgaggtaagtaatgcaggtgaggccttacgctgtctttgctatcaaatagatgggttgaaaaaagagattaaccaaggtcagtttcgcgttcgtatcgcaggtaatgatatgaccgaggatagtatttctgcgggactaaatacgccattaagtgaaggcgatgttattacgatcgtccctatagttggtggcgccaaatcaggcgggtggtttggcattattggtggggccgctttaattggcgcatcgtttttaataccgggcggatttttggcaacgatgacatcgaccgcattatttgccgctggtgtaggtgtggccgccgcgggattggcaaccatgttaactaaaacaccgccagcgccaagcatagaggggcgaaactcagaaagtaaccagtatttcagctcgttagcaaatagagtcggtcaaggttatccggttcctatctgttatggcgagatggttgtgggttcaaatgtaatatcacaaggtttggagactgtttaa

SEQ ID NO: 302994 - DNA, 135 bp, Proteus mirabilis
atgataatacagggttctgctgtgcctgtaacggaagatatttatacgcaatcggaatgcaataaacgtgctgaatatttaatgtcagtgaggaatgttaaagttgtttgtggagaggtatggaatgaaagataa

SEQ ID NO: 302995 - DNA, 354 bp, Proteus mirabilis
atggataaatcaagacagcaatttgaagagtttattaagtttcacatggacgatgaagaaacaaataataaattcgaagcagctaataacagattaaattacgctgaccaacatgtagatttaatgtggattagctggcaagcatcacgcgagagtttaattaataacttaccagaaagcattaattgccctactgcgccagaattaatatggctacaggttgaccctgaaccagaggaggaaaataaacctgaatttccagttaatttacgtagtgatgatgtgacttggtgtgcaaatagaattcatccaactgacacgttatatattcgtgctgatttaattcaaaagtaa

SEQ ID NO: 302996 - DNA, 297 bp, Proteus mirabilis
atgattgagctacaaaaacaatttcaacccaaagagagaaatatatgctcagcttgcggtaaagacgttggagtatcaaagctagttgttataggaaatgtgaatatctgctttgaatgcgccgatttatcaaaggaaatgacagacaaggagcgcgaaagattatcgaaaaaagaaatagagcgtatagcagctattatttccgctggcgataaaggtttaattgatatgggcatggctactgcttatatgtacgccgaacgcttatataaagctggatatagaaaggtggagtga

SEQ ID NO: 302997 - DNA, 690 bp, Proteus mirabilis
atgcagaattctcaaggggttaactctgttgatatcgcagtgactattttagagtttttagcatctcaaggaggtgctgcacgctcttctgagatagctaaggcatgctcactatcaaaaagtcgtctacataaatatttagtgtctctttgccgtagtgacatgctctatcaagagagtgaaggagggcagtattgtttaggtagcaaaattataatgctagctgaggcaacacacacaaacctctctttagttgatgaaattaatcaaagactttgtgaatttagagatgagcataatatgtcaacaggacttgttattgctcaaggtaagaagctctatttagtgagatataatcgtagttttaaacatgtcgatattgattttttgccaaatacacccgttccacataaattgagtgcggcaggcgcgacttatgcagtctttagtcatttagaaattgatgctgatttatcaatacagcaaaaaaacagtatacatcaacaaggttttgctattcgccaacaacccgctgaaggtattcctggagctcaatctattgcatgtcctgtatttaataggaaaggtgaaatggtcgcagccgcattgaccatgggatttattaaacctgaaaaccaaatagaattaggtaatgcattaaaagcaaaaattcgccatgttttatcttaa

SEQ ID NO: 302998 - DNA, 174 bp, Proteus mirabilis
atggtcaccttaattacaccactggcgttagcatctgtcacattaagcgcaggggctgttgctgatgcagtactaccatttgacggtacatgcaaaaaattttgttgccagcctaccgcatatggtgtggctaaagaaaataaagctattcctattaatgtcttattcatttaa

SEQ ID NO: 302999 - DNA, 270 bp, Proteus mirabilis; identical to SEQ ID NO: 297227

SEQ ID NO: 303000 - DNA, 465 bp, Proteus mirabilis
atgacgtttgctaactttgacggaatgttaactgcgattaacaacgactatgatgatgcgctaggcgctgttgttactcgcaggcaggttttagagcaatatctcgatgctgttaattttcccaacggaaacccacaagcagatccaaccagagaagccgttcaaaaatatgttatcgaacagcgagaaagttcagactctgattttgtgacgtatatattagcacttccaacagaaacagataacgccctgatacctagacgggttattcaggctgatatctgctcgtggcgatacagaggatttgattgtggttatgatggccctcctgttgcagatgaaaaagaccaaccaacaaccgatcccttaaaagacaaatgctctcataaatacagcgggtgcaaattaagacacaaagggaatatgccattcggcgggtatttaggatcaaataaattaggttaa

SEQ ID NO: 303001 - DNA, 498 bp, Proteus mirabilis
gtgctcactattgatggaatttctctgttgcctcacagcatttacatttgtgttgaagggggcgacagtaacgaaattgctaaatcattgctgagaacaaaaactattggatcggcttttaatggagagattgaaatcggtgttgtagagccggtaagtggacaagaatataaagtgaaattttcacgccctaaggagatcaccgttttttgtcgagtgaccgttaaaaaatcagccgttgatgcgcaaactattatccccagcgccatagaacaatggacgcgtggagatctggacggcgataacggtttgattgttggacgtgaagtatcgccttttgagatagcttcagcggtaaatactgttgagcctcgtctgttcgtgactaaagttgaattgtcactggacgggaaagtatggaatgttgcattaattccgattgccattaatcaaatcgcacgcttgcaacgaggtgctgtgcaagtggtgattgtatga

SEQ ID NO: 303002 - DNA, 471 bp, Proteus mirabilis
ttgcctcacagcatttacgtttgtgttgaagggggcgatagtaacgaaattgctaaatcattgctgagaaccaaaaccattggctccgcttttaatggcgagattgaaatcggtgttgtagagccagtgagtggacaagaatataaagtgaaattttcacgccctaaagagatcaccgttttttgtcgagtgacagttaaaaaatcagccgttgatgcgcaaactattatccctagtgccatagaacaatggacgcgtggagagttggacggcgataacggtttgattgttgggcgtgaagtatcgccttttgagatagcgtatgcagtgaatactgttgaacctcgtctgttcgtgactaaggttgaattgtcactggatgggaaagtgtggaatgttgcattaattccgattgccattaatcaaatcgcacgcttgcaacggggtgctgtgcaagtggtgattgtatga

SEQ ID NO: 303003 - DNA, 390 bp, Proteus mirabilis
ttggactttcaagctaccgataaaaatattgctaattggtatttttgcggttcagcgttacagcaagtacaacgattgcaggaagcaggaaacgttaaagcctttattgatgatgatacgttgtttgtcaaagatgataaccaagccttaaaaggtcgtctgcgcattcttagcatgaaatcaggcatggtaggtatacccaaagccactgaaaaagggttgtccgttacctacttaattgatggcgcctcagaactaggagggatgctacgacttgagagtaaattcaattccgcacttaatggtgactacatcattgaacaactgaaattcgatgttgcttcacatgatgatcctttcttttatcaggctacctgtaaacgagcataa

SEQ ID NO: 303004 - DNA, 492 bp, Proteus mirabilis
ttggccaacattcccgtttttaggtttgggggaggcggtttctttattcgcgcacccattaagccgggtgatttcggttggataaaagccaatgacagagacattagcctgatatttcagcgtggaggattggaggatcaacctaatacagcacgtctgcattcatttagtgacgcaatgtttttcccagacaccatcaaaggatgggcgatagatgggaagaacattgatgctttggtgatccaatcaatggatggttcagtctgtttctctttgcatagcgataaagtggtgctggaaacccctaagtatgaagtcaatgcccctgaaaccatatttactggcaacgtcacagtgaacggtaattacgcggtaaatggtaatagtgattcacaagggggaactatgcgacataacggaaaagatatcggctctacgcatcaacacagtggtgttgagaccggtcatggaaattcaggagcgcctctatga

SEQ ID NO: 303005 - DNA, 414 bp, Proteus mirabilis
atgccagaagatgaagcaggatttattgcattacatatcgccagtattagaacaaacgataatattcagcaaacctacaaagtgacccactttatccaaagcattactaatatagtcaaatattatttaaatatagagtacgacataggatcgttaaattatcgtcgttttgtgacacaccttcgctatttctccatccgattattttcacaacctgaaaatgatcacgaacctttagaaaatgagttactggatataataaaagacaagtaccatcaaccttatatgtgctgtttgaaaataagtaaatttattaaagataaatataattgcaccttagatgacaatgaaattttatatctaataatccatattgcaaaaattgcagaggataataaaaagatgaataaataa

SEQ ID NO: 303006 - DNA, 213 bp, Proteus mirabilis; identical to SEQ ID NO: 297906

SEQ ID NO: 303007 - DNA, 363 bp, Proteus mirabilis
gtggcgggtgttctaacagtttgttatggacacacagggaaagacattattcaaagtaagacatactcacaacaagaatgtgatgcgttattacaaaacgattttattaagacacaacagcaagtcgatgcattaatcaaagtaccactcgatgactacaccaaagccgctttatattcctttgcttttaatgtgggaacgaccacatttgctcgctcaacattacttaagaaactaaatgcgggtgatagagcgggtgcctgtgaagaaataaaacgttgggtatatgcgggtggaaaggtttggcgaggtcttgttagtcgtcgagaggcggagtcagtactatgtcatggaaacctttaa

SEQ ID NO: 303008 - DNA, 363 bp, Proteus mirabilis
gtggcaggtgttctaactgtttgttatggacatacaggcaaagacattattcaaggcaagagatacacacagcaagaatgtgatgcgttattacaaatcgattttattaagacacaacagcaagtcgatgcattaatcaaagtatcactcgatgactacaccaaagctgctttatattcctttgcttttaatgtgggtacaaccgcatttgctcgctcaacattactcaagaagctaaacgctggtgatagagcgggtgcctgtgaagaaatgaaacgttggatatatgcaggcggaaaggtctggcgagggcttgtcagtcgtcgagaggcggagtcagcactatgtcatggaaaactttaa

SEQ ID NO: 303009 - DNA, 165 bp, Proteus mirabilis
atgtataataaagtagaggatgaggatcaaaaaaatgctttatttgttgaaatggatgatataaaaaacttgaaaagtgcatatccgaattatttacttgatacttctgcgtttcttaataaatatcaagcctatattacaaatacatattggcaaaaaccatag

SEQ ID NO: 303010 - DNA, 171 bp, Proteus mirabilis
atgcttagacactctcaacaaaaagaccaagccgtaaagatcacattacctgatggtacacatggatttgtttcaacagatagacgttgccatgtttcatacgattttccagctcacgtcaaaatagaacttcaaccttctctcgctgagcaacaaaggagtgaacaataa

SEQ ID NO: 303011 - DNA, 162 bp, Proteus mirabilis
atgcaattaattgaatatgtattactcatgctaatacagggttctactgtacctgtaacggaagatatatacacgcaatcggaatacaataaacgtgctgaatatttaatgtcagtaaggaatgttaaagttgtttgtggagaggtatggaatgaaagataa

SEQ ID NO: 303012 - DNA, 165 bp, Proteus mirabilis
atgctacgccacatgggttggacagaagccgctgacttaatcattaaaggtatggaaggcgcaattgaagcgaagaccgttacttatgatttcgagcgtctaatggacggtgctaaattgctgaaatgtagcgagttcggtgacgcgattatcaaacatatgtaa

SEQ ID NO: 303013 - DNA, 135 bp, Proteus mirabilis
atgaaaaaaatattttctttttttttaaaagaccttaaacaatctttaatattaagcattattgctattttttttgtcctttatagtgttttgattgttcgttttttccctatttctatggtcgaatactattag

SEQ ID NO: 303014 - DNA, 843 bp, Proteus mirabilis
atgagtaaggtcattggttcacttgaaaaggtactccttccttttgcggttaaaattggaaagcaacctcatgttaatgcgataaaaaatggttttatccgtttaatgccattaacacttgccggggcaatgtttgtacttatcaataatgtttttctcagttttggtgagggctcctttttttactctcttggtattcgtttagatgcctcaacaattgaaacacttaatggtttaaaagccataggtggtaatgtctataacggtacgttgggaataatgtcattgatggcgccgttctttattggtatggcgttggcggaagagagaaaagtcgaccctattgcggcgggattactttctatcgccgcctttatgacggtaacaccttatgacgctggtggcgcttatgctgtgggggcgaactggttaggaggtgccaatattatctcagggattattattggccttgtggttgccgaaatgtttacctttatagtgcgtcgtaattgggttatccgtttgcccgatagtgtacctgcctccgtttcgcgctctttttctgccttaattcctggttttattattttatcaattatgggaattatctcttggggattagcgcattacggtacacatttccatcaaatcattttagattctatttcaacgccattggcttcgttaggatcggttgtcgggtgggcttacgttatttttacctctttgctgtggttctttggtattcatggttcattggcgctggcggcacttgatagcggtattatgacaccttgggcattagaaaacgtctctatttataccgagtatgggttcagttga

SEQ ID NO: 303015 - DNA, 1212 bp, Proteus mirabilis
gtgaaaaatcgcactataggcagtgtatttattgttgcaggaacaacaattggtgcaggaatgttggcaatgccacttgctgctgtgggtattggctttagtaccatggtattattgctggtgggcttatggctattaatgagttacaccgcgcttttattagtagaagtctatcaatacaacgatccccatacaggccttggctctattgcgaaacgttatctgggtattggaggacaagtcgttacaggtttagctttgctacttcttatgtatgctttaacaacggcttatatcagtggtgcgggtgaactattagcttcgactttatcttcttggattggtcataagataaccatcacacaaggtatcattatctttacagttattggtggtgcggtagtcggtattggtaccacttctgtggatatgattaaccgcttactctttacagcaaaagttattttcttaatttttatgctggtagtcatgttaccccatgtggaaaaagtcaacttaacctctatgcctatcgctcagggactcgttttttctgcgatcccggttatttttacctcttttggtttccacggtagtgtacccagtattgtcagttacatggatggcaatatcaaaaaactacgcctcatatttatcgtaggtagcgcaatccctcttattgcttatattttatggcaattagcaacattaggagctattcccaccaccacctttatggggattttagcccaagaatctggcttaaatggcctactcaccgccatccgtgatgtggttgctacaccgcgagtcaatattgctgtcaaccttttcgcagcccttgcactcgccacctcttttttaggcgtagcattagggttatttgattatctagctgatttatttaaacgcagtaatcgcgcatctggtcgttttcagtctggtttattaacctttgttcccccgctattctgtgcgttatttttccctaactttgtgcaagccttagcctatgccgcaattgctttatctattctcgcactattattaccagcacttctggtatggaaagtaagacagcaaaagcagactacagagcattataaagttaaaggcggtaagccagccttagccatcgtatttatctgcgggttagtagtgattggtattcaaattgcgattacctttaatatattgccacaagtgggttaa

SEQ ID NO: 303016 - DNA, 183 bp, Proteus mirabilis
atgcaggcagtaggacttaaattgccgtttaaagcacgttcaaaccctattccatggattaatgcttggttagtatctgataatgtgcaagttgcaccacaagaagttgaagtaagctcatatctagtaggtcaaatcgactcacaagtagatactgatgatttaagtaacttcgaactgtaa

SEQ ID NO: 303017 - DNA, 513 bp, Proteus mirabilis
atgaaaaaaatcatgataacggctctattggctttatttttatcgggatgtgataacaacccgccagcaccctacgggtttaagtgggggcagactgtggcggatatacaaaaattaaatattgctggcgctagcgagtgcaaagacccagcttgctctattatggtaacacctagcggagcacatggattaacaacattaattttctataaagattcaggattggcacaagtggtacactcagagccactgaacgaaaccaacaaagatgatgtaatggcaaggtttaatcatattagtaatgagttgaaatcaatttatggtaatccaaccagtgaaataatacgtattgatgatgagaataactttattgactgtttaaaacaaattagctgtagagatatcaaggcagaatataacaaagatggttatcgggcatttatctcaataggaacgagaaaaaaagacgggagattattcattttcaccgatcaccaaagacctctaaaataa

SEQ ID NO: 303018 - DNA, 264 bp, Proteus mirabilis
atgggaggctatgatggtcatcgtggctcgctttactatttgggcgttcatcctgagtttcgcggtagaggaattgccaatgcactaatctctcggctagagaaaaaactcattgcaaaagggtgtccacaaattactttaatgatccccgaagagaacgatgccactatttgtatgtttgaaaagcttctctatgaagatcaaaatcaagagaatacggcttacactaaacgcctaattatcgatcaggacttcgatctttaa

SEQ ID NO: 303019 - DNA, 1686 bp, Proteus mirabilis
atgaaaaaaaaagttgttttattaacactattaagctgtttttctaccagtggattaagcgcaaatgaaacaggaaatttaggctcaatcagtgaatcaaggcgtgcattgcaaaatagccaacgtgaaattaatcaattaatagaacaaaatcgctatcagcaactgcaagaaaaagcggtaaatatttcacctaccccaactttaattactgagtcagaacactgtttgcctataaaaggcgtttatattcaaggtattactttacttactgagaaggatctcaattcattatctccgttacctgatcaatgtattaagagtgctgatattaatcgcctcgtgaaagaactcactcagcgttatcttcaacatggttatattaccgcgcgtatccaatttttacgtcctaaccaacatggcgaattaggtctgtatgctattgaagggtttgttgaacgtattgaagggggtgatcgaggtgttaacaccacactactatttcctcgaatcaaagggcaaccattaaaactcgctacactcgatcaaggcttagatcaagcaaaccgtttgcaatcaaataaagtcacagtggatattcttcccggtaccgaattggggggctctgtcattaagttgtctaatcaacgaaaatcaccttggcatctcaatatcgctagtgacaattatggacagaaaaattcaggccgctggttaatacgaacgaatgctagtttagatagcccattaggtttatctgattttgtaagcttaaatgccaatataaccacagataacccgaatacccgttttaatcgtgcttatactttgctctattcaattccttatggtggttttacttttagctcttttggtagttattcggagtaccaatttcaccaaaaattacaaacacgtactgtcagcttatatggcgataccactcaagtaggtattagaggcgattatgcttttagccgtagccaaaaacaaattgataccttaaatattcaagtcactcataaacgtatacgcaactactttagccaaattcgtttagatctcagtagccctaaattaaccacgattgaattagggattaatcatttgcagattattccaaatggcgtattgagcactaatctgagtgttgaaaaagcggtcggctggtttggcgcagaggaaacaccctatatcgctaacggtaatggtaacgactatcgctttacaaaagttaagctatttgccaattggtatcaacgcttttctctatggcattcaacatttttattcaatagttcttttttaggccaatacagccacgacacactccccggcgttgaatggctaagtttaacagacaaaaacgccattcgtggttttgatcaaagcacactttctggtgataacggtggctatttacgcaataccctctcctatccctatcgacttaaccacttttctatcacacctcgtataggggtagatatcggtcaagtaaaacaacatggtaactacaaaggatggcaaggtggttacggcctaagctccggcttaaatattcaatatcaacaagcacaactcgaccttgaagttgcaaaaggcgagttactgtatcaccaaacaaattccaataaaaccaaagatcctactcaactactggttaaattttcatacttattttga

SEQ ID NO: 303020 - DNA, 393 bp, Proteus mirabilis
  misc_feature (334)..(343): n is a, c, g, or t
atgatagaaaataaccgacaccccttcgcttgcacaacacttgcgattactgacaagaaaaaacgtgtttatcatggtcggacaatggagttttcttctgatgagccaacgtctattttagcttattatccacaaggtcatacttttcagcaaaatgcccctgatggaactcccggattaaagtacagcgttaaatatccttttatggctattaccgctcctattaacttatcgggtaccaaagatgtacttgaaggtgtaaatagtcagggactctcttttagcttaaatatgctacctaactctaagttagatgatctcgatccccaatatnnnnnnnnnnatattacgcaagctctgttcctattgctgctattggtgagtgggcattag

SEQ ID NO: 303021 - DNA, 1704 bp, Proteus mirabilis
atgtacgaatttgatttaattttgctgttattacagcaaatgtgcgtttatctcattattgcgtggtttctcagcaaaacgccgctatttacgcctcttttacaagtgactatcaaacttccacataaattaatgtgctatgtgattttctccattttctgcattatgggcacctattttggattgcatattaatgactctattgctaatacccgtgctattggctccgtattaggcggattattaggtggcccgtatgtaggctttctcgttggcttcacgggtggcttacaccgctattccctcggcggaatgacagcgttaagttgtatggtatccactatcgcagaaggattaattggtggattagttcatcgttattatgtaaaacatggacaaatgcaccgcatatttaatccttggacagcggctaccgtcaccttttttgccgaaataatacagatgagtattattttattactcgctcgtccttttgatgaagcactttctttagtaaaaaatattgccgctcctatgattgtagcaaatacaataggtgctgcgatgtttattaggatattacaagatagacgtgccatttttgaaaaatataccagtgctttctccgctcaagcattaaaaattgcggtttgcactgaaggtattttacgtaaaggctttaaccaagataatagtactcgtgttgcaaaagttatctaccaagaattaaaagtcagtgctgtcgccattacggatagagataaactactcgcttttattggtattggcgctgatcatcatttgccgggtacaccgatttcctcagaacaatctaaacaagccattaataataacgaagtcgtgtatgcggacggtaatgagacaccttatcgatgtaccctttctccacattgtaaattaggctcgacactggttattcctttacgaggagaaaataatcgcgttattggcaccataaagctctatgaagcaaagaatcgcttatttagctccattaatagaaccttaggagaagggatcgccagtctattatcagcacaaattcttgccgggcaatacgaaagaaataaacaatcactattagaatcagaaattaaattactacacgcacaagtcaatccccactttttatttaatgcattaaatacattacaagccgttattcgtcgtgatagtgatcaagcaaaacagttagtgcaatttctgtcagctttttttcgtaagaatttaaaaagacccgaagcgatagtgacactcagtgatgaaattgaacacgtcacggcttatttacaaattgaaaaagcgcgctttcaagatagtttacagatagatattcagatacctgaacatttagccactgcgcgccttcctgcattttcgcttcagcctatggttgagaatgcaattaaacatggaacatcacagttattaggcatcggaaagattacaattagagcgcatcaagaagaccacttaatagtgatcgaaattagtgataatgcagggctttatcattcgcaaggcgcatcacatcagctcggtttaggaatgagacttgtcgataagcggattaaattacgctatggtgatctatatggtgtacttgtggagtgtcagcctgataactataccaaaataaaaatctgtttacccttagaaaaaaatatggataacgcagcataa

SEQ ID NO: 303022 - DNA, 1704 bp, Proteus mirabilis
gtgcttgacctctcatttcgctatggctctattgtcagagatatgaactatattgaagatatctccgatatgatgctgcgttatccgattaaaaatattcttaatgcagattttattgccgatgactatcaaccttctgcgatcctttctcgcctaggatcgcttacaccagaaaatgcgcgtatttgggtgattagccctaatgagccttcaaataagcaagcttattttgttcatgcaccttatcaagtggataaaattactgcgaagcaattagcttcatggcaggaattagccagcgacatctcattgtcattgccgacactaaacccttatattcctgataatctgtcacttattgatgctgatagtaacatcactaagcctcaattattatggcaagacagtcatgctcggttattctatatgtcatcgcactatttttctgatgagccgaaagccagtgtgacgttaagtttagtgaacaaaaatgcagatcgcacagttaaacagcaagttatacaaacattgaccaattaccttgctgatctaacctctagtgaattggcttatcaagcttctgttgccggcatgaatatctcctcttcttctgggcgtggagtcgatttctcagtcaatggttatactcaacatttaccagagctagtaaatgccacactaaaaagctatataacgtttgaagctactcagcaagagcttgatcaagctaaatcttggtatcgtgaacaactggaagtgacgcataaccttaaagcgtatgatgctgcaatgttacctgcccgtcgcctaaatacgatcccttattatgaagaagccgataaacttaaggcgttagagtcgataacgttacaagatattaaagataatcgtcgtgatgtcattgaaaatgcagcgcttcaagcattaattatcggtaatttaacgccagagcagagccgtgagatagttaaatcggcacaagcattattaggcaataaaggaacagaatattggattggcgacacattagtttttgataaattaaatcaagttacattccaaaataaatctaaaagtaccgataatgcgctaggggaattgtttatccctgttggctatgagcgtctacaaggaaaagcgattacatcagtattatcctctatcgtgcatccttggttctttgaacaactcagaacagaagagcaattaggttatgcggtctttgctttccaagcttcaatgggcgagcagtccggtttaggctttttactgcaaagtaatgctaaaccaccagtttatctcaatgagcgttatcatgcattttatcaacaagcttatgatcgtttgaaaaagctaagtgaagttgaatttaatcaatataaaaaagccattattgatgaagtaaaacaaccaccgcaaacattttatgaagaggtttctctttatcgtaatgatttttatcgtaataacttaaaatatgatggtcgtgagaagtttttagcccaactgaataaggtaacgctaaaacaagcaatcgaattttatgaaaaagcgataattaaaccgacaggactcgtgtttgtttcacaaataatcgggaaagagggtaacaacgctgattatgcgcaaaataaacagtggaaaatctattcaaccgtgagtgaattacaaaaaacattacctgttgaggaaattaaagagtga

SEQ ID NO: 303023 - DNA, 765 bp, Proteus mirabilis
atgatttcagatatttgtcctattgatgatcttattcaacgctcaggacgattacatcgacatacacgaacaaaatatggggattacacatcagaaacgattgataaacgtcgacctcctattttatatgtacatgctcctttatttatagagaccccatcaagctgttggttaacagaacaattttcatcaacagaaacagtttatcgttcacctggtcgtttatggctaacattaagaagtttaactcgattaggtgaaattaatatgccaaaagatgcgagacagttaattgaatccgtctatagtgataatgcttacaatgaaattcctcaatctttaatacaaaaagaaaataatgatataggtgaaaaaaaagccagagtatcaaaagcaaaaattcaattattaaagataaataaaggctatagtgaagaaagttcagaattttggacagaagatcactatgatattagtactagatatagtgatatagaaatggttaatattcttttattaaaaaaaataaaagataattatgttccttggatagaagattctcatttttctattgctttaagtacagttaagatttctaaaaagaaatatgctgataaattagtatcagtaccccaagaggtaattgatacaattaataagcaatatccacaggcacgatatttacaattgtggataccagatgaagatcactattatcaatatgatcatttaatcggtttttgtgaaagacaggaattgtcatga

SEQ ID NO: 303024 - DNA, 1194 bp, Proteus mirabilis
atggcaacaaaaaatatagttattattggcggtggtacggggggtactattctcgctaatatcttagctaaaaaattaaatgatgaaatattttcaaaaaaaataaaaattacgcttatttcagataatccataccattattacaaacctgcatttatgtatattgcatttaaccttttcttaaaagaagagttaatgcgatcacaaagaagtttattaagaccagaaattgaatttgttatagataaagctgaaagtttcgattttaataataaaacagtttattgttgttctaagaaaaaatatcactatgattttctggtattagccacaggatgtgttcctcgtcttgatagaattgaaggtttagctgaagctggaaatcatttttatcaatatgaagctgcacgaaaattagcagataaaattgctaccattgaaaaagggcgtgtatttatcacggtaactttccctgaaacgccaaatgtacctcaccaatgtggtattgcaccaatggaaacaaccttgatgctggatgaatttttacgtcagcgacgggtaagaagtaatatagaaattgtttatacctatcctaccgtagctcaactattaagaaattgtctttttatgcagcaagaagtttgtgaagtgcttcctgcggtcttttctgaacgagatatcaaagcaaagcgtggttttacattaagtcatgttgatcctgataagaaaatcgcctattcgaaagaaggagaagcagagccttttgatatcttaatgagcacacctcctataacagcggtagaagccattcgtaatacaggattaagtgaatataacaatggtgaaggctggttaccgaccgatcctgaaacattacaggtatatgggttaaatcaagtttatgtgttaggtgatacggttgatttgcctattagtaaggccggtggtagctgtcataaccaagcgggtgttatagctaataatatttgtggtgaactgcgttatggttatccggcagcaatttatgatgggcgagtacaagctgttgcccaaatgggattatcagcgggtatgccattacagtatgactataaacatgatgttattccaacacctccaacaaaactcggtggcatgttacgtaacggttataaccggggcttatattgggcaacggtcagaggattattgtag

SEQ ID NO: 303025 - DNA, 501 bp, Proteus mirabilis
  misc_feature (486)..(495): n is a, c, g, or t
ttgagacgtattttagtcacaggtggcgccggttttatcggctccgcagttgttagacatattattgataacaccaatgacagtgtcgtcgtggtagataaactgacttacgcgggaaatttagagtcacttgccccagtggcaaacagtgaacgttacgcgtttgaacaggttgatatttgcgatctcgctgcacttgatagtctatttgcgcaatatcaaccagatatcgtgatgcatttagccgcggaaagccatgttgaccgctctattgatgggcctgcagcgtttattgaaactaatattgttggtacttacaccttattagaagctgcacgtcatttctggtcagtattacctgaagataaaaaagcggcatttcgtttccaccatatttcaactgatgaagtgtatggcgatttagaaggaacggatgatttctttactgaaacgacaccttatgcaccaagtagcccttattcagcnnnnnnnnnntcctaa

SEQ ID NO: 303026 - DNA, 597 bp, Proteus mirabilis
  misc_feature (560)..(569): n is a, c, g, or t
gtgaaagtgttgactgtttttggcacacgccctgaagcgatcaaaatggcacctttagtgcacgctttagcaaatgatgattcgtttgaggcgaaagtttgtgttacggcccaacatcgagaaatgcttgatcaggtattaaatcttttcgagatcaaaccagattatgatctcaatattatgaaaccaggacaagatttaacagatataacctgtcgcattttagaaggtttaaaacctgttctagcgtcatttcaacctgatgttgtgttagtacatggtgatacaaccaccaccatggcggcaagccttgctgctttttatcaacaaatccccgtcggtcatgttgaagcgggattacgtaccggtaatctctattctccttggccagaagaagcgaatcggacaattgccggccatttggcgatgtaccattttgctcccactgaaactgcaaagttaaatctggtgcgagaagcggttgcggataaaaatatttttgttaccggcaataccgttattgatgcgctattttgggttagcgagcgagtgatgggaannnnnnnnnntgatgggaaatcaaaccctgctcgatga

SEQ ID NO: 303027 - DNA, 273 bp, Proteus mirabilis
gtgcctttattgcaatcacagttagaaacattaatggcaacaggaccagattttgatagtgattatgatcaaaatacggcaatgttatccaccctcgcggtaggtgctaaattacaagataacttccaaacttaccgtttcttacgtacacctgaagatcctgtgaaacgagatagtcctcgccgtgcctttatgatggtgctttggggtgctattggtgttttagtgggcgcgggtgtggcattagtcagacgtagttcattaaaaaaataa

SEQ ID NO: 303028 - DNA, 708 bp, Proteus mirabilis
  misc_feature (598)..(607): n is a, c, g, or t
atgcatactcgttttcaggcaatttggtcagatttatcccctcaattacaacaagcacttacgccttatcttgagcaggatgaatttccggcaatgttcactgcagaacaagttaatgcgttaaaaacacagttacaatgtaatgatgatgagttagccctcgcattactgcctgttgcagccgcttgtgctgtgacacctatctctcattttaatgtgggtgccattgctcgtggtgaaagcggtcacttctattttggggcaaatatggagtttgctggcgccccattacaacaaacagtacacgcagagcaaagtgcggttacacatgcttggttacgcggtgagtctcgtttagttgccatcacagttaactataccccttgtggtcattgtcgtcagtttatgaacgaactaaatagcggcactcatattgcaatccatctcccaggccgaaaagtggcgaccttaggtgactacttacctgatagctttggccctaaagatctcaatatcactaccctactgatggataaagttaatcacggttatcaaatagataacactagccaactagcacaacaggcactacaagcannnnnnnnnnctattaactcagtgggatgccacacaagcaacattaacagctttaggttgtcgccaaatacagcgtgtcactttgtaacattttttaacttataccgttaa

SEQ ID NO: 303029 - DNA, 141 bp, Proteus mirabilis
atgcagatgttaggcggtgctagtaaatcagcaggatcacaaccagcacagagtagtcaaccaccaatggattttgaggatgatattcccttcgcacctattgggcttatgtatccacgccatttaattaatgtggtttaa

SEQ ID NO: 303030 - DNA, 276 bp, Proteus mirabilis
atgaaaaatatatttattacagcaacgttattattctgtttttctgcttcaacttattcttttgactccagtaaagaatggtatgagggatgccctaaatataccaatgaagaaatagaaaacttaaaaggaggtcgaatagaaacagttgaagaattacagcagtactcaaaggaatatctagaagaaagtagtaaaaaaattgactgtgaaataaaaaacctagaagaatataaaaaacgtttaattaaaaaactagaaatagaaagtaattaa

SEQ ID NO: 303031 - DNA, 315 bp, Proteus mirabilis
atgcaagatgtaggtaaaccagagcaaagtaacgatttatttattgcaggcttaggtgattgttttattaaagatactgttattaactcacccaaaattaaatttagtgcgtcaggtgatgcggtatttagtggtgtgcttgtcagcaataagttagagcaggacatcaaggctcaattgattgatctccgcatgaaagccaatcaacaagatgttgctatcaatgagttaaaaagagtaatggaaactcagaataatgcattggcgaaagctctgaatgatttaactaacagaacgtggtgcagtcagaagtaa

SEQ ID NO: 303032 - DNA, 1392 bp, Proteus mirabilis
atgaattttccgttaattattaacgtactcgtctttgttgtgctattactcatcttggctaaattaagccaacgtcagtggagcctgtcaaagaaagttcttgtcggtttggtctttggggtggtgtttgggctggcgttacatgcattctatgacgcacacgatcctattattaaagaatctatcctttggtttaacatcgttggtaacggttatgtacaactattacaaatgatcattatgccattggtatttgcttctattttaagtgcagtatcacgtttacaccaagcatcatcattgggaaaaattagtgcactaaccattggtacacttctatttacaacggcaattgctgctcttatcggtattgttatagccaatatctttggtttaacagctgaaggtcttgttcaaggggaacaggaagcgcagcgtttagccgctattcaacataattatataggtaaagtgtctgacttaactgtacctcaattaattttatcttttattcctaaaaatccatttgccgatttaactggtgcaagctcaacctcgattattagtgtagttatctttgcggtattcctaggaatggctgcaataaaactgcttaaagaagataaacctcgcggtgaaaaagtattagcagcgattgatagcttacaagcgtggatcatgaagttagtccgtatcgtcatggcattaacaccttacggtgtaatggcactgatgactaaagttgtggcaagctccaatctgcatgacattattcaactcggtagcttcgttgttgcctcttatgttgcgctgggcttaatgtttgtcgttcatggtttattagttggatttactggcttaagcccaattaaattcttcaaaaaagcaggaccattattagcatttgcattcacaagtcgctcgagtgcggccagtattccattaaatatcgaaacacaaactcgtcgcattggtgttcctgaatcgattgccagtttctcatcgtcttttggtgcgacaattggtcagaatggttgtgccggtatttatcctgctatgttagccgttatggtggcaccaacagtcggtattaatcctttcgatcctctttggattgccactttggtgggtatcgtaaccattagctcagcaggtgttgcgggtgtcggtggtggtgcaacctttgcagccctgatcgttttaccagcaatgggattactcgttacactggttgccctactgatttctgtggagcctcttatcgatatgggtcgtactgcattaaatgtcagtggctctatgaccgcaggtactattactagccaaatgatgcgccaaacagataaagagatctttaatcaggaagaagaagctgaacttaatgttaaataa

SEQ ID NO: 303033 - DNA, 552 bp, Proteus mirabilis
atgaaattacgtgttttggcaacggcattaattgctggctcagtgcttttttctggtctggcaaaagccgataaattagacgatataaaacaggcaggtgtggtacgcattgctatttttgatagtaacccaccgtttggttttatcgatccacaaaccaaaaaattggcaggttatgatgcagatattgcgaatgaaattgccaaagatctcggggttaaattggaattacgtccaactaacccagctaaccgtatcccactacttagcgccaaaaaagtcgatttaattgccgccaacttcaccattaccgaagagcgagcaaaacaagtcgatttctctgtaccttattttgctactggacagaaatttatcgcgcgcaaaggcgtattaaccagccctgagcaaattgcgtcattacgcattggggctgacaaaggcaccgtacaggaaattaccttacggaacgctatcctgaaactaaagtcatctcctatgacgatacccctcttgcgtttgccgcattacgcaatggcaatgtacaagcgataa

SEQ ID NO: 303034 - DNA, 258 bp, Proteus mirabilis
ttgacggcgaaaggtcatgcgccttttgattttatttcacgcttttttgcaccacgtaaaggagttaatgaagatccagtaactggcacttcacattgtgtattagctccaatttgggcaaaaaaattaaacaaagataaattaaatgccagacaagtttccgcgaggggaggcaatatacagtgtgaactcaaacaagagcgcttattgcttacgggtgatgctgtactatttttaaccggtgaaataaccttttaa

SEQ ID NO: 303035 - DNA, 378 bp, Proteus mirabilis
atgaaagtgaaaaccaaattattatcattacttgtgatgggtgctctcagtgcccctgtattggcagcaacacccgccaatacattgattgtagtacaaggccttgatgatattgttagccttgatcctgccgaaagtaacgaattatcaagtattcagaccgtaccaagtttatatcaacgtattgttcagcctaaccgtgacaatccagaaattaacgagccaattttagtcgagagttggcaggctcaccctgaacaaaaatctatcgtctttaaaattaaacaggatgcaaaatttgcctccggtaatagcgtacgcccagaagatattatcttctcttaccagcgtgcagtgacgatgaaaaaaagtcagtga

SEQ ID NO: 303036 - DNA, 624 bp, Proteus mirabilis
  misc_feature (17)..(26): n is a, c, g, or t
atgaatactattaaacnnnnnnnnnntagtaaaactaagcctgtgagcgatatcgaaaaagcaattgcatgtggacaaactgaatttggtgaaaactatgtgcaggaaggtgtagataaaatcagctattttgctgaaaacaaaaatttagtttggcactttattggcccattgcagtccaataaaacacgtcttgttgctgaacattttgcctggtgccataccatagatagattaaaaatagcgcaaagattaagtgatcaacgtccaactacgttaccgccactaaatgttttgatccaaataaatattagtgatgaaaacagtaaatcagggatctctcttaccgagcttgatggccttgctgcacaaatatccattctgccagggatcaaactgcgcggactaatggctattcctgccccagaaaatgactataacaagcaagtcgaggtactagagaaaatgcatcaggcatttaaacagttacaaaatcagtaccccgatattgatacattgtcgatgggaatgactggtgatatggaagcagcaattgcctgtggctcaacactggtacgtattggaacggccatttttggcgctcgtgattacgccaataaataa

SEQ ID NO: 303037 - DNA, 129 bp, Proteus mirabilis
atggcaagacaaaccaaacccttatcagcaaaagagatcgacgtagcaaagccaaaacagagtgattatgtcctctatgatggcgatggattagaactattggttaaatccaatggcagcaagctgtga

SEQ ID NO: 303038 - DNA, 894 bp, Proteus mirabilis
gtgaagaagtccaccgtaaccgaagattacggtaatgatatttggcgttcacttgaacgagatgtgttccctgccattggtgacatcagcgttaccgatatcaaagcgcatatattggttcaagcaatacaaccggttcaagctagaggtgcgctagaaaccgttcgtcgcctatgtcagcgtatcaacgaagtgatgacctatgctcaaaatacgggcttaattgatgccgttccaagtatcaacattggcaaggcttttgaaaagcccaagaaaaagaatatgccaagtattccccctgatcagctcccaaagctcatgcagacaatgcgtacagctagtattagcttatccactcgatgcttgtttatgtggcagctactcaccatctcacgccctgccgaagccgctgaagcgcgttgggacgaaatcaactttgaaaccaaggaatggaagatacccgctgcaagaatgaagatgaaccgtgagcacactgttccgttatctgacgctgctttagctatcttagagctaatgaaaccattaagtggcaaccgtgaatatatcttccctagccgtatcaagcctacccagcctatgaacagccaaaccgtcaatgctgcattgaaacgcgccggattcggtggtgtattggtttctcacggtcttcgctcaatagccagcactgcactcaatgaacaaggtttcccacccgatgttatcgaagccgccctcgcccacgttgataaaaatgaagttaggcgtgcctataaccgcagtgattacttagagcaaagacgccctatgatgcagtggtgggctaattttattgaagcggctgataggggaagtattattgaaggtggtataagagggatatcgctagttgggtga

SEQ ID NO: 303039 - DNA, 4671 bp, Proteus mirabilis
atggctttggaagctggggggtatgcagaaaaatttggcaatagatatgaagctaactgggtggcctaccaactgcttcgcctacttgaagaaaaaattcattggattacgatcgaacctattggagatgacgaagttggtgttgatgtaataattggcacgtttcaaaatcaagcagagcatcatcaatgtaaagctggcgtaggtaataatgaacattggaccttatctcaactcaatgaatccaatatttttaacaatgccttatttcaaattgaacgtggaatcaccgagtttcatcttgtctcccccctacccagtaaaaaaatgagtgatctcagtgatagtgcgcttaatagcaacatgattccagatgattttatgaagtaccaaattaaagttagccaagaacgtgaaaaagactttaatgccatttgtagttatttgaaattggatgtaaatattccttcggatataaacagagctattcattttcttcaaaaattcaagattaccccttatattattaatcgttatactcaatatgagcttgaagataaagcttctatgttatttttagataatccagtaaagctactcagttttcttaaaaattatccagtagagtttaacaaactaaggaagaaaataaccttatctgagttattagcagatttaaaaacgagtggctttgaacaaaagattgcacccgaggaccatagaatttcaactgtgcttgatactctttctatcgagtttgaagaatcaatcaaacctttccttatttgcaacacattaattccgagaaatgaattaaattcgatcactaactcaattaaagacaacgcagtaaccttaattaaggcagaagcaggaagagggaaaagtgctttacttttagaattacataaccatttaaaagctaacaatatcatttctgttcctgtgagattagatagaaggcggcctgaacataacacaaatgagtttggaaaatctttagggtttccttattctccagttcatagtttaactaagtttgctccacaacaaaaaatagtatttattcttgatcaacttgatgccataagatggactgcctcacattcgaataatgcgttaaatatctgccgagaaatcgttaatcaagttattaacacaagaaaagagggaaaagatatcagtattgttttagcatcgagagattttgacttaaatgaagatattgctttatccagttggctaaaaagtattaacgatgatcttttagatatcgaattaactcttttagatgaaaaaacaatagccccgttagtttcaccttatgaagtttatgcatctttagcggaagaaaaaaaagagatacttaaaattcctttatggttgggtatttacttatctattgcacagcgtactcaaactgcccctcaatttaataataaattagagctagtcaaaaatttttgggaagataggctaaatcaaatcaatcagtgtggaataacagaacaagaagcgacatgtcttattgatgaagttgtaacattgatgattcatcaatcacaattatcgatttctgaaaatgtactaccaacaggaacgaaaaaacaggttgaggcactaatttctgttgggttactcagcaagcagaatcaaagaattagctttcgacatcaagctttattcgattatcaagtaggggccaaattttttaaagctggaagtgaatcaccagaaggcctcttggcagtaattggttcttataaggaacaaaccctaacaaaaagagagcacctcaaatatgctttaaatatgctattagactcggggcaagctgcattttgtcactgtgttgaagccatcttattcaataataatattaggttccatctaaaatatttagtcttaaactcaattaaagaaattaacagtatcaaaaaacccgcaaaattacttattgataaaatcatcacagcccctctgctttttagaaagttcctcacgataagttgctattcaaatattgctattattcgccaccttagtgaaaacctgaacattttaaaatggctacatagtaacgatgaaaatttaattaaccttactatcaatttactccgttctatagccacaattgagccaaaattaattaccaaagagctatcggccttcattgggcaatcggagcagtggaatcaaagggtgtactctgcattaccatgggacattaaagatgatatggatgatatctttgaacttcggaagagattacttaatttaggttgtacagcaagttatattgattggaagtcattgagcaaaacatatccattacgtgcactctttttcattgaattaatattggaacattatagaaacgttatctgtgaatatccatactcctataatataaaaaatattaataagataacgcatcgtgacggttggactgatgatgatcttaaagagattaaaaggttggcagtagtagcaccaatacaaatgattgaccgttttcttaaatatatagatagtgtttttagttcaaaacagcatgaatatgctattcatcaatggtttgaacgatctaggcatattaattatcatgatgtaagtagtattcgaaatggactctttacacttattgaggcggcagggcaacagttagaggctcgccctgacacattgctagatcttatgacaccttatatggaaaaatcaaatgctgtgataacgcatttggttgcgacactgttattgaatttaccaaaccaatatgcagatttggtcataagttggctattggcctctccgacaatccgtttagcctgtggcaatgagtatattgagcctgcctgggttttaccaggaaaactcataactaaattttcccctcattgttctaatgagttattttttcaattagaaaaaacaatttatttttttccttcaacaaaagaaattggacagataaagcggcaattagaagatagaagaagaggtgtatattctagttattggggagagttgcaatattttctattaccaacattagatcgtcaacgcatattaagtgaatcaaaaaaattaatcttagtacttacgcgcaaatttcgatcatatactgatgctgatttttgccttattaatagttatacaggagggcacattatttcgccgttacctaacggcaataagctttctaataaatcatggagcaagctaatactaacgccggagtttagattttcgcctaataaattaactcaagtcagcgataatgttgcttctcaagccgatattagctcgtttgctcgtaatttacagtcgaacgtgataaatgaacctgttcgttttgctcaatttgcactttcattgcctcaaaccattcataaagagtatattgatgcttttttttatggactcgctgaggtaaataataaacaagtaaacgatagtgataaagaacctaaggaaacttgtcctatagaattaatagagaaagtgattcttcatttcaataataaagattgtgggtactctctggttagattattaagcagtagatctgctagttggtctagacagattattgatatactagttaatctagcaaaatattcaactaatcctgaaactgatcaattaacggtttgggactctaaaaaaggaaaaacgacagatttcgctgatgctaaatcattgcttagtacaacaattaattgcgttcgaggtattgcttaccaagggattgctgatattttttggaacaacaaaatatttgcattagacaatcttgaactagtcgattgtgctattaatgatgaacatccttcagtaaaaatcgctgctatttttcttttaactccattgctaaattataataatcattatgcccatgaaaaatttattgagctgtgttaccaagatctacgtatgacatgtgggcatggtgcttatcatttctttaatcaaggttttgaaggaaagtatcaatcacaatatatagatttagtgctatcaatgctaacctcatcctatgatgaagtaaggaaacaagccgcaacacaaatatatgctcgctggttttttaatgatctatttgaggaacaacttaacacaatatatcaaggtgataatattctaaaacaaggatatgcatctgtcgtttgtcagtttcttaaagaagataaatacaatgataaaatcgatagaatagagcatgcctatcaattattaatcaatgatgataatgatgaaatactaagagaaataggagtatgtattggatatgaaagctattggctcaaacctaatgcagataaattatttaatctttttgttacatcaaaggctgttaagcattcgttatatcaactatttgattcattagaaaaatatccccaaaatttatctaacttaagcgacactattttacgattaataaaaaatatcacgggcaattacagtgtaaatgatcaaccactaagaatggatgttcaagagtcaagtctacttgccgttctacaaaaattatatgatgaagccacagaagaccaagataaagaggctcttaatatctgtttagatatctgggatacattactgcaatctgaaatgtattcagcaattggagcaataaatatactagatggaggtctgcttagttaa

SEQ ID NO: 303040 - DNA, 255 bp, Proteus mirabilis
atggtagctaaaacggtatttggtccaaaaccggatgtggttgccaaaggtgaattaggtctgttaaccacactaccgatgatcattttgattgcgcttatgttgttaatgggaacacatattcctaagccagtcagtgagttattggagaacgcagccaatatcgtgatgaatatcgatgagagtggatcaccaaattatacatggccaacaacgttaatcagcaatccatcaatatcgcttcaggagaagtaa

SEQ ID NO: 303041 - DNA, 1320 bp, Proteus mirabilis
  misc_feature (1302)..(1311): n is a, c, g, or t
atgaatcaaacaaccatgttaacaatcttaatgtttgcaccgctggtattttcgatattggcatttttaagcccattattgaaagcagcagcacgttctatcgttacaggcattcatactataggtatttttgtcttagttattgccgcgttaggcactgttgctgatgtgatgtcccatggcgaaatattggcggcagcgaaatgggttcatgttgatagtttaggggcactatttctagccattttaggcatcattggttttttaaccggcctgtattctattggttatatgaatcatgaagtggatgagggcgaaatttctgttcgtactttatgtaactactatggtttcttccacctcttccttttcaccatgttattagcgatcaccagtaataacttgatcttgatgtgggccgcgattgaagccacaacattaagctctgcttttttagtagggatttatggtcaacgctcttcattagaagctgcatggaagtacattattatctgtagtgtcggtgtcgcatttggtctttttggcacaattttagtttatgccaatgcagcaagctttatgcctgatcctgatcaggccatcttctggacagaagtgttgaaatatacacatcagttagatccaacactgatgcatttagcttttgtatttattttgatcggtttcggtaccaaaaccgggttattcccaatgcatgcatggttaccagatgctcacagtgaagcgccaagccctgttagtgcgctgttatctgcggtgttattaaactgtgcgctgttaatcattattcgttactacattattattgatgcagcaataggcactgaattcactcgtaacctattgttaatctttggcttcctctctgttgctatcgccgcgttctttattctgatccagcgcgatatgaaacgcttattagcgtactccagtgtggaaaacatggggttaattgcagtggctctgggtattggtggcccgattgggattttggcggctttattccacacgttaaaccacagcttagcaaaagcattgctgttctgcggctctggtaacgtgttactgaaatacggtacacgggatctaaatgtcgtgaaaggcatgtttaaagtaatgccattaagtgctgcattatttgctggcggtgctttggcattagggggcatgccaccatttaatgtctttatcagtgaatttatgattgttgttgcaggcttagcagctaagcatatgggattaacaattctattattattgttattaaccgtagtattaggnnnnnnnnnngtggattag

SEQ ID NO: 303042 - DNA, 672 bp, Proteus mirabilis
atgctggattttttaaaaaattatgacaatttaaccgtcagtgaaaagaaagtattaaagtatcttaccgataatatcgccgatatcccctatttaaatattaatgatttagtcgctaaaacctttgtatcaaaaacggtaattattaatttatcgcagaagttaggttttagtggctttaaagagctaaagtttcaaattaataattatattctttcgcgtaataaaatagaaaagagtgatcactcatcttataaaaaacaactagagaagaatattaataaaagctttaccctcatcaatgaagagcaaattaaagagtgtgctaaaaccctgcgccattctcgtaatatttttattgtggcaaggggaacaagtaaagcagtcggttattatcttgaacacttattgtttgcactgggcctgcattgcttttttattaatgattataacttatcagattcgtttacacgtttagtgaatgaagatgacacggttatttttatctctctttcagggggaactaaaaagatcattgaaacggcaaaaattgtgcagttaaaagaggcaaacattatcagtatgacagcctttaataccaatgagttaaccagttatgcgacacatacgctattttgtttcgcggataatcatgataaaacaatcagttaa

SEQ ID NO: 303043 - DNA, 603 bp, Proteus mirabilis
atgttggaaaaattagattgtgatgtgcttgatttaggcgttattccagattcgccagaaaaactgcgagaaacctttaaaaccgctgatgcacaagcggatttagtgattagcagtggcggagtttctgtgggtgaagcggactatactaaacaaattttagatgaaataggcgaaattggtttttggaaattagccattaagccgggtaaaccttttgcttttggtcgcctacataatgcttggttctgcggattaccgggtaatcctgtctcagcaacagtgacattctaccaattagtacagcctttaattgcccgtttatctggttttagtcagtggcgagcaccacagcgtttccatgctaaaacctgttcaccattaaaaaaatctgtcggtcgtctggatttccaacgcggtatcgccagtattaatgaaaatggtgaatggcaagtaaccacatcgggacatcaaggctctcacgtatatagctcctttagtgttgcaaactgttttatcgtcttagagcgagagcgtggtaaagttgcagcgggtgaaaccgtcactattgagctatttaatcctctgctaaaaagcgaatag

SEQ ID NO: 303044 - DNA, 234 bp, Proteus mirabilis
atgtgtgcggtgcaattggcatttttacgtggtaaagagttggcacctgatcatgctcgttatatggcaggattattaacaacattttatgctattggacagctagttgggcctctggtttccttcctttcaacggcgttaacgggaagactagagccggcattatatgtcgcctttgtgatattgatcatcggcggtattttggtttgtatgaaagaaaacaataaagggtaa

SEQ ID NO: 303045 - DNA, 315 bp, Proteus mirabilis
  misc_feature (269)..(278): n is a, c, g, or t
atggttagatcattcaaaaccgtttgtttagagaagcgagaaaagagaaaaaagcatgctattcggcctgttgctatattgatctatttaattgttactggggcatccagtctttcaaattcagctttagcgaatagcgatattgagtttaatgctgatattttagatcttaaagataaacaaaatatcgatttatctgatttctctcgagctggctacattatgccagggcgctacgaatttgttgttcgtataaataataatgaacnnnnnnnnnnccgagaatttatattgcactcgtcctggtcgagttaa

SEQ ID NO: 303046 - DNA, 444 bp, Proteus mirabilis
ttggaaaatggcacatcatatagcacgctttttttcgaatacttatcttgtttgcaaatccttgctgccagtgaaactactccagaagctgctctaaggcgctttgaattagcgttattaacgcaattgggttatggcctagactttttgcattgtgcaggaagtggtgaacctgtttctgataccatgacttatcgataccgagaagaaaaaggctttattgcctgtttggtggttgatcactatagttttactggattggaattaaaatcgctggcaaaacgagaatttcctacggctggcacattgaaagcagcaaaaaggtttacaagaatggcattgaaaccttatttaggtggaaaaccattaaaaagtagagagctgtttcggcaatttgctattaaaaagtgtgcgaaaaaaagcgtattgatagaggataaataa

SEQ ID NO: 303047 - DNA, 372 bp, Proteus mirabilis
atgcatacacatactttttcattgctcggtgacaggctttatttaacctcatatcaacgtagctgcgatgtcccattagggttgaattttaatcaaattcaatgctttgtattattagcgctggtggctcaaatcacaggacataaaccaggtaaagcattccataagatagttaatgctcacatttatgagaaccaattacctctgatgcgcgatgttcaactaaaaagagagccattgccattacctaagctacatattaatccaaacattaagacattagatgatatagaaacttgggtcacgacagatgactttagtgtcgaaggttatcagtgtcacgaggcgataaaatacccgttcacggtgtag

SEQ ID NO: 303048 - DNA, 930 bp, Proteus mirabilis
atgtctgattttgtcaattttaatgagctggttgacagcattgtcatcgaaaaggattacggcgcgaacaggcctgtcgtggaaaaagaattgctacattatgacattctttatgctctttccgccacagggcttttaaagcacatcacatttcagggcggtacatcgcttaggctttgctatggatcaaacagatttagtgaagatctggactttgctggtggtcgtgacttctgttcagcgcaactgcttgagattaaagcgtgtattgagaaatatgttggtgaacgatatggcttggaagttgtggttaaagagccaaaagagctaagaaaagaacctgattatgcagatgtaaaagtcgataagtggcaaatatcagtgactaccaatccaggaaaaaaagacctaccaaagcagaagatcaaagtggaaatagccaacattcctgcatacaccaacacccttcgaacgcttgttaaaaactatgagcagcttcctagtggctattctgacctgattattagagtggaagagctcacggaggtcatggctgataaattggtttcattcccagcaacaacctcacgtattcggtatagagatatgtgggatttggtgtggttgcaccagaaaggggttaaaccagacgctgaactggtaatgaaaaaggttgccgattataagctcaatgagcattttgaggaatggttgcaagcaagaattgagtctttgcctgcattggttgcgagtgaaaagtttaagggagagatgaagcgattcttacctgtgtctgtcgtagatagaactctccttcacccagattttcttgaatttttacaaattactcttcatgaactgctagtcactatccaaacagatatttatggaagtaaagatccgaagccagtaaaaaaatttgaaatgtag

SEQ ID NO: 303049 - DNA, 1074 bp, Proteus mirabilis
atggctgattctggtgaaatgctagatgaagtacgtagtcaagtatttgatgatcgcgtctatgtctttacgccaaaaggggatgtgattgatttacctgcaggctcgacaccattagattttgcttatcatattcatagtgatgttggtcatcgctgtattggtgctaaaatcggcgggcgcatcgttccatttagctatcagctacaaatgggcgatcaaattgaaattattactcaaaaacaccctaatccaagccgagactggctaaaccctaatcttggttatgtgacaaccagtcgtggaagagcgaagatccacaattggttccgtaaacaagatcgcgataaaaatattattgcaggccgccaaatcttagataatgaattagcgccgcttgatatcaatatgaaagaagcagaaaaactgctgattgctcgttataacgtccatagtcttgatgaagtgctggcaggtataggcgttggtgatatccgtatcaatcaattagtcaatttcttacaaagtaagctgaataaagccacagcggaagatgaagacaaagaggcgttacgctcattagaaaataaaacggctacaccaaaaacaaccacgtcaggtggtggcagtattgtggtcgagggtgtcgggaacttaatgcatcatatcgcacgttgttgccaacctattcctggcgataatatcgttggatttattaccaaaggacgtggtatttcaattcaccgtgcagattgtgatcaattagctgagttactttctcacgcaccagagcgtattgtcgatgcggtgtggggtgagaattactcaagtggttattcattagtggtacgggttgtggctaatgatcgtagtggtttattacgcgatatcaccactattttagctaatgaaaaagtgaatgtgctgggagttagtagccgcagtgatgtgaagcaacaaatagcgaccattgatatgaatattgagatttataatctccaagtattagggcgtattttagcgaaactcaatcaattacctgatgtcatagaagccaaacgcttttctcattaa

SEQ ID NO: 303050 - DNA, 561 bp, Proteus mirabilis
atgactggattaattattaccatcgcgttattgggtcttattttttattattacaaccgtattatctctatgcgtgaagcggttatctcaagtgaaacagaaatatcggtacaactcgaccgtcgtggtaaagtgtttgatagcttattagctacagtaaaaaaatatcttagtcatgaagccgatgtttttactaaaatcaccgaattaagagctaaaacacaaagtagcaataaccaagaagcaaaagcagcagaagatgagctatcaaaaattgtttcaagtggtgcgattaatgtcgctgttgaaaactatcctgaactcaaatcagatactatcatggctaatttacaagaagagattgtctcaacggaaaataaactctcttttgctaaacgtggctataaccgtaccttagagcaatatcgtgcgtttatcgcctctatccctgcggtatttattgtgaagatttttccaagtctcgtgattaataaagaatactggcgtcttgatgaaacagcgattaaatcagaagaagcgcgccgtattaactttgattaa

SEQ ID NO: 303051 - DNA, 813 bp, Proteus mirabilis
atgcatgattatcaaatgcctttggttctattcaccgtaatgagtcaatgggggatcggtgccgtacttgccttatctctttatcaatggcaaacacaaaactccgccatgttaagccccaaagcgttacgtacaacgattgcccttatttggttaattgaagtaattggttcttctatgtcaatgggacacctaggcgagcctctcggcgcttatcgctcagtacttggtgttgctcactcatggttaagtcgtgaagctattgcctttgttatgttaaacggtttaatttccctctgggcattagcaagttggctacaaccaaataaaatacgccgtaatagcctactaggtctgttctgtggccttattggcttacccgttattttaataacagcacaaatttattatcaaatgcaaacacatgcgttatggcatacccccgcaacacaaataagttttattggtacggccctattattgggttttggctctgttattccttggttacagttgcaaggtaaaaaaaccattcatacattgcatttcggtgcttttatcggcttactgttagtattgatgggattagtaatacgagttcaaatttcaggtgctaacgtagcgagcttattgttatggtggcaagtcatcgccagtttaataataggatgtgttattatcacactatctcgtagctctttgtttacaaaggctttaatatcaattattactatttttatcctttttagcggtgaaatcgccggcagaatgctattttatggcaatgtgatgtcccaatcaccttggttttaa

SEQ ID NO: 303052 - DNA, 156 bp, Proteus mirabilis
atgaaaatttttattgctccctttattatttgtcgtgggcaaaaaaaagcccacagaggctgtgggcaaggaatgaaaataaaaagagggtatttggatcagatgtctatattaaagtctattaccggatatggaagtggttggctcaaatgttga

SEQ ID NO: 303053 - DNA, 2091 bp, Proteus mirabilis
  misc_feature (2075)..(2084): n is a, c, g, or t
gtgcgcctgataatcagtctactttttagcttttttctgactatctcattcaatacttcggtgtttgctgcggatgttgataaattacgtcaagatatcaaacaacttgaaggcagtactaatcctcaagatattgaaactgttcaggcgctacaaggcaccatcaattggataaatgatggtgaaaaagctcaagttaatgcggataattatcaaaagactattgatgaatatccgcagatcactcaagagctaagggctaaattactcgaagagagtcactcagttccaacaattccagaaaaaattactattcctgagcttgagcaaaaaatcattcaagtgagtagccaactgatggaacaagctcggctacaacaacaagagcaagataaaagccgtgaaatcagcgaatcactcaatttactccctcagcaactttcagaagctcgtcgtttactaagtgatgcaacggcgcgtttagcggcaataggggcatcaaacaccccactagcagaagcacaaaataaattaacccaagctgaagtcacagcacgaaaagcgatggttaatgagctggaaatggcgcaactttctgctaataatcgtcaagaaattactcgactgcgcttggagctatttaaaaaacgttatcaacgacttgatgtacaactgcaacaattgcgtagtttactgaatattaagcgccaagaagtggcagatctcgctttagaaaagacagaaatgctcgccgagcaagggggcgaactccccgagtttctgactaagcaaatcgagactaaccgtcaactttctcagatcctcaataaacagacgcaagaaatgagtgagttaaccgaaaaacagcgtctaacaacacaacaaacccaacaagtaagacagacactcacaaccattcgagagcaagcacaatggttaagtggctctacggcattaggtgaagcattaagaacacaattggctcgcttacctgaaatgccccgctctcaagagctggatagagatatcgttcagttacgtgttgaacgattaggctatgaagagatgctagaaaacctaggcaaaatccaacctcctgaaactgccgatggctcaaagctaccagaagctcagcaatatatttttgactccctcattcaagcgcgccaagagttactcaattctcttttatccggttatgactcccaaatcttagagctgaccaagcttaaagtagccacaacacaacttgcggatgccttaaaagagacaaaagatgccacaaaccgctatatgttctgggtggccgatatcagcccaataaaactcaattatccggttttattaattaaagatattactcgcctactctcattagatactttctcacaattagggcatgctgcggttaacatgctcaaaaaccaagatacctttatctatctactggtcaccctatctattgtcggttttagtcttcgtacccgtaagcattacaatgcgtttcttgaaagagtcagtaatcgcattggtaaagtcactcaagatcatttctcattaacggtgcgtaccgtattttggtcaatattaatcgccttaccactaccgctattatggtctgccgtaggatatggtttacaaagtgtcgaatggcgttatcccatggcgggagcgattggttatggtgtaactgccgcagcccccgtgctatggctatttatgataagtgctacctttgctcgccctaatgggttatttatcgcgcaatttaaatggaaagagagtcgtgtgaaaaaagcgatgcgcttttatcaactgtcgattttcgtcattgtgccgttaatgatgtcgcttatcacctttgaatactatagtgacagagaatttgcgccaacagttggacgtttttgctttttattattgtgcattgctttaagttttattacctcaagcctaaaaaaggcacatgtgccgctttacttagataaacatggctctggtgataatgtgataaataccattttatggtggttcttacttgttgcccctgttcttgcagccctcgcggctatctnnnnnnnnnnatcttag

SEQ ID NO: 303054 - DNA, 762 bp, Proteus mirabilis
  misc_feature (717)..(726): n is a, c, g, or t
atgaaattacaacagttgcgttatatcgttgaagtggtgaataacgatttaaacgtctcaacgacagcagagcgtttatatacctctcagccggggatcagtaaacaaattcgtatgctagaagatgagttgggtatacaaatattctctcgcagtggtaagcacttaacacatgtgacgccagcgggggaagaaattgtcagattatctcgtgagatattatccaaaacagaagctatccgctcggctgcaggggaacacacttatcctgatcgcggttcgctttctattgccaccactcatacacaagcgcgttatgttttacccccagtgattaaaggttttatagaacgttatcccgaagtgtcattacatatgaatcagggttcaccgacacaaattgcagaagatgtttgccgtggtaaaagtgattttgctatagcgacagaatcattacatctgtataacgatttagtgatgttaccttgttatcgttggaatcgtattgtggtggtaactaaagatcacccattggcgcaaaagcgtgaagttaccttacaagagcttgcaacttacgatatcgttacttatacccatggttttactgggcgttctgatcttgacgaagcctttggtaaagtgggtttaaagcctaaaattgtttttactgcaacggatgcggatgtaataaaaacttatgtcaggctacacttaggnnnnnnnnnncttaggtattggtgtgattgcgagtatggcatttga

SEQ ID NO: 303055 - DNA, 834 bp, Proteus mirabilis
atgaacaatcaacaagccgaacaactaaaaaagattatgatggctgatagttattttgcacaacctattacgcccccttttccacagcctttagcaataaaatcattacaacagacacttaatatcaaagatacagaaggacttgttcaatttattatcgcttcacctaaacgttttaacgaatcagaaaaaatgatcatgacacaactgaaagatatacaaattgccttaatctctattatgtcgaatcatctttcagtattgaaaaaagaagatagtgaagcttattatcaaccagagcattggctagaaacccttaatcatttgcctttgcttagccgtaataaagttgaaagcaaacgacttgataagcaaacatttgacttttcaattgctcaagcctttgtgcaactgttattaggtgcagccattaatgcagcttcaccgtcattagccgagtttatcgattttttacgcaatcagggacaacaaattgaactaggaatacgccaatcctttgatagctataaaacaataactattgcaggtgtgacggaaatccttaatcataataatcagcttatttttgtacctaaattaaaaataatgagtctacgtttctcacatcgaacagccaaaatgttattagccagttgttcggggcgaaaatttacgatttcagtagaatacacaacaatcacctcaatttttgatattggtgcacttaatgatccactgattaatcgacaattttatgcttttttaaataagtttcgtcagttgagtattactcaatctgattcattttttagtggggactttttattgcaatag

SEQ ID NO: 303056 - DNA, 198 bp, Proteus mirabilis
atggcaattaaactcgaagtaaaaaacctatataaaatatttggtgagcaccctaaacgtgcctttgaattattagaatctggtatgaacaaagaccaaatctttgataaaacagggttaaccgttggtgtgcaaaatgccaatctggccattgaagaaggcgaaatatttgtcatcatgggattatcagacgattga

SEQ ID NO: 303057 - DNA, 459 bp, Proteus mirabilis
  misc_feature (11)..(20): n is a, c, g, or t
atggcaaaatnnnnnnnnnnagtgggtacaccgcaacaagtttggcacacgcctgaaagtcgctttgttttagaatttctcggagatgttaatcatctccaaggtgaaattaatggtgcgcaattacaaattgctggctatcacttacctttatcggttacgccgctctatcaaggcaaagttgatgtttttttgcgcccttgggaaatttcacttaacccgcatagtgatagcttatgtaaacttcccgtcaaagtaatagaagtgactcctaaaggacactattggcaattggttttacagcctattgagtggggaaatacgccaattagcgcggtatggaatgatatgacatcaataccccataaaggtgatatttactatatgggtggtgcaaaagcgcggttatatgcacaagatcgtcccttaacaacagtttcactggcatacacagcttaa

SEQ ID NO: 303058 - DNA, 486 bp, Proteus mirabilis
  misc_feature (27)..(36): n is a, c, g, or t
atgaaattccgatggctgaggtggtannnnnnnnnngtggtattagatttctttgaccgtttaaaatcgacctctcgtggttatgcttcgttagattataacttcctgcgtttccaaggctccaacatggtacgtgttgatgtcttaattaatggtgagagagtcgatgcacttgcattaatcacccataatgataacgcaccgtatcgtggacgtgagttggtggaaaaaatgaaagaattcattccacgtcaacagtttgatattgcgatccaagctgcaattggcaatcatattattgctcgttcaactgttaaacagttacgtaaaaacgtattagctaaatgttatggtggtgacgttagccgtaagaaaaaactgttgcagaaacagaaagaaggtaaaaaacgtatgaagcaaattggtaatgtcgagttaccacaagaagcgtttttagccatactgcatgttggtaaagataaataa

SEQ ID NO: 303059 - DNA, 951 bp, Proteus mirabilis
atgaaaaagatccttgcgttagttactgcctctcttctgtcagttagtagtttttctgcattaagtaatacctcagttacataccagcctaatcaaattgttgaacagcaaaatgataaagttgttatcaagcacttattaggtgaaaccgcagtatctaaaaatccgtctaaggttgtactatttgattttggtctatatgactctttagttgcattaggtttagcggataaagtggttggtttaccattaggaaatgcacctgaatatattaaaggacgtattgcgaatgatgtggctaatgttgggggaatgaaagcccctgattttgagaaactcgctgagcttaaacctgatttaattattattaccggtcgtcaaggcgcttcttatgagaaactcacaaacattgcccccacgattaatttaggcgcaaatagtgcgaattatcttgattcagtggaagcgaatattcaattaataggtgaattatttgataagcaacaagctactcaagcacaattagcaacattgaatacagtgattgaacaagctcagaaaaaagcggcaggatcagataaaaaaatgttggtcttactgcacaatgcaggcaatttaatgcccaataaccaaagcgtgatttacgatgtggttaaagcgaagaaagcagaattaccacctgttgctgaagaagagaaaggcaaacgtcgcgtggttacttctgaaatgatcgccaaagtaaatccggatgttatttttattatcgatcgcagtgaagccattggtgccggtaaattagagaaagccacttttgaaaatgatgaagtgaaaacaacttctgcttataaaaatggtggtattgtttatctgcaatctgatctttggtatctctctggtggtggattagaaagtcttactcagcaaattgaagcggtgcaaagtgcactttaa

SEQ ID NO: 303060 - DNA, 471 bp, Proteus mirabilis
atgaacctaaaacaaaaagtgacagctgttgcgagtgctggcgctgtaagtattgcactaacagtgattggttattttgagggggtgcgttatgaaccttaccgtgatgttgctggaattctgacggtttgttatggacacactggaaacgacatcattcaaggcaagacatacacacaacaagagtgtgacgagttactgcagaaagactttatcagaacgcaacagcaagttgatgtcctggttaaagtgccggtcgatgataaaacaaaagcttctctatattccttcgcttttaatgtgggtaccacggcttttgcacggtctacactactaaagaaattaaatactggtgatcagaatggcgcttgtgaagaaatgaaacgctgggtttatgcgggtggaaaggtgtggcgagggttggtcagtcgtagagaggcggagtcagcgttatgcaatggaagtctttaa

SEQ ID NO: 303061 - DNA, 1023 bp, Proteus mirabilis
atgcaactatttaatgacgacgcactatctgtattaaaaacactacctgataacagtattgatttaatcgctacggatccaccgtatttcagagtgaaatcgtgtgcatgggataaccagtgggataatgttgaggcatatctgtcttggcttgatgaggtactagttgaattctggcgagtattaaaacccaatggcagtttgtatttattctgtggctctaaattggcatcagatactgaactgcttgttcgcgggcgatttaatgtattaagccatattatttgggctaaaccatctgggccatggaaaaaacaaaataaggaaagcctacgcaccttttttccttcaacagagcggatactctttgctgaacattatcaaaagccaatcaccgctaaaggttctgaattttctttaaaatgccaggagttaaagcaaaacgtatttaagcccctgattgattattttagaaatgctcgtttagcactacaagtgagtgcaaaagaaatagaccaagcaacaggtaagaaaatgtgcagtcattggttcagcaatagtcagtggcaattacctagcgaggaagactataaaaagttacaaacactgtttacacacattgctgataaacacgaaaaactatcaccgttatcccgccagtttaccgagttagagcgtgagcaggttacattacaaaaagactaccaagaattaataaaagaatatgggttattaaggcgaccattctttgtaactgcagatgtgccttacaccgatgtgtgggattatccacctgttcagtattatcccggtaaacatccttgtgagaaaccatcggccatgatggaacacattattcgctcaagtagtcgcgaaggggatctagttgctgatttttttatggggtcgggtgcaacactaaagtccgcattaaagttaaatcgtcgagttcttggggttgaacttgagaaagagcgatttgaacaaaccaaacaagaaataaaagcgctaacttgtaagtaa

SEQ ID NO: 303062 - DNA, 1023 bp, Proteus mirabilis
atgtcagaagagacacagaaaaaggcatccaataaaaacactcaactgactcagcccattaagcatgggttagaaaaagggcttcatggtggaaaaaaagccattggtattggtataaaattcactaattttgttaccaacattccctttattgctcaccttattcgagcggcagagcgttttactgaccgaatgggaaaccagtttggtgcggctatcacttacttctcatttttatcattaattcctgtactaatgctctcttttgcttgtgcgggttttattttagcttcaaaccctgatttgttggccaaattaattacgggagttgccaatagtattgatgatccaactttagcctcaaccgttcaacaaagtattgatactgcggttcgtcaacgtacaaccgtaggtttaacagggttagccatcgccttgtattctggtgttaactgggtcgggaacttacgccaagccattttggctcagtctcgcccgatatgggaacgcaacaaagaggatcaagaaaaaatttactttcgttattttcgcgattttttagcccttatcggtttacttgttgcacttgttatcactattacactaacctccgttgctggctccgcacaaaaattgattgtgcatacattaggtttagatggtattgaatggctcacacctgcttggacaaccattggtttaactatctctattagtgccaattatctgttatttttgtggatattgtggatcttacctcgtcaccaacctaaacgtatctcattattaaaaggaacgcttatcgccgcaattggctttgagatcttaaagtcggtgatgacatggttattacctagattagccagttcaccttctggtgcagcttttggctctgtgattggtttaatggctttcttctacttttttgcacgactaacactcttttgtgccgcttggattgcaacagatggacctaatatgcgcaaagaaaaacacaagagtgaaacgcaatctatcacctaa

SEQ ID NO: 303063 - DNA, 819 bp, Proteus mirabilis
atgaataatagagtccatcaggggcactttgcccgcaaacgcttcgggcagaactttttaacagacagctatattattgaaagtattgttgaatctatttatccacaacccggtgaagccgttattgaaatcggtcctggtttaggcgcgcttactgagccggtgggggaaagaatggataaaatgacggtcgtcgaaattgaccgtgatttagctgcacgcttagaagttcaccctacattaaaagataagctaaccattattcagcaagatgcgatgacgattgattttgcccaattagcaaaagagcgtcagcaacctctgcgggtttttggtaacctaccttataatatttcaacgccattaatgttccatctatttagttttgctgatgccatttctgacatgacttttatgttgcaaaaagaggtggttaatcgcctagtggcaagccatggtagtaaaacttatggccgcttaagtgtcatggcacaataccactgccaagtcattcctattattgaagtgccaccaagctcatttaagccagccccgaaagtagattctgccgttgtgcgtctgatcccttataaggaaaaaccctatccggtgacagatattgctatgttaagccgtatcacatcacaagcctttaatcagcgccgtaaaacgttacgtaatagcttaggtggactacttacagcagaagatatgctggcattagatattgatcccactgcacgcgcagaaaatatttctgttgagcaatactgtaaagtggcaaactggttatcatcacaacagcaacacgctgagtga

SEQ ID NO: 303064 - DNA, 1002 bp, Proteus mirabilis
atgcaaactaagctaaaaaaacccctcgttatcacccccggcgaacccgccggggttggtcctgacctgattatttcattagcacagtcacagtgggcacttccttgggtggtatgcgctgatcctcaattattacgagcaagagcacagcaactcaatctcccactcactttagttgaatattccccagataatccacctacagcacatatccctggccaaatttgtgtacttgccgttgaattaaccgacccttcggttgtcgcaggtacacttaatactgccaatggccactatgtggtacaaacgcttgctcgcgcttgtgatggatgtttaaacggagagttttctgctttagtcacagggccggtacataaaggggttattaatgatgccggtgtgccatttacagggcatacagagttctttgccgatcgtagccattgtcaacgagtggtgatgatgctggcaacggacactttaagagtcgctctcgccaccacacacttgcccttaagagaagttgctgatgcgattacgggtgagttgcttaatgagatcatcaccattttaaaccatgatctaaaaaccaaatttggcatctcatcaccacatatttacgtatgcggcctaaatcctcatgctggagaaggcggtcatatggggcgtgaggagatcgatattattgaacccgcattagagcaattacgccaacaaggtattcaacttcatgggccttaccctgcggataccttattccagcctaaatatttaacacatgcagatgctgtgcttgcgatgtatcacgatcaaggattacctgtgctaaaatatgaaggtttcggtcgtgctgtgaatatcacgctcggtctaccttttattcgtacatctgttgatcatgggacagcccttgaacttgcaggtactaaaagcgcagatgctggcagttttcgcaccgcattaaatttagccattaatatgatacaaaattgtaatgaataa

SEQ ID NO: 303065 - DNA, 891 bp, Proteus mirabilis
atgttagcagaagtgcgtaataacgaagttcgtcgtcgtattacgattttgccacaagaagtggactcattagctaaacaaattgaaagccaagcaagccaaagtattgatcttaatcttagccatatcttaattccattatcagaaaatccatcacctgcagaaattgaaaaagcacagcaagtggtgaaccgtattaagaaccagctaaaaaacggtgctgatttcggaaaattagctgccacttattctgccgatccacaagcacttaatggtggtaatatgggatgggcatcaattgatgagttaccgacaatctttgctaaacagcttgctaatgcacaaaaaggtgaaattgtcgggccactgcaatcaggtgttggtctacacattattaaagtcaatgatatacgtggtgcttcaaaaaccgtttctgtgactgaagtaaaagcacgccatatcttactaaaaagctcgcctatcatgaatgatgagcaggcttatgccaaactacagaaaatttccgccgatattcgtagcggtaaaatcagttttgcggatgcggctaaagagtattctgaagatcccggttcagcattacgtggcggtgagttaggatggtcaatgcctgatatttatgatccagctttccgtgacgcgttgatgcgtttaaacaaaaatgaattaagccaacctgtgcgctctaattttggctggcacttaattgaacttgaagatacgcgtagcgttgataaaacagatgcagcgaataaagaacaagcttaccgcttactgtttaaccgcaagtttaatgaagaagtgcaaaactggatgcaagagttgcgtgcaggcgcttatgtgaaaataatgaacgagaataatgcaaactaa

SEQ ID NO: 303066 - DNA, 810 bp, Proteus mirabilis
  misc_feature (757)..(766): n is a, c, g, or t
atgcgctctctgtttgccagcacaggccgaggtctggaagaattattaaaaactgaacttgaacaccttggtgcccagtcttgccagattacgcaaggtggtgtctatttccgtgctgatgataaaaccatgtatcagtctttgctctggagccgtttagcttctcgcatcatgcttccgctaaatgaatttaatgtctacagtgatctagatttataccttggtgtgcaagcaattgattggagcgaagtatttacagttaatcatacttttgctattcactttaatggcactaatgatgtgatccgtaatagccaatatggtgcattaaaagcgaaagatgctatcgtcgattcattccaacgtaaaatagggcaacgaccggatgttgctaagcaatcaccggatattcgtttaactatacatctacataaagaaaaagcgtcattatctttagatctcagtggcgatggattacatcaacgtggttatcgtgacttaacagggcaagcaccgctaaaagagaatctagccgcagcgattattatgcgttcaggttggaaaaccgatacaccattaattgatcctatgtgtggctcaggtactttacttattgaagcggcaatgatggcgacggattgtgcccccgctttaaatcgagtccattggggttttcgtcattggttaggacataatgaagcgctatggaaagaagtcactcatgaagcatttgcccgcttccgtgaaggtaaaaagnnnnnnnnnntcaagcgcgtttttatggtttcgatgtggataaacgcgtattag

SEQ ID NO: 303067 - DNA, 1644 bp, Proteus mirabilis
atgaaaagtagactgaaaaacctatataaatatcttattgagaacaggaaacatgaagtcaatggatggcacaaagcctatcgtgacttttacagtcaggtcgctcaaattcgtgagcgaatcacatctggagaaggcttgtctcaaaatgatgaagcttttctgaagcagttaatctatgagaagagcaacggtatcgcttctcgcggacagtctgtgttgagcaatgacaatttccagtcattcattaaaaacaagaatttcatatccgcattagaaaaatttatattgattccaaacagtgaaaacttcacgattttttctgatacgtggtctaaccaaggtaaatccaacaaccctgttctcgttaatcgagtggctgcagcttgtacactcgaagtctccacaacggttgactccggtaaattcaatcaggtttttagttggcttatacgcgaaggaataattccagtatacccaacagaagaaaatcaaagttggtttgctaaaaacatttttctattaaaaagcatcaaaagcgagtttgataatgagcttcgggaaggtaaaactgatgagttttatcttagtcagtttgtttgggtgctttacgagaatttgtcaaacccattcagtttaaagaagcagattattaaatacggggcaccggggacagggaaaacttatcaagcacgcctgcaaacttcgctcatgtttgacatctggaaagaggaatttgcttccaatagccgtctcacacatgcaagtcagattgagttggttcaatttcatccttctttcagttatgaagactttatggaagggctacgtccggttttgggcagtaatgggaactctcaattaaggttgcaaaatggtgtttttaaagagttttgtcgaagcgctggtaagtgggaaatcgatgtatatgggcttggacttgctcagaagtgggagtctcttactatcaaggaacttctcccgtttagagaaaggttatcaggtgagcattggcgggatgttttcgaaatatcagatacatccaagcttgtatcggaagcagtaccaccatttttctttataattgatgaggtaaaccgggctgagttatctcgcgtttttggtgagttaatgtactgtctggaataccgaggcactagaggttgcgttaaaacccaatatgccaatctgaacaatgaacatactggtatgcttaaggacgctaaagggtatttgttcttcattccaacaaacatctatcttattggaacgatgaacacgatagacagaagtgtcgaaagttttgacttcgctttacgtcgaagattccgttgggaagaagtggtgcctgatatggcgctattgaaataccatttgaaccaattttgcaaagcttggctgcccctggtggataaccttgaacgcttgaatgaattgatagctaaagagcctttgcttggtaatgattaccaaattggtcatgcctatttgatggacttgaagtatgcaaccagccttacagtttcggaagtacgagagcgtgtatgggatgattgtattcgtccgttattacaggagtatcttcgtggaacgggtaaggagactgaactgattagctccttcggaaaggcgtttggggtttaa

SEQ ID NO: 303068 - DNA, 801 bp, Proteus mirabilis
atgcgctattggggaaaattattaggccttatcatcggtagttttgccgggatcggcttttggggcattgtgattggggtttttctaggacacctttatgacgtacaaagaagtaaattaagctatggtgggcgctataatcgtgatagacaagcctatttctttgctgccacattccaagtcttagggcatttaaccaaatccaaaggacgagtgacacaaaccgatatcacattagccagtacgttaatggatagaatgaatttacatggggcagcacgtcaagcagcacaacaggcgtttcgagaaggtaaagaggttgatttcccacttagagccaccttacaacgtgttcgccaaatttgtgctggtcgccgtgatttactgcagatgtttctggaaattcaattacaagcggcatttgctgatgggcagttacatcctaacgaacgtaaaatgctgtttattattattgatgagctcggattttctcgcgcccgttttgaacatatattagccatgatgcaggcggggcaaagttttcattatcaacaagggcaaaattatcagccacaaactcaaggcccaacgctttctgatgcctataaagtgttaggtattaaagagggtgatgatgttaaaacaataaaaagagcttatcgaaaattaatgggagaacatcatcctgataaattggttgcaaaaggtttaccaccggagatgatggaaattgcaaaacaaaaagcacaagctatccaagttgcttacgatttgattaaaaaagaaaaaggatttcgttaa

SEQ ID NO: 303069 - DNA, 273 bp, Proteus mirabilis
atgaaaaattggaaaacgctggttatcggcttaatgatcacggttggtgcagccaccagcacaaccacttttgcagcacaagaactcaaccgcgtatcggctatcgtcaataacggtgtcgttctggaaagcgacgtcaatagaatgttacaaacggtgcaaatgaatgccaaaaatgccgggcaagaaatgcctgatgagcaagttttgcgccaacaaatcttagagcgcttggtgatggattttctgataatggaattaagatatggctaa

SEQ ID NO: 303070 - DNA, 1515 bp, Proteus mirabilis
  misc_feature (460)..(469): n is a, c, g, or t
gtggtagtttcgcaacgattacttagggtgatatcctgcgccttagctagcgcaggattgacattacttatttttgatatagctgtttaccagcaatttcaacttcatttgacccagttggtttgggatttggttatcaatccagatgaaggtgaaatggcgcgagaatggcaacttatctttattggcatccccattatctttcttatcgaaatgctatttgctacatggagttggcaaaagctgcgcagcttaaaccgccagcgatggggaaaaccattagcctgtgtatttattagttgctttattttatcccactctatgtctatttgggcagatgctaatttttatcgccctattactatgcaacgtgcaaacttaccactgtcttatccaatgactgcacgtaaattccttgaacggcatggttttattaatcaatctgagtatgagcagcgcnnnnnnnnnngcgagggtaatcctgcggcacagagtatcacctacccgcttgcacctcttgattattctaaagatgaaagctcatataacttacttatgattgtggttgatggattaggtaatgaagacgttgccaaactaccgagcttgcaacaatttgctgataataacctctctttctctcaacactattcagcaggcataaataacgaaacggcgctgtttggattattttatggcatttcaccgtcttacttagatagtgtgttaagtagccgcaaaaactcagcgctctttgacgctttaaattatcgtcactatcaattagcactattttcaactaacggatttaaatcgccattatttacacaagcggtgctggctgattactcactacctacttcacgtagtgaggataacgacacaacgattaatagttggcgttcatggttgttaaaaaataaacaaagcacaccttggttctctttcttacaaatcaacggtgataagcatacatcagcttctcaagcacagttaaatagtcaattagagaccatttttactactttaaaagaaagcaacatacttgataataccgttgtggtcgtaacgtcaaattatcatcagaacaatgataaacaagatagccaatggcttgttaacaaagacacttttaacttaagccaatcgcaggttccactggtaatacattggcctaatgttacaccacaaaaactagataaactaaccagccaccaagatataatgacaacgctaatgcaacatgtattaggtgttattagccctgcagataactattctcaaggcgaagatctatttgctaatacgcgtaatcacccttggatttttactggtgataatgaaactctagtggtctttttacaagataatacgttaatgatagataaacatggcagatatgctttgtttgataaatcaggcaaagagatccaatccgccaaacctgatttacgcctattattgcaagtacttgctgagcaaaaacgatttaaaatacagcagttaagtatctaa

SEQ ID NO: 303071 - DNA, 300 bp, Proteus mirabilis
atggaactttctacattacttctttttatcccagcctgttttgctttaaaccttgcaccagggccaaacaacctgctttcaatcaataatgcagcctactatgggtttgctcgttcatgtgcaggaggtctcggtagattactcgcattcgtgattatgattgttctagcttcatttgggctagctgttgtattgcaaacatctgagttcattttcagtgtaattaaatttgctggggttgcttatcttttgtggctcgcatatcaattatggaaagccccaactgatgaattcaaataa

SEQ ID NO: 303072 - DNA, 675 bp, Proteus mirabilis
atgatcaggcttcatcccagagttgagttaggttattacgatcaaagcctcgcacaacttaatgataatgatacccttgccgatgcactaaagccctttgcaccgctattagatgagcaaaggaaaatggcattaataaatgcaggttttgtttattctcgccataatcagcaagtaaagtcattaagtggtggtgaacgagctcgtttactttttattggtctcagtttggcaaaatattcattattaatgctagatgaaccaacaaaccatcttgatatggaaggtaaacaggcattagctgagcaaattcaacgattttcagggggaattttactcgtcagccatgatagagaattgatagagaaaagctgtaatcgtttttggtatattcacaatggtattcttagcgaacatcatgatattgaaacaatttatcagcttatttctcaacaagatatgtcatcggtctctaatgagcaaaatggccatcatgctccatctgttgaaatagtaaaacatcataatgaagatgaattgctaatgaaattgatagcacttgaagataaattgaatgctgatttagcaagaaaatctgctcatcaaaagcctatattacaggctcaatggcaagcaggaatagagatcttaaagcaacaacttgatttagcttaa

SEQ ID NO: 303073 - DNA, 1098 bp, Proteus mirabilis
  misc_feature (1052)..(1061): n is a, c, g, or t
atgagcacattattatctacacaaaatctctcttttcataataatcacggtatattgctgagtaatatttctttggcactcactaaaggtgagaaaattggtttaattggctacaacggttgtggaaaaagtaccctattaaaacttttatcacaccaattaataccaacagatggttctattactatcgccaatcaagtcattatggcttatgtcgaacaacagttaccaagtgagctacagtcaatgcgtctcattgatgcggttcttcataaattacctgaagagctacgcatatctgaaagttggcgcagtgaattattattaagtgaaatgggatttaaagccaatgaaatcaatctattagtctcacaattaagtggtggtcaacatactcgtttattacttgcgagagcattgattttacaaccagacttactgctattagatgagccaagtaaccacttagatctaccgactatcttgtggttagaaacatttttaacacagtggcgaggaagttttattcttgtttcacatgacaataggttgttagataaagtgaccaattgtacgtggatcattcgtgataaaaccctatctgtttttcgcttgccctgctctcaggcaagacaagagcaagaagcacaagatatcagtgcgcaacatcgttgtgatgcacaacaaaaagagatagatcgtattgcacaaagtgcgaagcaattggccatctggggaaaagtgtatgataacgaaagtttgtcacgtaaagccaaacaaatggaaaaacaaattgttcgtttaaaagacgaacaagtcgatgtaacagaaggcaatcaatggacgttacagttatcaggaacaatattacgggcagatagattgcttgagctgcatcagctttcagtgatccctgcgccagatgcaccgattttatataccatcgataatcaacggatcaaaagtggtgatcgagtcgctattgttggtgctaatgggacaggtaagtcatcattattaaaaatgatttctaaccacaagatagtcggtannnnnnnnnntcatttcatggttcaaccacatcaacagaaaatatga

SEQ ID NO: 303074 - DNA, 1101 bp, Proteus mirabilis
atgagtaaattaagagtcgctattatttttggtggaaaatcaaccgagcaccaagtttcattacaatcagcaaaaaatattatcaatgaattagatcgaacgaaattcgacctttgtttaattgggattaatgaacaagggcaatggcatgaatatgctgaagacaattatttaattaatagcgataacccctcaactatctcattaagccaacctttgcgtccagtggctattattcctggcagtacccgtcagcaatttatctctttaactgatgggcaacctcttgcacaaatagatgtggtatttcctattgtgcatggtgcttatggtgaagatggcaccctacaaggactattacatatgattgatatgccatatgtaggccctaatatcatgagttctgcagcatgtatggataaagatatcactaagcgcttactggatgatgcaggattagcggttgcaccatttattacactgatggctcaccaattaaatgatatttcctataatgaagttgttgaacaattagggctccctttatttattaaaccagcaaatttaggttcttctgttggtatcagcaaagtcaataatgaagccgagtttaatgctgcattatccatggcatttgaatatgaccttaaagtgattatcgaaagtgctattgttggccgtgaaatagagtgtgccgttttaggtaatgaagagcctgaagttagcccttgtggtgaaattgtgttaaatgatgctttttatgcttataacacaaaatacattgatgacgatggtgcaaaagtagtagtacctgctgatttagataatgcgattagcttacatattcgccaaacggcattgaaagcttaccaagttttaaactgtttaggtatgtcgcgcgttgatgtgtttttaactgaagataatcaagtcattatcaacgaaattaataccttaccaggtttcactaatatcagtatgtatcctaaactgtggcaaagtacgggattagattatcaatcactcatcacgaaattaattgaattagcgctagaacatcataaaaaaacagccgtattaaaaactaagtgtgagctttaa

SEQ ID NO: 303075 - DNA, 1062 bp, Proteus mirabilis
atgagtttattattactaaaaagtcgccctttagtcgttattcctgaattagcggtacgtcttggtttaaatgaggcgatgctgttacagcaaattcaatattggctaactgaaactacttcaggtgttgaatatgacggctcacgctggatttataacacagttgaagagtggaagaatcaatttccttttttctctgaatcaacgattaaacgtgcttttactaatttgaaaaaacagggtgttttacgcattgagcaaatcaataaatcgaaccatgaccgtactaattattatgcgattaactacgatcaccatctgctaactgatggggtcaatatgacccaatcgaacagtgataatacatctaatcgagcagttcaaaatgaccttatcgataagcgcaaattgaaaccgtcaaacagttcaaaatgcgctgttctgaacgggtcaaaatggcctgatcttacagagaatacaacagagattacttcagagagtacaacagagactaactcttcttgtcaggttcctactgaacccgacaacgctcctgaaaaattaattttggattatttcaacaaggtgacaaattccaaatatcgtgaaggaaaaacaacaacagggcatatcaaggcgcgattagcagaaggatttacctctgaagacttgatattaattacggattacctgacagctaaatggcaaaaagatcccaagatgcgtgattacttacgccctaaaacattatttgttcctgaaaactgtattgaataccaagataaggcgatcaaatggcgtgatgcagggcgtcctgaatgtgtgaatggtcgttggttaaagcctggagaagtttcagtggaaattaacacggttgaacgtgatgaaacttttagaaaaatgttcacttcaggctggaaacctgaaaatcgtattcaagcattagcagtcgagcaagcaaagaaaaatggtcttggtcgtatgagtgaagttgctggtttagcttcattccgtggtatctggaaacaggcgacagaacaagttgcactggaggctaagtga

SEQ ID NO: 303076 - DNA, 180 bp, Proteus mirabilis
atgaacaatgagaacccaaaccaacttgatcgctactataaaaatcaccgaggtatcgttgttcatgttgttcgttatgacagagaaaaacagcgcgttatttttatgcttgatagttgtgacgacccacagtgtgaacctgtacagcgttttaaagagaagtacacacgtattaagtaa

SEQ ID NO: 303077 - DNA, 459 bp, Proteus mirabilis
atgagtaaccaatcaataaaacaagttgtgaaagagatgtgtgaggcaacagctggtgggcgtgaagcgatggctggggcattgggtttatctctgacttcattcaataacaaattgtacgagaaaaacggctgtcgttcgtttgatttaaacgagctattagcgatgcaagatatttctcagaccgttttatttgctgaatttgtcgctcgtgaatcaaaccgcttactcgtggacagaattagccctgctgatttagatcagacagaactattcacattacgtagcaatgttgacgaaatgcagggacgtttagcgttattgatgaaagatagcttatctgacggcgttattgataacgaagaagagcagaaaataaaaatgatgttagatggattaatttcgcagatccgcacatttatgaatgcatttgtttcgttacatcaaaagagaaattaa

SEQ ID NO: 303078 - DNA, 234 bp, Proteus mirabilis; identical to SEQ ID NO: 300213

SEQ ID NO: 303079 - DNA, 726 bp, Proteus mirabilis; identical to SEQ ID NO: 300214

SEQ ID NO: 303080 - DNA, 204 bp, Proteus mirabilis
atgacaactgaaccaataatcatagcgccagatggtttcactaatgaagatatcgcaaagtggatgaggtgcaagttgcagtgcatagattacctccctgttttacacggtaagcgagaaagactaatgagcgatgtaaaaaagctagatgccgaaatagcagagtacataagtaaaagcgctattcagatacaaagtaaatga

SEQ ID NO: 303081 - DNA, 792 bp, Proteus mirabilis
atgatggatgaaaaattcagaagttatactatcagaagattgggtgaattgggctctggtggttttgggcgagtagaaaaagtagaaataattaataaatttggcgaaagtaaaggatactgtgcaagaaaaatattattgccagaagcctgtcgatatgatgaggtaaaaaggcgatttattcgagaggtaataagccagtctaaatgcactcataagaatgtggtgcctgtatatatgtgtaatctacagatagatacaccttggtttattatggatttagctgaaaatgatctctttaaagatattaaagatggaacacttccttcgtctgaaaaattaaggatcataaatatgatcttgaatggtgtcggttatatacacaaaagaggatatttgcatagggatatcaaacctcaaaatattttaaaaatagcgcattttgattcatcagtgatggattcatataaagaaaatggagattataaaatatctgattttggtttagtaaaaaatactaatccagaaaatgatagtactcaattgacgcggattggcgctggtgaaatgggaactcagtacttttctgcaccagaagcttggcatctaggagacttcacagtacaaagtgatatatattcaatcgggaaagttatccaattattagatgtaggcattcctggtatagagcagatagttggacggtgtctagaatgggataaatatgatagatatgattctgtagaatcattaaaaaatgatttaataaatttagatagagaggggcaataa

SEQ ID NO: 303082 - DNA, 735 bp, Proteus mirabilis
atgaaacttttatctacattatctttttcttttgctaaagaaaaaggcaggatgaatgaggattcaattctccctcttaagtttttagatgatggttttttgatggctgttgcagatggcgttggttcttactctggagccgaagttatctcagaagaagtcataaaaactcttaatgaagtaacatcattagagttactaaatcagacatctgatattttttataagttaaataataaattaaatgagttagcattaaaggataaacgattatcggaagctgctactactttgacattttgttatctgaattccagcggtttattagttggacatataggtgattgtcgcctctatatacaaaatggtgtgaagttaaaacaattaaccaaagatcatacaaaacaccaattattgattgatcaaaaaatatattcagcaaagcaattgagggacttgccaggaaaaaatattttaactaaagcgatttcattgcgagtacctttagagcctgatgtattcttcattccattaaatgagctaccaaaaaataatcaaaaaatgactttgtatattatgtccgatggggcccatcatttctgggaaaaaaggccaaaattttcagaaaatacaatgaataatctggttaaatttacaaatgggttatttcgcagaattgaaaaaaatggaccaacagatgattattctttagtaggtgctgaatttaaactttaa

SEQ ID NO: 303083 - DNA, 1344 bp, Proteus mirabilis
atgttgtattttcaccgaatgttactattagttatttgtttcattagtctgatctttagcgttgtaagcaaagcggtatgtattaaggtaacagataatagttttctatccgatagtgcaattaaggcaggctatactgctcgtaactggtatggtgcctttgatgataatattgggcatttaggcttaccatctgtaattagtgtgagtaccagtaataaatttcaacctgctggtactgtactagcgagctctattgctaattttcttacatcagcaactcgaacaccatatagtgcgaaacagatcctttttcgttgtgagctaaaggatgcagggcaactttatgaattgtattccaccaatggtgataacatatttgtgggagggcgtccggcgaaagaattggaaggagcctattatgatgtagaacgtaatgtcgctgtacgtatgactaatcttagtacaggagagtattatagtcgttattggaaacagcgccaacttacggcagatagttggtttcaagatgatcacgctatttatattcctgctagcgcatttagcaatatattgtatgagatgataaaaatctcagcctcagatcagtttatttatgcgggtagaattaataaagatacttataaccaacctcgaggttatattgcttttaaagggcctggcttagatacttttgctatccaagaaggagatgatcatgccaataaatatttgggatggccatatgtatggccgggcgcatggggaacttataatcaagttacttatattcgaggtgcaacttgtacaatagaggattatccctcaatagttatcctgcctcaaattactgttagggcactctcttcagggcaaagcagtcaagcaacatttagtcttacacttaattgcgaatcaggagcaatgtcttcaactcaccctacaactaatattgcgaatgtagcaatgggctttttagttaatcaacctacggcagttgcggccgcccgtcgtttaggtctaacaacatctggtggtggattaacatggctattggatacacattatggtgaaaaaggcgttgcttctggggttgggatcaaaatctatgataaacaaggtgctgcaattaatttgctaccggacaggatggtgacggcaagtggaagtactcgagggtggtatgcgtataaagatcttactacgttttctggtacaaaagaaaatggttctatagaaacttggcatggtgattttactgcttctttagaagctcttagtggacaaaccgtaaccgtggggagtgttaatgcacaattacaagccgtggttagttttcaataa

SEQ ID NO: 303084 - DNA, 1482 bp, Proteus mirabilis
gtgaggcaatataagcatgttgataaccgtttttttgaaggtactgctcagtttggtattaataacaacctcaccattaatcttggatcgcgattagccaaagattattacgcctggttggggggcgcagtatgggcaactcgccttggcgctattggcatgaatgcaactttgtctcatgcgcgtatacagcatgatgatcgcaaacaaggttggcgtgcagagttaagttatagtaaaacgttttcttcaggtactaacttagttttagccgcttaccgctattcaacggatggttttcgtgatttacaagatgtacttggtgtacgtcgccaactgaaaacgggtattgattactattccgatattcttcaccaaaaaaatcgtctttctgcaacaatcagccagccattaggccagttcggtactgttaatcttagtgccagtaccgctgattattaccataatcaatcgcggatcactcagttacaaataggttatagcaaccagtggcgaaagttaagctacggtcttaaccttgcaagacagcgtactactcaggattatggtgatcatttttatcaccatattgatgaattgcaagatcaaagccaaaagcaaaaatatactgaaacaatactgtcattgactctttctattccatttgattggaaagacaaccgtacttcggtagcaataaattatagccaatcacgaaacagtcaatcttcaacgctatctattactggctctagtggagatcaaagtgatttttcttggtcattatatggtagttatgatcaccatcgttatggtaaggaacatttatcgacaaactttggtgctggctttcaacaaaatactcgcttgggaacactgagagcaggttttgatcagggtaaaaattatcgtcaattatccctaggtacgtcaggaaccttagttttgcattctggtgggataactttaggcccttacactagtgatacctttgccttaattcatgctgatggggcgcaaggtgctgttgtacaaaatgggcaaggagccgtcatcgatcattttggttatgccattttgcccactttatcaccataccgtcgcaataatatctcccttgatacccgccatatgaaccgtgataccgaattgtcagggggaagccagcaagttgttccatattcaggtgcagtggctaaagtcaattttgcaacaattacaggtaaggcggtactaatagacgtgaaaaagaaagatggcagtataccaccaatgggcgctgaagtgctcagtgatgaaggggcggtaataggaatggtcggacaaggagggcaagtttatgcccgaattaatcataattcaggaagactacttattcgttggggaaaaagtgttaatcaatattgtcgagttccttaccagattgatttacattcatctaaaaaggtgatttatctaacgacaatttgtgaggataaataa

SEQ ID NO: 303085 - DNA, 633 bp, Proteus mirabilis
gtgccttatgactacggttatttcgcttttatttacgataaaaatcgtattactcatccccctaaaagcatggatgagttgttaaatagccaacagccgtggaaaatcctttatcaagatccacgtaccagtacccccggcttaggcttaatgttatggatgcaatcactgtatccaaacaataccgctgagcagtggcaaaaattggcgaataaaacactgacagtaaccaaaggctggagtgagtcctatggcttattcttgaaaggagaaggggattttgtgcttagttacacctcatctccgggctaccatattttggctgataaaaaagacaattatgcggctgctatttttgatgaaggacactatttacaggtagaagttgcagccaagctaaaatccagcaaacagccagaattagctcagcaatttatgcaatttatgctaacccccgctttccaagaaaccatcccaaccactaattggatgtatcctgttattgatatgccactacctgaggtctactccgttatgcctaaaccgcaaaagtcattacaatttgatgctgatgtggtagccaaagagcgccaaacatggacacgtaattggcaatctgcggttagccgctaa

SEQ ID NO: 303086 - DNA, 576 bp, Proteus mirabilis
atgaagaaacacctcttgcttaccgccggcatcttcaaaacgcaattcattaaaaccttcccctttgtgggtttggctacggaaagtggtttgtgtcttattctctgggaacttaatcggtggtgcgttacgaccatcataggtacaaccggtaattatcggtctgtcgatatccccattcaggtaactgaccagcacttgtgtgccgatgcgcggtaccgcagaaaaaccatagccatttccactccagcccatggcaacccgtacccagcaggaggcactgtgatcggcacttccccgacgatcccaatgaaaatgcactttcacggcgccatattcattgacgtagatttcttcccccggcggtcccaccaccgtcgccacttcatcgccgtcggccgtcggtttataacgataagggggacgccactcttgcgtgcccggaataaaggagacactattcgacagttgtgtgccttcgcccccgctattgtccgccagtggctgtacaccatgatggctgacgctgatcacttgccagcgatcattcatcggctgatggggatgctgagataa

SEQ ID NO: 303087 - DNA, 519 bp, Proteus mirabilis
atgccaactccttgctatatttccattgaaggaaaaactcagggcaacatcactgcaggcgcgtttactgcagattctgtcggcaacatttatgtacaaggtcatgaagaccaaatgttggtacaagaattttctcacgtagtgacggttccgactgatccgcaatcaggtcaaccttctggccaacgtgcgcataaaccgtttcgttttaccgtggcattaaacaaagccgttcctctgctgtataacgcactggcttccggcgaaatgctgccaaaagttgagttaaaatggtatcgcacgtctgttgaaggtaaacaagagcacttctttaccaccacactgactgacgcgactatcgtgaacatcgattgccaaatgcctcattgccaagatccggctaaagccgacttcacgcaacttatcgaagtctccctctcttaccgcaaaattgactgggagcacactgttgctggaacgtctggtgcggatgactggcgtgcgcctctcgaagcgtaa

SEQ ID NO: 303088 - DNA, 828 bp, Proteus mirabilis
gtgggcgcttataacaaagccgaggctgataagcgttttcagccggtgggtaaatatcaagtggaaggttatagctatgcaaaagcggaatcagatactaaatatcaacccaaaggcaattatgctcctgcgggaaattatgcgaataaaggcgatagctataccaaagcagaatctgatgggaaatatcaacctaaaggcaattatcaagcttcaggagattatgccactaataccaatttaaaaaatgagcttaataaaaaatttgataagggtaatatttctcaagcgaccggaacctcaacggctcatgttattagccaaaaagccgccactgatgcttttcagccaaaaggaaattatcaacccaaaggcaattatgcattagtgggtgcatcctatactaaaacggaatctgataataaatatcaacctaaaggcaattatttagcgacaggttatagttattctaaatcagagtcagatggtaaatatcagcctaaggggaattatttagcatcaggttatagttattctaaaggtgagtcagatggaaagtatcagccaaaaggaaaaggattgttaggaaacaatcaaaaatggatagatgtaactaaggaacgtaaaattggagaggtttacaccaataattcagaaggacctatttatgttcttatatggtctgatggccgtgcagttgaatttaaattagatggtattttaattaaagggtatagcagtttggataattgtagttttgttgttcctaaagggggaacttatcaacttttaaatggaagaatgggaacttggatggagttaagataa

SEQ ID NO: 303089 - DNA, 543 bp, Proteus mirabilis
atggttccttaccaacccgtattaaccttttggtttgaagaatgtaccccaaaacagtggtttcaaaaggatagcgcttttgataaagaaattaaggatagatttggtgagctatgtattagcgcaagtcgcgcagagcttgcctcttggcgcgagagcattgaagggcggttaggggaaattattattctagaccagttttcacgtaatatttggcgtgatacaccaaaggctttcgcccaagataatatggcgttaattcttgctcaagaagccattcggttacccgaatatctcaccctgacaccagtaaaacgcaaatttctgatcatgccatttatgcattcagaatcacaaaaaatccatcaagatgccattgcgttgttttcacaattaaatgatgacgacacttatcaatatgaattacgccataaagagattatcgataaatatggtcgttatcctcatcgtaatgaaattttaggccgtacttccacagcagaagagttagcgtttttacaacaacccggctcctcattctaa

SEQ ID NO: 303090 - DNA, 273 bp, Proteus mirabilis
ttgtcctttattatcggtgccataattacctttgccgcacgctccggttatgtcagtttcctaagctttaatggcccagaattaagtgctgagcaatcactgttttggggtttccaattagcagtattagcattaggtattgtggttgtcgggtttagtgcattaaaagcgcaaacctcaaaagtgaccttagcaacttgtgccgcagcggtcgtaattgctgaattatccggtcgcattgccttttataacttatggcatataaccatgtaa

SEQ ID NO: 303091 - DNA, 1326 bp, Proteus mirabilis
atggtgcagttttattcccctaaaaaacgtcctgctaaaaaacaggtaaaaaacttggcggtaaccgctaatgcattggatgctaacggtcaaggtattgctcatgctgagggcaaaaccatttttgttaaaggattacttccacaagaaactgcacgcattcgtttgaccgaagaaaaacgccagtttgccaagggagaagtgatcacacgattaaccacaaacccagaaagagtgacaccaccctgtcagtactatcaacattgtggtgggtgccagcaacaacatgtgcctattgattggcaacgtaccactaaagctgaggttttatcacatcttattaaacgtgaaactaatgtggtcatttcagcacagcctgttattgccggtgcggagtatggctatcggcgtcgagcaagattagggttacgttatcaccctaaaaagggtttggtaatgggatttcgccaagcactttctaatgacttagtgatggtcacccaatgcccagtattaaaaccacaacttaatgcactgttattgccactgtggcagtgtttaaagcaactctctgtcgtgcgtgatttaggtcatgtggaattagtgttagcagataatgggccattagtgattttgcgtcatttatcaccgctatctgagagtgataagcaattgttagatgatttttctcatcacgctcaagtgatgatatatctggcgggtgataatggtgagatcgcacaattaacaacgattgagaaggaacccttctatcagatagagggtctaaaattacactttgcaccaacggattttattcaagttaatgatgaaataaatcataagatggttgctcaagcgatagcatggctcgatttatcgccaaacgatcgcgtactagacttgttttgtggcatgggtaacttcacattacctatggcaaagcgtgttgataaagtcgttggtgtcgaaggtgttcctgcactggtggcaatggcgaaaaaaaatgctgaacttaatcaattagataatgttcagttttggcatgctgatttatccgccgatttttctgctatgccttgggcacaggaaggatttaataaagttctgctagatcccgcaagagcgggagctgcacaagtgatgtcacatattgtgacgttatccgcagaaaaaattgtgtatgtttcctgtaatccgaccacgttagccagagatagtaagatattattagattccggatatcagctaacccagttaagaatgttggatatgtttccacaaacagggcatctggaatcaatggcattgtttattcgcaaataa

SEQ ID NO: 303092 - DNA, 1092 bp, Proteus mirabilis
atgagtttgttatttacgcctaataaattaggacctcatcaattagacaaccgtattattgttgcaccaatgtgccaatattctgcgcaagatggaatatccacatcttggcatacaatgcactatgggcaattagcattatcaggtgccgctttagtgattatagaagcgacggcggtagagcctcgaggtagaattagctataaagatctcggattatggtctgaggaacatggtcgcgcattaaaacagcttattagcgatataaaacagcatactaatgctaaaataggtatacagttggctcatgcggggcgaaaagcatcaacatcgttgccatgggaaggtggaaaatcattggctcctgatgatgagaatggctggcaaaaagtagcaccttctagtattgcttttggtcaatatcatcagcctcaagcattaacaattgatgagattgaaaagataaaaaacgcatttgttgaagcagctaaaagagctgagtcagcaggcattgatgttattgagatacatggtgctcatggttatttactgcatgaattcttatcaccattatcaaaccatcgcaccgatcagtatggcggtgattttaataatcgtagccgcttgttaattgatgtttttactgcagttaaaaaagcagtctctgacaaaatgtgtgtgggagtaagaatatcggcgactgattgggttgagggaggatgggatctggaaagttctatcgcattaactcaacatcttgaagatctcggttgccactatattcatgtttcttccggtggcttatcagacaaacaagccatcaagctaggacctaattatcaggttccttttgctcaagccatctataatgaaacacaattacccgtgattgcggttgggttaattacagagccagagcaagcagaagctattttactgactgaacaagctgattttatcgcattaggcagaggaatactttatgatcctcgttggccttggcatgcggctgaaaagttaaagcagaccattaaagtcgctccgcaatatttgcgttgtgcgccacatggtagtaaagatttttttaaatag

SEQ ID NO: 303093 - DNA, 192 bp, Proteus mirabilis
gtgatcgttgttgatcctgagttatcttattcttcagatttattggttgttgcgcgtttggatgattcgaaagaagcaacctttaagcagttagtcattgacgatgaacagaaatacctaaagcctctggactcccaatattcagcaacagcgatcaacgacaacggcaccatcattggtgtagcacgatag

SEQ ID NO: 303094 - DNA, 150 bp, Proteus mirabilis
ttgggagtcggtaatgtagaagtcgtgcctgatatcaagggaagaattcctctcattaactgggttcaggccggtgattggactgaaatagcgaaggaatttgcctatgaagatgctgaagagtggcgtgaagtcacagggaaagcataa

SEQ ID NO: 303095 - DNA, 561 bp, Proteus mirabilis
  misc_feature (531)..(540): n is a, c, g, or t
atgagtagcagccaaacgctggttgttaaattagggacaagtgtactgactggtggttcacgacgtctggatcagtctcatattgtagagctggttcgccaatgtgcaaaacaacacgaaaaagggcaccggataattattgtcacgtcgggagcaatagcggcagggcgtgaatatttaaactaccccgatttgcccgcaacaatagcatctaaacaactgttagccgctgtggggcaaagtgctttaattcaggtatggaaacagctatttgctatttatggtattcatattgggcaaatgttattaactcgcgcggatatagaagatagagaacgttttttgaatgcgcgtgatacactgcatgcattattagataacaagattattcctgttatcaatgaaaacgatgccgttgctactgcagaaataaaagtaggggataacgacaatctttcggcattagctgccattttaggtggcgctgataaactcctgttacttactgatatcgaaggtctatatacggcnnnnnnnnnngtgatagtgtctctggtttag

SEQ ID NO: 303096 - DNA, 468 bp, Proteus mirabilis
atgcttcaagaaagattaggcgcggataatgccgaagttcatgatatcgcaaaatccagtcaagaagacatcgaagcatttgatattctattactaggtattcctacctggtattatggtgaagcacaatgcgattgggatgactttttcccaacattagaagatattgatttcaacggtaaacttgttgctctatttggttgtggtgaccaagaagactatgcagaatacttctgtgacgcaatgggaactattcgtgatatcattgaacctcgtggcgcagtcattgtgggtcattggcctactgaaggttatcattttgaagcatctaaaggtcttgctgatgataatcactttatcggccttgcgattgatgaagatcgccaaccagaattaactgaagagcgtgttgacgcttgggttgctcagatcaaagaagagatgagccttgacgaaattctgggataa

SEQ ID NO: 303097 - DNA, 615 bp, Proteus mirabilis
atggattacaaagctcaactgactcaagcgtccattacgctattaaacaatattgaacagagtctctcactctccccttactggttagaaggccatatgttagctgcccaagtagcaactaaattaggttatggggaagtagaaagtggcattattgaagagttacgtatttttttagcgcgtcttcctgaacttgttaacttgcacttttcggatatgacacccttctttcctgaaagtgtacaacagtggttagagcaatataaccaaactgaaaacggtcaattgccaccatcgaatacgaatactgcaatcctagagcaagaggtcttgcaatgttatgagcaacaaggtcttgaagcagccctgaagcttattgaattaaaccttgctagcagatcagagcctagagatagattttatggacaattattgtctgcacaactatttgaattgtcaggtatggattatatggctacacagttataccaacaacttaatacctctgcctcacattattcacttgcagattgggaacccaacttaatacgacaactcatgcaaaaaatagacaaaaagacagaaataacaatgactatggatagggatcaataa

SEQ ID NO: 303098 - DNA, 1017 bp, Proteus mirabilis
atggctgagccatcttaccgtttattaacccgcttagatcgcgaatttactcctcaaactgagatattagtcagtaaccaaggggaaaatttacagaatctgaatcaaaaactaaatgacttacatcgttacctattggggatccaaaactctccagtgccggggaaagcggcgcttaaagcagtttcgatgcgcttaaacgataataatcgcgacgctatttttgagctatcacaaatggcgaaaacattaccagagccgcttaaccgctgggtcgatgagttatcagtgcaagcatggaatgtggtccaaaaagaagctattcgttatatggaagtagaatggaatgaaaatgttgtcaaacaatacaatacttatattgccggtcgctatccatttaacccagcagctaaacaagatgttcctttaagtgaatttgaacgtttcttcaaaccaaatggaacattagatagcttctatcaacaaaatctgcgtttattcgttgagaataacttagtcaacgatagtgatagccaatcattgatccgcgctgatgtattagcacaaattgaaatagccaatcgtattagagaaaccttctttaatgcccaaggtaatttagaagcacaatatgctattgagccactgtcattaagtggtaataagcgtcgtagcatcttaaatcttgatggacaattgattgattacgctcatagtcgcagccatgtgacacacttggtatggccaaactcaatgcgttccaatattgaaagtaaactgactttagtgcctctttccggtgataaatcgccacgttcaatcagtttctctgggccatgggcacaaatgcgattagttgataatgcaaaactcatcaatatcaaatctaactcattcgatattcgcttcacaatcgacggtggtgatatgacttatcgagttatagttgatgaatctaataatcctttcttcggtggattattcacaaaattccgtttacctgaaacgctttattaa

SEQ ID NO: 303099 - DNA, 915 bp, Proteus mirabilis
atgcgcaacaatattgctcatcgctacttacgctatgataatcagctccccattgaagaaagagaaataggttggaatagctgggcaaatattctgtacggttatggtacgcaaagtcaacaaggtggaattaacggctacaatacttatcgcactggtattcaaatcggtactgattatgaaataaatcaagatgcgctaattggcgtttctttagcatataactacgctaaagccgatgctaaacaacgtaatgcaagcaaagaaattagccattttgaatttatgccttatgccggttggtatagtgatacattattcttaaacggtaatttaaatattggttattacactgtcgatagtgagagggatatcggtggtaatacgggatggcaaggaaataccaaagcaaaaggtgactactctggtgtgcaattaggctatcagattaacgctggcacctatttggattttgattttatccatattaaaccgatgctaacttaccaatatcaatggctcaatattgattcttgggaagaaacaggctctacattatctatgcgtacttatggccaacgctacgcagttaatcaattaggtggctctgttgctttatggaatgactaccaaacctcttatggcaaattaaccccttctcttaaccttcgttatatcaaagatattgcaggtaataacgatattaatcaacgccacagacttacctattttaatactggaggaagcaccttcgatattaaaggaaataccgttggtggtgacatcattagtgctgaattaggtgcaaaccttgatattacccaatcgttaaatttaggtacaacaatgggatatcagcgttatgacaaattcaatgaagggcgtatcggctttactgttagccagcgtttctaa

SEQ ID NO: 303100 - DNA, 306 bp, Proteus mirabilis
atggtttctgttgcattagatgtgccaacaatcgctgggatctctaaagagcgtgccatgatagaggtgtgtgatgttctaccccctaagtcagtgataaagcctaacacattgtctaagctaagctgcgctgtttctgatggcgttaaatctgtagcaactaaaatcactttttcagaaatagcacttaaatcgataattggcatctctaagatattacgcattaagcgcttaccaatatcacgaacatcagccgcacgctcttttaagtactcatcatctaaggcttctaatgcggttgcctga

SEQ ID NO: 303101 - DNA, 864 bp, Proteus mirabilis
  misc_feature (836)..(845): n is a, c, g, or t
atggacactcatgaaataagcagtaaaaacatggccctaaaagaagatgtttctatcaacaccacttctaaaccaaacagtccgaaacactatatccagcgtgatgacgcgctttatataaaagtgacagtgtcattttttatggttggtttagccacttttgcattactctactttgtgcaacctatcttacctatcctatcaaaagaattttcagtcaccccagcaaccagtagtcttgctttatcgctttctacaggtcttatggcttgtggtctattgattacagggcctctttctgatgcgtttggtcgaaaaaatgtgatggttattgcgctattttgtgcggcttttttcacactattaagtgccatgatgaatagctggacgggaattttaattacacgagcactcgtagggctatcacttagtggtgttgcagccgttgcgatgacctaccttagcgaagagatccatcctgcttatctagccttatcgatggggctttatattagcggtaactctattggtggtatgagtggccgtgttattactggtgttttgagtgattattactcttggcgtgtgtctgtgattattttaggtatttttgcccttgttgctgctatcattttttggcgaatattgccgacatcacaacattttaggccagcaaccttaaaaccacgtaatcttcttatcacaactaaattgcattttagagataaaggactccctcttctttttattgaaggtggcttgttaatgggagggtttgtaactttatttaattatattggttatcgcctattagatgcaccttattcattaactcnnnnnnnnnntcgaaagcaggcttattaa

SEQ ID NO: 303102 - DNA, 915 bp, Proteus mirabilis; identical to SEQ ID NO: 301329

SEQ ID NO: 303103 - DNA, 1008 bp, Proteus mirabilis
atgaaaatattagtaacaggtgcagcaggatttattggctaccatttaagccagcgtttgatagaaatgggttatcatgttgtcgggatagataatctcaatgattattatgatgtgcgcttaaaagaagcacgattagctaaacttaatcagttggataacttccaatttgagaaaattgatattacagattcagtgagtattgcgcaattatttgctgatcaccgttttgatcgagttattcacttggcggctcagcctggcgttcgttattcaattgaaaacccaatggcatatatcgatgctaatattgtaggccacattaatatattagaaggttgtcgccatcataacgttgggcatttgatttattcgtcatcaagctcggtatatggtttaaatcaaaagcaacctttctctacagaagatagtgttgatcatccggtgtcactttatgctgcgacgaaaaaagccaacgaattaatgtctcatagctattctcatttatatcagctacccacaacaggactgcgattttttaccgtatatggtccttgggggcgtcctgatatggcactatttaaatttactaaagctatgttagcgggtgagcctatcgatgtttataatggcggaaatatgacccgtgatttcacttatgtcgatgatattgtcagttctgtggtacgtttaattaatattattcctgaacccaacccaaattggaccgtagagcagggggaaacttcatcaagttctgcaccttataaaatatataatgtgggtaatgggcaacctacaaagttaatggattttattacagcaatagaaaaatcactcaatattaaagctaaattgaacttaatgccgatgcaagatggtgatgtactttcaacctgtgctgattgtagcgatttagctcagacaacaggtttttcacccaacactgcagtagagtatggtgtgaagcagtttgtggattggtatgtagattattaccagcaataa

SEQ ID NO: 303104 - DNA, 2004 bp, Proteus mirabilis
atgatggagcgttttatcaccgcgcctgtatggtttcgttatcaaaatagtcatactgtcacgctaaaacctgccagtgattatcgtcctacattacgtaccgtctctttagatattgaaaccagtgagtttggtgagctttattctattggattagccggttgcggtgataacgttgtttttatgcttagtgacaccctcccagaagttcaagaaagccaacaacctgaaggctatcgtctgtgctatgtaagtagtcgattacaactccttgaaaaactaaatgcttggatacaagagtacgatcctgatgcgattattggttggaatcttattcaatttgatttgcgtatcttgcatacccatgctcagcgttacgggatcaatttattattaggacgacaaaataccccattagagtggcgtgaacatggttttaaagcggggcacttttttgcctcagcacaagggcgtttaattattgatggtattgatgctttaaaaatggcgacatggaattttccctcttttagcctagagtcagttgctcaaacactgctaggggaagggaaagcgattgatacaccttatgccagaatggacgaaatcaatcgccgttttaaagaggataagcccgccttagcgtattataactggcaagattgtgtcttggttaatcgtatctttgataccacacacttaatggaattcttattagaaagagccagtgtaacaggactggcagcagatagaagtggtggctctgtcgcagcatttactcacctctatttaccctcaatgcatcgtcttggttatgttgcccccaatcaaggtgaaaaacccgaagagcatagccctggtggttttgtcatggactcaacaccgggtctctatgactcagtggtagtactggactataaaagcctatatccctctattattcgcacctttttaatcgatccggtgggtatgattgaaggtatgcatcaccctgatagcacacatgccgttcccggttttcgtcaagcgtggttttcacgagaaaaacactgtttacccaccattgtttcacaaatctggcatgaacgagataatgctaaacgtcataacaacgccccgctctctcaagcattgaaaattattatgaatgctttttatggtgtattaggctcggtaggctgtcgtttttttgatcctcgattggcttcatcaattactttacgtggtcatgaaataatgaaaaagacccgtgaattaattgagtcaaaaggctatcaagtgatttatggtgatcctgattctacttttgtttggcttaaagccgctcataacgaagtacaagcagagcagatcggtcgtcaattagcgcaagatgttaatcaatggtggaaaagctatctgactgaaacttaccagcttgatagccaattagagcttgagtacgaaacccattatcgccgattcttgatgcccactattcgaggtatggaaaccggaagtaaaaaacgttatgcaggactaagtcataataaaatggtgtttaaaggattggaaacagtcagaacagactggacaccactggcgcaagcgtttcaaaaagagctttatacacgcatctttaatcagcaaccttatcaacagtttattcgtgattatgttgctgatacgctattaggaaaatatgatgatagactggtttatcgaaaaagattgcgacgaaaattatcagactaccagcaccatatcccccctcacgtcaaagcagctcgattagcggatgactataatcagttacaaaataggccgcaacaatatcagcaaggcggttggattagttatataattactcacttggggccagagccgttagagcatatcacttcgacacctgactatgaacactacattaataagcaattaatgccgatagcagatgctattttgccatttctacaagatgatttttctaccttgttaaatgggcaaatgacgctctctttttaa

SEQ ID NO: 303105 - DNA, 543 bp, Proteus mirabilis; identical to SEQ ID NO: 301110

SEQ ID NO: 303106 - DNA, 525 bp, Proteus mirabilis
gtggctcataatattagtgctaataccaaatcagccaaaggtgtttcgcccgttgttgccatgctagaaaaaggtgttcgtgttggtttagggactgacggtccaatgtcgagcaatacactcacaacgatgaatgagttaaatttagtaggcaaaattcataaattagagaataaagatcgcgccgcaatgccaccattaaccgtcgttgaaatggcaacaataggctcagccaaggcattacatatggaagataaattaggctctttagaatcgggaaaacttgctgatattattgttgttgatactaaagctcctaatatggtgcctatgtatagcccatatgcagcattagtttatggtgcgaatggaagtaatgtgcgtcataccattgtagatggtaaaattttgatggaagatcgccaactgttaaccgtagatgaacaagcgattatcagtgaagctcaaaatttcgcgaataaagtacgccaaaccgttgttgatagtggtgaagtcgttaaatag

SEQ ID NO: 303107 - DNA, 267 bp, Proteus mirabilis
ttgtttctccgtgcccatgatattgaaccacttgattttgataaggtgaaattatctaaacaaaataaagggttagtaataaataacgatacgccgtatcacctgacaattaaacatatcttagtgggtgataaacgctacccatttaatgattttgttaatcctcaccaagaagtggtcttgctaaaagaaaatcatattccgcagaaagttaccgttcaatttatcaatgattacggtgcgactgtagataaagtattaaattaa

SEQ ID NO: 303108 - DNA, 426 bp, Proteus mirabilis
  misc_feature (396)..(405): n is a, c, g, or t
atgacattaaatatatattgtcttatagacactattggtgtcaagtcatttagtgtctttatgacaaaatttgattttcatgtgtttaacattaaaataaactcattatctttttataaagtgcagaccatgaacgaacaaaattttttagcaaattacaatcgccgtgattttctatcgccgcttattactgttgattcagtactattcacttaccatgaagggcagttaaaagtgctcttggtggaaagagctaatcatcctgaaaaaggaaaatggggattacctggtggctttgttgatgaaacacaagacaactgcctagaagatactgtgctcagaaaattaaaagagaaaacaggggtgatcccgccgtatattgaacaactctgctcnnnnnnnnnnactctgctcagtgggaaataa

SEQ ID NO: 303109 - DNA, 636 bp, Proteus mirabilis
gtgggaaataatcagcgcgatgtaagaggttggtctgttactgtatgttacacggcgttgattgctcaccaagcatgtaaagcgcatattgatagtgtggatcatgtgatgtggttacctattgatgaagtagcacagaaaaatctggcatttgatcataatgaactgattgcgcaagcgagagagcgattaaagcaaaaatcgctttattctattgtgccgggatttgcgttacctgaagtgtttactttgcctgaattacagcatgtgcatgagatattgataggtaaagagatccagaaaaaatcttttagacgacggattgaacaagccgaaatagaaaaagagcgtcttgaagccaaagtcaatgccgaagcaaaacgtaaagaattagtcgcgttaagtgcggaaaatcaacgcatacaatctgatgctgatgcttatgctattgaagcaactatgcgagcttaccgtgagttgcccgttgaaaatctcaaagcaatggctctagcaaaaatggactcacaacaattaatggcaatggcatttgaaactttagcgcttaattcaggaaaaattggtgaattaaatatcactcctgatttatttagccaatttatgaaaaaaagaggataa

SEQ ID NO: 303110 - DNA, 1185 bp, Proteus mirabilis
atgaaagcattttttcctttatttgccctcgctacaggagcatttgccataggagccaccgaatttacacctatgggattgctacctaatattgctaatggactgagtatttccatagcaaccgcaggtggattaattactggttatgctgttggggtgatgattggtgcacctattatgacattaagtcttggcaaattaaccaaacgtcatgcattgggattattgttattattatttattgcaggaaatctattagccgcacaagcagatagttattggagcttaatgatagctcggttgatcactagcctaaatcatggtgctttttttggtatcggctctgtcgttgctgccagtttagttgaaaaacataaacaagcctctgccgtcgctgctatgtttatgggattgactatcgctaatttagtcggtgtacccttagtcacttggattggacaacaatatggctggagattagcctttatattaatttcaggtctgggttttattaccctaatcggattattaatgtttttacctgttatgcctaaaggaaataagcctaatattaaatatttagtagtaagaaaattgggagtaaatatgaatattctacttattaacggtggacaaaaatttgggcattctgcaggacaattaaaccgtacattacatgatatcgctctggcacatttggcgacattagggcatcaggtaaaagaaacacaaattgaagaaggctatgatatcaatgaagagatagagaaatttatctgggctgatactattatttatcagatgccgggctggtggatgatgatgccatggaaagtgaaaaagtatatggatgaagtctatacttatggtcacggcaaactatatgaaaacgatggacgtactcgtcatgatccaagcaaacaatatggtagcgggggattgttgcaaggtaagcaatatatgatctccgtgacttggaatgcccctattgaagctttcaatgaatttggtaatttctttgatgggcgaggggttgatggtgtctattttgcttttcataaatcacaacaatttcttggtttatctcagttgcctacttttatgactaacaacgtcattaaagagcctaatattgagaaagatattgtagaatataaagcacatctaaccaaagtctttggctaa

SEQ ID NO: 303111 - DNA, 531 bp, Proteus mirabilis
gtgatcgatgatgatggctaccgcccgaatgtggggattgtaatttgtaatcggcaagggcaagtgctttgggcccgtcgctatggacaacattcatggcaatttccccaagggggaattaatcctggagaatcaccagaacaagccatgtatcgtgagttgttcgaagaagttggattaagtcgtaaggatgttaaaatccttgcctccacgcgtaactggttacgttacaagttacctaagcgtttggtgcgttgggacacaaaacctgtttgtattggacaaaaacagcgttggttccttttgcagttaacaagtaacgacaaggacattaatgttcagcagagcaaaacgccagagtttgatggttggcgttgggttagctattggtatcctgttcgtcaagtcgtctcttttaagcgagatgtatatcgtcgcgtgatgaaagagttcgcaccagtagttatgccattacaagaacaagtgtctatgtctcgtccttcctatggatatcgccgtaaaaggtattag

SEQ ID NO: 303112 - DNA, 534 bp, Proteus mirabilis
atgtcttatattgcaacagcaacaaataaacatttctattatctcgatgtacggatcgaagatatagatattcaagatattgcgacaggtttagctaatgagtgtcgctttaatggacaaattgataatttctattctgttgctcagcattctgtgtataccagttatttagttgcacctgaatttgctttagaagccctacttcatgatgccagtgaagcttatgtcaaagatctaccgtcaccacttaaaaaattattgcctgaatataaattaattgaattgcgtgtggaaaagataatccgcaaaaagtttggattacctgaaaatatgtctgatgaagtccactttgcagatctaatgatgttagccacagaaaagcgtgatttagacattgatgcagatagtaactggttaatgcttgaaggtattccagctagcgattttgctgtcaacccgctaacccctcgacaagcaaaatccctattcttacgccgttttaatgagctttataaggaggttgagaatggctaa

SEQ ID NO: 303113 - DNA, 366 bp, Proteus mirabilis
  misc_feature (296)..(305): n is a, c, g, or t
atgtctcaggctgctgcttctttagctgtttctgtgcgtactaaaaacaaaaccttaaaacaattagctttttctgccagtattaccgccttttttggtggtataactgaacccgctatgtatggggttaacctcaaactgaaaaaaccaatgtacgcttgtatgattggtggtgctattgcaggattatttgctggtattgttaagttaaaagcgttcgtctatgtcactccgggcttattaagtttaccaatgtggatatctgatacagataaccaagtagtaaatgcaataannnnnnnnnntaatcaccttattgattgccagtgtagccacttttattgcaacgcttattattggttttga

SEQ ID NO: 303114 - DNA, 396 bp, Proteus mirabilis
atgtaccacaccttaggtcaacgtaaaggtctgggtatcggtggcacaaaagaaggtagcgaagatccttggtatgtagtcgataaagatgttgcaaataacatattaattgtcgcacaaggtcatgaacaccctcgattaatgtccgtaggcttaattgctcaacaacttcattgggtcgcaagagagcctattaccgaagcttttcgttgcacggtgaaaacacgatatcgccaagctgatattccgtgtacagtaacaccattagatgaagataaaattgaagtccgttttgactatcctgttgctgctgttacaccggggcaatcggccgttttctatcaagacgaagtctgtttaggtggcggtattattgaaacacgtattcaggagtag

SEQ ID NO: 303115 - DNA, 492 bp, Proteus mirabilis
atggatcaggacattaccttgtcaaatttatgcccctgcaatagccaattgccttatagtgagtgctgtgagccttacttattagggacaaaaaatgcccctacagctcaagcgttaatgcgctctcgctatagtgcttttgtgactcataatgcagatcacctaatcaaaacatggcacccttcgtgtcgtacaccttctttacgggatgagttaatcgccacgtttcccaatacacaatggctagggttacatattatatcggcacaagaaaaccctcgtgataacgaagcctttgttgaattctcagcttgctttattgaaataaatgctgatgataagcagtatctacatgaacgctctcgttttctaaaaatagacgactgctggttttatattgatggtgtacagcctaaagtaggacgaaacgatccctgtccttgtggctcaggccgtaaatacaaaaaatgttgtgaacacaacagaaaataa

SEQ ID NO: 303116 - DNA, 522 bp, Proteus mirabilis
atgctatgtgcactggttttcttatcagcctgtggtgaaaaacagcaggtgttagaaggcgaaacgatgggaacttactattcaattaaatatgttcctagtagtgattcaccttcacaaagcgtcttacaaacagaaatcgatcgtattcttgaagaagtgaacgatcaaatgtcaacgtatcgtcctcaatctgaattaagtcgtttcaatcaaagtcgtgaaattaatacgccattcccagtttcacccgctactgctaaagtcgttagtgaagcgattcgtattaataaaattacggatggggctttagatgttactgttgggcctttagtcaatttatggggatttggccctgaaggacgttttactcatcaaccttcagccgatgaactagctaaacgtaaaaaatggacgggaattgattaccttgcagtggaaggtaatacattaattaaaaaaatacctgagctttatgttgatctctcttctattgctaaaggttacggtgttgatgagtaa

SEQ ID NO: 303117 - DNA, 780 bp, Proteus mirabilis
ttggtattaaaaattcctgaaggtgaagtggtacctttccgtgctgggggctttattcagattgaatgtcctcctcacacagtgcgctatgaagattttgatgttcctgaagagtatcgtgaagattgggataaatttaatttattccgctatgtttctgaagttaaagagaccacagtgcgtgcatactccatggcgaactaccctgaagagcatggcattatcatgttaaacgtgcgtattgcgacaccgccaccacgtaatcctgatgtgccaccgggaattatgtcatcttatatttggtcattaaaaccgggtgataaagtgacaatttcagggccatttggtgaattcttcgcgaaagaaactgatgcggaaatgatcttcattggtggtggtgctggtatggcaccgatgcgttcacatatttttgatcagttaaaacgcttacattctaaacgtaaaattagcttctggtatggtgctcgttctgtgcgtgaaatgttctatacagaagattttgatatgctggctaaagagaatgaaaactttacttggcatgttgcgctgtcagatgcattaccggaagataattggacgggttacaccggctttattcacaatgtgctctatgaaaactaccttaaagatcatccagcaccagaagattgtgaattctatatgtgtggaccaccagtgatgaatgctgcggtgatcaaaatgcttaaagatttaggcgtagaagatgaaaatattatgctggatgactttggtggttga

SEQ ID NO: 303118 - DNA, 243 bp, Proteus mirabilis
  misc_feature (219)..(228): n is a, c, g, or t
atgagagagccgacagaaaccggcatagtggaataccaagttcctgatacgattttaaaaattttagctgactttcctccagaatatatttgctatgttttaaatctacactgggatgttttagcttataatcaaaaagcagatctatgcttccatttttcggactactgtactgaaaatcgtaattatctctatttgttatttatggatcctagatannnnnnnnnnatattcgtaagctaa

SEQ ID NO: 303119 - DNA, 150 bp, Proteus mirabilis
atgtgggaaaaacatgagatctaccctccctgtgatggagtaagaacattaaattttgctggtaaaaacgagcgttatgaatacacctcattagcatttgatttagaaaaatataatcgaattttagtgtatatccctaaagataagtag

SEQ ID NO: 303120 - DNA, 1449 bp, Proteus mirabilis
atggagattaatgaaaaacatttggtgattggcgacaacggggcacaatttagtttctgccataatttcaccatcatgccttatagcattttggatagaaaaattactcagcatccaaaccactcttgtatctctcttgaaatattatatcgtggtgatgtggaattaactcaaacaaatgcacttaatgtttttttaggggaaaataaaaccacctcagacattttattactcgcatttagtcaatattttgaaaaaattgaggtggtacataacggtgaacgttatgaaggcgatcctcttaattatgcttttgaacccaaaattggcaatgactataaaatcttcccacagaaaaataactcattttctgcgccacaacgtttattagaaggtctttatttaccccatgttcaccattttattgagttagatataccacaaatagtgactcaattagattggaaacaacagcagcggtttgttgtgaatatctatttcagtcagcaacttcctttaactcaagaagagtgtaatcagagcttttttttaaactgtgctccagcgattgatagtgaagcaaaacatacacttttaattgattttaaaaagaataaatcaagttatttactccctattccaacccatcactatttggccgatcttgataaaattgagttatcactagagcctcatgagctagcgcgtggcatatactgtcatttttatcctacgacagaattaaccgccgcctctcgtttaatgccccaatttcataaagccattttctattcattaacaatggagaaaaatattactgggcatacactttattatttgaatttctttgataataaaggtgatcctatggtcacaccgcctagtttacattttgcatgtatttatattggctttgaacaatataaaagaaatgagttaggtctattaaataaacacagcgaaaaaatgcctgatgcagtaaaaacgggaaatatcacattattatcatcttgttatccacctattgtaaataatcaccatttttggaaattgttatctcattacagtgctaatggttcaatgttaatgtcattagatactattaaacatatgatttctgattatattctttaccgagatactgataggcagatcactcgaaaatgtgagcgattattaaatggactcgttgaactaaaaacacatttatatgactatattttaaaaggtaaaccctatcgttgtttatctttatcgctattcattgacgaaacacaatatgaaaatagaggtgaagcttttgtctttactacacatctttaccattttttcccgttctgtttatctgaaaatatgttattggaaatgtcagttacactcaatgatcagaaaaacaccacttggtatttatctccctcaccactaaggggctataaatcaatgatttaa

SEQ ID NO: 303121 - DNA, 1038 bp, Proteus mirabilis
atgataagaaaaacattgctagccagcttattaaccgtaattagtggtactgtttttgctttacctaatgtgacaatcctcgcaactgggggaaccatcgcagggggtggagactctgccacttcttcaagctacacagcaggaaaattaggcattgatacattgattaatgccgtacctgaggcaaaaaaagtggctaacttaacaggcgagcaagtggttaatattggttcgcaagatatgaacgaccaagtgtggttaaaactggcgaataaaattaatacggattgtgataaaacagacggctttgtgataacccatggtacagatacgatggaagagaccgcctattttcttgacttaaccacagcatgtaaaaaaccagtggtgatggtaggggctatgcgcccagcaacagcattaggtgctgatggtccattaaacctctataatgccgtggtggtggcgagtgataaagcatctgaaaatcgtggtgtattagttaccatgaataattcggtgatcagtggtaaagatgttgtcaaaatgaatacgacagaagtgcaagcattccagccgattaatgcgggtgcacaaggttatgttcatgatggtaaagtacactattacactgctgcaacaccacgcgctgagaaagttgcctttgatgtcagcaaattaaccgaattaccaaaagtaggtattgtttataactatgctaatgcatctgatttaccggctaaagcgtttatagataaccactttaaaggtattgttagtgcaggtgtcggcaatggtaacttatattctgacatcttaaatactttagcagatggtgtaaaaaaaggtgttattgtggttcgttcaagtcgtgttccggttggatttaccacacaaaatggtgaagtagatgatgcaaaatatggctttattgcttcagaacgtttaaatccacagaaagcaagagtgttattacagttatctttgacagaaacacaagatcccgccacgatccaagaaaactttgaaaaatattaa

SEQ ID NO: 303122 - DNA, 744 bp, Proteus mirabilis; identical to SEQ ID NO: 302433

SEQ ID NO: 303123 - DNA, 729 bp, Proteus mirabilis
gtgagtttaagtggtactcgtctcgaagataacaatcttcagtatgatatttcgcaaaactataaccatactcgccaagaatatagcggtgctatcaatggtagttatagtgcttcaggtggcgaaatcagtgctggttataactatgataaacgtttccagtcagtgaattggggagcaactggcgcgttattaatccatcaagatggaataaccccatctcgcactatctatgactccgctattttaatcaaagcggaagatattgatcatttgaaaattagcagtgcacaaagtttatataccaatgctcaaggttatgccgttatccctaacgtttcccgttatgaacgcaatagagtaacggttgatcccgcttccttaaagggaaacaacgatgtggaactcacttcaacaacagtgatcccaacgaaaggcgcgattgttttagccgattttaaagctcgcaagggtgcaagagtattagtgaacctctcttataacggtaaacctttaccattcggtagccaagttgaaattagccaagatggacaagtgatttccagtgggattgtggctaatgatggtgaggttttcctaaatggtgtacctgcaagtagtcaactacaagccaaatgggggaatagtgctaccgaacagtgccaagcaacattaaacgccgatctatcgctcgagaaaattcaatttttacaactggactgcagatag

SEQ ID NO: 303124 - DNA, 609 bp, Proteus mirabilis
atgaatatagcaagtcttcttgaacaaattgcagataaaggttggtgtgtatgggatgatttccttacacctgaggcggttaaacaattgcgtgcttgttttggtaatgatgcacaacaagcacgtataggacgtcatgaaaacctattagcagaaaccacgatacgcagtgataaaattcgttggctagagccgcaaatgggagagccagttcaacattaccttatgcaaatggaaagcattcaacgagcagttaatcgtgagttctttttagggctgtttgaatatgaagcgcatttcgcttgttatgaaaaaggtgctttctataaaaaacatcttgatgcatttaaagaaaatgtcacaagacgtttaacgacagtgttatatcttaatgatgaatggacacaacaagatggtggagagctagttatctatgatctggatgataatcaattagcgacagtcgtccctcaaggtggtcgtttagtggtttttctttcagaacaatttccacatgaagtattacctactcataaagaaaggatcagtattgcagggtggtttcgagttaatggtgtcagagataattttctcgatatcgccagctaa

SEQ ID NO: 303125 - DNA, 846 bp, Proteus mirabilis
atgttacaaagcggttttccttccgaagatgaacaaaaaaaccgttatcgtgaaatcttatcattttttcccaataaacccgtcgtactacgtgctttagatataggtgcagataaacagcttccttatatgccgataaatgaggagaacccttgtttagggtggcgggggatcagaatattactcgatcagccagaaatatttctgatccaactacgagcgatgttaaaagctaatcttgaatttaaaaatttgaaaatattgttgccgatggtgacaagtattgatgaaattgaagaagcgaaagcattgttactaagagcatgtgctgaagttagccgagaaatgaaatgcgaatgcattctaccacctgtggggatcatgcttgaagtcccctcattggtctttatgttaccgcaattagcacatcgagtagattttatctcgattggtaccaatgatttaacgcaatatttacttgcagtcgatcgtaataatacccatgtagcactgctctatgataatttgcatcctgcattactgcgttcgcttaatattattgctttagaatgccaacgttatcagttaccagtcagtgtttgtggcgaaatggcgggtacgccgatgggggcattgctactaatagggctaggttttcgtcagttaagcatgagtggacgtagtttacctagggtaaaatacttattgcgccatctagatcctgctatcttacagccttttatgcaacaggtgttgaaagctgaaacggcaatagagataaaaaaattgtctgctgattttatggaaagacaaggattaggtggattaattcgcggaggtatctga

SEQ ID NO: 303126 - DNA, 627 bp, Proteus mirabilis
atgcagaacctaaatgttgatgtaccaacattacctgcttatcaatcacagcaattaattagcgcagcaccaaatgcgccaggtggaaacgttgctttacccggcggaattttcttccgtgagcaagcggatggaacgtatgcaacttctcctcgtgtcattgttgctccggtagtaaaagaatcatttacttacggctataaatatttacctctgctggctttacctgatttcccagtacatatttcgttaaatgagcagttgattaattcctttatgcaatcaacacattgggatcttaatgaagagtcgccatttgaaaaatatcgtgatatgaccgctctgcctgatctgccagaattaaatgcctcactggaaaaactgaaaaaagagttcccagcatttaaagaatcaacgttaattgatcagtggagtggtgcgatggcgattgcaccagatgaaaacccaattatctctgatgttaaagagtatccaggtctagttattaatactgcaacaggttggggaatgacagaaagccctgtatcagcagaaattacagcagatttattattaggcaaaaaacctgtattagatgccaaaccatttagtctgtatcgtttctaa

SEQ ID NO: 303127 - DNA, 255 bp, Proteus mirabilis
atgacctttaacgtcaactcacgtgtcttagataacagaaatgtcagtaatgacatgccggataaagagttagatgcaatttcaagctccaaggaactttgtgaaatagtcagttctttaaatagacctcttatttctgctaattgtttttttattgattcactttcttttttgttgatcaatgcctttaattcatcagcatgtgaagtaattttattgattttatcttcatttaaagaaatatttggtaggtaa

SEQ ID NO: 303128 - DNA, 414 bp, Proteus mirabilis; identical to SEQ ID NO: 296248

SEQ ID NO: 303129 - DNA, 681 bp, Proteus mirabilis
atgccaatttatgcgcatgacttgaaatatttaagtgatatggcatcgatagctacatcaaacttaagggcttcaacaaaaggtcagttagaagcatttgaagattttgggttaacagacacgagagcaacaccaagagttagaatacgagatttaaaattaaatggtcgttttgtttgtcgtgataccgatccaatctatgtattagaaactcgctgtcgtcgaacaccaaagccgatgatagagcctgtggattttttattatgctcatggcgtagggctatcaatgcattaagtgaagagcaacactcatggataatgtattgttatggatatagcttgaaatttgagcatcaagttaatatcagtgttcatgtgtggtctgaatttgaaaaacagcataaaggtaaaaagataactaaaaaagttaaagaacgactaagatcattagtctggttatcggttcaggcttacactaggcgtaattattcacaaacagagctggctcgcttggtgggtgttaagcgtgataattggagtaaaaactatcaagtatattgggattatctactttatgtgtgttatgaattagataaattggcattactttcaatgaggcgagttagaatcgagttgatcaataaaaataataacgacaacttgcaaaagtcaacaaaatag

SEQ ID NO: 303130 - DNA, 198 bp, Proteus mirabilis
atgttaaaacagtgtgatatgacagatgaagcaagagtgttttttgataaaattcctgaagataagttaattacagctcagttcatgttttgggaaacagggttttctgtgccaaaatgcgggtttttgataactcaatttgtaatggctgggttattgcgggaattggggaacggttttttccaaaaaaatatttaa

SEQ ID NO: 303131 - DNA, 1089 bp, Proteus mirabilis
atgaaaaagacagctatcgcattagcagtggcagtggcagctttcgcaactgcagcgcaagcagctccaaaagacaatacttggtataccggtggtaaattaggttggtctcagtatcaaagtactggtaacaattgggacggcgtgaatatcggtaacggtagcacacacaaagaccaaattggtgctggtgcatttgctggttatcagtacaaccaatacttaggttttgaactgggttatgactggttaggtcgtatggcttataaaggttcatacaacaacggtgcattcaaagctcaaggtatccaattaaccactaaattaagctatccagtaatggatgacttagacgtttatacacgtttaggtggtatggtatggcgtgcagactcaactgcaactattaatgcaacttcagcaggaactcaaaaacgtttctctgaaaatgatactggcgtttctccagtattcgcattaggtactgaatacgcgatcactcctaacattgctactcgtcttgagtatcagtggatcaacaacatcggtgataaaggtactctgaacgctcgtccagacaatggtatgctgagtgttggtgttgcttaccgtttcaaccaagaaactccagctccagttgttgagccagctccagtagttgctccagctccagttgttgagaacaaaacctttactctgcgttcagacgttctgttcaactacaacaaatcttctctgaaagctgaaggtcaagaagcactgaatggtctgtacaatgaattagctaacatcgacccaactcaaggtcgtgtcgtagttatcggttacactgaccgtatcggttctcaaaactacaacctgcctctgtcagaaaaacgtgctcaatctgtagttgattacctggtatctaaaggtattcctgcaaacagcatctctgcagaaggtcgtggtaaagaaaacccagtaactggcaacacttgtgacaacatcaaagctcgtgcagctctgatcgattgcttagcgccagaccgtcgtgtagaaatcgaaatccaaggtacaactgaagttgttgttcaacctggtcaataa

SEQ ID NO: 303132 - DNA, 690 bp, Proteus mirabilis
atgtatgctttggctgtattggttaactttagcattcccaagttatcacctgctcaaataggccggggctggaatattaaaaaaatattcaatcaattcttagctgcttgtggctctttatggcgagataaagagagccgtttttctctggtaggaacaagtatgttttggggggctggcgtcacattgcgttttctattagtgcaatgggtgcctatagctttgggaatgactgataatacaacaccaacaatattaaatgcgatggtggcgattggtatcgtgattggcgctggtttagccgctaagtttgtcacattaaaaacggtccgtcgttgtatgcctgccggggttttaattggcttaggtgttgtttacttctcattacaaaccaccattattccagcctattttatcttagttgttattggcatttttggtggcttctttgttgtaccattaaatgctttgctacaagataaaggaaagcatagtgtgggagcggggaatgccattgctgtacaaaatttaggtgagaataccgcaatgttactgatgctaggtttgttctcgctagtcaccagtatgggtatttccgttattacaattggtattggctttggtgctatctttgcgctagcaattggtggattatggttgtgggattgcaccagaaagagagctgaataa

SEQ ID NO: 303133 - DNA, 318 bp, Proteus mirabilis
atggaacatatcaaagaatattggcacgaaaattatgacgaatatttatctggaacagagaaaatccaatcattagattatgacgaaagatctaaagctgatgacattgcatatgacatgctacatgatttaattaatgaatacgatcttccctttgaggacaatgaaattgaatatatgtatagtaaagtcgatgcatctgcacacctctctgacttttatgattatgatgacgatgaaagagagctcttctatagtcgcagagatgaaaaagaacatagcgaaagctatataaacgatttatttcaaaaacattag

SEQ ID NO: 303134 - DNA, 1122 bp, Proteus mirabilis
atgggatcctggcaaaagctgattgccaatttagccgaaatttttgttccattattacctatcttaatttgcggcggtttattgttaggattaacaaatgttattggcgaaatgcctatatcagataataaacccctcacttatttttatccttggttaacgccaatatatgattttctctggttaccttgtgaagccatcttccattttctacctgtgagtatttgctggtcgagtgtaaaaaagatgggtggtacacctgcactaggtatcgtactaggtataaccttagtttctccacaactaatgaatgcttacaatttaggttcacaaattcctgaagtttggaattttggtttatttactattgagaaagtaggttatcaagcccaagtgatcccttcgattttagcgggactatttctgggatggtttgagactaaattacgtcgttttatccctgattacctaaaattagttattgtgccgattgtaactcttattgtcgccgtttttgttgcccatgttattttaggccctatcggtagaagcataggtgatggtctcgcccaactgatcaaatttttaatgttaggtgattttgcccctattggttcaactatttttgcctttttctattcccccatggtgatcaccggcttacatcacacaacgttagcgatagatttacaaatgactcaaagttatggcggtacacctatttggccgattatcgctctgtctaatattgctcaagcatccgccgttgtaggcattattatcgttagccgcaaattaaatgaacaagaaattactattccggcagctatctctgcttatttaggtgtgacagagccagccatgtatggcgtcaacttaaaatatggctttcctatgctgtgcgccatgattggcgctgcgctagcgggtttgatttgtggattaaataatgtgctatctaatggtattggtgtcggcggattacccggtattttatctatccaacctacttattggttagtttatttattggcaatgatagtggctattgtcgtccctattggattaaccattctggtctatcgctataaagaaaaagcaggcaccttgcaagtcgattaa

SEQ ID NO: 303135 - DNA, 357 bp, Proteus mirabilis
  misc_feature (269)..(277): n is a, c, g, or t
atgagtgaagtggcgccaggatggaaactacgtgtgctccttgcacaagccctattcgctgatcctgacatcttattacttgatgaaccgacgaataacttagatattgatacgatccgctggctagaacaaacattaaatgaacgtaatagcactatgatcatcatttcccatgaccgccattttttaaatatggtgtgtactcatatggccgatcttgactatggtggattaacagttcacccaggtaattatgatgagtatatgtnnnnnnnnnaaccgaagttaaagcttccagccgacaaaatccctttattcgttttgagcaagagaagaaattatttcgtaatgcgttag

SEQ ID NO: 303136 - DNA, 294 bp, Proteus mirabilis
gtgctaaaaaatgcgttagatcaagcctctcgcccttatggtactaatgcatgggatagtattcctgctgggatcatcggtgtttcaatcggtaatattagtactgctattgcacaacagcacctgcgtaattcattagcatttttaaatatgccaaccttaaatcaaccagaatgttttttaaaatggtatgatggaatggtagaaaacggtcagttttctgaaaaaacagcaggttttatgcaaaactgggttaatagctatattaactttgtaaagcataatcaaaaatag

SEQ ID NO: 303137 - DNA, 222 bp, Proteus mirabilis
  misc_feature (105)..(114): n is a, c, g, or t
atgagtcattttaacattggtgttgtagtcggaagcttaagaaaagattcctataataaacaaacagcaaaagcattaacctcgctatttcctcaagaatttacnnnnnnnnnnatatcggtactcttcctctctacaaccaagatgatgacgacaaaacacctgaagccgttgtcgagtttaagcaacaaattaagcaatgccaaggcattatcttcgtaa

SEQ ID NO: 303138 - DNA, 324 bp, Proteus mirabilis
  misc_feature (309)..(318): n is a, c, g, or t
atgcgaaatcgcacgctaagtgatttagatcgtgttgtagcccttggtggaggtcatggccttggacgtgtgctttcagcactctcctatttaggaactcgccttacggggattgtcacgacaacagataatggtggctccacgggacgtattcgtaaagacgaaggcggtatcgcgtggggagatatgcgcaattgtattaatcaattaatcacagagccttccgttgcttctgcgatgtttgaataccgtttctccggcacaggagagcttgctggacacaacttaggtaatcttatgctaaaggcnnnnnnnnnnacttag

SEQ ID NO: 303139 - DNA, 444 bp, Proteus mirabilis
atgatcagtgtgttgcctcgtattagtaatactaaccaagagattgagatgattatcaatcttgaagatggcgccgagaaaaaaagtgatgatgaagatagagaagaagggattgaaaaattacctgttattaatcgcacaaatatcagcaccgtggcccgagtttctgaaggcggtagtttattaattggtggatatacacgagaagataacataaaagcagaaaacaaaattccttttttaagtgctatacctttagttggccgagcatttagctatcagtcagataataataaaaaaatggtgcgtatttttatgttacaaccgcgtttattagataaaactgatacgcacggattggactctttaactgaacacccatttttaccgatggataaaaaaacatctcaagcgctaaaacaaattcaggcatttatgaggtga

SEQ ID NO: 303140 - DNA, 621 bp, Proteus mirabilis
atggttatgatggaaatcattgcctgcctattaattgttcagatggtctattggatgaacaaacaaggtaaatcactaaaagccaatatcgaaaacgaattgacacaaaaaacgcaacaacaaagtgtctgggggattttactgatcatcgccattgccattgcgagagaaggcagcgaagtggttgttttcctatcaagccatattatggctctcacagcacaaaccgcgttgcctttcttgattgaagtattcattggcctattgatagcgggactaactctatggttatttttgctaacatcaaaaatgatttcttggcgtaaattctttgttattaccggatttttactgcttttcctcgccgtttccttgctattaaaagcagtagaagagatagctaatctacttattgaaatggatattgaattacctgactttttgatttatccactatgggatcttagccatattctggatgattcaagcatttttggtaatttcttagtttcattctttgcttatcgctcgcaacccattggtttaagtgtcgttacttttattgtgttttggttggtggtcgcactgttatttaaacaaggggatcgccatgccaaatag

SEQ ID NO: 303141 - DNA, 936 bp, Proteus mirabilis
  misc_feature (557)..(566): n is a, c, g, or t
atgagtggttatgtgtatgcagggtttccaagctctgtaggagtcattattggtgtttttttcctcgtggtactttttaagtggttacgcaactttgccgtgcaagacaataaattatcaacctctgcaatgccagcaacaactgatccagagtctgcgttatctactccaacaacggaaggttcagtaaatcagctattacctaatgaatggggattatatgttgcagccccttatgctgtcatgaatgaatgggcatataacgaatataatcaaggtaaagatgatggtgggctatcagcggcttggggagttaatgatcggtgggatttaatctaccaattattttggttgctgactcaaggtcataccaatgacttttaccagttacgtgaccagattttgaatggcaaagaagaagatattcaatcattaaaaaacgatattttattatctgatttaactgaaaatgataaaaatgaacgtttatggcaaatcgatatgatgaacaccaatcgaatgaatatccaaaatgtaaaatatcttatttgggatcnnnnnnnnnnaggttatattacccagcaagaagcacaaacatggtcattaatgagtgcatcaatgctacgtcgtatttatgatggttgggaagatatgtggcaaaactttattgctactcgttggttatgggcaagtggtgatcaaaattgggcatcatcacatcaaacattttccgatgtcgtacaaaatatactcaaagcagaaaataccttagcgacagaagaaaactgggtgatggagctacccccattagatttaatgtcttttacacgagccgtagctggattaggttttatgaaaaatgatgtgcctatgtcactggctgaaatagaagaaatgatcagcgaacgcattactttaaaaacacttaatagctaa

SEQ ID NO: 303142 - DNA, 885 bp, Proteus mirabilis
atgaacaaacttcgtattgtgcttttcttacctctttttggcttagctttaacttcttttcattctcacgcagcaacagttaatgcgatgttctcgtgggaatctgctgattatgatacatcgaataactattctggttatcgtgttgattttaacattaatccagacaaatcgaactggtattttgacgtcggttttcgtcagcgtgaacatgacaataaaaatcgttatcagcgttatgatttacaaggtagttatcgttttaaattaaataatggttggatacaaccaggattaaaaatacgtcaagatttaactaactatgataatggtagccgtttaactatcgacttttatgaatcaaaaacaaattatcaatttcctattaataaagactgggttttaaccggtagtgttttgtttggattacaaaaaaaagaggacaaacgaagtaatggcgtcactaatacggattatttaggttgggaaattgaacccggtattcgctactttatcaccccgaatctcaatacaacagtggcttattttgatggtggaaaacaagcaataagacaagaagagtatgatacaaaagaaacaaatcacaaccagcaattacgtatgtatgtaaactggacgacacctatcggtgttattatttctccctcaatgcgtaagtctatttttggaaaaatagaagacagaacaaataaaggtgaatatatcgataaagatatgactcgttataccttacaaatggcttaccaaatatctcctcaatggcgtgttatgacagaatattataatgagcgtgttgagaataaaaataacggcagcaagtcaactcaagattattttaaagtatcagtaagagcaactttctaa

SEQ ID NO: 303143 - DNA, 636 bp, Proteus mirabilis
atgaacaaaaaattactggcatctttaattctagcaggtcttgttaccattacagcaggttgtgatgattcatcgaaaaaagtggatgaaggtattgataaagcaaaagagacagcaacccaagtaaatgaaacggctcaagacaaagcaaaagaattaacagatcaagctaaagaaaaagccgctgatttaaaagagagtgcatcagcgacagctgacgaattaaaacaagatgcggccaagctaaaagagcaagctgaagataaagctgcagagcttaaagcacaagccgatcaaaaaaccgatgcattaaaagagagcattgcacaaaaaacagatgaactaaaagattctgcaagtgcaaaagcagatgaaatcaaacaaagtttgaataatgaaagtgacaaactggctggtaaagcagaagaagtgaaacaaaacgctaataccactgcagataacttaaaacaaaatgctagcgacaaagcagcgcaactaaaagaagatgcggctaaaaccagtgatgatgtaaaacagcaagcgcaagatactaaagataaagcgcttgataaagccgatgagctcaccgatcaagcaaagcaaaaaattgattctctaaaggctgataataaataa

SEQ ID NO: 303144 - DNA, 774 bp, Proteus mirabilis
atgctagatattatttatcaagatgaatatcttgtggcggtgaataaaccggcgggctggcttgttcaccgcagttggcttgataggcatgaaaccgtgtttgtgatgcaaacattaagagatcaaattggtcagcatgtttttcctgttcatcgtttagatagacccacatccggagtgctattaatggcgctctcttccgaggttgcaagaacactttcagtctgttttgaacaacatcaaatggagaaagtgtatcatgcagttgtgcgtggctatgttgaagagccaatgataattgatagtccacttgttgaagagcatgacaaaatcgctgacaaatttgcctctcaaccccctaaaattcaacactgtattacgcattgtgtgccacttgcaaaagtggaaaaagaagtggcgatagggcgctatccaacatcgcgttttagcttattggaattacgtcctgaaacggggcgtaagcatcaattgcgccgtcatatgtctcatattcgtcatcctattattggggatacagcccatggtgatttacgacaaaatcgtggggtcgtaaatcattttcaatcacatcgtttgatgttacacgcaagtcagctaaacttaattcatccgatcactcaactacctcttaacttaacagcgaagtgggatctgccatggcaacatctgattaatcagtttggctggcgtggtctaaagcccgaattagagcaattcggtgaggatttagctcaccattttgtactttcttga

SEQ ID NO: 303145 - DNA, 771 bp, Proteus mirabilis
atggataatcagataatggctgaagaatatgccatttcacaagataaacagcgtgaaattacgaaattatgtattcaaacggcgctattgttgttacaacatggtgctgaaagtatgttggttgaacagctctcaacgcgacttgggctggctttaggcgttcatcaagttgaaacggctatttcagccaatgcggtggtattaacgacaatagttaatggccattgccaaacctcaacacgaaaaattgttgatcgtggtatcaatatgcatgttgttactgaagttcagcacattgttattttagttgagcatcatctcgcggatattgatgaagcaaggaaacgttttgaacatatcaaaccactacgttatccacgttggataattattgttatggttgcactttcttgtggatgtttttccaaattgaatggcggtgattgggatggctttttagtctctgctttggggggaggaatgggaatgtgggttcgtcagctcctcactcatcgtcaagtaaatcctttaatcaacttttgtatcacggcatttgttgcgacatcagtatcaggtttattgctaaaactcccttattttcaagttactgccactatatcaatggccgcgagcgttctattattagttcctggatttcctttaattaatgctgttgctgatatgtttaaaggtcatgttaatacaggactcgcacgctgggcgatggcgacgatgttaacacttgctaccagctttgtcttggtgatttaa

SEQ ID NO: 303146 - DNA, 825 bp, Proteus mirabilis
atgaatagtagacgccgtcgggttgtaataaccggaatggggattttatcatctttagctaaagatgtgcctcaatttaaacaggttctttttaatagacaatgtaatattaagccaagccaacgctatttaaaatggtttaaaaatgccaatgcatctgagattgagatggcattagattattcagatataccgcagcatatcgctcgatcactagataatgcggcattatgggcatatcgagtctgcaatgaggcattacaacaagcaaacttaatagataatcagtctattttagataataccgcgatgatcgtgggcgtctcttcagcaggaacggaagcctttctgccattatttgaacaacatattgatgatttttcgataaaaaaagccattttatccggtggattttcatcatgttgttcgagtgtatcaagtctacttggcttacgtggtggtcttgaattagtggcgacggcctgtaccgcaagccctaacgcgataggtatggggtatgattatatccaaaatggcaaaaatcctgttgtgctagcggtcggaacagaacccatttatcttcctacctttgcgggtttttatgcccttaatgtgatgaaaacaacaccaacttccccattttcaggtactcctggtatgtctattggtgaaggtgcaggagcgttagtattagaagattatcaacatgcggttgaacgtggtgcgacaatatatggtgaaattgtctcttacgcgacatcttgtgatgcttaccatgaaactagccctgatcctcgaggaaatggtgcagtgcaagttatgtaa

SEQ ID NO: 303147 - DNA, 747 bp, Proteus mirabilis
atggatgagaaaaaattcttaattgatgaaaaagtaatatttgacagcaataaaatgatattagctaacaataataaaattattaagatctcggaatcagaatctaatttattacttgctttctatcaggggatatataagaaagaagatattattaattttgtttggaaaaaccgtgcaggttgtgtttctgaatcgagttattacaaacttattaatcagatacgtaataattttacccttataggtttaaatgcagatgacatagtgactcgtccaagaattggtatctcactaacggtaacactagagccaatagtaacggaaaaaactacaccatacgaaagcagtaaagagttagagaatacaagggatcaacaaccaaaaataatttctagcaatagcataatccccagaaaaaaattattgattattttggggagtatcctaattctactgtctacgatagcgttactgatagtgcatggtcatgaatcacatagataccatagtcacttccagctccttggtcactatgatagttatcatttttataaaatgactacagataaagtggcatttgaagaagtggttgcagcatacgatagtctgacactaccaatatgtcgcgcaaatgggcactatctttattatatccgagagccaaatatggatctttttttacaatgtttgaatcctgttgaatcggcggtacctaaatgcatgacaataaaagaacgttattaa

SEQ ID NO: 303148 - DNA, 708 bp, Proteus mirabilis
atgaaaaaaaacgctctatttactgtctcactgttatctgtatttatttcattatcttgttatgctcatcaagatgttattttacattctgattcattatcagatgcaaaagtatctattaatgatgacacagggaaaacacaaattgaagtgataaatactaatcaagatggtaccgcccatatctattatgatcgtcttgatgttggtgattttggtttatcattaaaaaataatgctgaagcagaattaattattaatgaggttgtttctaaagagttttcaactctaagaggtgagcttgagttacaaggaaaaaaggcaacagtagttatagctaatcctaatggaattttttgtcatgattgttctttctctggaattgatgatgttaagttaattactggaagcagtacagggaaattttctaagacattcactatagctggtatagattcgagtgttgtttttgatatgagaaataaattagataaaaatgaacatatgcatattcatcgcaattataaagatatttcatctggaataataaatattatctctaatgatatagacttgattaaaggtgatttaaatgctgaatatattcgttttgatatggggttaagtgagtttaatcttggagctaaaaatgattataataaatacagccattttttgttaaggacagaggcaggaataaatagttga

SEQ ID NO: 303149 - DNA, 222 bp, Proteus mirabilis
atgggtattactttttgctcaataaatgaagttgaagataatttaaaaaagaatgcttttgatcacaagttaaaatttattaataaaacggaaacaaaacaaccgaataataatcgctatattactttgaaacaagtaatgagcaaccctgaaaaataccaattatcacaagataaattaaccgattctgctattgaatatttaaaaagtttgaaagattaa

SEQ ID NO: 303150 - DNA, 417 bp, Proteus mirabilis
atgtccccaaaagcaaaatcatggctttggatgctggcggttattatttcagaaacctcagcaacctcgaccttaaaaatgtttgataatagtgaaggaataacaaagacattattattaggattaattattgttctttatattgtttgttattattcattatctcgtgcagttaaaaatattccagtaggcttagcttatgccacctggtccggaaccggtatcttagttgtatctactttaggtatggcattttacggtcaacatcctgatacggctgctattattggtatggcagttattgccagcgggatcgtcattatgaatctgttttcgaaaatgggttccgaagaagagtcagaagaaacgatggagttatcaaatataaaacagactgtatcgtcagtgaataaataa

SEQ ID NO: 303151 - DNA, 297 bp, Proteus mirabilis
  misc_feature (285)..(294): n is a, c, g, or t
atgataaaggttattgcagaagattttattaaatcaggatcaataaaaacggtcttaccactttaccaagaattggtgaaagctagccaacaagaagcactttgtattagctatgatttatttgttgatgagaaagatcccggtcactttatttttattgaatcatggccaaataaagaagcactagatattcattgtaatagtgaacattttcgtcgcatcattccgatgattaaacaatatacaaaagcagagtcaaaaatcactttagtcaatagtgtattnnnnnnnnnntga

SEQ ID NO: 303152 - DNA, 276 bp, Proteus mirabilis
atgtttaaaaaatatttattagcaatttctttattagcattatccagcggtactactttagcagctaaccctattgctaaattaaaagtcacaggaaggatcaagcctccgacttgtactatcaataatgaagagcaagaagccacaatcatctacaactttgatatcactccaggtcttttccctgaaaagggtgacttaaagtcagcagcaaaagattttcctgcaacagatgtcttaccaggcaaagcccaaccatactcactttgtttatga

SEQ ID NO: 303153 - DNA, 486 bp, Proteus mirabilis
atggtactactacataaaatctgtggttttattctcatcgctttttggataggttttgttgtaattaacctaaccacaaataatggtgtacattacaaagtcagaccgcaaggattaattggacgctgtatcaagcaagctcgcttttatctttatggtattatgaaaggtgaaccacatccttttgccgcgactgcaacagataaatttaaccctctccaacaacttgcttacttaggtgttatgtttgggttagttccactacttcttatcacaggagtactatgcttataccctgaagtcctaggttatggctattggatgttaaaagtacactttatattaggcatcgttgcactcatgtttatttgtgcgcacttctacttatgtactttaggcgatacctttacacaaacattccacagcatgattgatgggcatcatcgacatcaaaaacatggtgaaagcacaacaacaaaaaattga

SEQ ID NO: 303154 - DNA, 258 bp, Proteus mirabilis
atgcatgatattgccttagcgggtattttcgtccaaattggtttactgccaaacacacaatggttagacggaactgttgagcgtaataaaattggtgagatcgtggttgattcacgtggtgaaaccaatattaaaggggtatttgctgcgggtgactgtacaactgttccttataaacaaattattatcgccgcgggtgaaggtgcaaaagcctcattaagcgcctttgattacttgattcgcacgactgcaaaataa

SEQ ID NO: 303155 - DNA, 339 bp, Proteus mirabilis
atggcagccactcgcattgaaaaagactcaatgggacaaatcgaagtaccagctgaccagttatggggagctcaaacgcagcgttctctagaacacttccgtatttcagtagaaaaaatgcctgttgcactgatccacgcgcttgctttaaccaaaaaagccgccgccggtgtcaatatggatctcgggttattacctaaagaacgtgcagatgcaattattgctgctgctgatgaagtgctggcaggtaaacacccaactgaattcccattagcaatctggcagaccggttctggcactcaatcaaatatgaatatgaatgaggtggtgagatactag

SEQ ID NO: 303156 - DNA, 720 bp, Proteus mirabilis
atgagtgtcactatcttagaaaagggtcagattgccggtgagcaatcaggccgtgcatacagccaaattattagttaccaaacatcgccagaaatcttcccattacaccattatgggaaaatattatggcgtggcatgaatgagaaaattggtgcagataccagttatcgtactcaaggtcgtgtagaagcgctggcggatgaaaaagcattagataaagctcaagcgtggatcaaaacagctaaagaagcggcaggttttgatacaccattaaatactcgcatcattaaaggtgaagagctatcaaatcgcttagtcggtgctcaaacgccatggactgttgctgcatttgaagaagattcaggctctgttgatcctgaaacaggcacacctgcactcgctcgttatgccaaacaaatcggtgtgaaaatttataccaactgtgcagtaagaggtattgaaactgcgggtggtaaaatctctgatgtggtgagtgagaaaggggcgattaaaacgtctcaagttgtactcgccgggggtatctggtcgcgtttatttatgggcaatatgggtattgatatcccaacgctcaatgtatatctatcacaacaacgtgtctcaggggttcctggtgcaccacgtggtaatgtgcatttacctaatggtattcattctgtctcttatacacatctgacgctgccgacgaagaggatagtgtag

SEQ ID NO: 303157 - DNA, 528 bp, Proteus mirabilis
atggaaagctcatttacgccaacagaagaactactaaacactcgcgctacacaacagaaatcgcttaacaaagatattccttaccaagaaattttgttaactcgcctgtctatgcacgtccagagcaaacttcttgaaagtcgtaataatatgttaaagtctcagggcattaacgagacattatttatggcacttatgattttagatacaacggaaaatcgtagtattcaaccatcagaattgagtgcggcgttaggctcatcaagaacaaatgccactcgtattgcagatgaattagaaaaacaaggatggattgagcgtcgtgaaagtcataatgaccgtcgctgtctacatcttcatttaactgatgctggagaagagtttttaaatagcttattaccaccacagcacgaatgtttaaagaaaatttggtcggtattagatgaaggtgaacaaaaacagctagaaaccctaatgcgtaaattattattacaacttgatacattagcggataatcagcaggaataa

SEQ ID NO: 303158 - DNA, 351 bp, Proteus mirabilis
atggctgctgatttagataagaatcaaaaaataacacttgcctgtgttggtgacagcgtaattataggctctccagggctaaaagattgcaaaccggtacctgctgtcgcatcaaaaataacaaacgagcaaatgaagtttgttaataaatttattaagggaaacaatgaagtacctaatgaaataaagcaaatagtattacttgctaaagtattaggtaaagaaacaggtgatttctctcaatgccaagatattaactctcaatgcatgaatgactcagtaaaagtattaaagagtattagcaaagaaaaactacaagaagaagctaagttacttggcgttgaaatgtag

SEQ ID NO: 303159 - DNA, 498 bp, Proteus mirabilis
atgacacaatcaggtgggcgtcgaattaagcgcagtttatctcttgatatcaatagtatttactttttagatcaagagaatattgataaattagaaaaggcacagcttcttgaaccttatataaaaagcaaagtaggtgaaatctccagctataacgctagcctttgtcatgatcatcaaatgccacttaatcaacgtggtatgacgaatgtcggtacatttcgcgcttacgtggaagcttatctaaaaaatcatccgaagatccataaacagatgaccattatggtaagacagcttgccccaacctctgaagggttacctatcgaaatttatgcctttaccaatacaaccgtgtgggtagagtatgaagctattcagtccgatatttttgatcatatattcgctattcttcctcagtttggtttacgaatacaccaatcaccaacaggtagcgatgttagagcattaaaattccctaccaatatcgacacaccatag

SEQ ID NO: 303160 - DNA, 252 bp, Proteus mirabilis
atgtcaaaatgtgatggttgctatgagcgtgtcgcccaaggtatgaaaccggtctgtgttgaatcttgtccacaacgtgcactggattttgatgatattgaagtgatcagagcgaaacatggtacagagtgtggtatcgcaccaatgccagatccaagcttaactaacccaaatatcgtgataaaagcacataaagatgcaaaaccttctggtgataaaaccggctcagttcaaaatgcggcggaggtataa

SEQ ID NO: 303161 - DNA, 237 bp, Proteus mirabilis
  misc_feature (222)..(231): n is a, c, g, or t
atgttatgggatattttttctgaaggtgacaaattacttaccgcagcaggatatcaacaatatgaaacatcggcttattgtaagccaggttttcaatgtcaacataacctaaactattggcgttttggggattatttaggtattggctgtggtgctcatggaaaaataagttttgccgatggccgaattatgagaacggtaaaaaccaaacatcctaaaggnnnnnnnnnntcctaa

SEQ ID NO: 303162 - DNA, 357 bp, Proteus mirabilis; identical to SEQ ID NO: 296467

SEQ ID NO: 303163 - DNA, 129 bp, Proteus mirabilis
atgttgaataataacaattttacaataatgtctgttgaccaatttcccattattaccatgcaggttttcccagaaacgttagagcatgctaataactggattgctgaaatggacttagacgctggctga

SEQ ID NO: 303164 - DNA, 201 bp, Proteus mirabilis
atgattatagctgattcattaaaaaataatcgattgatcccctcgactacacattacccaatagatgatggaatggaggttaatttcctcactaatcaagagtgtgtgaactatagcgctaaacctattttaaaaatcggcttaggtatggatggctctattattgccatgttattaatcgcaaatggagagcaaggatga

SEQ ID NO: 303165 - DNA, 216 bp, Proteus mirabilis
ttggattatcgtcaaggtggtgatgttggtcctgcgctgggagctgctagactggcgcaattagcgataaatccggctcatttatcacaaattattctttctcagccaaaacttgaaacacgtcatgttcccaatttagaaaaacataaggcatatcaagataaatataatgcctttaaaaagctctacacacttattgaaacaatgaaaatataa

SEQ ID NO: 303166 - DNA, 324 bp, Proteus mirabilis
gtgcttgaaactcaactggaagagcttatcaatgaggtgaaaaccgatgaaaatctaacagttaatgatataaaagataaattagataatttctataataatgcgaaacaagagttaaataatattgtatatcagcttaattcaatagatgtgatgtctataagtgaactcgctgataaagcaaaatcatttcctcttgcttttttacgattagaaagcaaaaagtctattatgcatcatcaagttaaaggtgaaattaattttttatatgatgaatatgaaaagcaattggataaaataactaccaattattattttcagtaa

SEQ ID NO: 303167 - DNA, 144 bp, Proteus mirabilis
atgacaaaacgcgatcgtaatacagcaattggtgccggtgctggtgccataggtggtgcaattttaacagatggtagtccattaggaaccattggcggcggtgtattaggtggtgttattggccatcaagttggcaaaaaataa

SEQ ID NO: 303168 - DNA, 159 bp, Proteus mirabilis; identical to SEQ ID NO: 297609

SEQ ID NO: 303169 - DNA, 210 bp, Proteus mirabilis
atgggcgccagatcatttgatagtgcagcaatattattatcattattaccagcggcgactaataaacttaaagcttcatctgaaatctggctacgtgtattattaaattcatttaatactgttggaataataaaattagctgctgctaatccattctctgtgacattgccacgttcagcagcgctaataaaattatcccccccttcgtag

SEQ ID NO: 303170 - DNA, 219 bp, Proteus mirabilis
ttgtcgtataatagtgtttttcatattgtcgctgaggatagtatatctcttggtggtaaaatccagggggatggtcatgttatattacaattaaatgatgataaagttgatattgaaggtaaaaacttgttaataggaacagagggattaagattagaggggggaacaaaatataaattaggtagatcaactattatagattatactaaatacaaataa

SEQ ID NO: 303171 - DNA, 174 bp, Proteus mirabilis
atgcctactggaggaattagtctaaacaatgttagtgattacctcgctatcgggcaagttatcgcatgtggtggcagttggattgctactactgaggcaattgataatcaagacaaacagactattgctcgcaatattcaaaatatccattcattacttaagaataaaggataa

SEQ ID NO: 303172 - DNA, 138 bp, Proteus mirabilis
atgggtaaattgtgttttttaatcagtgttgataatgcaactgttggacgactggagccatccatagatccacttggtgcatcaatcgcatacacaggggctaattcaggtaatcctgccattgcttgtaacttttga

SEQ ID NO: 303173 - DNA, 207 bp, Proteus mirabilis
atgcgttataccgaagttcgtatggcgaagatcgcccatgaactgctggcggatttggaaaaagagacggtcgactttgttcctaactatgatggaacagaaaatataccggctgttatgccaacccgtattccaaacttgttagttaatggctcttcaggtatagccgccgcggagtcaccatcaactgacccgaagttaccctga

SEQ ID NO: 303174 - DNA, 189 bp, Proteus mirabilis
atgcaggtgaaacaaattacagagcatagttttatgtatcgcggtttcaccattattaaactgccaagaaaagcagtaacaccgataactcgttatcacgtttggctagatgatcagtcattcggtaagtttgatgcaatggcggaagcaactaaatatatcgacttattaaaaggtgacattcaatga

SEQ ID NO: 303175 - DNA, 474 bp, Proteus mirabilis
atgttcatggtagtttttgaggctgaaactaactctacatggctatctccaacaacaattatctccatactaactgcaatcataactattgcaggatggtcaataacagcaaagctatcgagaaataatgcatctaaagaatcacaaaataaggagttgaatcaattaattgatgatcttgattttgtgattgaaaccatccacctagatatgattgatctcttttcgaatcaaggaaatacgttacctgcgtaccataagttcgtatcatctgctacaaaggttagatttatttgtgaagaaatcgaaaaaatagatcatacgcagaaacctgattttgatttaattggtcgtttgaggcaagcatgtacaaatgatcgaaattacgaaaaggcaaagttacctgtaactttgtctgaaatacaatttgtacatcaagatattagaaaaaaatattccaaaaaattcagctaa

SEQ ID NO: 303176 - DNA, 324 bp, Proteus mirabilis
atgtcaaaaatgataaatgtaaaagatttttcaaaatacccaggtcctagatactctcatttaggaagttttagtggagaagaatttagagacgaatttttaattccagctataaatgaatatgaatttataggagttaatcttgatggcgtatttggctatggttcttcttttttagaagaagcttttggtggtctagtaagaaaaggggttaaaaaagaatcaattgatttcataagaaataatttagttagtaaagatgacccttcaattattattgaaattcaatcatatatagatgatgaatttgctaagaatatgtaa

SEQ ID NO: 303177 - DNA, 1122 bp, Proteus mirabilis
atgaaattgagagaaaaggagtttacgccccaaaaaagaagatcaaatgtaaaaaagtggcttagaaaggttatttttaactataataaaacgaaaaagaaaaagaaaagtctgagaggaaaggctaaaaaacacacagactattataaaataattgcgcctacaattctcgatctatacaaacctcaaaatcataaaccaatggttgaatttgtaactgaaatagaaaaaagagcaacgaaaggaactaaaaaaaatccagctggaatacatatttgttttagaaatacaaaatatataacatcagcggctggagtatggctattagcatgtatggaaaatttaaaaactaattttcctaacaccatatttagagtcactagacccccacaaactcctatagctaaaggtcataaaaaacgctatcccgtagtagatagtgttttgaacagaataggcttttattctgccataggtctaaaaaaacgtgagatgatagaagttcctcacgttaagtgttgggaagtatctaaaggaagtatagttgctggtgaaacaataggtaagttgttagaaagcgtaactcaaattacaggtcgagattataagtcactttacagacctttacttgaagcaacagcaaactcagttgaacatgcttaccatccagaagtatattctttacctcaaccggctataaaatggtggtgttttgccgccataatgaacaataaacttataacattggtatgtgatcttggcgtaggaattcctaaaacattaccaaaaacacaaggtaaaggtttttttgaaagaatatctaagcttcttggccatccttttaccgaagattgtcattttattcgtggggcattagaagttaaaagaacaaatactgagttagaccatagaggaaaaggcggtactgatttacaatcaataatagagcaaacagaaggctctcagttacgaattttatcaaatcgtggccttttaaagatagttaataatggctataaacaggtaagatcatcaggcctcgataatgctaaatcaattagcggaactatcgtagaatggagtgtcgctcttccagtagaggatacaaaatgtcaaaaatga

SEQ ID NO: 303178 - DNA, 1098 bp, Proteus mirabilis
atgttgccagaaatgatcaccggtaaaagtagcatgccggcttttgtgttaattgctggtgatgaagatatcagtgccaaaattcaagggcgattaatttcgctttcattaacggacaatcggggctttgaagctgaccggcttgatattgagttagatgattctgacggcgcattaatgatgcctaaacgaggtgaggtattgaccttgcatcttggttggcagggtgaaaaccttattcataaaggctcatttacagttgatgagatcgagcattcaggtgtacccgataaaatgacattgcgcgctcgtagtgccgattttagggcaacactgaatgtgcgccgtgaaatgtcttaccaccaaaaaacattaggcgatatcgtcagaaccattgcagggcgtaataatgttacggcggtggttgatcctggtcttgatacggtaaagattgaacatatcgatcagactaatgagtcagacggtagttttttaacgcgcttaggacaattaaacggtgccaccgcttgtgttaaaaacggcaatttgttgtttatggtacaagggggcaatactaccgccagtggtcaagcattaccgctagtacaaattacccgaagtgtgggtgatggacaccgtttttcattagtggataggggcgcttacaccggtgtgacggccaattatttaaatacccgtaaaccgcaagaaaaaacacaatcacaaattcgccgtagaaaacccactaccaataaaccgaaaaaagaagagcagaaacaaggggagtaccttgtcggtgaagaaggtaatgtgatggtgttgtctcatacttatgcgagtaaaaccaatgctgaacgtgccgcgaaagccgcgtgggaaaaaatacagcgaggtgttgcctcttttagtattacccttgcgaaagggcgtgcggatctctttcctgaattacctgtaaaggttagcggatttaagcctgagattgatgaggcctattggacgttagtcacggtgagtcactcattaaacaatagcggatttaccacctcgttagaattagaagtcaaaagcagtgatatagatatggataaggaatag

SEQ ID NO: 303179 - DNA, 219 bp, Proteus mirabilis
atgatgatttgtcctgtttgtggtcatgccgcgcatactcgtagtagtcagcaaatatcttccgataccaaagaacgttataaccagtgccagaatatcaattgtggcgcgactttcgtcagccatgaaaccgtaacgcggtttatttcaaagcctcagttgattgaacgagtagagccacatcttgataagtgttgccaacaggcattagcgatttga

SEQ ID NO: 303180 - DNA, 462 bp, Proteus mirabilis
atgagtgataatcatactctgcaaatcgaagaaattttagatttacttccacaccgttacccatttttattggttgaccgtgtccttgattttgaagaagggaaatttctaagagcagtaaaaaatgtatcttttaatgagcctttctttcaaggtcacttcccaggcaaacctattttccctggtgtactgatcctcgaagcaatggcgcaggcaacaggtattttagcattcaaaagcgtaggaaaactggaacccggtgaactttactattttgctgctattgacggtgctcgctttaaacgtcctgtcttacctggagaccaaatggttcttgaggttgaattcattaaagaacgccgtggcgttgcacgctttaaaggcgtcgctaaagttgatggagaaattgcctgcgaagctgagatgatgtgtgctcgccgccgtgaggtctatgaggtctag

SEQ ID NO: 303181 - DNA, 1728 bp, Proteus mirabilis; identical to SEQ ID NO: 103825

SEQ ID NO: 303182 - DNA, 774 bp, Proteus mirabilis; identical to SEQ ID NO: 238184

SEQ ID NO: 303183 - DNA, 1089 bp, Proteus mirabilis; identical to SEQ ID NO: 282027

SEQ ID NO: 303184 - DNA, 9216 bp, Proteus mirabilis
atgctgaattttgaaactttctatggtaatagtgaacctatagctgttattggtctttctggtcgcttccctgatgcacaaaatattgatcaattttggcataacataattaataaacacgatagctctcgtcttttttctgaagaagaactaaaagccgcaggtgtcgctgaacaaacttatcattcacctgattttgttaatcgtggcgcgccgttagatgaagcggaatattttgacgctactctatttaattattcacgctcagaagctgaacttatcgatccccagcaaagaatttttttacaaggtgcttggcatgctttagagcatgctggatatgccccttgcaatataaccatcaaaacaggcgtttttgcttcagcaagaatgagcagctatcctgcccagcaagatttagcattgcacaatattggccatgtccgtggcatgcaaaaattattagggaatgataaagactatctcgcaacacgtattgcatataaattaaatttaactggtccagcattaactatacaaaccgcttgttctagctccttagttgccgtacatatggcttgtgaaagtttacgctctggtgaatgcagtatggctattgctggtggaattggtatcacatttccacaaaccggtggttatctatatcagaaaggcatgatcttctcaccagatggtatttgtcgtccttttgatgcagaggcaaacggtacttttgctggtaatggatttggtattgtagtgttacgtcgtcttgaagatgccttagtggatggaaacacaattattgctgtattacgtggtagtgccattaataatgatggtcatcaaaaagcgggattcacagctccctccgtagcaggccaagtttcagttattagagaagcaatacaactggccgatattaaaaatgaagatattgaacttattgaagcacacgcaacagctacaccattaggtgatccaattgagtttagtgcattatgtcaggttttcgctgatcgctctcttactgcttctaaatgcgctattggctcagttaaaggcaatatcggacatctggatacagcagcaggtatcactggcctaattaaaacgatattagcggtaaataaagcacttattcctccatctatgcattttaatcacccaaatcctcaattacaaatagaaaaaagcccgttctacattcctaaaaaccctaaagcttggtctagcagaatacgaactgctggtgtttcttcatttggtattggtggaacaaactgtcatatcattgtgcaatcattgcctgactcattagtatcaatcaaacctgaacaagaggtagacaataattttgaatactcattattgcttagtgccgccacaaaagagagtctaaaaaaacttgctggtgattatgcaccattaataaaaattaccccagcaaacattctggctcataatgcattacagcaaagacaactcaacttaccatggcgcttatctatccccttaacaagtgagagtgatatttcactgttagctttctctcaaggaagtgctgattctttaatacaatatggtcatacatcaacaaataagaaaatagcgtggctattttctggtatgggatcacaatatcctgctatgggtaaagtgatgtaccaacattcaacaacatttgccgaaacaatcgatcgttgtgagcaagcatgcctgcaacacttaacatttccgttaaaagaagtcatgtttggcctacatagcgataaacttgttaatgccagttatattcaagcggctattgtcgcctatgaaatcgcaatggcagcacattggcgagcaatcggtattttacctgaaataattgtaggtcattcttgcggagaatatgccgcagccgttatcgctggtttctatacaatcgaacaaatgatgccacttgctgtatatagtggacaattaatggaaagtcatgttaatggtgaaatgattgctgtatttgcagaatatcaagatattcaaatcattgctaaacaatgtcatgttgaattagctgcaattaatggccataacaacttatcattcgcggggcaacccgatgatatgcaaaagtttactcaaatattgaaagcaaagaatattcgatttagagaaatgaataacgtgtgtgctgctcatacctcttatattgataatattcttgatcaattgatggaatttactgagtcattatcagcctcacaaggaaaaatagccttagtctcaggctatacagggcaattaatttctcaaaaagaacttcaacatccatcatattgggctcagcaactacgcaatacagttatgtatcaagatgcaatacaaacgttagtcaatcatggtgtcacccatgctatggaattaggaccaacttctgtattaagtgatcttggtgaacgtgaaggcattactgagattagttggataccaactgccagaatgggagttgatgaaattcagatgaaacaacaggctgcaacaaccctatttattgcaggctatgatttaccatggcagtcactgtttaaaactcaaggaagttatataccattacctctctatccctttgaaaaacaatattattggtatgaaaaaaaggatagtgaaaaatatcaaccacaaaaaagcgcatttgatttacctattagccaaggtcgtgaaacggcattaaaagcgcttacaacactcgatcttcctcgtttaaactcatttaattcaacacttaccactttacataattattacgtcgataaaatgatatgctcgtgtttaggccatgagttgaatacccccatgtctgtaatcgatattatgcgagcaggacgcattttaccccgctattatcaattattagtacgtttattagaggcctgtgttgaggatggatattatatttaccaacagataaatcagcacaactactataaaaaaataaaatctatttctagtgataaattaccattattattccatcaattacaattagatagcgaaggtcttcaatctattcctgacaccgtcaagcgagcaggagagcaactctacgatatgatgacaggcgtgattgaacctgtttcagtgatctttcctgaaggtgcatctcaaggtgttgaagttctctatcaagattttagttttggtcgttattttaaccaaattgctgccgcggtacttaaaggattactttctcactaccagcccactgtggctaagcctttgcgaattattgaagtcggtggtggcacgggaggaaccacctcttggctgctacctattttatcaaccatacaacatgttgaatacgaatttaccgatatttcacctatcttcacccgacgtgccgcacaaaaatttagtcaatattcatttgttaactatcgagagttcaatttacaacaatcccctgaaatacaaggttttcaatctgattattatgacattattattgctgctaatgttattcatgccactcaacatattggagatacattaactgctcttcgtactttactgcgttccaatggtcatttgcttatgcgcgaaataaccaaacaagctcgcttatttgattttgtttttggcccactggtgttacccctccatgatgaaaagatccgtaaaggaaaactatttttatcaccagaattatggcatcaacagtgtcgcttagcaggatttcaacatattcgctggttacctgatgcattaccagaaaccaaagatatgtgtgaacatattattctcgccagtgtttcgacagaaaacgatcactttgatcaagagttacctagtgacaccaagatacaacaaagttcacactaccaatggcaattaacaccttgtgtggaacaagatcttatcaagccaacattaatatttaaccatcaacaaacattgccttctgaaatcacagctattttatccgctattggatgtctttctgaacagggcgaaaatcaattaatcgttgccaaccttgcagatcctttaattatcgccgagcagatccgccaaatattactgtcatcgtctgatgggtttgttgttatcacgcaacaagcctgggcattaactgccatagaaacggttaatccagcacaacgtagtattcgaagtttattaaaaactattcaaaaagaatatagctcaaggttaattgccattgttgatttaggtataaatgcctcatggtctgaattagttcctgcttttatacaaatagaacaaggtaataatgaaattattgttcgtaaccattgctgctacttaccacaattaaccccactgccctcatcttctacgatcatagcgcagaacatcatggtatccccgcgctggcatattattactggtggttttggaggcttaggtcgaattacagcaagttggttagtaaggcaaggtgctaaacgtatcgctattttggcaccacgagctgatagcagcgcattagattggatgaataacttacagaaatctaaccagctagaaataaaatggctaacatgtgattgtcgtgataacgctcaatgtcatgcagcactcactcagcttgaaaatgaaggtggcattgaggggcttatacacagtgcaggtattttggatgatgcacttatgacacaactcacccctaagcgtatgtctgacgtattttctgttaaagcgatatctgccaagcaattttgtgatgctttagaaaaaacagatgccagttaccttattttatactcctctgccgctgcaactataggctctgaaggacaagcagctcattccctcgcttgtggatatttagatggattagctgaatatgcacgtcgcaatatcaagggattaaccgtcatttctatcgcttggggggcatggcaaagtgttggctttgtggcagaaaaacaactccatgataaattacaacacaaaggtatgagtacgcttactactgaggaaggactggcacatttagatgcttgtctgctagataatacctcttgtcgccttgcaatgcgcttagcgactccacctttaatgacacaaaaaacgcctttatttcatcagactaatcataatgatcattatgataaccatgaaattaatcacactcgccagctttgtgaaaccccaactcaaacggatcaaacagagccggtaagccctaacagggttgattatcgcgttggtgataacttagaacagtggctaacagcatgtatcaaacaactgttgcgtcttggtgatgaacatattgatactcacattgaactattccaattaggactagattctctctctttcctcgatctcagtgcggaaattaagaaacagtttgcggtcaatattgacgctgaacaatcttatgatgatatgactattgctggtttagcctcagttattcgaaccgcagcacctgagaaatttactgtgacagaagcattccataatcaagacaacatttcccacacaatggagtcagaacgatatgccccatttccattaacaccaattcaacacgcctattggatcggacgtaaaaacctctttaactacggaggcgttgcttgccatgcaatttttgaatgggattgtcaacgccatatatgggagccggcctcacttgaaaaagcttggaataaagttattcagcgtcatgatatgttgagaatgatcatagatgatgatggacaacaacgtatcttaaaagaagttccttattttcattttattcaacatgacctaacaaatttaacccaacaagagcaacaagagagcctaacacagataagggaagccctttcttatcgggtattaccgactgagtcatggccattatttgaagttgaaatttcttggctaaataacgattgttacagattacatatcaatctagatttactgcagtttgataccatgagctttaaaattctgtttgatgatctatttaacgcctattcaggacaagaattaataccacaaacatttaccttccgcgactactgcttaaaaaatcaaacaaatcgtaacagtgatgagtggaaaatggcatggtgttactggcaggatctattatctgatttaccttctgccccatatttaccgataaagaattcatccattactgaacaacctcgttttacgactttccaacatcatgtttctatagcgcaatgggacaaattaaaacagaggtggaaaaagcatggtattacaccatcagcagggcttttaacactttttgctttagttttaggtcgctggacaaaatacccagcctttacactaaacttaactttctttaatcgtcaaccatggcacccagatgttacacaacttattggtgattttacctctgtactccctatagatatttatctagataacgactgtacattaaatgagtcaatggcaaaaatacagcgcagactttggcaacatttaagtaagtcccaagtaaatggtgtagagattttacgtgaatggggacgctataaaggggatagtagccaatctctgttacctattgtatttactagcatgttaggtatgacactagatggtgacaatattgatgaagcattaaatcagcttttcggccaacccgtatatagcttcgcgcaaacacctcaagtttggttagatcaccaagtaatggaaggaaaagaggggctaacattaaattggttctgcatggatgacatctttgctgacggtttattaacaatgatgttctctgattatcaaagcttgatcactcaattatgccaagatgaagataataatcaatcagttgataagattattgcgcaacttccttcatatcaacatttagcaatagataatcacctccaatcacgctatcaacaactcgagcaaacattggaaaatcatccgcaaatcaaacgtgctcatgctatggtaatggtaaaagacgatacgaaagtagagcctcctctacaattactgtttgaagcctcttctgatattccactatccgttattaaacagcccaattggttacctaatttactttcgccatcagcttcactcagtgacattattgaaaagagttggcaacgatttgaggaacgagcacggtatggcatatgtcacacactgtatcgaaatgctctttttaccgagctaaacacaccaatcaccctagctgaaatagtggctcgtttaaaagcaaagcctcagtatgagaggctacttagtcagtggctagatttattatgcctgcatcacttattaaccaaagagggtgatcagttttatgccacaacacagtttattaacttatgtttatctgccccagtatttcaacaacctgttaatgattgggaatatgtactttgggattaccttgaacaatcactaacccaacatgaattactctttagtggtaaggtttctcctctttcactactttttaattcagatgaaattaccacagcactatacgccaaacaccctgcactaaattatttaaatcaatgtgcaaaagatattgttagtgcaatggttggtgcaacatcttcactcaatattttagaaataggggcaggtacaggagctaccactcaaggtatagtcgcagtacttaagaatacgcattactcatacacctttactgatatatcacattacttccttgataaagcgcgaaaaaaattcactgctgtaggagaaatgcgctatcaactctttgatattaatgcaccaatacaattttctcatcatccagataatggctatgatctgatcattgcatctaatgtattacatgatgcatcacatatcggccacgcactaaaacggattagaagcctgttaaaacctcaaggctatttattatttatcgaagcaaccgagtgtcaaagtgctatgcaaatggcgactgttggctttattgagggattaagtgcatatcaagataagcgtatattgacgaataaagcgatgcttgatagtgaaagttggcatgatattttaatcaatactggttttgaaactattggtcaatggccccaaacagattcctcatctttgcgacaaacactctttttagcctctcccactcgtggaggaaaaccttatttaggtaaattacgtgattatttatctcattctcttgatcagaatatcgactcttttgagttgttccaatgtgaaaatattgaagcaacccttaatggcatagcaacatcatccgctcaagagctaaatgaacagatacaacctgttgcaatacctgatgtaccaaccaatatgattaatgaaatcattgcattatggtctgagttattaggtcgtgaggtcaatagtacaaatgatttcttccgttctggaggagatagtttgattgcaaccaaaatgatcagccaattacatcaacggggatatccagcaacattacaacagatttttacctatccatgcttagccgatttttgtgctcatttagagcaggaaaagcaatctcaacgagagtactcctctttgatacctctaagcgctgtatctgctccaaaaccttaccactactttatggtacatgcttctgatggtgatcccggtgtttacctacctcttgctgagtcgttaaataatacagtgtggggattaacagttacagatgcttcaaaactaactgatttggatacattgttatcattacatttatctagcataaaaacagcacaacagactggcccttatattcttattggttggtcatatggtgcttttattgccagttaccttgcagaacaactctcgcaacaaaatcattccgtattattagtattaatagatcccgtctatcgacatgattttattaaattttgtcatgatgactcagatagttcatcagatgaaaataagcagcttgcatgcactaaaagacttatgtcattcctacctgaaagtgacctaccattatctgatgatatcgcctgtttatggctggaagccaccaaccacccaacagaatggacatcacctgaaaaagagtggtaccaacgattaccgccacatacccaacatcactatttttcaggggagcactggtcaatactgcaagatcgcgctaccagcacacatctggccgaaatcattgatcagtgggtgcaacaaaaactttctaataacggatatccatccgaaggaggtaattaa

SEQ ID NO: 303185 - DNA, 6105 bp, Proteus mirabilis; identical to SEQ ID NO: 293497

SEQ ID NO: 303186 - DNA, 2355 bp, Proteus mirabilis
atgacaattcacacagagcaaggctttattcttacccgccattggagtgataccccacaaggtatcgctgtctcctattggttggcgacagaaaatggaccgcgtaaagtcacggttgcaaagcagtatgctattggttttgttgcccaacaaaatgaaagtatattacgctcagtggttggtcataatcgcgatattgatattcgtcctctggcgttaaaagactttgaaagacaacctgttttgggggtttattgtaaacaataccgccaacttacccagcttgaacagcaattaaaacagtataatattcgcctatatgaagccgatatccgcccacatgaacgctatatgatggagcgttttatcaccgcgcctgtatggtttcgttatcaaaatagtcatactgtcacgctaaaacctgccagtgattatcgtcctacattacgtaccgtctctttagatattgaaaccagtgagtttggtgagctttattctattggattagccggttgcggtgataacgttgtttttatgcttagtgacaccctcccagaagttcaagaaagccaacaacctgaaggctatcgtctgtgctatgtaagtagtcgattacaactccttgaaaaactaaatgcttggatacaagagtacgatcctgatgcgattattggttggaatcttattcaatttgatttgcgtatcttgcatacccatgctcagcgttacgggatcaatttattattaggacgacaaaataccccattagagtggcgtgaacatggctttaaagcggggcacttttttgcctcagcacaagggcgtttaattattgatggtattgatgctttaaaaatggcgacatggaattttccctcttttagcctagagtcagttgctcaaacactgttaggggaagggaaagcgattgatacaccttatgccagaatggacgaaatcaatcgccgttttaaagaagataagcccgccttagcgtattataactggcaagattgtgtcttggttaatcgtatctttgataccacacacttaatggaattcttattagaaagagccagtgtaacaggactggcagcagatagaagtggtggctctgtcgcagcatttactcacctctatttaccctcaatgcatcgtcttggttatgttgcccccaatcagggtgaaaaacccgaagagcatagccctggtggttttgtcatggactcaacaccgggtctctatgactcagtggtggtactggactataaaagcctatatccctctattattcgcacctttttaatcgatccggtgggaatgattgaaggtatgcatcaccctgatagcacacatgccgttcccggttttcgtcaagcgtggttttcacgagaaaaacactgtttacccaccattgtttcacaaatctggcatgaacgagataatgctaaacgtcataacaacgccccgctctctcaagcattgaaaattattatgaatgctttttatggtgtattaggctcggtaggctgtcgtttttttgatcctcgattggcttcatcaattactttacgtggtcatgaaataatgaaaaagacccgtgaattaattgagtcaaaaggctatcaagtgatttatggtgatactgattctacttttgtttggcttaaagccgctcataacgaagtacaagctgagcagatcggtcgtcaattagcgcaagatgttaatcaatggtggaaaagctatctgactgaaacttaccagcttgatagccaattagagcttgagtacgaaacccattatcgccgattcttgatgcccactattcgaggcatggaaaccggaagtaaaaaacgttatgcagggctaagtcatgataaaatggtgtttaaaggattggaaacagtcagaacagactggacaccactggcgcaagcgtttcaaaaagagctttatacacgcatctttaatcagcaaccttatcaacagtttattcgtgattatgttgctgatacgctattaggaaaatatgatgatagactggtttatcgaaaaagattgcgacgaaaattatcagactaccagcaccatatcccccctcacgtcaaagcagctcgattagcggatgactataatcagttacaaaataggccgcaacaatatcagcaaggcggttggattagttatataattactcacttggggccagagccgttagagcatatcacttcgacacctgactatgaacactacattaataagcaattaatgccgatagcagatgctattttgccatttctacaagatgatttttctaccttgttaaatgggcaaatgacgctctctttttaa

SEQ ID NO: 303187 - DNA, 546 bp, Proteus mirabilis
atggtatgggcaggcgatgcatattggcgtattactgatactttaggtatgcgtggtggtttacaatatgaccgtcgtttaggcagtgtctctatgggtgatgcgattatggagtatcgccgtgatagcgaccatctcttacaattgagctatcgttatgtagaccgtgattatattcaagcaacacgggttcgcccttatgatggcggggtcaatcaactaccagaataccaaaaaggcatttctcaaattggtgttgtcggcagttggcctttagcagaacgttggggactggtcggcgcttattactttgataccaaagattcagagccagtaagccaaatggttggcttacaatataacacctgttgctgggcggtaaacgttggttatgaacgtaaaattgttggctggaaagaagaccacagcgatattgacaacaaatggtcaatcaatttggaactcagaggcctaagtaacaatcatagtttaggtagtcaaaaaatgcttgagcgcggtatcttaccttatcaaagagcgttttga

SEQ ID NO: 303188 - DNA, 363 bp, Proteus mirabilis
  misc_feature (282)..(291): n is a, c, g, or t
atgcaaactaagctaaaaaaacccctcgttatcacccccggcgaacccgccggggttggtcctgacctgattatttcattagcacagtcacagtgggcacttccttgggtagtatgcgctgatcctcaattattacgagcaagagcacagcaactcaatctcccactcactttagttgaatattccccagataatccacctacagcacatatccctggccaaatttgtgtacttgccgttgaattaaccgacccttcggttgtcgcaggtacacttaatacnnnnnnnnnncaggtacacttaatactgccaatggccactatgtggtacaaacgcttgctcgcgcttgtgatggatgtttaa

SEQ ID NO: 303189 - DNA, 1227 bp, Proteus mirabilis
atgacatttcaaattgcagacacactctattataacggcctaatctataccgctgataatagtaacaatttcgtcgaagctatcgctgtttcccaaggcattattattgcaacaggcacaaaatcgaatttacttgcttactgtaatgaaaaaacacagcatatcgatttacagaagaaaatggtgatgcccggcattattgatgctcatatgcatccattttgggggggagccacattagcaggttgtcaccttgattacctctccttaacaatcgatgaaattctatcgcgtatccaacgctatcttgatgctgatcctatcgatagtgatacagcctggttgaaagtgtcagcatggtatcgtgaagggatgcaaccggaagggatacaaatgacgcgttatcaccttgatagcttaaatacgtctcgccctatcttacttttttctagtgattgtcatagcgtattagcaaattcccgcgcactagaattattaaatattacggctgaaacccccgatccccctgatggcaatattgaacgtgatggtgatagaacacctattggtattcttgaagatgcgccagctatgcaggctattgatagcctaccgcctttaacggcagagcaaaatctacaaatcgcacgccatgtacaaaagttgctcaatcaacaaggggtaacgactatcatggatgcacgtgttggtgagccacaattacgtgcctttaataccttgcgagaagcgggtgaattaacggttcgtgttgagaatgcggttgaaattacccctgatgatgtggctgatattgcagctattcctcatgctgtacaacaagcaataacacgattctctcactggcatcaaatcagtcaaggcgcgcaacccagtgtcgctattcgccatattaagctttttcttgatggtgtattacaagcgccgattatgacagcccgtttacacgccccttatcgtattaatgtcggtacggatgaaacgcctcattggcaagattcagagcatgttggcgatctctatttttcacctgaaatcttgacgccattagtcactgagattagccgtgcaggttatcatcctcatattcataccgtcgctgaaggggctattagtgtcgcacttgacgccattagtgaaatgcgcaaagccttgccagaaaaagatattcgccccggccttgcgcataacgaattaatgccagaataa

SEQ ID NO: 303190 - DNA, 738 bp, Proteus mirabilis
atgggatttaaaaagttggtcgttgcattggtttttgtcgcaagttcagccactgctgcacccagttttgactgtgctgtcacgccaaaagatgatttacgtattacacctgaatttgttgaagtggccggctctaatggtttacttgttatttatcccgatggcacgttactgcgcgatgaaaagagcgtcacactaacccctgagcaacaagctattgcgaaaaaatatcaagcgacagttaggcaagatattccttggttaagaaaagagacgggaattaaattacaagagtcaagaaaagtactggataaagttgttattgaagcctttgggcaagatagccgtattttaaagcgcttaagtgacttagaaaaaaatcttaatcaacaaatggatactgttatttcgctcaagcctgataatgtcacattccatgctcaagcgattaaacaggtcgaaaccaaagggcgagaaataattgagagtagccttggggggatgttgcaagatagcattaatgaattaggtcaaaaacaattactagctgctgcgagtggtgataggaaaaaagccttaagtggattattaggtaatcttgatggttttcaacaaatcatcgaaaaagagtggaagcaacaagaagcttcatttaatcaatttgggcagcaggcatgtaataaaatcacccaaatggaaaaccaacgtgtcgaattgataaattcactaaacaaatag

SEQ ID NO: 303191 - DNA, 417 bp, Proteus mirabilis
atgaaaaatgaaactaatatttgccgtggcagacattgtgtattcctgatgcacgtccatttggtctttgttacaaaataccggcgaaaaatatttgatcaggatgcaattgaaaaattgcgaggctactttgccagtgtttgtgctgattttgatgttgaactggttgaaatagatggggaacgggatcacgttcatttactgattaattacccgccaaaactggcgatatctaatctggttaacagccttaaaggggtatcgagtcgattacttcgacgtgatcgtcctgatattgcccaacgtgattactacaagggggttctttggtcgccgagttatttcgcggggagttgtggtggcgcaccaatatccattatccaccagtacattgagcaacaggaaacaccgagttag

SEQ ID NO: 303192 - DNA, 381 bp, Proteus mirabilis
ttggataatcttattcaactcattgatgataaccatcttgatcctcaattttgtggtgggatcttagcctctcctgtgcgtgatacgatgaaacgtagtcatcaacaagataaccatattgaaaaaacagtggcaagagacacgctatggcatgctttaacgccacaatttttcccagcggccttgttaaaacaaaatcttgaaaacgcattggcacaaaacgtacccattactgatgaagcatctgcgatggaatttggtggatatgaacccttattagttaaaggccgtgcggataatataaaagtcacacaaccagaagacttggctcttgcagaatttttcctctctcgacaaattaccagcataaggaacacataa

SEQ ID NO: 303193 - DNA, 534 bp, Proteus mirabilis
atgagaattggacacggttatgatgtacataaatttggcggagaaggcccaattattattggtggtgtgagaattccttatgaacaaggtctactagcccattcagatggcgatgtggtactacatgcggtgacagatgccattttaggtgctgttgcgatgggcgatattggtacattatttcctgatacagatccggcttataaaggtgcggatagccgagtattattgcgcgaagccttttcaagagtgatggctaaaggttaccgtattggtaatcttgatgtcactattattgctcaggcacctaaaatgctacctcatactccacaaatgcgtggatgttttaatagcgcattaatagtatgttcaaggatagtcaatctgccaattttaaggtattgcttcgggcaggttgcttgcattcgactacctatgccggcagcgggaataaccgccacaataggaaaagttgagtttggtatattcattatagtatttatatcaaggcacactattaattcaacaaattaa

SEQ ID NO: 303194 - DNA, 2598 bp, Proteus mirabilis
atgtcaaccatcgattatccagagaaaaaagcgtcccgctcgataaggcaacaggctactatgcagtcgcatatcttaacccgttattacaaattttaccgtcataatggggcttcattcagtgcgactatcgtgaatgagcttttctgggtattaatgtggctctttttgcgtatggaatcccctttttggcagaaaatagcacaaaaacaacaacaactatttcctcatattaatccgcgtcgccctaaattatgcgatccgatccgatacttattacaaagtatttggcttatttgccattacttgatgctcaccttggtgaaaaaaccgattcaatttattgtctatattagacagtattatcaaaatctctttgctcgcttatctcctgttgcgcgagatatgatccatcataagaaaacaaacacgccactatggcaatacgctctattatcgctcgttgctgtttttgccatttttattatcttattaagtattactcaaccttttgatttaaaactacaattcgtttttgttctcgtgatttggctgatagctttagctatccgcgatatccctggccgactgtcttctattaccattattattttatcgctgactattgcttgccgatatatttggtggcgctatcaatacacactctactgggtggataatctgagccttttctttgggatcttactattactggctgaaacctatgcatggattgtgttatttcttagttttatgcaatgtatttggccactccatcgacaacctatttcaatgcctcaagatacaacacaatggcctactgtcgatatttttattcccacatataacgaagcgctacaagttgtaaaaccaacactttatgcctgtttaaacattgattggcctaaagataaattaactatctatttattagatgatggctctcgccctgagtttgcggcttttgctaaagaaattggtattcaatatatcactcgtgaaaaacatgattttgctaaagccggcaatatcaaccatgcattgagcaaagcctgcggagaatatgtggctatttttgactgtgaccatattccgacacgctcattcttacaatttactatgggctggttcctaaaagacgaaaaaatggcattggtacaaacaccacaccattttttctctcctgatccctttgaacgtaatttaggcaatttccgcgaaacaccgaatgaaggcacgcttttttatggattagtgcaagatggtaatgatacttggaatgcggcttttttctgtggctcctgtgctgtattacgtcgttgtgctttggatgaaattggcgggctggcagttgaaactgtgaccgaagacgcacatacctcattacgcttacatcgccatggttggacttccgcttatattcgtatccctcttgccgcaggattagcaacaggatcactttcagcacatattggccaacgcatacgttgggcaaaaggaatgatacaaatatttcgtttagataatccactctttggcaaagggctgacactgccacagcgcttttgttacctcaatgccatgttgcactttttatcaggcataccaaggatgatcttcttattagcaccactaacgttccttatctttcatgcctatattatttacgcacccgccatcgctatcgctttgtatgtcgtgccttatttattacacatttggttagccgcgaccaaattacaaggtccttatcgccactcattttggggagaaatttatgaaacgattttagcttggtacaccactcgccccgtattaagcaccctattctcaccttataaaggtaaatttaatgtcacagagaaaggggcaatcatgaagaaaagttttgtcgattggcaaattaatcgcccctatattctgtttcttaatcttaatttgctaggaattctatttgctttctggcgtatcgcaacaggcgatcccgatgaaaggttagccgtactcatgtgcttagtttgggtatgctataacttagtattactaggtgttgccattgctgtttctgtagaagcaaagcaagagcgtcagttcccacgggtacgtctaaaagtgcccgcaatactattactccaagacggttcgctttattcttgtcagctcaatgacttctctgataatggctgtgccattgtattaccagataattttacagttcccttatcttgtcaccaagagatcaccgttattctcaaacaaaatcaacgtgaatatgcttttgaagcacgtattttaaggattgataatcgcattattggcttacaactgcttaatatggatacacaaaaatccattgattttaccgcctgtacttttgaacgagccgacacttgggctaattggcaacacgctctccctgccgataatccactgaatagtttaagaaatatcatttatatcagtatgcggggctataacaccttacttaaacgcgccccgtatcttgtttacctcttatttcgtttattagggcagtgtttattgtggctattatcgctacttccacgacgtgtcaatgtttcacaaatatttcattaa

SEQ ID NO: 303195 - DNA, 321 bp, Proteus mirabilis
atgactgataaaatgaaagaaatgctaaaatttgcacaagaaatggaagatgcaggagtcactgatggcagtacaactaaacgaattgccgccagaataaaagcgaaagaattacaagctaagtataaacatcctacccctatgacaggtgaagatataaaaaggatccgtgagcaaaataatatctctcaatcttcccttgctttgatattgaatatgactaaagaaagcgtttctaagtgggaaagaaacgaaattaagcccaatggtgcagcactacgacttctgcatttaatagataaaaaaatattattcatctag

SEQ ID NO: 303196 - DNA, 387 bp, Proteus mirabilis; identical to SEQ ID NO: 295557

SEQ ID NO: 303197 - DNA, 1026 bp, Proteus mirabilis
atgaaactactcttaacgccctatattcagtctgaccttggcgttgttttattgaagcctggagcggagttgcttaagcaatttaaaccacattcgcgcgtgattattagcgatgtaccaaaaagtttagataaatggccttctggggcattaacaggaaatgaacagccattattggataacaagggcattgttgattttttgaataataaaaaagttctccaagctatgggaggattgtcatcgatgaatatgtggataggcagaaatatccattgttgtcagattaacgataagcatgacagttatcatcatcatgaattaacaaccacatggcataaagacggtgtgatacggacttgttggtaccatgataatcatattcgccattcatcagctgagtgggttgctgaattggctcataaaaatcgtattgcttggatggtagacactattcgtagtcgtttgagattagatgatagccattcgctgacgatacctgatttttttgcttttgccgtgatgcataaactggttgataaattacctgatgctatattgcgccgtatcttaaattggcctgataaaactaaagatcgtagagtgcatggcggttttcctgaagctgatattgttccaaatgaagtgacagcactatcagcaatgaatgcgcgtttagatgctataaaacccgttattaatgtgactgtcgatcctgaacctccagcctcatttcttcttaaacctaaaatgtgccgttgggagaatacccaatggcttcaatgggtaaaaacacagccatgttgtgtttgcggacaacaagctgatgatccacatcatatcatcggccatggtatgggaggcatgggaacgaaagctcatgacttattcactattccattatgtcggcaacatcatgatgagttacatcgtgatcccaagttgtgggaagccacttatggcaatcaaatcgaattgttattttcttttctaaatcgttcattaggaataggggcattggtttaa

SEQ ID NO: 303198 - DNA, 174 bp, Proteus mirabilis; identical to SEQ ID NO: 297705

SEQ ID NO: 303199 - DNA, 414 bp, Proteus mirabilis
atgactcgatatgaacagcttgcggcacagatacgccaacaaattgaagataatatttggcaatcaggcgatcgtttaccctcattacgggatacggttaaacaatcaggtttaagtttaatgaccgttttacaatcttatcaactgttagaaagtcaagggtggatcaccgctcgtccgcaatcaggttattatgttgcacatcgcaatacaggttttgctcaagtaactgccagcaaagggctacatatgagtgaaaatgttgagataagcgcctctatattcaatgttcttcaagcctgtaaagatcccaatatcattccgttcggttccgcctttccagatcccagtttattcattcaacctaaattaagccgagcattagcctctgcaaggtattcatgtatcgcctga

SEQ ID NO: 303200 - DNA, 138 bp, Proteus mirabilis
atggtaattaacaataaaataaacgaaacaataggagtttccgtgactaaacctctttatgagagctacctgcaagcaaaaaatgaaaaaaaagcatcttatgcgcgtgaaagctcagcttcacttacattaaggtaa

SEQ ID NO: 303201 - DNA, 240 bp, Proteus mirabilis; identical to SEQ ID NO: 297976

SEQ ID NO: 303202 - DNA, 198 bp, Proteus mirabilis; identical to SEQ ID NO: 296461

SEQ ID NO: 303203 - DNA, 972 bp, Proteus mirabilis
gtggtcaaataccaaaagcaatttgctaacggcaagacaattaccaatagtgtacaaaccaatgcgattgccattaatcgccaatgggcacaattctttgctgataaccactttctattaggcgtttcaattgatggcattgaagccgttcacgataaatatcgtatttcagtcaatggtagcccaacatttgaacgcgtaaaacgcgccatcaatttactaaatgagtatggtgttgaatttaatacattaaccgttgtaaatgatcaaaactggaataaaggaaaagagacttatcaagctttaaaaaatttaggttcaactttttttcaatttattcccatagtcgaagtggatagacgtttcccacacactcatggcggacattatgctcccggtcctaacgcacaattagcggctttctctgttcccgctgaaggttacggaaaatttatgaccgatatattcaatgaatggatacgccaaggtgatgtaggaaaaatatacattcgcttatttgatagcttattagggacatggatgggatatcctgcatcaacatgtattcaatctaaaacttgtggtcaagcattaattattgaagccaatggtgatgtttactcttgtgatcactatgtttatcccgctaataatttaggcaacatacaactaacaagtcttacacagcttgcaacatcaaaaacacagcaacgctttggtcaaaataaatacgataaacaaaccaacctttgcaaacagtgtgaagtgcaaagcttatgttatggcggttgtcctaaacatcgcattattgcgatagaaggcgaaaaatatcgccacaattatctatgtcactcttataaaaaaatatttcatcacacggcaatcggcatgcaattaatgcgtcaagcgatagctcgtggaggccttgccagtgatgcacttggggcgatgcaaaaaaactatctcaagtga

SEQ ID NO: 303204 - DNA, 708 bp, Proteus mirabilis
atgttattgagcgcactacccgcagtttatgcactctatttgcgttcaaagttaccagaacccagttccacacagtcattattacaaaatcgtttatctcttcgccaatcaatggcattgatttggtcacctcaatatcgccgttcaacactgatgttgtgggtattatggttttgtgtggtgttctcttattatggcatttttttatggctaccgagtgtcgcaatgttaaaaggctttagtttaattaaaagctttcaatatgtgttgatcatgacactcgctcagttaccgggctattttaccgcagcatggtttattgaacgttatggtcgtaagtttgtgttaatcacctatttagcaggcaccgcgattagcgcttactattttagcgtagccgattccacaaccacactattagtgttcggtatgttgttatcattttttaatttaggtgcgtggggggcattatatgcctataccccagaacaatatcctgatggtatacgagctacaggcgctggaacggcgacggcaataggccgtattggcggaatattagggccactgatggtaggctatttagtgcaatatcaatttgacataagcactatttttcttatttttagcctttccattgtgatagcgatactagcggttatgttattaggtaaagaaaccaaaaatagaccacttaattctatttaa

SEQ ID NO: 303205 - DNA, 546 bp, Proteus mirabilis; identical to SEQ ID NO: 296158

SEQ ID NO: 303206 - DNA, 1059 bp, Proteus mirabilis
gtgacaaaacgtaaattatctaaaggccagcaacgccgagtacaagaaaatcataaaaagcgtttgcaaagcaaagagaaaaaaaatcacgttgaattagacgatacacaattaggcgaagcgaccgaaggcctcgttatcagtcgctttgggcaacatgcagatattgaagctgcagatggctctattacccgttgtaatattcgccgtactatttcatccctagtcacaggcgatagagtggtgtggcgccctgcattacaaacccaagaaaatgtgcgcgtcaatggcattgtagaagcagttcatgagcgtacttctgtactcactcgcccagattattatgatggtattaaacctattgccgctaatatcgatcaaattattattgtttcagccattttacctgagctttcacttaatattatcgaccgctacttagtggcttgtgaaaccttaaatatcgaaccccttattgtattgaataaagtcgatatgttagatgcagaaagccgagcgatggtaagtgagtggatgcaaatttataaagatattggttatcgagtgcttgaagtctcaagctataccaaagagggattagaagcattaactcaagcattaattggccgcatctctatttttgctggccagtcaggtgtgggtaaatcgagccttctcaatactctcttaccaccaatggaagaaagtattctggtcaatcaagtctctgacaactcagggctagggcaacataccaccaccgcatcgcgcctttatcatttccctctaggaggcgatgttattgattcaccgggggtacgtgaatttggtttgtggcatttaacacctgagcaagtgaccaaaggttttattgagtttcgacctttcttaggaggctgtaaattccgtgattgtaagcataatgacgatccgggttgcttgatcaccgaagccgtagataaaggtgaaatcgcaccaacccgatttgaaaactatcatcgtattttagaaagtatgagtcaggtgaaagtgcgtaaaaatattaatttagactcttaa

SEQ ID NO: 303207 - DNA, 912 bp, Proteus mirabilis
ttggacaagctaaaaattaaactacagtatctattgcctaaattatggctaacacagctagctggttggtttgccaataaaaaagcgggtagcgttactcaatttgctatcaaaatgtttgctcgcgcatataaagttgatatgaatgaagcgaaagagagccaatttcaggcttatgcaacatttaatgagttttttattcgtgcattaaaagatggcgctcgccctattgttgaaggagataaccaactggctctccccgcagatggcgctgtcagtcagcttggtcagatccaagacgatcaaattttacaagccaaagggcactcttacacccttgaagcgttgctagcaggtaattttaccttggccgaccagttccgccatgggcaatttattacaacctatctttcaccacgggattaccaccgtgttcatatgccttgcgatggattattaaaagagatgatttatgtccccggcgatctcttttctgttaatcctttaactgcggcaaatgttcctaacttatttgctcgtaatgaacgtattatttgcctttttgacacccaatttggtcccatgatacaaattcttgttggagcgaccattgtagggagtattgaaacggtctggtgtggcatggtaacaccaccacgtgaaggtattattaaacgttggacttatcctcaagcggataaagttggcgctatatttctgaaaaaaggtgaagagatgggacgctttaaattaggctcgaccgttattaacctcttccctgaaaatagtgttcaattaaataaagatctgatgaacggctctgtaacattaatgggagaactactaggctctatcattaatgccactggcactgatcataaggcctgcgataataataccattaatgaataa

SEQ ID NO: 303208 - DNA, 3336 bp, Proteus mirabilis
gtgcgcctgataatcagtctactttttagcttttttctgactatctcattcaatacttcggtgtttgctgcggatgttgataaattacgtcaagatatcaaacaacttgaaggcagtactaaccctcaagatattgaaactgttcaggcgctacaaggcaccatcaattggataaatgatggtgaaaaagctcaagttaatgcggataattatcaaaagactattgatgaatatccgcagatcactcaagagctaagggctaaattactcgaagagagtcactcggttccaacaattccagaaaaaattaccattcctgagcttgagcaaaaaatcattcaagtgagtagccaactgatggaacaagctcggctacaacaacaagagcaagataaaagccgtgaaatcagcgaatcactcaatttactccctcagcaactttcagaagctcgtcgtttactaagtgatgcaacggcgcgtttagcggcaataggggcatcaaacaccccactagcagaagcacaaaataaattaacccaagctgaagtcacagcacgaaaagcgatggttaatgagctggaaatggcgcaactttctgctaataatcgtcaagaaattactcgactgcgcttagagctatttaaaaaacgttatcaacgacttgacgtacaactgcaacaattgcgtagtttactgaatattaagcgccaagaagtggcagatctcgctttagaaaagacagaaatgctcgccgagcaagggggcgaactccccgagtttctgactaagcaaatcgagactaaccgtcaactttctcagatcctcaataaacagacgcaagaaatgagtgagttaaccgaaaaacagcgtctaacaacacaacaaacccaacaagtaagacagacactcacaaccattcgagagcaagcccaatggttaagtggctctacggcattaggtgaagcattaagaacacaattggctcgcttacctgaaatgccccgctctcaagagctggatagagatatcgttcagttacgtgttgaacgattaggctatgaagagatgctagaaaacctaggcaaaatccaacctcctgaaactgccgatggctcaaagctaccagaagctcagcaatatatttttgactccctcattcaagcgcgccaagagttactcaattctcttttatccggttatgactcccaaatcttagagctgaccaagcttaaagtagccacaacacaacttgcggatgccttaaaagagacaaaagatgccacaaaccgctatatgttctgggtggccgatatcagcccaataaaactcaattatccggttttattaattaaagatattactcgcctactctcattagatactttctcacaattagggcatgctgcggttaacatgctcaaaaaccaagatacctttatctatctactggtcaccctatctattgtcggttttagtcttcgtacccgtaagcattacaatgcgtttcttgaaagagtcagtaatcgcattggtaaagtcactcaagatcatttctcattaacggtgcgtaccgtattttggtcaatattaatcgccttaccactaccgctattatggtctgccgtaggatatggtttacaaagtgtcgaatggcgttatcccatggcgggagcgattggttatggtgtaactgccgcagcccccgtgctatggctatttatgataagtgctacctttgctcgccctaatgggttatttatcgcgcaatttaaatggaaagagagtcgtgtgaaaaaagcgatgcgcttttatcaactgtcgattttcgtcattgtgccgttaatgatgtcgcttatcacctttgaatactatagtgacagagaatttgcgccaacagttggacgtttttgctttttattattgtgcattgctttaagttttattacctcaagcctaaaaaaagcacatgtgccgctttacttagataaacatggctctggtgataatgtgataaataccattttatggtggttcttacttgttgcccctgttcttgctgccctcgcggctatcttaggctatctctcaacctccatcgtattactgggtcgcttagagatgtctgtggcgatttggtttgccttgctgattatttatcatattattcaacgatggatgctgatccaacgtcgtaagcttgcctttgaacgagccaaacaaaaacgggcagaaattttagctcaacgagctaaaggggaagatgagaataccattgttggcagcagtggtgagagtaccgctaacttagagttggaagatcaagccattgaccttgatgcgattagtgcacaatctattggtctagttcgttctattctgaccatgattgcacttgtgtccatgattttactctggtcagagctcaatacagccttctcttttgtcgataatatccgactatgggatgtgacttcctccgtaaatggcgtcaatactatccagcccattaccatggggtctatcttagtcgctatattagtgattattatcacggcacaattggtaagaaacctgccagcactgcttgaactggcaattttacaacacttagatctaacacctggtacaggttatgccattaccactttaacgaaatacagcatcaccctaataggcagtattgttggtttctcattattaggtattgagtggtcaaaactacaatggttaattgccgctatgggggtaggtcttggttttggcttacaagaaatttttgccaacattatctcagggttaatgatcttgtttgaaaagccaattcgtattggtgataccgttactatccgtaacttgactgggaatatttctaaaatcaatacgcgagccaccacgctcaccgattgggatagaaaagagatcattgtgcctaataaagcatttattacagagcaatttattaactggtcattatcagactctattacacgtatcgtaatgaccatccctgcgccagctgattgcaatagtgaacaagtgaccaatgttttattagaagcctctaaacgctctaccatgattttagacaaccccgctcctgaggtttacttggttgacctacaacaagggatccaaatcttcgagttacgtgtttatgccgcagaaatgggacatagaatgccagccagacatgagatccatcaaaatattctgctagcctttgcagagcatggcattccattaccattcccgccgttccaagcacgggtagatatggtgggtaataccattagtacttcaatgcgtgcaacaccaagagaagtaggcggattgtag

SEQ ID NO: 303209 - DNA, 297 bp, Proteus mirabilis
  misc_feature (279)..(288): n is a, c, g, or t
atgaacgctaaccctgcatttaactacaaaagaaatcgtgacaagttattcgctaatttaatatcaatcattgatggtattctttccgacggggagctatctgatacggaaattttatatgtaactacatggcttaatgagtcacatcaaatatctgataacccatttattcaactacttaaggacagaattactcgaattttagatgacgggattataaccaaagaagaaagattagatctagttcaaaccttaaaaaatgtacaacagtcaatcacnnnnnnnnnnaaaatgtaa

SEQ ID NO: 303210 - DNA, 2349 bp, Proteus mirabilis
atgaaaaagaaactgacatcaatactaagtctgacggttattgccatggcgagtattcatttttgctatgcgacaacaggaatgctagagctagatggtgaagtattaccagagccaacatcttatactcatccgccactacaacccacagtaagtacgcaactatttgatgatgttgcactctccgaggcgcgtaatattgaagagcagttaacattagctcagatggggagtccatcaccaatagtattatccggtcgacgtttattatccggcgtgacatttcgtatggcaaatgatctgtttatcgatagtgcgacactcaccatgaaagtgaaagcttcatcgggattagtgcaagccgatcaaacgttacatttgatgctaaatggtcaacctatgggatttttgcctttagaagaaggtgagcaagaacatgagtatatgttagaaatccctgaaatgatgttgaccaatgtaaacaacttgagttttcgccttgccagtcgcgatgctttagatgaaaagcagtgtatgcctcctttagctgatgagctaagtttggtgatttcgcccgattcatcattaaattatcgaggtcgttggattaatggcgggtatagcttggaacgactgcccctaccgttctttgatcctgacagaatgacagcgacctcgttacctattgttttagccgataaaccagataatgggcaggtaacagctgccgctattgctgcttcttggtttggtagttttagtcatgatattaaacaaatagatttacctgtattaatgaatcaactacctgatagcgatggtgttttaattggttatgccggacagactattgcaggtattaccttaccatcaggaaaaaatgggcagctaacgatagtcgataaccccgttgatcccgtatttaaattattactgattagcggtgatgatgaaaaaacattacgtcaagctgcatgggcattaaatagtggcaaattaccaccaaatgaccaattaacggttgctgctcaacatattccggtacgtcaggattatgatgccccacgttggttaaataccaatcatcccgtaacattgggggagatagctcatggtcgtgatgattttactcgccaaggaataaatcatgctcctaatcaattttcgtttcgtgtctcacccgatctcttttggtgggatggagatgcgctacctttagatctgcaatatgtttttcctcattcagataaaataaatagccgtcgctcttcgctaattgcctctttaaaccatcaatttattggtgcgttatatccttctcgttcagagccattaggaatattaaggcagtggttagggatggagagtgcacagcaaagtagtacgctttatttagatccacgacaaatctacagtcaaaatcaattagagttctattttgatttacatgagtatgatgatgcaccctgtattttaacggatggccaaggattgattagtcgtattgatccgcaatcaaccttacaatttaaaaatacgtggcactattccagaatgcctaatttagcctatttttcaggtgcatcgttcccatttagtcgccgggcagatttttctcaaaccacattattattgccagaaaaccccacaactgaagagctatatactttagttaatttaatggcgagatcgggctattcaaccggtacacctgtttcttatatttctgtttttcttggtgcgcaagccttagaaaaaaatcagttagcacaaaaagatatcttggcgattggagagttaggtagtaacggctttttgccaagtgctttttcacaaaaaaccttctcttttataaataaccaacttgagatccaatctccctcattgatagataaagctaaaagttggttagccggtgatccattatcaccaagtagtgatgcggcaaattatcttgctccgttaaatgattggcggggaatgatgagttttatctctccttgggctaaagatcgtgtggttgttttagtgactgcaaaaggtaatgactcaattaaaaacatcattggtgatttgaaccatgcaaatgtcaatgccgctattaaaggggatctgactttaattagtggtcaagatacggtgatgagcttccatttaggagaacatttttcacagggagacctgcctctattacagcaatttctttggtattgcaccagacatgtctatttgcttggcatgttggcagtcggtttttgtgcgctaacagggtgcgtggtttattgctggttacaacgccgctcaacgcgtcgcctgagtgaaatatcaaagcgtcatgttgataaatag

SEQ ID NO: 303211 - DNA, 786 bp, Proteus mirabilis
atggcttctagcaatatggcttacacaaagatccgccaaccaaagctttctgatgtgatagaacaacaacttgagcatcttattttagaaggcaccctacgtccgggggaaaaactcctgcctgagcgtgagctggcaaagcaatttgatgtatcgcgtccttcattgcgtgaagcaatccaaaaattggaagcaaaaggttttttattacgccgccaaggtggtggaacctttgtgcaagataacctttggcaaagctttagcgatcctctcgctcaactcctcagtgggcatccagaatctcaatttgatctgttagaaacacgccatgcccttgaaggtattgcggcttattatgctgcattacgcggtactgatgatgatcttgagcgtattaaagccagtcatgctcgcattattgatgcccatgataaaggggatatcgcggcggagtcggatgcggtattgcaataccaattaatcgttacggaagctgctcataatgtcgttttgctacacttattaaggtgtatggtgccaatgcttgagcagaatatccgacaaaattttgagtttctttatacacgtaaagagatgttaactgctgtaagtgagcatcgcacacagatttatcaggcgattattaatagagagccagaagcagcccgtgaagcttcacaccgccatctggcctttattgaagatgttttgttggatatgagtcgtgaacatactcgtcgtgagcgttctttgcgccggctccaacaacatcctgatttattttag

SEQ ID NO: 303212 - DNA, 543 bp, Proteus mirabilis; identical to SEQ ID NO: 302508

SEQ ID NO: 303213 - DNA, 444 bp, Proteus mirabilis
atgaatacattaaattatcactcaacagagaatggattcacgctaatggaattgatgattgtgattgccattatctcaattttaagctcagtggcgatccctgcttatcatggttatatccaaaaagccgccttaactgatgtattacaaaccctgtcgccttatcgttctgcagtggaactttgtcactatgaacatcaatataaccaatgccatgctgatgccagttttatgcctcaacaatttcgtagtcgataccttactaatattcatgttgccaatggcgttattagtgcaaaaggtaaggctcaactagaaggactaaccatcgtaatgactcctgcagcaaacagtaaagagacacttccccaatggcaaattaactgcacatcaactaacactgcgttacaaacgctatgccataaggtttttaaatctcattaa

SEQ ID NO: 303214 - DNA, 1104 bp, Proteus mirabilis
atgaataatactatccatacagcaacagagtttattgagcaattgttacgtcacagccttgctcaacgtgtttctgatcttcatttagagccacaaaaaaatagcctgagaattcgcgcgagaattgataatcatctagtattattttctccccctgacaatcaattagctaacgagatcctgacacgtttaaaaatcctcgcgaatattaatattgccgaaaaacgcctaccacaagatggtcaatttaattggtcttaccagaaaaacaattattcaatacgtgttgcgacacttcctactttatatggagaaaaaatagttttacggctcatgaataatctgcaacagccacaattagcacagttaggttttcaaacaattcacctaacactattaaaaaaatatcttactcaacctcagggaatgattttagtcaccggccccacagggagtggtaaaactttaacactctatagttgtttacaatatttaaataaagataatcgtaatattaatagtattgaagatcctattgagttacctctccatggcattaatcaaacacaaataacagaaaaagctggtattacttttgcaacaatattacgggcgctattacgccaagatcccgatgttattatgataggtgaaatacgtgatcaacaaacagcagaaatagcaataaaagcggcacaaacaggccacctagttttatcaacactgcatactaactctacccaagcaacactcgcccgtttggctaatttaggcatcgcaaaagatttaatcgactcttgtgtaaaattaattatttctcaacgtttagttcgttgcttatgtagcaactgtaaatacccatcacctgaacagaaaaatttcattattaataatcaacaaattatattacccaattggcaagcaacaggttgtcaattttgttattccggctacaaaggcagaacagctatttatgattgttttgaacttgccaagcaatcacttccctcaccttacgcactatttaactcaggtattgaactgataaagaaggggatcacgtctttagatgaagtttatcaagtagtcggagatattgaatga

SEQ ID NO: 303215 - DNA, 669 bp, Proteus mirabilis
atgaactcggaaaataacgtctcccgacaggggttttcacccgataatgaactcgatattcgaggtctttgttgtgcactatggtcaggaaaacgctggataatagggttcgcgctgctttttgcgctgattgcattaggggcatcttacttgatgcaacctaaatggagcgctattgcgatgacagagagacctactgtgaataatttaggtagttattattctcagtctcagttcttacgtaatcttgatacgcaaattaatccgtctgtaactgtttctcagttaagtatccctgatgaagcttatcaagagtttgtaacacagatttcagcttttgatacacgacgtgagttttggctgcaaacggattattacaaacaacgtaaagaaaatgatgcgcaagcagatgcggcattattagatgagctcatcaataatattcaatttacaccggctgatgagaagaaattggttaatgatcaattgaaacttattgctgaaacggccaacgattcgagtcaactgctcaatgaatatatcgcttttgcgaataaacgtgccgcagagcatctaaatgaagaagtgattgccgcatgggcaactcgaacacaatcgatgaaagctttagtgaaacgccaagaaatggccgctcaaacaatcgattaa

SEQ ID NO: 303216 - DNA, 138 bp, Proteus mirabilis
atgaaaaaaacgtatcacggcattcatcctaacgcacctaaattcgcccgtaatgatattgatggttacaaagaaggtgacccaattgatatccctgatgaccattttatttccgttcgtgtacagatgcctgagtaa

SEQ ID NO: 303217 - DNA, 1305 bp, Proteus mirabilis; identical to SEQ ID NO: 295810

SEQ ID NO: 303218 - DNA, 840 bp, Proteus mirabilis
  misc_feature (806)..(815): n is a, c, g, or t
atgaaattaaagcagagtgcttgtctcgcttttatgatgtttccggcgctgtcttttgctaataatgagtttaattttgtcattgaagattttgaccgttatttagaagcacaacagcccgttgatattaagcctgaaccctctgcaacaatttcatcttcatctactcccgatcagcgtagtggaacggtgcgttccactgtgacattaaagccaccacaaaaaccacaacaaaaaattcagcctaaacagcctgttgtacggaatgaacatcaaaccgtggtacgcaatgagcatcggccagtagtggcgactccctctgtacctcaggtgactttgtctgaacaatgctctgtggtatctacaaataccaacaaaataaacagtgattacactcattatttaacaccactgctttcgtttgtaccgattaaaccgcaatttacccctgaggacttgaatcggtattatcaaagtaaatccgtggtctataatcctctaatgctttatacgcgtaagcgttatccagggcagccatatcagtctactgataatactttattagatttcattccaaatacagtgtattcagtgactgaaataccttttcattttttatatcaatttaaacgttctttgcttgaccataagcaacctctctttaataaggagctattaaatcgtttagcaaatactcgcgaaaaatatcaacgtctgtatcagaaatttactgaacaaaccgcgttattaactgaaagtttaactaaactgcaaaccgcagaagaaaaagttcaacaattaacagnnnnnnnnnnaaaacacaagataaactggctgtag

SEQ ID NO: 303219 - DNA, 936 bp, Proteus mirabilis
atgcaaaatcgcattccttatcgcatttcgggtgaaacctcgtttttttcccgtgaagagatcaaggatattttggcttacttaagagtgatcactaatccggatgatgatgctgcattcttacgtatcgtcaataagcctcgtcgtgaaataggcccgatgactatccaaaagttgggggagtgggctaaagtccgtgataaaagcttatttaatgcctgttttgacttgggattaagccaaacgttaacaggacgaggtttaagtgcattacaggctttttcacagtggatggcgcgaattgtacaacaatcagagcgtgagcctttgcttgctgtacgtgatttgcttcatgaaatggattatgaaagttggttatatgaaacctctagtagcgcgaaagcggctgaaatgagaatgaaaaatattaaccagcttttttcttggatgagtgaaatgcttgagggggatgagttacatgaacccatgacgctctctcaagtggtcaaccgttttactctgcgcgatatgatggagcgtggtgaaaccgatgaagagttagatcaagtgcaattaatgacacttcacgcctcaaaaggactggaatttccacatgtttttctggttggcatggaagaggggatcttgcctcatcaaagtagtatcgatgaagataacgttgaagaagagcggcgtttagcttatgtcggtattactcgagcacaaaagacattaactttcacattatgtaaagagcgacgtcaatacggtgaattaattcgtccagagcccagtcgttttctatatgaattgcctcaagacgatctccattgggataccaataaaaagaaagtgttaagtgctcaagaaaagcaagaaaaagggcaaaaaggggtcgctgggcttaaagcgatgttggcgagacataaaccttag

SEQ ID NO: 303220 - DNA, 519 bp, Proteus mirabilis; identical to SEQ ID NO: 299944

SEQ ID NO: 303221 - DNA, 366 bp, Proteus mirabilis
atgatcaatgagggcaaaacggtagaagtgaatttcggtgatgtgctaagtacacgagttgatggcttaaattacaaacgtctagttgattatcatccaagttgtgaacaaatgcccattaatacactaaaactttctgtcgaggggaatggcactttttttgatgccaatgcattaatgaccaatattaccggattaggtatacgtattttgtatcaaaataaaccacttaagttagggcaggcaattaattttacttatcccgatttccctgtattggaagcggtgcctgtgcgtgatttttctactcttcttgtgggaggagacttttctaccacagcgacattgcgcatggaatatcagtga

SEQ ID NO: 303222 - DNA, 1308 bp, Proteus mirabilis
ttgcgtagcgcacaatggcaaacgacaaataacacaacaggtacggtgaataccgcagcagggcagttaatggcactagagagtgaaaatagtgtgatgactggctctataaatgaagataaacagatggttgctgttcaacgctccattcgtcaattagagcagcagatatctccttgggtacaaggtggtattgctattcgtcatcgtaatggtgataagggattatcaaatttgactgaaatatcggcaccgattgctatctcaagtgttcctggtgaagattggcgctggcaatttaatattaatcccgtttcaatcaccagcggtacggcttctggagagcgcgctaatcgctttggctcggggcaattgcagcatgctgaacgttttgcgaaaaacagtgataatcatgatgaaaagaacaaaataaacgcagatgatgcgggaagccagcgggcttcaggtgttgaattaggattgattttatctgatcacaatacacgttttgatgttggaacaacacctttgaataaagatagttccactattgttggtggactgacttactcaccaaaaattggccaaaatggacagttaacattaaccgcagagcgtagagcgattaaagatagcttactttcctatatgggacgtaccgatcctataacgggagaaacctggggacaggtcacgcgtaatggtgctaaagcgcaatatgcatgggatgatggcaaagtcggtgcttatattggtgggggatactataactaccaagggaaaagtgttgaaagtaatgaagaggtaaaagtttggcttggctcttatgcaaacttctacaaagatgagcaacaagaagtcacagcaggtgttcatgtggactatatgaactttaaaaacaaccaaaattacttctcattagggcatggggggtacttcagcccacaagattatgtcgctgtctctttgcctgttgcttatacccgtcgttttgaaaaaggagaggtatcgctaaatggtgcgataggggtacagagttacaagcaaaaggggagtgattattttccaacccatgcttatatgcaaaatgcgttaaacaaacgtcatacgagtgactcacgtattaaatctcgttatgaagagcaagatgaaaccaatattacctatcgtttagggctcgatgctaaatattatttaaataaagagtcagaattagggctcagcttatctcatgatacatcgggtgattatgctgaagataatatgtggttatatctaaaatacaccccagactttttatctaaataa

SEQ ID NO: 303223 - DNA, 249 bp, Proteus mirabilis
atgagtgaattagtaattaataataatattgttaatgacttattaataaagcaatttactaattatgtatttatgatgatagtaacagatataaaaggtaatattatctacgctaataaaaaatactgccaatttaatcatattaattttgaaagtataaaaaataaaagatataacttgttttatttagttgatgaaaatcaagatgtgttttctaacattagtgataataaagaggtaataagttaa

SEQ ID NO: 303224 - DNA, 480 bp, Proteus mirabilis
atggctaaccgtctaagtattattgagaaaattgaacaggagcgattaaatattgcgacaccttcatctttttgtcttgggattattgattgtgataaattcaaaacgattaatgatcaatatggccatgctattggtgatcatgttttatgtgagatagcgcagcgtttattagccttagaacgccagcaggtttactgtgggcgacttgggggcgatgaatttgcggtacttttccctgctggattacgttcttgctctttattgttattggagatcatcgaatcgctatggcgagggatggaaaaaccgataaaaatcaataaagaaaaaacaatcgttccttctattagcttaggtattgctgaataccctaaggatggcaagacattatctgaactattaaagtcagcagataaacagctttatgcaataaaagagaaaggaggaaataaatacggtttttattcagagtattaa

SEQ ID NO: 303225 - DNA, 636 bp, Proteus mirabilis; identical to SEQ ID NO: 297411

SEQ ID NO: 303226 - DNA, 171 bp, Proteus mirabilis
atgctacctcatactccacaaatgcgtgtcaatattgctgaagatctccattgtcatgtcgatgatatcaacgttaaagcgaccactactgagaaattaggttttgtaggacgcaaagaaggtatcgcttgtgaagcggtggtgttattaatcaaagagtctttatcttaa

SEQ ID NO: 303227 - DNA, 624 bp, Proteus mirabilis
atgttaagtcggtcaatgaaagacttactgacaatgttaaaacaacacggcatcaatgatgagcgtctgttggaagctatgagcaaagtaccccgagagctatttattgatgaagcgctctcccataaggcttatgaaaatacggctttacctattggtaatggtcaaactatttcacagccttatattgttgctaaaatgacatcactgcttgaattacaagcaacggattctgtgttagagattggcacaggctctggttatcaaactgcagtattagcaaacttagtgcatcatgtaagttcagttgaacggataaaaatattgcagtggcaggcaaaacgacgctttaaacaccttgatttacataatatatcgactcgtcatggcgatggttgggaaggttgggtatcaaaaggcccctttaatgctattattgttactgcctgtgcaacagaagtaccgcaacgactcttgatgcaattagctgatggtggcaggatgatcattcctgtcggtgaacagcagcagatgcttaagtttattcgtcgtttaggtaatgattttcactatcaatctatcgaggctggctttgaggctgcgcggttgtgttattcactctaa

SEQ ID NO: 303228 - DNA, 615 bp, Proteus mirabilis; identical to SEQ ID NO: 297564

SEQ ID NO: 303229 - DNA, 765 bp, Proteus mirabilis
  misc_feature (32)..(41): n is a, c, g, or t
  misc_feature (448)..(457): n is a, c, g, or t
atgcatggtctaaactattccctaatcaagcnnnnnnnnnntaaaccgcgagaattaaatacctttaagcaaatcaacggcgatgtgtataccgcagtatcgacacctggcgatctgttttttcacatacgggcactaaaggtatccgcttgttatgaattagccgcaattattagccaaaaattaaactctattgccacctcagaagatgaagtacatggtttccgctattttgatggtcgctcaattattggctttgtggatggaacagaaaatcctgagtttgaagatgagcgtgtcgcttatgcggttattggtgatgaagatccactgtttaccggtggaagttatgcatttgtacaaaaatacattcatgatatggcggcttgggaaaaccaatctctcatcgagcaagaaaaagtgatcggtaggcataaattcaatgatnnnnnnnnnnatgttgaactaactgatgaagaaaaagatccaggctcacacaatgtcgtcaccaatattcaagatgaaaacggtgatgatttaaaaatcgtacgagcaaatatgccgttttcaaatccctccaaaaatgaatatggtacctattttattggttatgctcgctatttctcaacaactaaccgtatgttagaaaatatgtttgcaggaacacccgaaggacataccgataaactactgaaattcagtactcccgtcacgggcacattattctttgtcccatctccggcgtttttagatgatatagaataa

SEQ ID NO: 303230 - DNA, 924 bp, Proteus mirabilis
atgccaaatagcgccctattgaaaggtgatcatattgtcatcttgctattgatatcgctatgctctttttctgtttctgcaaaaaaaatcattcaaggcattactcaagatagtgaaaatattgttgttgctaaaggggatattcccactcctgaaaaatttacaaccaatattcttaactatcggcagaaagctgttgatcagttgaccttagttgaaactgcattaaaaaatgtcattgttaacagtgaaaaaaatcaactgactgatgcccaactcgcctatcaacaagcgcattatcactatgaggtgatccgcccgattattgcattgtttggcgctactgaacgcctattaaataatcgggctgatttctttcttgaaagagaaaactcgccccgttttagtggatttcatttggttgaatatcaactctttaaattagaggatatgcaatcgtcagccgagtcagccaaggcactgttaagaggcattagtgatctaaaaaaacgcttagcgattgaagatattcccattgctaaattagtgcaatctgcaggtgatagtttagagctgattttaaccgacaaattagccggtattgaaaatcaatatgcaaaaagtgatctgggtgatgggtatgccaatttatacggatcacgcttaattattgagtcgctatctaaccatattccacttcaggaatatcaatcactacgcaaacagtatgacactattagcaaactatttttaaaatatcagcgagatgaagaattatttcagcctttagatacgctttctgatagtgagaaagccgtgctctttgcacaaataacacaattggcagagcaagttgcacaattacgtaacgtgctcaatattgatgtctattattactataaagaagcatatggtgaaaaataa

SEQ ID NO: 303231 - DNA, 1353 bp, Proteus mirabilis
atgaaactaaaaagaatggtgttgtttatgttttccccttgttttttagctgtgagcgctgctaatgctgggaattgggaaaatacaattaaagaaagctcatttatttctgattctgaacttgagctgactaccattaatatgtggaaatacctaaaaacagaaaaccgttttgataaacaagagcaacgttatagaaaacaagttgctaatgcttggggtcaaaacttccaagctgatttcagatctggctatttaggtggcattcttggattcgatgtttcttattatggtggtattaaattaggagcaagtaaagacttcgcttctcgtgccatattatataatgatgatggcgaagcaaaaggctataacaaaattggtcaacgttttgcaaaagtgagattcgatttagatcctgttttaattaatggtaaagcgggttggtttaccttgaagaatacaggtatttttactaactcacagcgcttatcattaaacagttataacggttattacactaatacggcgatgggtgattggagtttagatttgctgtatctcgacggaaaagttatgcgtcgtgatagcccaaatatcgatagaatgtatttcagtgatggtaatggtgttagacataatattgaccatgttattactggtggagttaactataattccaaaccattaaaagtctattatttctatggtcaggcggatgatgtattccgtcaacacggtttagaaacaaaatataagttaacatcagacgttactctaggtggtgttgtttattaccacgattatggcagtgaaggaaaacgcacattaaccaatgctaatgcaggtaaacgtaactttgataaggatgcatggcactttgctggtactatggaatggcgtattcctgaatcagcgtggaccattcgtacgggtgtgacttataccgatgcgaaaaaagccaatggtgttggtcaatttgcgcgtaacccaattgggaatactcgtggacgctttaactcaccagcttatgcagatattgactatgtgcgtgatggtgaagtgatgggtgcattagaagctgcatacaaagttaacaatgagttgtctgttggtgcacggactaactatagtgaatttagttactccggcgaaagattaaaacaagggcagtttggcttatttagctactggaagccaacggctaatctttctatttctttaagtggcggtattggttggcaccatcaacaagaaaatgattacaccacaccaaaactgtatgatggtcactcacgacgtgctcactcattatcaggctctatgacaacgacatatcgttttaaaatgtaa

SEQ ID NO: 303232 - DNA, 414 bp, Proteus mirabilis
atggggataggcatatttccgctaataaatgaaacgtcgttaatcggtaaattattaactaaaatccctacgcgattacctgataagctacggattataggtcttgccgcattagggccaaaaccttcggtttgtaccccagctattttggaaacggtattaccaatagtattagcttttatttcatctagttttttgccttttacctcttcgcgattatttaataataatgaagaaaatgtttctttattatttgttttattttctctaacagtaaggatatctgctttctctttgttcttctcttcatcaatttcttttgcacaaatatataaaggaaatgaaaaaagcataagtaacataatagagagtttaatttttttcataatcaaatggctctattttagaatgtaa

SEQ ID NO: 303233 - DNA, 387 bp, Proteus mirabilis
ttgtgtggttgtggtagaaaagcctgctttgagacttatttatctggtcgtggttttgaacgtatgtataaagcctttaatggctcaccacaaagagcggtggatatcgttgcacaatattatcaaggcgatgaacagacccaacagcatgttgaccgctatatgaaagtattagccatttaccttagcaatattctgactgtacttgacccacatttaattgttattggtggcggtttatcacaatttgacgcactgtataccttattaccggattatctctcacattgtgtatacggtaatacacaaattccaacaatagaaaaagcacgttatggtgatgcgggtggagcaagaggtgctgcctgcttaaatttattagactga

SEQ ID NO: 303234 - DNA, 942 bp, Proteus mirabilis
atgaatattattttttatcatcctttttttgatgcaaatacatggataagtggaatgaaagcacgacttcctgacgcgcatattcgtgtttgggagcatggtgatgataagcctgctgattatgcaatggtctggcttcctccctatgaaatgttagcaagccgtaaccaattaaaaggtatttttgcactaggtgcgggtgttgatgccattttaaagcaagagcaacaaaaaccaggcacattacccgctggggttccggtaatgcgcttagaagacacgggtatgggtttgcaaatgcaagagtatgccattgctaaagtgatgtattattttcgccgtatggatgattataaacgtcaacaatcacaacgcttatggaaacaactccccgcacatacttatgataattttgttattggtgttttgggtgctggtgcattaggcgcgagtgtagcgactaagcttgctgaacttggttttaacgtgcgttgctggagtcgtagtaaaaagcaaattaatcaggtagagagtttttatggtaacgatcaactgagcgattttgttaaagagtgtcagttgttaatcaatctattaccttatacaccacaaactcatggtattttaaatttctcgctttttgaacagcttaaaccttcttcttatttaattaatttggcaaggggagcacatcttgttgatcaagatctgctagaagctatcgatcaaggttatattgctgatgcctctttagatgtatttagccaagagccattaccgggtatgcatccgttttggactcatcctcgtatctctattacaccgcatattgctgcttttactattccagatattgcaatggatacaattgttgaaaatattcaacgtattgaaaagggcgaaacaccttttggtgttgtggatatgaaaagtggctattaa

SEQ ID NO: 303235 - DNA, 231 bp, Proteus mirabilis; identical to SEQ ID NO: 302689

SEQ ID NO: 303236 - DNA, 369 bp, Proteus mirabilis; identical to SEQ ID NO: 297807

SEQ ID NO: 303237 - DNA, 381 bp, Proteus mirabilis
atgttaggcaaagcacgttgccaatatctagaaaccgccggtaaatttattgatgcgggagtgactgtcgcatttggcagtgattggccgattgatccattaaatgagtggtatgactttaaagttgccatgactcgacaaaaagatccctctcagccacgtttagataatgatcgcaatctcaccttaatcgaaactccgccactgctaatcactaaatccgcttgtgcactagatatggataaacagattggttcattagaagtagggaaattcgccgattttattgtcttagatagaaacttgtttgaaatatcggcagaagatattgaaaatgtcagggtattgtgtacgataattgcggggaaacccacaatttag

SEQ ID NO: 303238 - DNA, 645 bp, Proteus mirabilis
atgactaaaggtcttatttttgatctggatggcgtaattgttgataccgccaattaccactatattgcgtggaaaaaactatctaatgaaataggaattgattttgacaaagagtttaaccatttattaaaaggaataagtcgaattgagtcattagagcttattttatctcatggtaataaaagtgatgtttattctgcggatgaaaaaaaatcattaacagaaacaaaaaataaatattatcttgagttattaaataatattactccaaaagatattttaccgggtgttttagatctaatagaacaagcaaacaataatcacattccttgtgctattgcatcagcttcagaaaatgccccaaccatattagaaaaattaggcattaagcattattttaaggcaattgttgatcctaaaacactcaaaaaaggcaagcccgatcctgaaatatttttgcgtgcagctgagtttattcacattccaccacatttatgtatcggatttgaagactcgattgctggaatacaatcgattaaacaagcgggcatgtatgcaattggcgttactgctgacggccccttaccagaagcagatttagctgttcactcattaactgaaatagatattcattcacttttttaa

SEQ ID NO: 303239 - DNA, 336 bp, Proteus mirabilis
atgtcatttttaaaaaaactaccgggaattctgttttgtgcactaattggtgggttattaacattatctggtctaccgatggcgttgatgtttgggccaatcgtcgtggttattattgcttatcgttttaaatggcagctctctgttcctaagcatacactgacttttatccaactgaccttaggcacctctgttggattgatgtttaaccaagtacatttagggagtgcggataatttagtgcttcttttgattatcctcgttatttgtttagccattcaatttgttgtcagtttcttatggtttcatcgtcatattggttggacaaaatgttag

SEQ ID NO: 303240 - DNA, 543 bp, Proteus mirabilis
atgacgattgattttgcccaattagcaaaagagcgtcagcaacctctgcgggtttttggtaacctaccttataatatttcaacgccattaatgttccatctatttagttttgctgatgccatttctgacatgacttttatgttgcaaaaagaggtggttaatcgcctagtggcaagtcatggtagtaaaacttatggccgcttaagtgtcatggcacaataccactgccaagtcattcctattattgaagtgccaccaagctcatttaagccagccccgaaagtagattctgccgttgtgcgtctgatcccttataaggaaaaaccctatccggtgacagatattgctatgttaagccgtatcacatcacaagcctttaatcagcgccgtaaaacgttacgtaatagcttaggtggactacttacagcagaagatatgctggcattagatattgatcccactgcacgcgcagaaaatatttctgttgagcaatactgtaaagtggcaaactggttatcatcacaacagcaacacgctgagtga

SEQ ID NO: 303241 - DNA, 381 bp, Proteus mirabilis
atgatgccgggtggtcctaaaggtacagatcgtctatgtgcaaattcactcgtgattgattttattaaacgccatattgcacaagacaaatacatttgtgctctatgctcttccggtgcaaaagtattagcagcacatcatcttcttgaaggtcgttattacagcactggtgataaacttgctgataaatatgatgatggtcattatcttgaccaagatgttgttgttgatgggaaatttatcagtgccaaaggattaggtgttagctttgaatttgcctttacggtagctaaatatttgctcagtgacaatgtagaaaaagtagattggcaagctaatcacatttactttaaacattggccgttgtcttaccttgactaa

SEQ ID NO: 303242 - DNA, 789 bp, Proteus mirabilis
atggcagaatatgccaaaaaaatgggtatcaaaattttcacaaactgtgcagcccgtggtttagaaacgcaagctggtgttatctctgatgttgtaacagaaaaaggaccaattaaaacctctcgtgttgttgtcgccggtggtgtttggtcacgtttatttatgcagaacctaaatgttgatgtaccaacattacctgcttatcaatcacagcaattaattagcgcagcaccaaatgcgccaggtggaaacgttgctttacccggcggaattttcttccgtgagcaagcggatggaacgtatgcaacttctcctcgtgtcattgttgctccggtagtaaaagaatcatttacttacggctataaatatttacctctgctggctttacctgatttcccagtacatatttcgttaaatgagcagttgattaattcctttatgcaatcaacacattgggatcttaatgaagagtcgccatttgaaaaatatcgtgatatgaccgctctgcctgatctgccagaattaaatgcctcactggaaaaactgaaaaaagagttcccagcatttaaagaatcaacgttaattgatcagtggagtggtgcgatggcgattgcaccagatgaaaacccaattatctctgatgttaaagagtatccaggtctagttattaatactgcaacaggttggggaatgacagaaagccctgtatcagcagaaattacagcagatttattattaggcaaaaaacctgtattagatgccaaaccatttagtctgtatcgtttctaa

SEQ ID NO: 303243 - DNA, 1104 bp, Proteus mirabilis
atggcacaagttattaatactaattatctgtctttagtcactcaaaataatctaaatcgttcacaaagcgcacttggtaatgcaattgaacgtttatcttcaggtatgcgtattaacagcgcgaaagacgatgcggcaggtcaagctattgctaaccgtttcacttcaaatattaacggtttaactcaagcatctcgtaatgcgaatgatggtatttcagtgtctcaaaccactgaaggtgcattgaacgaaatcaacaataacttacaacgtattcgtgaattaactgttcaagcgaaaaacgggactaactctaactcagatatcacttctatccaaaatgaagttaatcaacgtttagatgaaatcaatcgtgtttcagaacaaactcagtttaacggtgtgaaagtactgagtggtgaaaagtcaaaaatgaccattcaagtcggtactaatgacaatgaagtgattgaattcaatttagataaaattgataacgacacattaggtgttgctagtgataacctgtttgatgctaaaacagagaaaaaaggggttaaagcaacaggtgatgctatcgatgcaaacgctctgggcatttcgggcggtacaaaatacgcgactggtgtttcagtaaaagagtataaagtagatggtaaggtttctgctaataaagttgtcttaaaggatggtagcgacgagtacgtagtaagtaaatcagactttacattaaaatcaggtactactactggtgaaattgagttcactggtagtaaaaccattaaatttaaggcagatgcaggtaaagatgttaaagttttaaatgttaaggatgacgctttagcaactttagataacgcaattagtaaggttgatgaaagccgctctaaattaggtgcgattcaaaaccgtttccaatctactatcaataacttaaataacactgttaataacttatctgcttcacgtagccgtatcttagatgctgactatgcgacagaagtgtccaatatgagtaaaaatcaaatcttgcaacaagcaggtactgctgtactggctcaagcaaaccaagtaccacaaactgttctgtctctgttacgttaa

SEQ ID NO: 303244 - DNA, 423 bp, Proteus mirabilis; identical to SEQ ID NO: 298890

SEQ ID NO: 303245 - DNA, 1125 bp, Proteus mirabilis
atgaattcagaaagcccaattaagcatgtccgctgggcaatcatgtgttcggtaatcggatttgcattaacaggctgtgccgacacgccttatcgtcctgcaccgataacctctgtcaatgatagttcgtcaaatcgtaccgtttctacatcacctgttacaactaacagtaatgcaggagtggcaacacctattgaaagaggttcaactccgttacaaacaacgcctcctccttctattagagtgaataacacaaccgcgcagcctcaaagccagcctcgtacgcaaaatgttacccctcaaaatgtcaatacggatggtagcggacgcattgtgtataaccgtaattatgacaatatccctaaagggaattacagcggtaacacttatacggttaaacgtggcgatacaatgttttatattgcgtggatcacggatagtgatgtaaaagatttggcctcaatgaacaatattccagagccatatagcttaaatgttggacaagtacttaagattggtaaccgtcaagttaataccggtaccaataccaatgtaaatacttcagtaattaataaaccaagtagtgaaggcgttcagacggcacaaactaagccgtcaaataataatagctcaatggggccgttgatcacgaaaccaacaacaacgacaccgccaaagacaacgacttcgacaccaacaacttcggcaacaaccagtaataacacaacggcaacctctaaacctgcagccgcaacaggtaaatgggtatggccagcacaaggtaaaattattgagagctactcaaatgcacctggtggtaataaaggtattgatattagtggtacacgaggttcacccattgtggcaacagccgcaggtaaagtggtttatgcagggagcgcattacgaggttatggtaatttagttatcattaaacataatgatgaatatctcagtgcttatgctcataacgatacaatcttggtacgtgaacagcaaaatgtaaatgcaggacagcaaattgcgaccatgggaagtactggtactagttctgttcgattacactttgagatccgttataaagaaaaatcacttaacccaatgagctatttacctaaaagataa

SEQ ID NO: 303246 - DNA, 402 bp, Proteus mirabilis
  misc_feature (390)..(399): n is a, c, g, or t
atgatgatccaagcgttacattcgctttatcaacaacacaccgataatggtggtcatggcatcggacgttgtggtggtaaaggtaaacacagaggacaacaccacaatggcaataatgaacattgttgtcatggtgaaagaggccatcaccaagaaggtcatggcaaatgttgccaacagggtgagcaaagtcatgagcataatgatcatgccgaacatggctgttgtcacggtgaaaaacagcaagagcatggtaaacgacatggccgaggttgtggtgctggtaaaggaaaaggaagaggccaaggtcgtcaattaaaacgtatgtttgaccatggtgatttacgtgtccttttgttgagtatgattgcggcaaaacctagccatggnnnnnnnnnntag

SEQ ID NO: 303247 - DNA, 804 bp, Proteus mirabilis
atgatactttggctgatctcttttggcttaatttcaggtattactacatggttatttggttttggcggtggttttgttactgtgcccctactctatactttgattcttacactttgggctggtgatagtttagcgggtgaacatgctatgcaaattgctgtggctacctctgcgctcattatgttgttttccgctattattacgaccctaaaacaccataaggcgaaaaaaatagattggaaattaattatgatcttattttgggggattgcattcggtgggatcttcggtgccttacttgcctcatccgtccaaggtgaatggatccgatggatttttattggctatctattccttactatcttagattgctattttcgccccggatttatggcgccacgcaaagaaatacaaaaagtaaccaacaaaaaagaagcgttaactggcactattattggcattattgcagcttttttaggtgtaggtggaagtgttatgaccgtacctttattacgccgtagaggtatgtcaatgactcaatcggctgccatggcaaacacattgacattccctttagcattaacggcaacactcacttatatcttattgtctttcactaccccgttaggggatagcgctggatttgttggctatatttggataaaagcagccgttattctaatctgtagtacatggataggattaaaaatagctgaacgttttttatcacgtataccggataaatggcatgcgagagtttatccgctgttattgatattggtgttagtcgttatgctgaactaa

SEQ ID NO: 303248 - DNA, 843 bp, Proteus mirabilis
atgctgagctatcgtcatagtttccacgctggcaaccacgccgatgtattaaaacatattgttcaaaccctgattattgagtctttaaaagagaaagaaaaaccgtttctttatttggatactcatgctggcgctggacgttatcagctcaccaatgcacatgcgactcgcacgggagaatacttagaaggcattgcacgcttatggcaacaagaagaggtgcctgaacttatcttgccttatttggaggcggtcggttcgttaaatacatctgatgagttacgttattatcccggctctcctttattggctgctaaattattgcgtgagcaagatctgttaatgctaactgaattacatcctaccgatttccctttgttacgtacggaattttctcgcgataaacgtgtaagagtgtgtcgggaagatggctttggacaattaaaatcaaaactccctcccgccagtcgtcgtgggtttgctttaattgatccaccttatgaacttaaacaagattatagtgcggttgttaaaggcattgtggaaggctataaacgtttcgccaccgggacctatgcaatttggtatcctgttgtgcatcgccaacaaattaaacggatgctaaaagagctagaggccaccggtattcgtaaaattctgcaaattgagttggcagtgaaaccagatagtgatcaactaggtatgacagcatcaggtatgattgttattaacccaccttggaaattggcatcacaaatggcgtctatcttgccttggctacataaaaccttggttcctgaaggtactggacacacattagttgaatgggttgtaccagaataa

SEQ ID NO: 303249 - DNA, 789 bp, Proteus mirabilis
ttgttgagtgctgaagaagaagtattctttgctcgtagagcgttacgaggtgatatcccatcaagacaacggatgatagagagtaatctacgtttagttgttaaaatatctcgccgttatacgaaccgagggttagctcttcttgacttaattgaagaaggtaatttaggccttattcgtgctgttgaaaagtttgatcctgaaaaagggtttcgtttttcaacctatgccacatggtggatacgtcaaactattgaacgtgccattatgaaccaaacccgcactattcgtctccccattcatatcgttaaagaactcaatgtctatttaagaaccgcaagagaattagcacataagctcgatcatgagccaagtgttgaagaaattgcgcaaacgctggataaaccggtcgatgatgtcagcaaaatgctacgtttaaatgaacgtatttcttctgttgatacaccgattggtggggattcagataaagccttactagatattatttcagacgaaaatgaagaagggccagaagcaaccattcaaaataataacctcaaggaaaatatcgtaaaatggttatttgaattaaatccaaaacagcgtgaagtattagcgcgtcgctttggattactgggttacgaggctgaaacattagaagatgttggtcgagaaattggtttgacaagagagcgggttcgtcagatccaagttgagggattgcgtcgtttaaaagatattctgcaagggcaaggattatgcatagaggcactttttaagatgaactag

SEQ ID NO: 303250 - DNA, 153 bp, Proteus mirabilis
atgctcgatgaacctcatcgggcgttttatagtttaataataaatggggtcgcctttcattataaatctgtattgattcgtcaacctatatcaagattagtcattatttttcaatggatggaagtgttttttcttgttaacaatttactataa

SEQ ID NO: 303251 - DNA, 441 bp, Proteus mirabilis
atgttcgcctatgagatttcatataatcaatcaaatctaagacttttagaaggaactaaaaatgcaggttttgataaagaaaagtgccaagcagaaatctgcactgctagtcctgttgaactcaatgtatttgctggcataagattgatgattctaaactcgctaagagatgatgtatatactatttatctacctcagatatatcttcttgaacctaaagaagtctcgttaataatgaattattattacagtcagaaagagctattacaaagctcaaaagccattcagataggattagcccaaaatagagacaataaaaaatggcttgaagaaaaaacataccttcttacccatagttttgagaatgaatacttattaggcgaacaaatactgtcaatgtataaagcttatattcctgatgaattagtgaataaacgttaa

SEQ ID NO: 303252 - DNA, 570 bp, Proteus mirabilis
gtggctaaaggtgatgagttactttgtgaaaaaggcgaaattgttgccaagcagacccaaccaccaagaccttttacagatgctacgctactttcggctatgaccggtattgcacgttttgtgcaagacaaagagctaaagaaaatcctaagagcgacggatgggctaggtactgaagcgactagggctggtattattgaattactgtttaaacgcggctttctgcaaaagaaagggcgagctatcaactcgacaccagcaggaagagcattaattcatgttttgccagatatggcgacattacccgatatgaccgctcattgggaatcaatattaacgcaaattagtgagaagcaatttaagtatcaagattttatgatgccattaagtaacacactatttgaattaattactcaagctaaacgtcgtcctaatattcaagcatttagaaacctgcctgcgcctgcgcagaataaaaaacgtaaaggtgcgacgaaaaaaagtgcacaagggaaaagtcgttcagcgcagtctcaatctacgaatcgcaatataaagagtgatgcttag

SEQ ID NO: 303253 - DNA, 609 bp, Proteus mirabilis
gtgactactcaacaacagaaggagaatcaaagtaagtttgatataccacttcttagagtacctcatgaacaggagaggaatgcgaaaagaattaatattcaagatgatccacaatataaaatgacgacattttcactagaaaatgatgaagacaatactaagccttccttagcagaagaagaaccgaagaataataaaaaaaaagatgatcatcttgacgtatctgcacaacaaaattcatcattacctacttccagtcccgatcatttagaaaataaaaaatccaacaaagattatgattttttatttttacaattatcttaccagcatgttatacatgaagatattttgaataaaattaaagatccagagaaatttgattattacagagataaattacaaaagctatctaatggcatagatgatttaaaagaactttttaaatctggcttcaatgagcttgataaaaccaaaggtgcttttgttgattactggatggaagtttataaccaaataaaagaaaagaatttcaaaaaagagtctgaagttaaaagttttttaaataattgcaatattcctgattcattaattcatcagtatgtgaagtaa

SEQ ID NO: 303254 - DNA, 231 bp, Proteus mirabilis
atggaaaaagcccttgaagatgttttccctttcttaaactttcctagtgatttttctaagctttcattagatgaactagataatttatctaaaaaattggatggtttttttgatgattcttttaattacctaccaaatatttctttaagtgaagataaaatcaataaaattacttcacatactgatgaattaatgaatcaggaatattgcaattatttaaaaaacttttaa

SEQ ID NO: 303255 - DNA, 630 bp, Proteus mirabilis; identical to SEQ ID NO: 302832

SEQ ID NO: 303256 - DNA, 195 bp, Proteus mirabilis
atgattaactatatgtatgcgcgtgcattatttagttgtgatcaagtgacacaagcaaaaaagatcatggctcaattacttcaagaaaatgaagcgagtaaaaaaattgctcgatatagtttcactagtgttcctccttggttatctattgaaaagaccgcggttattcaaccaataacattagagagtgattaa

SEQ ID NO: 303257 - DNA, 516 bp, Proteus mirabilis
atggttaacagcatttttaatatcaacccaacttcaaccttggatgtttatggtaatcaaataagtcatttgaaattaggttttcaaaccataaaagctatccatcaagcggtaagaagagaaaaactcacgtttgagttgatgacttatcaacaaggcctgattaaccttgaacgtatcatcaacaaaaataacgattacagttcgcatttgtcacaaaaaatatctcaacttgaacgacaaaaaaattattttgaaccgctttctgacggattatttaatgctctcgctggcgtttatagtgatgcggtcagccctgtagggccaaaaattcaagttaatggttcgattgagttgcttaaaaaccctattattcaagccaaagttcgtggattacttctgacaggtcttcgtagtgccgtactttggcgtcaagtaggtggtcgccgttttgattttttactccatcaaaaaaccatcttacgacaaactgatgattttctcgctcaatgttaa

SEQ ID NO: 303258 - DNA, 480 bp, Proteus mirabilis
gtgcgtatttcaacggatgagcagggtattgaaattgataagcaagatcagatttggattcagcctatccatttatctgatatgttagttaacacgggaattgtctatcaaaccagtgatatcaattataccgttgctaaccaacatttgtggataaacccgcttgatcaacagctacagcaaaatctggttgtgggattagcaaaagaattccctaatcgagtggtctcgacacaacctattgaagataaacttgctaaattgactgtcaatgttaattattttcaaggtcgatatgacggcaaagtgattattgctggtgattggatctacactcaaggcaataaagtgattagtcagcctttttctgtcgcgttaacacaaacgcaagatggctatccggctctggtacgtacgctaggggaaggatggcagaatgtcgtcgctgagatcgcaaaaacaattaaatcacaatattaa

SEQ ID NO: 303259 - DNA, 501 bp, Proteus mirabilis
atgaatatgattaaaagaaaacccgcagctaaaacgcgtaaaaaaacacgtgaagagctaaatgcagaaggacgtgaacgtaagcgccagaaaaagcatcgtggcaatcctgctggtaaccgtcagcaggaagcgatgaaaaaagagcaagcgcaaaccaatgaacagaaagatccacgtattggtagtaaaaaacccatccctctcatcgtggataatcaggcgcctaaagtagataagaaaaaatccgcgccagcaaaaatggagcctatgcgcttatcgttagaagaagagttagcactcttagagaatgatactcgtttagatgaattactctctcgtctggaagaagggggtaaactcaatccagaagagcaagcttatactgaaaaaactcttgatcgcatcgatgcgttaatggcggaattaggcattgagtttgaagaagatgacgatgaagaaaaaacagaagatattatgcagttattaaaaggtaagtaa

SEQ ID NO: 303260 - DNA, 423 bp, Proteus mirabilis; identical to SEQ ID NO: 298890

SEQ ID NO: 303261 - DNA, 423 bp, Proteus mirabilis; identical to SEQ ID NO: 298890

SEQ ID NO: 303262 - DNA, 471 bp, Proteus mirabilis
atggtttgtacgcgaacaaaaccaaaatgcgaactttgccctttaaatacaggttgtattgcttatgctcaccatagttgggcggattatccggggaaaaaacctaaaaaggctattccggaaaaaacaacttattttcttattttacaatatgataatctggtctggttagataaaagaccaccagcaggaatatggggaggactgttcgcctttcctcagtttgaaacaaaaatgcttttagaacagtggctaactgagcatggtcttgaaaataataaaactgagcaattaatttcatttagacatacttttagccattttcatttagatatagtaccaatttgcgtaaaactctccacgtttacctctctgatggaggcgcaacaaggactttggtataacttacaaaccccggcaagcgtagggcttgcggcacctgtagagaatttacttagacaattagcctaa

SEQ ID NO: 303263 - DNA, 492 bp, Proteus mirabilis
atgtgggggatccatcagctatatgcttttaataattttgggtatgggcaatgcgctcaaaatcaatgggaagctagagtaaaactggaacaacaattaaaacaagagaacgaatttgaaaaatcgggtatctcttatgctattcatattttgccagtttcagattttaataaactcacttttgccattgctcttaaaggcaaccaatgtttaaaaatacaaaatcagctaaataatgctatttataaaaatttagaaataaagagccaatataagccagatctcaacctattagtgctgtgtgctcgtaatagcgatgatatacctgctcagttttgtcaacaatgtcatttaggtaaagatgaatggaagcaagttaaccacttaagtcttttacaattaacgataaaaaacactgataaatggagtgaagagcatattaaagcagggtacgactatattaaaaaagttgtcctatctgcattaaaatag

SEQ ID NO: 303264 - DNA, 213 bp, Proteus mirabilis
ttgctggtggcgattgaatcctattggcgtaaaaacacacaagagagttgtgtttatttgttagagaaagcgaagcaatttattcaaggacacttacaacaaacgaatacatggatatctatgtatggtcttgtgattgtttctaatgcgtcactggaagaacagttgcctgaaggtttattaaaggcacttaaagtatcaatccccgcctaa

SEQ ID NO: 303265 - DNA, 513 bp, Proteus mirabilis
atggcagggcgagctgatcctgttgaacgtgctttaatacgtgcaccattaagaggtattgtgaaaaatatccgtattaatacagttggtggagtaatttcagcagggcaggatataatggaaattgttcctttagaagatcagttattagttgaagcttatattagtcctcgagatgtggcctatgtccgtgctggtatgcctgcattagtaaaattgactgcttatgattatgcgatttatggtgggttagaaggcgtcgtgactttggtaagcccagatacattgcatgatcaaaaaagacctagtgatttaaaacttaatcaagatgaagctttttatcgcgtattggtcacaactcaaagtagtcatcttacggataaaaatggaaaagagcttcctgttattccgggtatgatcgccagtgttgatattaaaacaggtgagaaaacggttttccaatatttgatcaaacctataacaagaatgaagcaggcattacaagagcggtaa

SEQ ID NO: 303266 - DNA, 414 bp, Proteus mirabilis
atgggttatgctcttgaagtagagatgatccgtaaagcacatgaaaaaggcttactcacaacaccttatgtttttagtcgtgaagatgccattgcaatgacacaagctggtgcagatattattgttcctcatatgggtttaaccactggtggcaatattggtgcagaaacagccgttactttagatgattgtgtcgcccttattaacgattgggcaaaagcagcaaaatccgtacgctctgacgtgattgtactttgtcatggtggccctatagcaacaccaaaagatgcgcaatatatccttgataactgtcctgattgccatggtttttatggcgcaagttcaatggaacgtttaccaacagaagtcgctttaactgcaacaacaaaagagtttaaaaatattaaacgctaa

SEQ ID NO: 303267 - DNA, 270 bp, Proteus mirabilis
gtgacattagatgttattgttgaaaatagtgaagaaaatgaagaggatgagcaaaacgatgccataatagaagatagcattgatttagctcaatcacttgatttaaattcaattggcgctattccgattacaatatcttttcttttagccaataaaacattatcaattgatcaacttgaagaattagcaccagggaagaaatttattttacctgataatgccattcgtcatattaatattttagcaaatggtaaagctattgcccaataa

SEQ ID NO: 303268 - DNA, 231 bp, Proteus mirabilis
atggctgaccaaatggcagcgactattcgccataatcgggctagagggcaacatcaagtggcggcaatgtcggatatagttagagatttatcaagattaggttggaatgaccaaaagattggtgatgaattaggtatgtcacaagatgaagtactacgtttaaaacagattagtggcttagctgaattattttcagagcacgacttctcagaagcttggacggttaagtag

SEQ ID NO: 303269 - DNA, 390 bp, Proteus mirabilis
atgtctaaatcggcaaaaggtacgacagaacggcatggacggaacgtaaaagctaaatctggtttaaaccgctcaatactggagcagggctggtatgaaatgcgccgtcagcttgagtacaagcagctctggcgaggaggtcaggtactggcaataccacccgcctacaccagtcagaagtgcgcttgctgtggtcatacagcaaaggaaaaccgccagtcacaaagtaaattcgagtgccttgaatgtggatatacagcgaatgctgatatcaatgcggcacgtaacattttagcggcaggacatgccgtgcttgcctgtggagggagggtgcagtcagaccgcccgtcgaagcaggaacccgccgaggtgattcagacatcagtctga

SEQ ID NO: 303270 - DNA, 234 bp, Proteus mirabilis
  misc_feature (192)..(201): n is a, c, g, or t
atgtggctaaaagatggcgtattagaaggactcgattttattttaccttggcgtttaaacggtgatgaatggcaactaggtgtaaagcagccagtgcaattacggattaagcgcgtcaataatttatttgaaatgacagacattaccgccgatctgcaaggattttacccttggatttccgcttcaagcacnnnnnnnnnntaccacagcatgaagcggcgattatctcattag

SEQ ID NO: 303271 - DNA, 207 bp, Proteus mirabilis
gtggcgattgaatcctattggcgtaaaaacacacaagagagttgtgtttatttgttagagaaagcgaagcaatttattcaaggacacttacaacaaacgaatacatggatatctatgtatggtcttgtgattgtttctaatgcgtcactggaagaacagttgcctgaaggtttattaaaggcacttaaagtatcaatccccgcctaa

SEQ ID NO: 303272 - DNA, 333 bp, Proteus mirabilis; identical to SEQ ID NO: 294321

SEQ ID NO: 303273 - DNA, 177 bp, Proteus mirabilis
gtgcttgaagcggaaatccaagggaaaaatccattagaagacaaacggcgacaagtaaatcttaattatcgccatcaagaaaatatttttcagttatggcgcagcttgcgatttggttcgcaattggaagagtggttagaaaagagcctatccgatttagggagtgagtcagaatga

SEQ ID NO: 303274 - DNA, 276 bp, Proteus mirabilis
atgcgctattgttttcctaacgggcagttggatatgatttgtaaagataagcctgaaaatgcgcctgcgccattaaaaccttggtttgatttacctaatcaactaccaaatgattacagtattatctttggccactgggcctctttagagggaaaaggcacccctgaaaatatctatgcgctagatactgggtgttgctggggcggtgttctaacctgtctacgttgggaagacaaacgttattttatccaacctagtctcacacacttaccataa

SEQ ID NO: 303275 - DNA, 180 bp, Proteus mirabilis
atggggcttgtctttgtctcatttcagaataaccttaaaaaaggctttattgatacgcaaaagcgtttaaatggtgaaccgttagagcgctatataaaaccttttggtgggggttattacttcgtattacccggcgtcacacaagcaagcgatatattagctaaaggactatttacttaa

SEQ ID NO: 303276 - DNA, 174 bp, Proteus mirabilis
atgtgcagtaacgggccgaaagtcgataaacaaaaaaccattcaatgccaatcagaacaagcaaaatcagtgagctatgtttttgctgggcaatgggatggccctgatggtctaatgccacccgatgaaacattagcaaattggcaggtaacacaaattgtttggcaaaaatag

SEQ ID NO: 303277 - DNA, 447 bp, Proteus mirabilis
atgaatatcaccaaattactcgctggtggttgtgtagtattggcgttctggctttggtgggtaatagatggctatggaacgttaaaagctaatcacaaattacttactaattcgttcaatgagcaagtcagtatcaatcaagcttatcaagcacgcataaaatcccttcatgatctcgatgtaaaacatacgcaggaactcaataatgctaaaactgaaattaatcgcttgcgtgatattagtgagcgccatcctgagcgggtgtacatcaaagccgaatgtccaaaacccgaaggcgctaccacctccggcgtggctaatgcaaccaccgcccgacctactgacaccgctatccaaaattattggttactcagagagcgaattgcagagtcagaacagatgattaaagggttgcaggattatatcaaacaagaatgcatggaataa

SEQ ID NO: 303278 - DNA, 864 bp, Proteus mirabilis
atgaagcaaaacccttttggtttatacgattttcttggttacttaatacctggagctttatttttatatactttacattttttctttggtaataatataatttatgaattgctaagattagatgacgacatacaacatagtgaaataatgacattcattccagctgtaattttagcgtacataataggtcatgtattttcattattatcgtctttttttatagaaaactatgcaacaagtttatatggatatccctcaaaatatattttcgtaaaaaaacataatttttttataaaaaataataatgatagttattttaactattcaaatgcaagaaaaattattttattcttaattttattacctatatcatttactattattatattgaagatactaaaaatatctatatttgaacaagcaaaaaccttacctcaagacctatcagaagttgtttttaaaaaatgtatgttaatattaaatataaatttaaacataaatacagaaaaaatagagtcagataaagaaaaagatggtataagtagggattattttagaattctatatcattttatattcgaaaactcagaaaaacactcagcaaagctacaaaattacgtagcactctatggattttgtagaaatatttcttttatattcttaattaacttttggattacatcttattttttaatatttaataactttgaatataataatttaattttactatcattaatgttagttttaagctttttattttttactggatttgttaaattttataggcgctatacattagaggcattaatgggtgcaactgtatttaataaaaagatattaaatacagaaaatgagagttga

SEQ ID NO: 303279 - DNA, 315 bp, Proteus mirabilis
atgattaagcttgaaatcaataacgctgaatatattgctcaattagaagaggctcgcttatctgcagataaccctcgtggctatctgtttatggatattttcttttctgatccaaggtttgataagaatacgtttgaaatgaagaatgttcgtaaggaaccgatgaggacgtatatgacggaggctgtggcgagggatttgtttgagaagttggggaggtatttcaatcataaaaatatggtactaacatcaaaaaacataaaaaacttatgtagtttgagtaatttaaaaccatctttctcgcttgttacttag

SEQ ID NO: 303280 - DNA, 321 bp, Proteus mirabilis
atggacttaaaacaatgcgataaaaaacaattaaaagaagagtttaatcgacttacagcattaacaagttataaatcaacaatgggtgtttttgatatatttactagattacctgaattattaaataatgatgaaacagttttatgtgttaatagcggaatcgtaaaatctaatatttggttgatcatacctacaaataaacgaattatttttctgcataaaaaaagtgggattttccataaaaaagttgatttatcttcagtaaactatgatgcaattacttctattgactcatcttccggattgacaggagtaaaataa

SEQ ID NO: 303281 - DNA, 171 bp, Proteus mirabilis
gtgacaggatatgctctattatcgctagcagtagcaaaaagctgtttaccaatcatatttgattcgaatttaactattgttttatctgcattaactgttgacgcagtttttttaaactgttttaaattacctagttttttatatcgattatcagattcatttttagtataa

SEQ ID NO: 303282 - DNA, 549 bp, Proteus mirabilis
atgtctgaacactttcaaggtaaatttgaagcagaattgaaatatcacttaaaacgacctcaagattttattgatgcattacaactcgctggagcaactttatttatatcgaaaaatgatgaaacagattggtatttagaacatccaaatacgcctttccctgctccctctataagtttatgcgtaagaaaaatggtcccctctggtatcaatttattaattgtaaaaggcccagaacaagcccaatgtgaagcagtaaaaatagaagatgcagaaaaaacggtttcgatgtttaaaacattaggttatcactgtattttaaactatacaaaatcccgtcaaatctactttctagaccaatttcatatcactatcgataaattagacaatcttggctactttgctgaatttgctattatgactgatgatgagagtaaacttgctgactataaattacagttacataacttagcatatcaatttggctttaatgatagtgagcaagagcatcataactataaaacaatacttttaagcaagttagcttaa

SEQ ID NO: 303283 - DNA, 162 bp, Proteus mirabilis
atgcaaataatcggatatgtattactcatgctaatacagggctctgctgtgcctgtaacggaagatatatatacgcaatcggaatgcgataaacacgctgaatatttaatgtcagtgaggaatattgaagttgtttgtggagaggtatggaatgaaagataa

SEQ ID NO: 303284 - DNA, 753 bp, Proteus mirabilis
atggatgtgagtatgattccaatatttataatggtatccacgatgatagaactatcttcaaagcttaaaaatattattttttgggtgtcaacagcttcaatatctttaattgtttttggtgtttttgttattgatatatttgtcaccgatgctcatggaaaagataaactcagcattattttttcttatctatcaactatctttgcattcttatcttcgctagccttatttgccaccataggtgtttatttttggcaaaaaaaagactcagaaaactcagaaaagaaaaggcaaaaagaaatatccattagttatctaaatatatttactgcatatgctgaagagctaaaaacaatagtaattcaattggttaaattacgtaatttattagacaaaaacaacaattcatttgtagaatatattggtggttatgatatacatgcatttattttaaaagatgaagatgggaaagaattaggtaatgctcgaatgtttaaatttgatagctcatccttgtcttctatacactcaaactccgcatcagttaatataaatatttcagaaaattatctatttctatacaagcacagtattcaaataaatatatatattgaaaatttaattttaaaaattcattatgataatagtaaagaaaatatacttgattactttagtgatataagcttagatgaatctatacacgcaatagatttatgtgtaaaagatttcaaaggttactgtaaaagtttatag

SEQ ID NO: 303285 - DNA, 516 bp, Proteus mirabilis
atgaaagatagaatcaagtttaacaatgccatgttagcggccgtcatggatgatagaaaggtgcagacacgtagaccgattgagccacagccaaaagtgaccgaggaagagttacgcaagattggtgcatggcaagaaggttacacactatcagagcaagtatgcgcagcatggcgtcatggatttgttgatgttgattgcccgtatggtgaaactggtgacatcatcaacgttgcagacaaagacggtaatatcaaagggaaaattgaaattactgatgtttgggttcagcaagttcaggagatatcacaggatgatgttatcgcagagggaattacaactggtaaatatggaaatgaaggtaactggttaactggattttatgtgccaaatagtaatcagccatatcaaacggcaaaatcagcattctgcgccttatggcagtcaatatatggcgtagatggtttttataaaaatccttgggtgtgggttattgagtttcgcaaagtagactaa

SEQ ID NO: 303286 - DNA, 219 bp, Proteus mirabilis
atggtgatgcacattaaaattaatgagcacgatgcgatagaagttggtaaatatccagactgcttagaaataggttttattgatgaacgctgtaattgtggcgatgggtcatgtgaagccaaagttcacggaggtgaatatatgaatattccaactaagcaagtatcagaattaattaaagaattaatcaggctatatccagattgggacaaggaataa

SEQ ID NO: 303287 - DNA, 354 bp, Proteus mirabilis
atgcaacctaaattagtttattcacctttgagcgtggatgggattcgctttagcctttatagcaatcgcgacatatttttagaaactaaaattcacgaaaaaagaaaggttgatactttaattttcgctgactctgggaaaccctggataccaaaacataagaactttaatagcttatgcaaacaaatggttcgtgaaggtgattttatcgaaattgaaaaggaattagagaagcacaggaaattaaagtcatcagtcaaagcaagatcatttgatgtttacaacgcagttatctctggtgatatgcaattagcaacggaaatttgccagaagattcaaaagcaaaacaaataa

SEQ ID NO: 303288 - DNA, 540 bp, Proteus mirabilis
atggcaagtaaaggcgtaaacaaggtaattctcatcggccacttggggcaagaccctgaaatccgctatatgccatcaggtggcgctgttgcaaatctcacattagccacatcggaatcgtggcgtgataagcagactggtgagatgaaggagaaaactgagtggcatcgagtgtgcatcttcggaaaattagccgaaattgcaggtgaatatctgagaaaaggaagtcaggtatatatcgagggctcactgcaaaccagaaaatggcaagaccaaagcggtcaagaccgatacacaacggaagtagtggtcaatattggtggaacaatgcagatgctaggcggtaacggtggtaatcaggcaggaagccagaagccacagcaaaaccaaggatggggtcagcctcagcaaccgcaagcacaaaaacaagcatcgagtaatcaaacaccacaaagcgagccacctatggattgggatggcaatattccctttgcccctatcggactcccctacccacgccacgctatttatgtgatttaa

SEQ ID NO: 303289 - DNA, 555 bp, Proteus mirabilis
atggacttatcacgcacaatcatcccaaagtcagatcagattaactttgaagatgttcaaaccacaccaattaccgccgttattaaatccgttcgcgaaggtacgagagatcagcctgtttttatcgacttagtaggttatgacggcaggccatacaaaccatctaaatctatgcgaagagtgcttattggaggctgggggaataacggccatgactgggttggaaaatctttaacgataattggcgatccatccgttaagtttggcggcgtagctgttgggggtataaaagtttatgcaatgagtgatattgagtctgatttttcaatgatgctgtctgtttcaagaggtaagcgctcagagcatagagttaaaaaactactgacaaaccaaatgatgcttgccgatttcacattaaaattaaccgagatgtcgccagaacatttcgaaaaatcatatcagtggcttaaaaataaattttcaggagatgatgaaaatcttgagaagctagaggttgtttacaagagccataaatcagatatggagaacacataa

SEQ ID NO: 303290 - DNA, 825 bp, Proteus mirabilis
atgaaacccggtgtctataacaacatttcaaatgaggactatcacaaggatgaagcgataggttcaacatcagtcaaggccatcagtgttagtccagcaaacctttattttaatccgtttaaaggaagtaaatcagcgcaaattggaacagcaattcatgcggcactgctagaacctgatgtatttgaaagggattttatactaaggccagatattacagatagaagaacaaaggagtatgtatcactaaaacaagtctaccatccagacaatatttttataaacggagaggtggaaacaataacaaggatggttgagtcggcaaggatgaataccgactttatggactacatggaaacaaaagggaattcagaagtatcgatgtttgctacatgtccaataactggattaagactgaaatgccgatttgatagattatctgactctctaccctacccgcttgatgtaaagagttgcatggatgcaacagagcgaggctttagtcaggcgtttggtaaatatcgataccatattcaagcggccttttatctgtacgttttaaagctaactacagggatagagttagaccagttttgcttctttgcacttcaaaataaaccaccttataccaactgtatgtatttcatcggcacggaatcgctggaacttggctataagcatatgcacgaagcattacgcaaaattaaagaatgcattgatgacgaagcgctacgaactgaaggaatagttcttccaccgagcgaaatcaatgttcccaattacttattcgatgatgaatacttagatgatgaggtatttctctaa

SEQ ID NO: 303291 - DNA, 1377 bp, Proteus mirabilis
atggaaaataaattcacggattattactcagagcaggctgtcattgggggaatactgatcgccacatctgaaacagaagaaattgctatctcagcgattgaaagtttagttgctgacgatttcacatcatcggctcacaaagccatatttaaagccatgcaaagccttgttagaaatggatctaaggttgatttggttttactgaatggagaaattgaacaacaaggtaattcagatattactggcgggttcggctatcttgctgaatgcactaaaaacacatcaagtattcaaatgttacccggttatgttcagaaaattaaggatctaaccacggcacgcaaaacgcttgctgttctcaatgaaggtattgcgaagattagctcatcaaacgttagcaaccttgttgatgttgttggtgaggtacaatcctcaatctcatcaatggacacaggcagtgttgttgaaacacagcacatcatggacggagtgaacgagtcgataaatattcttgagtcgatgatcaacggtgatatctggaaatataaaactcagtttggtttacctgatatcgataagacatttggtggatttaataacaccgatttgattgttgttggtggccgtcctggtatgggtaaaaccatgttcagtacagcaatatcaaaagcaattggattgaagcaaaagaaacccgttgttttttatagtctcgaaatgccgtcatggcagatatcagaacgcatttcatttcatcacgcaggggttaacaagcaagacttactcggtgatgataaatcgaaaatcaacatggatgaggcttgggctaagttatctcatgcgcttgctgacattcaagaatcaccgatttatatcaatgaccgaccatcaatgagcattcatgaaatacgtgctgacgctagaaagatgcacaaaaaaacgggtggtttaggtgtcattatcgttgactacttgcagaaaatgaaaatgaccaaccctgaaaatatgaatcagtcagtaggtgaaattgcgacaggattaaaaaacctagcgaaagagcttaaatgtcccgtagtcgcacttgcacagttaaaccgtaacttggagcaacgaacaaacaaacgccccgttaatgctgatttgagagagtctggcgttattgagcaagaggctgacgttatcttcatgatttatcgtgatgaaaaatatcatcccgacaccaatctgaaaggtatcactgaggttatttgcacgaaatcacgacacgcacccggtgcagaaaaaacatattacttcactaatgctcgcggtggtttagatcaggcggtattgagcaatataaacagcgactacttagatgaagaaattgagtgttaa

SEQ ID NO: 303292 - DNA, 228 bp, Proteus mirabilis
atgaaaggaacaactagcgctgttttgatgtggatgtacgcatcagaagcaatgagccgaaagttaaaatatgtaaaaagcggtgggggaagagttgattacaatcgaacgttacataaaacatatcgcagcgaacgagtcttgtatcgcctaatgaaattagatgcagatgtgttttttaaatcgattaaatccagccatcaggagtcatctaatgcagggaactaa

SEQ ID NO: 303293 - DNA, 225 bp, Proteus mirabilis
atgacagacaacgtaaataacccaccacactacgcatcaggtgatattgaatgcatagatgccattaaagccagcatgactaaggaggcgtttctaggctatctcaagggcaatattcaaaagtatgtctggcgatacgaaaagaaaattaatccagtcgaagatttgaaaaaagcacgctggtatatggaacggatggttagtgagatggagactgataaatga

SEQ ID NO: 303294 - DNA, 288 bp, Proteus mirabilis
gtgaaaactaagacaacaaatatggagctggttaagtttgaaaagaatagctctgtattcacaaaaacgtatagcgttattcataataacggtaatacatgtttagagcagaaaattcatttgtccatggatgatttcggcaactttgatttaaacgttgagatggacggatttcctcgcattgatgatgaaacagacgctttgctcaaatacggagactggctagagcgattaggtgtcgctattagacgagaagctaagcgagcagtaaagaggggcgctcaatga

SEQ ID NO: 303295 - DNA, 459 bp, Proteus mirabilis
atgactgaaaataaagagagagccactaaatattatatcgagatagttaaaccgactgtcgatgaatttatgaatgacaaatgcagcatcagaaaaggaatgctggcatcaatcaccatgcatcacataattgattacttatatgatgagaaatcaaatcatagcattttcaaagtttcttccactgagtgtgatgcgttgaacatcattagagatgtctgcaatgcatctaagcactgtgaattaaccagaggtaacccatcaatcaaatcatcagaccaaataatacaagatgatgttccaagtttattttctgctccatttggagtgggtggatttcttgaagcaaattatgttttcgttaaactcaacggtggaattaatggagatcaattccaatgtttgtcagatttaataaaagaggccgcagagtactgggataaacgacttttgtcataa

SEQ ID NO: 303296 - DNA, 405 bp, Proteus mirabilis
gtgactagaccagcgcgcggtgaacgcaataacaacccaggcaatcttcgacacggagaaccttggcaaggactatcagcacagcaaacagatccgagcttctgccaattcgtatctacagagtacggtattcgtgcaatttatgtattgatgcgaacctacgaaaagaaatacggattatgttctatccgtgaaattattaatcgctacgccccgccaaaagaaaataataccgagggttacattcagcgagtcgctaaagaattgaatgtaagtacggaagattgtgtatcagtaagcaaaaaagaagttgctatcgcattggctacggccattgttggtgtcgagcttgggtaccaaccatacagtcagaaagtctttgaagatgcttggttgttgttatga

SEQ ID NO: 303297 - DNA, 381 bp, Proteus mirabilis
atgagtaaattaacatcgtgggttccaatagctttatttagcatcatgctagcttctttataccttgttactaaatcagtaatagagctaaagaaagaaaaccaatcactcactgagcaactctcgcgccaaaactcaatcacagaaaatgccaaccgcacattcaggattatcaataatgtctcatcacttaatagcgaagagcggaataggtcagccgtggattctgaaaaagttaaaacggttatcaaaactgttcttgtcaataatgattgcgccaatactactattcctagtgacgctcttatcaggatgcacgactattcagaaagaatacgtgccagtggagcacatagcgataccggcacacctaaccgctga

SEQ ID NO: 303298 - DNA, 564 bp, Proteus mirabilis
atgacaaaattatcagtcatcaataatgctacatctgaacaaccaactatgactagtttagaaatggttgattacatcaatgcagatagaaaggcaaaggctgagatagaagggttaagtttcccatgcaagaagtatagaaaattacagcataaggactttttaaggaaagtacctaaagtattgggtgaaaatcaatcagcgaaattttacgccgattacatcgacaataaaggtcgctcatacccgtgttgtaagtttcctaagcgtgaggcttgtttgatggctatgagttatagctacgaacttcaagcgcaagtattcgaccacatgactgagttagaagctgaatcagggtttggattcactattcagcaattacaacacatgttagctgtggcaagaaaagcctctgatgaagattcaagtgatgcaggtcgccgattacgcaaacgccaagatgatttagctatcttaaaccgcgctgaaaagttaattggtgacattagccagatggcattgggtttagttggtggcggaaaggtgctcactcatgaaaaataa

SEQ ID NO: 303299 - DNA, 693 bp, Proteus mirabilis
atgacgcctattttagaaatcggggagatggttatctctactgataaaaaggattacttatttagaccatcgttcatcaatatgacaagaatcggtgagcctaaacagattgtgaaagcctacggtcaattaaatggcgctgaggtgcaagagttaattgcacgcgccgtaatgagctacggggttattcctgaatggttaataaaagccattagcaagccaacatatgggcgtaatatcctacaaactgcaatgatggttatgcaggcgtgctgtgatgatgattgttcagagctcattggtgaatggagatcgggtaagcgcggtattgtctataaaaacggtaagatgccaatcgctgacattatcgtcattgctcgagaattattcactcacggaattatcggtaaagcgaagatccgtaaacttcaacgtaacgaaggcaaaaacgaattctcagatgagtttatggcaattgactacatcagctctgctcgtgcgcactttggtatgaatcgagaggaagccgaacagctaaccatgactgaatttcagatgatgctcaaagctaaatatcctgatgaaaaaggcttcaccaaagaagaatatgacaacatcatgaaacaagatgataaacggaatgatgaactgatcagtggtaagcgtcgattggtgagtaggaaacgtaaatga

SEQ ID NO: 303300 - DNA, 381 bp, Proteus mirabilis
gtgaaaaggttattattatcttcttttttggttttatctgccctaattatttctggttgcgcacaagaaaagcaaattaactacaaccaaaaatcatccatgctttcattaggaatggataaagatcaagtaagaacagttcttggtgaccctagaagaactgaagttaatacagaaagagaaagatgggtatattggggtaaagtttattatggatttactccggtagataacgagcagttatctcaggataggttagttgtgacatttcaagagggtaaagtgaccaagtggggacagcaaacgctttctgatgatgcattagagatgtcacaaaaaacaattgaagctactactaacgcaataaaagcatcacagtaa

SEQ ID NO: 303301 - DNA, 3408 bp, Proteus mirabilis
atggcacaagtaggcgaaattgtttatcaagtacagatggatgttcagcaactacttacatctcaacagcagttagagcaacgccttaatcgcatggatagtagctttaaccgaacgtctcagtcagtaaataacacagagcgttcaatgcagtctctatctaaagttgcggcggctctgactggttatttatcggcttcaatggttgctagttattctgaagcatggactgaattaaacaacaagctatctaactcagttcgtgcgagtgagtcacttgttgatgttactcagcgagtatttgatatctctcaagcaacgcgttctagcctcgatgccacagcaacgctctatgcacgattagagcgaggcacgagagaatacaacacatcagcagcggacttggcaaaattaacatccatcatcaaccaaggctttatcgtctctggtgctactgcacaggaagcagaaaatgccattattcagctatcgcagggtatcgcgtctggcgttctccgtggtgaagaatttaactcagtggcggaacagggtagccgtttgatggttgcacttgctgactcgatgggtgttggtattggtcaactccgtaagatggcagcagaaggcaagctaactactgatgttgttgtgaaaggtttgctctctcaaggtgatgcgattggtaaagagtttgccaaaaccactcgaacaatgtcacaggctttccaagaggctgggaacaacctaaccaagtttctcggtgaaaatacaacaataaaatcaaccattagtgcgtttagtgatgcggttattacggttagtaagaatttagatgagcttagctctgtcttgacggtaattgccacagtggttggttcaagatatgttggcgcattagctatggctaccaagtcaaaagtgatgatggcagccgcctctcgtcaagagtcagtcgctacactgcaatcagcaagagcaagtgagtatgctgcaaatatgtcagtcagaaaggctcaggctgatttagcctccgctagatctgctgttgcccttgctcaagcagagtacaacgttgcaaaaggaaccttggcggaagcaaccgctcttgataacttaatcgctaaaaaatcattagcctcaaaagctgcaataacattaacccaagcaacacaagcgcaaacagcagcaatggcaaactcagcagccgcagcgagagctgcatcattatctatgggtttgttgcgtggcgctatggggatgttaggtggccctgctggtgtggccatgttagctggtgccgcaatctattacttctatcagaaatcagagcaagcaaaacaagaggctagagattttgctgatagcatagatcagttaacagtaaaattaaaagagctttcatatcaagagattgctagagatgctcaagatgctagagataaacaagagctactacgcctcgagatgaaagagcaggaaaaacagctatcagcattaagagctcaacttgaattacaaaaaactgcattaaaagaccagccagaacttattgataaaaacaccacaaggatcttgcgtgaaattacaaagcttgaaggtgatttatctacaaatagaaaacgccttgagttaaccacaaaatacctcacagatgctcaagatgaatacaacaggaaagcaaaggaagctattgacttaagtgttaagagtgcaacaactcttgatattgagaaatcagcttttggaaggttaacaactcagataagagaggcaactggagcaaaggaagagttcagtcttgtaaggccaaaacttaattttggtggtgaggaaggtgaaaagctaaaaaaacaaatggaagaaaggcttgctctatctaaattagagggagctgaaagagctaagctaaaagccatgtatgacgctaaagatgcagggataacagatcctgatgcaattcgtcatttacaagatttagcagctcaagagtacgaaaacactcaggcaaaaaaagaatcaattagtgctgccaaaaaagaagccacggaagctgaaaagctgaaacagaagatcaccgatgtagccaatgcgacaaaagttgctgaattagaaacaaaaggacttgctcgcgaggctgctattcttgaagccgttcaaaaacttggcagtaaagcaacgaaagcgcagattacagaaataacagagttggctgggaaggaatttgatttaaaccagaaaatacaagataggaaggacgctttctctcaaaatccagaagcaaaggcaaatcaagaatacaagttatctcttgagcaactcgaaaggcaacttcaaggtaatttggttactgaggagaattaccaaagaagaagagttgagttagctggtgagtattctaaaaaaatagctgaggcaaatgctcaagcttcagtttctccaattgaagataatagagctcagttcgatcctgttcagcaattgaaaaatgagaacgctaaaaaactagcgctgatggataagtattatgctgatgaaatggaaatcattaatcaagcgtatgcaaaccaacagatatcacatgatcaatttacaactgcaaaacaaatcactgacgctcaatacctacagataagaacagcacaggaaaagcaattcaacgaacagcaaacagccgcacaatggcaaatgttaagccagcaaagtttagggtttgacatgcttacatctgctgttgatgcaatggcagggagtgcatcaaacgctattactggattgttaactggcaccatgactgctgctgatgcaatgagatcactaggtaacacaatactaaacagtgttgttaattccattgttcaaactggcgttgaaatgctgaagaatttcattattggtaaaacaatgggtgccgccgccgctgccgcatctataggagaggcagccgttgttgcttctgcctgggcgcctgcagccgcctttgtttctctagctactatgggggctaatgccgcgccagctaacgcaagtttagtaggaactactggtcttgcttcaacattggcaattgctggtgctcgtaaaaatggcggacctgttgacgctggttcaatgtatcgagttggtgaaggtggtaaacctgagatattcaaggctaataacggtcgtcaatacatgataccgggtgataatggaaaggttatttccaataaagatatgcagggtgacggtatgaatgtgaatgttgtctttaatgactattcatctggtggccacaagtttgatgcacagtcatcacaagatggaaatacgctaactattcaggcgttcattatggatatggataacaaaggccctatgcttcaatccatcacaagaaacacatcggcaacagcgagagcaagaggttga

SEQ ID NO: 303302 - DNA, 477 bp, Proteus mirabilis
atggttattgattaccctgattggcttcctctggcacagaaagccgataaaagcatgacgctagatactggcttcttgacagatcaaccacaggtaggcgcacctatattccagaagctaactgatgatttaaaaactgtatggagtgtgaattggatatttacacttcaacaggagcgagcgtttgcgcaatggttgcgaagtcctaactatcttgataattgcaatcgctggttcaggatgaaaattaatcttggtggcagcgggttacaggagcaggaattgcattttgtttcctatccagtgcaaaccagtattaatggttcttctgtaacatggactggtcaggtcattagcaagaaactttataattcagatgatgaattcgacgatattattgttgagttcccgccatcatttgggagttggcttgatattatcgttactgagactctacctaagtataaggagttgtaa

SEQ ID NO: 303303 - DNA, 471 bp, Proteus mirabilis
atgactacactaagagagtatcgggcgcaaaggccaaacagaatactttatgagacgctgcaatttagtcatccgtcatttggcgatatctatctcgtgtcttatcaggtattcccaaaggttctaggtggggttgaatatcaaccttgtaatttcgaactatctgacagtcagcaaagcagaacgcccatcattgacgctagtgttaaattcagccgtgtcgcacaagactttaagcagaaacttaaactatggaaatcattcaacaggatgacacccatagaggctacttatcgcttgtttgatgagaaagacaaaggaacagcaattactcgatggaaattatttgtgaaagatgtgtcgatggatcatgaaagtgttactgtcacgctatctatgagcaacccattaaataaaaacattggacgcatttatgaaccgcaagaatggccgggcttggaggctgtatga

SEQ ID NO: 303304 - DNA, 393 bp, Proteus mirabilis
atgacaactcaagatttcatcaataaagtcatcggtaaaccatggaaaaacaggtcttgtacatttgatgctatggattgttgggggctcgtcgttctctattatcgacacgttctaggtattgagatccaccatgacgcaggctatgagtctgaaacggattttgttacttgctataaaaatgaagttgagttttgggagaaagtaaatcaaccagaaaataacggaatatttataggctatataggatcaaaacccactcacattggcttgattatcgatggtaacgcattacatagtcgaggtgaaaacggttctgtgagaatggataggttgattgtgctcgagaggaagttcactaagttggagtttatgaaatatgccaataattga

SEQ ID NO: 303305 - DNA, 2469 bp, Proteus mirabilis
atgccaataattgaaattcagcgtgtcgctggagtgccgaaagagagagtcgagataaaagccggctctcttttttttgattggttaaatgggcaaaactttcatcatgacgttgatatctatgttaacggcgtaaagcttaacgacgatggccgccttgactttattattagtgagtttcatcacattcaaatatttgaccaaccgaaagggattattggcgacattctaaatccagtgtttaagtttgtttccaagatattttcattcttagcacccaaagcaccatcatttagtgctgctgatgtgaatgcaaaggaaagccctaataaccgcttaactggtcaaactaatatagcaagaacatatcaggctagacctgaaattcacggacaagttagagcctttcctgatctcattcagcaatcaatgtttgaatacatcgacaataaaaagatggttactgaatggatgaactttggcatcggttactacacgattgagaatgtgaaatattcagagtctgagctgatcgcccttgatggtgccagttatcagatattccaaccaggtgaagtgatcccacagatattcgaggggtttgagttccctgatgttgacgggcaagaaataccgggtccgaatgaaagtgacgaaataccacaatatcaagctactgctaataatgttatttctggtgaaattaaaggtggtgaggcggccataaagatagagaagcaagatgagtttcgatacttcatggatatcgtaaaacctagatcagtaagccttgttgttaatgtgacttatgatactccacagggttcggttacaaaggatattaaggttgatgcctatttatccgatgcgaaagagagtgatgatggagctattatctcaccaaaatattactacgaattctttttcaccaatctaaccggtggtgatttagcgactcttcctcctaatgcaattgttaacacatccaagttcattctctatgataatcaattcctgacagtaggacctttcttttcccccttagatggtggtgagttatgggtgcatttaaacgcccagcttggtgatggagattgggctagcgcaagaattgaattctggaaagttgatgagaataacaatgaaatagctggaacaagagagtcattcaatagagggttcccatctgctccaaaaacaaaaacatactatctgacggaaaaattcaagccgttagctggatatggaagatatgcgcttcaactaactagattagaaaatagtaatgatcacagcattcttaagctagaggaagtctttattgttagagagagaataaacgaagtacatgaagaagatacacttgttaaggtaacagtgagggcaacagaggcaccaacgggaacaagagagcgtaaatacaacgcactggctacacgtcatgttattagttacgacatgaatagccgtagcgttgattatacattacgaccatcacgatcatttgctgacgctgtcgctcacacttggttagtcaccgctggacagccagaaagcaccatagatttatatggtttgtattcaatctatgaatcacttccagataagcgtttaggatattttgattacacgtttgatgatgaagatgtatcgctaggtcagcgtatagaaacaatatgcaatgttgctcgtgttatttcattttgggataacggcgtgcttacatttactcgtgaggaggaaaagaaatatccatctggcacttttaatagagcaaacacgacaggaaacggattctcgctgtcttatgatatgacaatgccgagtggtaatgatggtgttgaaatcgaatatgtaaaccctaaaaccaacaaaaagacctatctcaagtatcgtattgaagataacaaaatagttaacaagccagctaagaatcctaacaaaataaccattcacggttgtcgtaatgagtatcaagcgaccgatagggcgctattagaaatggatagactaataaatcagcgtatgagtatcagcgtgcaaactctcgcagatggtgattatgtttatccgggtgacttaattattgttgctgacacatacgataagaatcaacaggcgggttatatagttgagaggataggaaatcaattttcaacaaatgaaaaagttgcctttgatggtgagatgtttgtttgtatcactgatcacctaggtaatacgacggaaaggtttaaggctacaccaagaagcgataccgcttatggatttatcgctgacatacctgatatccagctaaatatctatgacggcatgaatgttcaatcgccatcacgttacgttatatccaatatcgttgaaatggactcaatgagatggattgtaagcgataaaaagcctaatgcagacggaactttcagcattacagcaagtgagtatttttctgcaaagaaagattacaacgtttaa

SEQ ID NO: 303306 - DNA, 1860 bp, Proteus mirabilis
atgtctacaattccaacacaaaatccagttccaagtgaagcaccgcgcgacctgaaatttaactcaggtaaaattgacgagttcgttacgtcaatgaaaaacaagtatatcgatagattcgggcaagagcattttacaatcgaagggttgcgctggatcgctcagcaagcaatatctcaatttggatatatcaccttagactcgttccagaaaggtgcggaaataacactacctaatcaagttttacgtgatgaagtaacgggggaatattaccgctgggatggtgagttgccaaaaatcgttcaaatagattcaacacctgataactctggtggtattggtgcagggaaatggcttagtgttggtgatacatcccttcgtaatgaattgaaaaagccaactggaagtgaccttgtaggatataataatgggacgttaaccaaatatattgaagaaaataaccgacatacagcaaaaacaatcatcaacgtcagtgcttttggtaacacaggaacagagcagaacgggagcgatgaggcctggaataatgcattttcttatgctctcagcattgcaccaaaatggaaaaataattatcctgccccccaggagtggtatgatttctccgggatagaatttgttgctgatggaccagtttatccgaaaacaagcataggcttcagaggcaccgtgggaggggttattaatcttacagttatagctcctgatgatattgaaaataacgcttatctcattgatatgtcaaagggacgtggaataactattgaccgagcaccaacgcaagccattatttcaggtgcgattcactgcagatataagtgcagtggcttaaatctgggaggtagcaatagctgctctacttttaatttattcataagtcaattcttaacgtatggaattgatactgatgcttcagatctttcaatcagtggtggtcacacaatagggcctggtactgttgttgaacaacggtcatggtctgctggaggggatgcagattttcctgatgtagtaacaacagggacggggatatatattcgttcacatgataataggctcatcggtgctacagtatcatactgtaaattacgatgcgtacgcattaagggacagagcaatagattagtcgcaggtacgcacctctattctgctggtaaacaagcaatactccacgaatcaacatctggtaacaccttgattgattcgtgttggttggatagctctagactgcaactcgatggtggttacataactatcaccaataacctaatttatcttacacaaggtactgattctgagaccggtattattactggaggcagtgctagtaacattctaataaagaataacagcttcttgggttatgtgagtggcaaccccgtatacttcggtaaaggcccattaagtgataagactattgtttgttatggtaatagatacttgccaggaatgaaaaatgccgatgttattacaaactttgtaccagggttagttggcgagagtactgcaggcacagtatcacttgatccaagttcaggattagctgttacctatgatggcgtttatgtgaatttcacagcaacgattcgttggtcttctttcacaggaggaactggagctattggtgtttatggcttaccctttgtagctgatagaattacaccaatggatattgtacagttcacaaataatgatttatttaaaggggtttcccccataaaacatactagtggaactagtttaagatttgtaaaacaggatggaaccaatgtcatggccaatgatactggcgcatcttcaggatatctgtgtatcagtggtagttatcgtccggcataa

SEQ ID NO: 303307 - DNA, 1641 bp, Proteus mirabilis
atgaatcgtattgacttcaacaaaattgccttcttaattgtggcatttttaattgtactcatcccttcattgtgggtgccaatgcaatcggatgattattcatactaccttatggggttgtcaccatctgcacatttggaacattatttaggatggagtggcagagtagtaacaaacatcattagcactactcttttaagcaccatgccacactttgtttatgaaactgttaacagcattgcttttgctcttttaactttatttattactgtcgtacctataactaacaaaaatagcaataaagctacctttttcgttagatctgcatttatatttgttctttattggatcgcaaatccaaaccttgggcaaacatcattctggattgttggatctgcaaactacatgtggacaaacatgtttattgcaggatactttgcctatttaataagatcagtaaataaaaacagattttgctctatctcattagcgctactctccttccttgcgggttgctcaaatgaaaacacggctactgtggtcgtgttggttacaattttcattgtgttttatgaaaaaacatcatcaaagataaaggtaatttcaatttccggttctttggttggtgccctattactaattctcgcccctggaaatagagttcgcgctagtcactttgaatactggaattcccttagctttattcagaaggtgcaaatccatttttttgataggtttccacaagcggtatcagagtactggcaagtttacttagtcatcatttccgctgtacttgtggcatctttttctgggacattacgcaagaacactatcgtctatatgacaatgttcttcgttgccagcatcctagcgaatgcggcttttatcggatcgccagttcttccaccacgttcaatgaacggtgcgctttgttttctgctgatttcattatcatttgccctagttgacgcaacaaattcgcgtgaaaaatttggttatggactgctttccgcagtaggtatgctttgcgcattctatttcctaccatcttattacttattcaacaaagcaatgcatgccacgtatgaacaggctaagattagagaaaagatcgtattaacagcaaagtctcacggtcaatctgatgttaagatccctgagttttacttcccacaacttgctaagtactatgatcgatttgatacatatcacagcaaagcactcgctcgttattatggcgtaaaatccacagaaatgtttaggattggtttcgattactcacagataaataaggccaaatatatttctgtcaacaaatcgttttttgttggatattcgttagaaaaaatttatttctacagtgaaaatcttggtatgaaaaatatggcattgctcgagttttccggcccaataaatcaaaaagcatctgctggggatcgtgtgtttatgcacatttacaggaaggggcattctggtttcatcaacgcagatgtggaagcttacccaacagtaattgatggtcgttacttcacctggagagacattgggaaagctaaactagaagatatcgaaaaaattaacataggaatttacaacacgaatactaaattacgaaagtttgaatataccataacaccatag

SEQ ID NO: 303308 - DNA, 147 bp, Proteus mirabilis
atgagcacacttcttatacaaaaaactgtaccttatgtaagcttactcaatcaaggtacagtttattttattcaatcaactcacgagttaaatcttgctaactttcttagcactgaaactatggctcatttcagtaattatctttaa

SEQ ID NO: 303309 - DNA, 573 bp, Proteus mirabilis
atgaaatatattattgggatcgcggtattgatgctgacggcttgttcaagtgtgcctgataaagcttattatcaattacctgatgtttatcaaggtgcaaataataaggttgttacaaccactgagagcgcaaagcaagatcagatttggattcagcctatccgtttatctgatatgttagttaacacgggcattgtctatcaaaccagtgatatcaattatatcgttgctaaccaacatttgtggataaacccgcttgatcaacagctacagcaaaatctggttgtgggattagcaaaagaattccctaatcgagtggtctcgacacaacctattgaagataaacttgctaaattgactgtcaatgttaattattttcaaggtcgatatgacggcaaagtgattattgctggtgattggatatacactcaaggcaataaagtgattagtcagcctttttctgtcgcgttaacacaaacggaagatggctatccggctctggtacgtacgctaggggaaggatggcagaatgtcgtcgctgagatcgcaaaaacaattaaatcacaatattaa

SEQ ID NO: 303310 - DNA, 498 bp, Proteus mirabilis
atgtggaaatcactaacgttatttttattattttcatattctcctatcgcattaagcaacactgttaatattaatgtatatggatcagtagtagcctcaccttgtgagttagaaacgaaaaaccacttaattgatttaaaaaaaatcaatattagaaatattaaaaatggtcaagcatcagactggatagatttttctataaaattaaaaaattgcccagttaatacagagaaagtcactatgattttaagaggccaaagtgttcctaattattcggaatattttattaatagtgggacggctaaagatatagcactaaatttagcaatgcaaaataataaaggtattgtaaaaaataatgataaattaatgacggctgttaataaatataaccataatgcggaatttgctttatcggcaagaatggttggctatggaaataatataacggtgggatcatttaagagccatcttgaatttactcttatttataattaa

SEQ ID NO: 303311 - DNA, 183 bp, Proteus mirabilis; identical to SEQ ID NO: 298826

SEQ ID NO: 303312 - DNA, 495 bp, Proteus mirabilis
atgtcatcagaaatctttttttcttttttagagataaaactattaattatagtatttttattactaaatattttattaaaaagtgtactagaatcatctttattctttaacaaagaggaaaataatacatttatatcattagcatcttttattcctgatacaattaccttattatcaagtatttttattttatcagttaatctttctttttcaataatatcttttaatttcttcagcctatctttttttttatttttttcaagtatgtatttttccagagcacatttcaactctaatgtaaatttaagaaataaaacttctttatctttattaacaatcataaagtctctattactattgcttataagtaaagataaatcttttattcctaaagaaatatcatcttttcccaaagagatgttttttttattccctatagagagcacaaaagttttatattcatcatcttttccaaataatttcattgtcatttaa

SEQ ID NO: 303313 - DNA, 141 bp, Proteus mirabilis
atgcctaccattattcttataggtgattcggatacaggccatgatcatcatggccctaccaaagtcatcacaggttcatcaacggtaaacttgttgctcgagcaaaagctcccattagttgataatgtaggtatgaaatga

SEQ ID NO: 303314 - DNA, 924 bp, Proteus mirabilis
atgaaatatcattccttattaaaaaatttattttatgcaacattttccatcatggcgttaaattttagtggcgtcactatggcaaaaaataccatgaatgatatttatgttattaatttatcctcaaataatgcagtttgtggcgtaaaaattaatgaaatgttagtaatgcataataaaaaataccctaaaggtcattattccgctggtcaaaatatctctagcgtgcttgaaaatgggaaaaataccttaggtataattatgtttaatggatcggtttttactggtgaagaaaaacttacctctgatatgtggtgtgaagtcgaacttaagaaattatctgcaaacggcgataacatcttaatatcgggacttagattaaacggaaataatgatgggaaaatggtggtctctgataaatatcaaaataacagtgagcaaatctattttggtgaccccagtagagatagtgaatttgatgttttagaagcaaaaaaccaatttaatatacaaggtctcccccaatggcaatgggaaaaagcaactcccgttactgaagacgatattcctaaaattcgtgctttttatgccgaactacgacaagcatttattgataaaaatctagataaattaaaaactatgggaaaaatatcgtgggaagaaatggcctatgccgataatggctctcctgatatcttttggagttctttagagtttaaagagttactcaaggatggatataaaccctcagatatagattggaatcgatacgaattaaatacctataacaataaccgtttgtttcgctatgaaataggatttaacagattatcgccaataaaacttgttaatcctgaagagagaacatttcattataacccttacctttctattattgatgggaaagtgactattgtccgataa

SEQ ID NO: 303315 - DNA, 273 bp, Proteus mirabilis
ttgagaattcagtccatcacagggttttctgatggtagacctattggtaatgagttgtcggtaggtgttcaatgcgcttcactgtgtcgagttgtcggatattactccacaccaacatctccttatcaacatgccgttattgaagtgggaagttgcggttcaggcactaaaattgtaccaatgcgatggcaattaacggtattaccggggcctagtgcaaattcaagtacggacgatgtggtacagtatattgatattaaggattatcaataa

SEQ ID NO: 303316 - DNA, 1212 bp, Proteus mirabilis
atgaagcttacggatatggtaatcaagaaggcgaagcctaaggatagggcatactctcttgctgatggaaaagggttatcattactaattgagcctaatggttctaaaggttggcgttttcgttatcgttttgagagtaaggctaaaatgctttcttttggcatttatccagaagtgactttattgatggctagagaaaaacgtgaagctgctagaaagttacttatggaaggtattaatcccagcgatgaaagaaaagctaagaaagaaaaaattgaaaggaaagtaactcattcttttgaaaatgtagctagagaatggcataaggcaaaatctgatagatggtcgttaaagtaccgtgatgaaatcatagatacatttgaaaaagatatttttccatttattggtggcaaagaaattgcagaaatagcgcctttggaattactggaagtgctcaaaaagattgaagcaagaggggcgttagaaaaaatgagaaaagtgcgtcagcgatgcggtgaagtctttaaatttgccatagtgactggacgtgccaagtataatcctgcaccagatttagcaagtgtacttaccccgccaaagaaaaaacatttcccttttttaagcgctaaagagttacctttctttttacgtgatctatctggttatacggggagttttattactaagactgccacaaaaatattaatgttaacggctgtgagaacgcaggaactcagatttgctaagtgggaatatatagacttagaaaatgggatatgggaaattcctgctgaaattatgaagatgaaacgcccacatgtagtacctctttcatttcaatgtattgaactttttcaatccctaaaaccaatcagtggaagttacccattagtatttattggtagaaacgatcacaataagcctattagtaaagaaagcattaatcaagttattgaattattaggatataaaggaagattaacagggcatggatttaggcatactatgagcacaatattacatgaacaaggttataatagttcgtggattgaaacccaacttgctcatatagataaaaactcgattagaggaacatataatcatgctcagtatattgaaggtcgtagagagatgcttcaatggtatgcggattatatggatgcgttagagaatggtgagaatattattcatggtaattttaaacgtgcttaa

SEQ ID NO: 303317 - DNA, 921 bp, Proteus mirabilis
atgagtttagatattttagaaaataggaagtggctaaatttaaaggaaactgttcgattacttcaaaaaaaagtggatgcgtcaatccgcttatctgatgtggcaaggttaattgcagataaggatataaagccctctattttcttccgtacacctgtttttgccagagaagtcaaactggaagaaaaacctctttcctatttattagcagaaatagaaacggcattatcctgcaatcgccatttgttgagtgaagaaaccattattgcggaaacgctggtcacacacgccacacctattaatcaaaatattatccgtataaaagatgtatggtcagtattacccgtaggtattacgcttcatgaagcagagagaatatatagcgaagaagagcagttatcatccccttgtcgttctctttacgatgtaaaagggatcattgtgagtgatttagataaatactatcaaatcgtcactccttttgatgttaagcgagaattgatggaactcgtccaactgactaaagcgcaaaatatcacggataatggttttttgaatggtcatattgctaaattgaaagagattagggataaattagaagcaaatagcgcttatgaatcactgatgccctgcatttcattacctcctaatgcttatttagcgttaaaaagagaagacattaatgattttattcattcatggtgccagccagataagaaaatatcatctaaaacagcaaatgctcaatctgagtttatttatggattaatccgtactcaatacggcattgatgttgcagaaaatcccagaagacatattgaagggaaagcaggcgtgatacgtctcgcttttgagaaagaaggattatctttgccgagtgggaatactgtttctggctggataaaagatattatttcgtaa

SEQ ID NO: 303318 - DNA, 210 bp, Proteus mirabilis
gtgtctactcaccaaacacaaaaagaaaccctcattcgattaccagaagttcaacgtcgtactggttacggcaaggcgtggatataccgattaattaaacgtggtcaatttccaaagcaggtaaaaacaggtattcgtgcggttgcttttattgaatcagaaatagatacatgggtagccaataaaattgctgattcgagaatgaattaa

SEQ ID NO: 303319 - DNA, 861 bp, Proteus mirabilis
atggataatatttctttttataaagatgaaaacttacacgccattgcaaattacaaagccattccatttaatgaaaaacatgaggacaatggttttattattcgtgttattgaactatttaagtttactcaaattaaaaatcaattaacacgactacaagaacttacagggttaacgttagataatatcgaaccctcagtagaagaagttattgcattaattgaacgagggaaagctatttcaaagcgaaatgaagaaatcgttactgaattatcaaagaattatgatttagctaaaaatataaaagaaagagccgaagaaggtgggcttacaaaacctaaaaatgccatatcagtacgggcttggaaagaagatattattgccgacgttattcgctgtaaaggaaggcttaatgatgcaaaagaaacgctaactaatttcaatggtgtgtttggattattacgttttattattcaatcacttgaaagcgtaaaggaaattaataaaaaacagcttaactgtatcccaaatgaagaatacaaaagccataaatttaattcatatttaagaaataatacttgttgggaatttaaagatgcttataaatatattgaatcatcttttgaaaaactgaatgaaaacatcttacatattcttaattcttgcacactctctaatgatgggtacaaattgcgaaagtgggaacaccaacgaggtgtagagctatatcaatattattacagtcagacagattggattataaaatctattttgagtgcagaagattatgtgaattatattctagctcaagagaaagaagttcacgataaaaaatatttaatgactaaatcatttatttaa

SEQ ID NO: 303320 - DNA, 510 bp, Proteus mirabilis
gtgttgcatctcttcaaatggatgggctatattgttggcgcgttagcaaaatctaacgtcaggattggaaccctgaatcagttactggcgacacatgacgcgcctagcgtctttttttgtgtttatatctgcgcaccgataaaaaatacggtattataccgtcctgattcaatggtggcgttgatagggcaaccgcaaggttggctggattccagtaactccagtagttccaaccctgtcagcgtcaccacccttattgagattggaacctctggtggtgactccttaactaagttactggagatcatcgttatgatggctatccctacccctattcaaatcaaattcttatttttgagcgttaatcgaacagatagcaaggctaaaccttgtcgtcttgaaattacagcggttaacgagcaagaagctagatcaaaatattcttccgattatgccttgtattttgcaggacaaattcccttacatgacacaagagggaatgcacaatga

SEQ ID NO: 303321 - DNA, 228 bp, Proteus mirabilis
atggagcatgtttatatcaagccagctacccccagattgaatggaaaggtagagcgttctcatttaacagataaacaagagttttatcaattaatcgattataaggatgatgtcgatttacatgaaaaattagctgaatgggaggctttttataattgtcatcgccctcactcagcgcatgctggtaaaacaccgtatgaagtgttaaaaaataagcttggtctttaa

SEQ ID NO: 303322 - DNA, 483 bp, Proteus mirabilis
atgagtgattttaaattttgggggtgggataaaaaaccacgaacgatgctgaggtttattaaacccggagatatcttttgctttcaattagacggtaatacatatggatttggacgcattatatcaaaggtgcatatagggcacgtgggagagatttttgacttcaattcaaaaattccaaatatttctgaagttgacatcagttcagcaaaaagaaagctccctcctcttgtattggacacttatagcttatttgataagaaaatagaaaaaggaagtgactggcgaataattggtcaccaaatcaactacactcctactgatattgacaatgtgtattttacttatggcgttgaaaactcatgttacaaggttgatatatacgataatgattatccaataacagaagctgaatcgcaaaaatatccaccattaagcccgcattctgattatcaggttagagagttattaggagttacctag

SEQ ID NO: 303323 - DNA, 441 bp, Proteus mirabilis
atgcttagtcgaatcaccatgttaacaacaagttttcttttatctgggtgcatgtcttcgagtgttgttcctagcaaacaacttgaacgtcctcaaccacaagtaaatataccaacaaaagtgttaacgattaaactagatattgggaaaactactcaaaaagaaaccatagcactattaggaactcctacagatatttcgtcttacgatgctaacttatatggtgaaaacatgaatgtacttgagagccatataggtaaaggatacgaatataattcttgtgatatgggccgagcagagaaagctaaagttgtaataaaaacacttgtggtggataaaaatgcaccagatttagaatatattgtcgaatgtaatacgacaagaaaaacattatcactatctttttttgatgggaaattgagtcaatattcatattattga

SEQ ID NO: 303324 - DNA, 249 bp, Proteus mirabilis
atgtttagttttgataaaatgataactccgtctataatcactattgtttatagaatattcatatcacttagcattttaggcggtcttgtcactattttttcaggtgggatatctctttggcaattgtttataaccttgttaggtgttgtagttagtattttatttataagaattacatttgagatgattatagttatattcgatatattaaaaacgttaaaagaaataaataacaagctagacaagtaa

SEQ ID NO: 303325 - DNA, 228 bp, Proteus mirabilis
ttgatatgggtagactctgaagttatggaggacggttctatcttcgtgagaacgtatcatcgaactcactctaacgcacctaaattcgctcgtaatgatattgacggctataatgacagcgacccaattgatatcccttgtggtcgtttcatttccgttcgtgtacagatgccagaccaatcaatctataacgtgagaatgcgtgagatggaagaagcgcgcagataa

SEQ ID NO: 303326 - DNA, 1128 bp, Proteus mirabilis
atgagcggacgacttcgtaaaaagaatattgatatacccaatttatattcaatatatcatccaaggatgaaaaagatatattggcgataccgacacccaatttcaagaaaatttcattcattaggagatgatgaagcacaagctaaacagatagctcttgaagccaataaccgtatagcagaacaaagaacacgccaaattttaatcattggtgatagagttgctactatgaaagatcaatctatctctgtttctacatggttagatcgctattggaatattcaaaaagaacgtttatcacaaggtgagataaaacttgctacatataaacaaaagaaaaaacctatagatctgatgcgtcaaaaattggctttatatccattagcaaatataggtactcgagatctagtcagtattattgatgaatacaaagcaataggtcaaatgcgtatggctcaagttgtaagatcggtttttagtgatatttttaaagaagcgcaacatgctggagaagttcctcccggatataaccctgctctagcaacgaaaaggccaagaacacggatcaggcgacaaagactcactctagatgaatggcataaaatttatgatattgccgataaacaacatcgttatatgggaaatgcaatgctacttgccattgtgacgggtcagcgagttagtgatatctcacgtatgcgttttcaagatatttgggatgatcatttgcacatcatacaaagtaaaacaggatcaaaagtagcaataccactttctttacgtaatcaagctattaatgtatctcttaaagaagttattgaacgatgtcgtgatcgtattgtaagccattatttagttcattatcatcgaactacttcacaatctaaacgtggcgaacaagttactgcaaatacgttaacgactaattttaaaaaggcgagaaataaaacagatattgattggggagaaggaacacctgcaacatttcatgagcaacgttctttatctgaacgtttataccgaaaacaaggtattgatacccaagccttattaggccataccacacgtttacaaaccgatcgttataataatactcgtggaaaagagtgggtaaccattacctgttaa

SEQ ID NO: 303327 - DNA, 306 bp, Proteus mirabilis
atgactctatatcattttttggatttttgtatagattattcttatatgaatttattgaaaatactctccaaaaccaccctaacccaaactaaaaatcaaccagttacatacaaaccaagatcacataaaaaaagattgtcaccaccaataattataatttatttaataagttacgaaattattatgggtataatgttacgccatatgggttggacagaagccgctgactttatcattaaaggtatggacggcgctaaactgctgaaatataacgaatttggtgacgaaattatcaaacatatgtaa

SEQ ID NO: 303328 - DNA, 630 bp, Proteus mirabilis
ttgtattataatcgctttcgctattatgatagggaaacagggcagtatctttccccagatccgatagggttattgggtgggctgaatccctatggatatgtgcattgcccgacggggtgggttgatccgtttgggctggcgggtggtaaggggaataagggtgctccagtaacatctagttttataaatgatgatattattaaccattccgcaaaaggagattggaaagaagctagctctatgcctccaagagatagaaaaacctttccaaatggaagattaagtggtggaggtcatggtcaatcagctatattagaactggaagcaaggggaatcctttataatatagagcacacatatccaaatggtgttcgagtgggaaatataccgagtcacgcatcgaaagcaaaacgctcagggacagctcagtcatggtttcctgaaaactggagtgacgctgatattaaagatgcagggcaagcaatatggagatcatcgaatagtgtccgagttgatatgccttctgggggagttatggtctcaggtacgcataatggtgtatttattcgtgttgtccgcgaccctaaagggggaggctctatattccctgataacacaattcaaccatga

SEQ ID NO: 303329 - DNA, 219 bp, Proteus mirabilis
atgctaaacaacaaagatattattgatttattagataaagttgagcaagaggtttcttatattgagagcaaattacttggcagtaagcagtattctggagttataaattcaaaaacaactgaaattaaaaacctcacaaaggaagaatctaatttatatagaatattagaacttgtacgagaaacaaaaagaattttcgaaaataaattagataaataa

SEQ ID NO: 303330 - DNA, 1026 bp, Proteus mirabilis
ttggaagatcaagccattgaccttgatgcgattagtgcacaatctattggtctagttcgttctattctgaccatgattgcacttgtgtccatgattttactctggtcagagctcaatacagccttctcttttgtcgataatatccgactatgggatgtgacttcctccgttaatggcgtcaatactatccagcccattaccatggggtctatcttagtcgctatattagtgattattatcacggcacaattggtaagaaacctgccagcactgcttgaactggcaattttacaacacttagatctaacacctggtacaggttatgccattaccactttaacgaaatacagcatcaccctaataggcagtattgttggtttctcattattaggtattgagtggtcaaaactacaatggttaattgccgctatgggggtaggtcttggttttggcttacaagaaatttttgccaacattatctcagggttaatgatcttgtttgaaaagccaattcgtattggtgataccgttactatccgtaacttgactgggaatatttctaaaatcaatacgcgagccaccacgctcaccgattgggatagaaaagagatcattgtgcctaataaagcatttattacagagcaatttattaactggtcattatcagactctattacacgtatcgtaatgaccatccctgcgccagctgattgcaatagtgaacaagtgaccaatgttttattagaagcctctaaacgctctaccatgattttagacaaccccgctcctgaggtttacttggttgacctacaacaagggatccaaatcttcgagttacgtgtttatgccgcagaaatgggacatagaatgccagccagacatgagatccatcaaaatattctgctagcctttgcagagcatggcattccattaccattcccgccgttccaagcacgggtagatatggtgggtaataccattagtacttcaatgcgtgcaacaccaagagaagtaggcggattgtag

SEQ ID NO: 303331 - DNA, 369 bp, Proteus mirabilis; identical to SEQ ID NO: 294279

SEQ ID NO: 303332 - DNA, 420 bp, Proteus mirabilis
gtgcattgtccgacgggttgggttgatccgtttgggttgagtggaacgtctcaattaaatgcatttcaaaatgctaatttcgccgactcccaaaaattaactcagcatttcgaaaaacatggccatgagttcagagctacttcagaagctgaatatttaaaaattggccgagatgtaatagaaaaaggtcataaagttgagtactattacaaaccattagaacaataccgtactggctatgtaatgtacatgagaaatacgaaaagaggtgatgtacaaatggcatttgtaggtattaaccctcaaggtcagatagcaactatacacacaaaaagtggtaaagacgtttggaaattactcaatggtaataaagatgaaaaagttatcaatcttatacctagagatgctaatgggttataa

SEQ ID NO: 303333 - DNA, 477 bp, Proteus mirabilis
ttgtattataatcgctttcgctattatgatagggaaacagggcagtatctttccccagaccccatagggctattgggtgggctgaatccctatgggtatgtgcattgtccgacggggtgggttgatccgtttgggttggcgggtgattgttgtgatgagttactagttcttgctactaaccctagaagtaaaacagttcaagagatggctgaagatttagctaatcgaattaatagaaatacagtgacattttccacaccaacaagcatgggacatattgatttaagaggaagatctcactttgataaagtgacacaagctgatattccaacaccacatgttcaagtttcaccaattaacgttgctcctaatggaaatcgcttccctcttaaaaaactagaagcggcaaggccagccacaaaacaagatattagaacagcggaaaaactagcagaaagacaagggcttttaaaatga

SEQ ID NO: 303334 - DNA, 615 bp, Proteus mirabilis
atggctataaagaagaatgtaaaacttgataagaaagattatctaagggctttactatgtgatacacagccaggtgactgtcccatcatcttttcaaatgatgggttatatttgaatctgaccaagtttgaaagtcattataaggaggtttcgcttttcactcctctttcttcgttcgtaaagaaaattattaaccctgctttggatttgtctctaaacatagagtttagagaaaaggaaaagaaaaaacaaagtactccgtttggctattgcattgtcaaggatgcttttagtttaagatatctttctttgattcacccgaggtctcagattaattattgtgagttttataaaaattactcaactgttataacattaaattcgtcaaaaagtaattattctataagatatcctcgaaaggtcgcaaattcattcttcttatatgaaaataatgcctcagaaaaatataaaggagaggatattgagactacaggagatgaattaatgagaaagtattcatcctcttatttttcttatggcggatttaataggatatataagttatttcaaagtaaaatgttttttgatataagacttatttttcaaagcccatga

SEQ ID NO: 303335 - DNA, 162 bp, Proteus mirabilis; identical to SEQ ID NO: 49400

SEQ ID NO: 303336 - DNA, 225 bp, Proteus mirabilis
atgataaatcaagaatgtatgtttacctatcaaaataatatttataaagaatttaaaccacataataaaggtaattataaaaaaataacaatagctaatccttacaaaataaaaaatgaattaattactttgggttataacgaatctaagatatatccatcaatttctggtttagctaattcattagttcataatcacgcgaacgatttttatcgttggtcttga

SEQ ID NO: 303337 - DNA, 282 bp, Proteus mirabilis
atgctggtactggtggttgaccagctcggccagggccgccgaataggtctcgtcgcggatgtgccaggcttgcagccaggacagcttggcgtaggtcagaccggggctcgactcggccatcttggtcagcccgaggttgatcgcatcaccgaggatcgcggacagcagcaacgtccggtctttggcctcggccccgtccttcaggtgggtgaagtggcggctgaagcccgtccagtcgtccacgtccatcagcagttcggtgatcttgatgcgcggcagtaa

SEQ ID NO: 303338 - DNA, 408 bp, Proteus mirabilis
atgggcgcggacgtgcttgatgttcagggtgccgccgatcagcggccgcagcgtcgggtaggtctgcacgccctgcggcacgtacagcttggttttgccgaggtcgcggatgcgcggcgcgaaacggaagcccagcaggtgcatcagggcgaagacgtgatcggtgaagccggccgtgtcggtgtagtgctcctcgatccgcaggtcggactcgtggtacagcaggccgtcgagcacataggtggaatcgcgcacgccgacattcaccacgcgggtgctgaacggcgcgtactggtcggagatatgggtgtagaacagccgtcccggctcactgccgtacttcgggttgacgtgtccggtgctctcgccccggccgccagcccggaaacgctggccatcggaggatga

SEQ ID NO: 303339 - DNA, 291 bp, Proteus mirabilis
gtgctcccagcccagcggcgacaggaattgcagcagctcgccgtccaccggcttgccggcctcgaccaacccctgggtggcgcgctccaggtacaccgtgttccacagcacgatagccgccgtcaccaggttgaggccgctggcccggtagcgctgctgctcgaagctccgatccctgatttccccaaggcggttgaagaacaccgccctggccagcgagttgcgcgcctcacctttgttcaggccggcatgcacgcggcggcgcagctcaacactttgcagccagtctag

SEQ ID NO: 303340 - DNA, 681 bp, Proteus mirabilis
atgaatactctattagttaaccagttacaaaaaaaactgggttatacttttaaacaaaacgaattacttttacaggcacttactcaccgtagtgcaagtagtaaacataatgaacgcttagaatttttaggtgattcaattctaagttatgtcattgctaatgcgctttaccatcgtttccctcgtgtcgatgaaggggatatgagccggatgcgtgcaaccttagtgcgtggtaataccctcgctgaactagcacgtgaatttgaactcggtgaatgtttacggttagggccgggagaattaaaaagcggtggttttcgtcgcgaatctattttggccgacacagtagaagcgttaattggtgctatttttcttgatagtgatattcaaaatatcgaaaatatcatcttaaaatggtatgagaatcgcttggctgaaatcagtccgggtgataagcaaaaagatcctaaaactcgcttgcaagaatatttgcaaggacgtcatttaccactaccttcttatgttgttgtacaagtacgtggtgaagctcatgaccaagagtttacgatccattgtcagataagcggtatcgaccaacctgttaaagggatgggtacaagccgtcgtaaagccgaacaagccgctgctgaacaggcattaatacaattggagcttgaatga

SEQ ID NO: 303341 - DNA, 345 bp, Proteus mirabilis
  misc_feature (301)..(310): n is a, c, g, or t
atgtctcatgcacaaagcggtattttagtcgcacatagtaaattcggtctatttattgaagcaatggtggtgggggaaattgatcaactacgtcaaggctgccaacaatttatgcaatcccttagcgaattacaaaaacagtatcctgatgcttcattaggtgccgtagtagcttttggttcagatctttggaaaaaattatcagataataatagtgcgccagagttaaagccatttcgtccattaggcaaagggttagctcctgcgactcagcgcgatatacttatccatatccaatccnnnnnnnnnngctttttcaaacgctccccatgcgtcatgatgtga

SEQ ID NO: 303342 - DNA, 297 bp, Proteus mirabilis
atgataatttgtgtgtatcttataattatttccttagtagtaaagttaaaaataaaatataatataaaatatattcatgattataatttttcctttaataaggaaggtctaaagtattatctattttcatttttaggctcttgggaagattatatgattttatccaatattatctatatgagagaattaccgctattgcaagccaagagaagagatggctatgatatagaaatatttaattcaggtaaattagataaaaacatttgttctttaaattatcttatccctataatttag

SEQ ID NO: 303343 - DNA, 540 bp, Proteus mirabilis; identical to SEQ ID NO: 297523

SEQ ID NO: 303344 - DNA, 663 bp, Proteus mirabilis; identical to SEQ ID NO: 36646

SEQ ID NO: 303345 - DNA, 333 bp, Proteus mirabilis; identical to SEQ ID NO: 36645

SEQ ID NO: 303346 - DNA, 2652 bp, Proteus mirabilis; identical to SEQ ID NO: 36624

SEQ ID NO: 303347 - DNA, 2241 bp, Proteus mirabilis
atgaacggtaacaacgacaaagatttgattgaccatcaaggccaatccggagagtggattggtgcagagcatgaaactcccgcaaatgttacgcagaacatatatgttgccaatatgcaagtgaacgtagatgaggctggtgtcgaaccagaagcgcctagtgaggttattccctcagatatttccatgtctgaaagggagattcgtgacatgaaaaattcagatctcgatgggttgctaaatctgcactttaaaggccgtgtcgttcgaaaagatctgacaaagcaattgaaagaaggcgctaacgtccctgtttacgtgctggagtatttactagggatgtattgtgcgtccgatgacgacgaagttgtaatgcaaggccttgagaatgtgaaaaaaatcttggctgagaactatgtccgacctgatgaagcggagaaagtgaagtcacttatccgtgaacgcggcacgtttaaaatcatcgacaaagtaagcgttaagcttaatcagaaaaaagacgtctatgaagctgcgttgtctaacctggggatcaaggatgcctttgtaccgaccaaaattgtacaagacaacgaaaaattattaactggcggtatctggtgcattattaccgtgcagtatttctttgaggaaggtcagaagacatcacctttctccattatgagtttaaaaccgatacaaatgccgtccatgaacatggatgaggtgttttcaaccagaagacattttagtaccgatcagtggatggatgtgttgcttcgttccgtgggtatggagccaaccaacttagagcatcgggtgaagtggcatcttattactcgcatgatcccattcgttgaaaacaactacaacgtttgtgagctcggaccaagagggacaggtaaaagccatgtctacaaagagtgctcgccaaactcattgcttatctcgggtggacaaacaacggtggcgaacttgttctataacatgagctcgcgccaagttgggttggtcggaatgtgggatgttgtcgcctttgatgaagtagcgggtattcactttaaagacaaagacggcgtccaaataatgaaagattatatggcgtcagggtcttttgcccgtggccgtgattcaatcgaagcgaaggcttccatggtattcgtcggtaacatcaatcaaagcgttgagacactggtgaagaccagtcatctgttggcaccttttcctgatgccatgattgacactgctttttttgaccgtttccattcctatattcctggatgggaaataccgaagatgcgtcctgagtttttcaccaatagttacggattaatcacagactatcttgctgaatacatgcgtgaaatgcgcaaaagaagttttgcggatgcgatcgataagttcttcaaactcggtaataaccttaatcagcgtgatgtcattgctgtacgcagaacggtttcgggcttgttaaagctactacaccccgacgcacagtacacaaaagatgatgtaagagcctgcctgacctatgcgctggaaactagacgtagagtcaaagagcaattgaaaaagcttggcggaatggaattttttgatgtgcactttagctacatcgataatgagtcattagaagaattcttcgtcaatgtaccagaacaaggtggtagcaagctaattcctgaaggcttacctcgcgctggtgttgtgcacttagttactcagggaagcactgggcagcttgggttatatcgctatgaaacccagatgatggctggttctggtaaacactcagtgtctggccttggttcgaataccgcagcgaaagaagctgtgcgtgttggctttgattatttcaaaggtaacctgaatagaatcagtgcgtcggcgaagttttctgatcatgagtatcacctccatgttgttgagctccacaatacggggccaagtacaaagtcatcgctcgctgcattaattgcgttctgttcaattctgatgaaccgaccgattcaagagcagatggttgttttgggagagatgactttaggtggtgtcgtcaatcctgttcaagatcttgcaggcagtcttcagttagctatggacagtggcgcaaagcgtattttgctcccaatggcctcagcctcagatattccaacggttcctgctgagttgttctcaaaattccagatcagcttttatgcagaccccgtcgatgccgtgtttaaagcgcttggggttaattga

SEQ ID NO: 303348 - DNA, 2670 bp, Proteus mirabilis; identical to SEQ ID NO: 36622

SEQ ID NO: 303349 - DNA, 3618 bp, Proteus mirabilis; identical to SEQ ID NO: 36621

SEQ ID NO: 303350 - DNA, 3678 bp, Proteus mirabilis
atgaaaattgaacagattttttccaagaagttgacgcgtgacattaatggcgttgttaaagcggaacaaaaagacaatgacagtgtgtatgtcgagcttgatgagtatgttgttacccgagagttagatagacactttcgtgcattttttgaggcttacgtcccatctgtgacgcaaagccacggtgatatgtcaggtaaaattggtgtgtggatttctggcttctttggctcgggtaaatcgcacttcctgaaaattttatcttatttgcttgagaataaatctgttgaaaaagatggccaaggccgacaagcgtttgagtttttcaaagacaaaatcaacgacgccatgctgttggcggacatccaaaaagcggttaccaaagacactgatgttattctttttaacatcgattcgggagccaatacggacgaccgagaaaatgccattcttaaggttttcctcaaagtctttaatgagcgtgtaggatactgcgctgactttcctcatattgcgcacttagaacgcgagcttgataaacgtaatcaatacgcatctttcaaggacaaatttgctgagttgactcaatcaacttgggaaaaggagcgtgacgcctatgacttctatcgagacgaactttcagaagcactcgctcatgccagtgagcaatcattagagtctgccaaagcgtgggttgagcaggttgaaaacaatttcccgctagatatccgaaacttctgtaagtgggttaatgaatacttagatcgcactggggatcgtaaccttcttttcttagtcgatgaagtcggtcagtttatcggtaagaacacacaaatgatgttgaagcttcagaccattactgaagatcttggcacatattgtggtggcagagcttggatcgttgttacctctcaggcagacattgatgctgccattggtggtatggataagcgcgatggcgaggacttctctaaaattcaagggcgttttagtacccgcttacagctgtcgagctcgaatacctcggaagttattcaaaagcgattgttgtccaaaacggaagaagctcgtacatacctcatcgatgtctttgctgaaaagggcgacattcttcgtaaccagctgacatttgataaaacgacaaccgcgtctctaaagggctacaccgacgctccgtctttcgtggacaactatccgtttgtgccttaccactacacgctggttcaaaaagtgtttgagtcaattcgaacaaaaggcgcgacgggtaagcacttagccatgggtgagcgttcattacttgatgctttccaatcagctgcaaaacaaatgaaggactctggccttgatgtgttaatcccgttttacagtttctacgcaccgattgaaagctttttggagccagcggttaagcgaacgattgaccaagcctgtgagttggattccttaacggattttgatggcaagatcctaaaaacgcttttcttgatccgttatgtggacgttgtcaaaagcacactagacaaccttgtgacgctgtcaattgatcgaatcgatgccgataaaattgcgctgcgtaaacaaattgaagagagcttgaatcgtcttgaacgccaattgctgattgcgcgtaatggtgatgagtttatcttcctgaccaacgaagaaaaagagatcgaaaacgagatccgtcacactgacgttgaaatgtcagaggtctcgaacaagctttcagccatcgtatttgacggtattttgaaaggtaatcgtgcctatcgttacccgattaataagcaagactttgcggtgagccgtttttgcaatggtcatccaaaagatggcaccacactggaagacctagtcattaaagtcatttcacctttggattcgcactttgaaaattacgcccacgatcaagcgtgcctcaatcatacgcttgaggctgatgggtgcgtgctcgtcaagctgggcgaacataagcgtctttgggatgagctgacaacctttataaaaactgaccgattcttaaaacaaaattcaggacagcgaccagagcaagaacaccttctccgcgaaaagcagatggaaaatatggagcgtgaaaaacgcttaagaacggattttgaagctttgtttgccgaggctgacgtttacgcgatcggcacaaaactgccgaagaaatcagcaacgccaagtgccatcgtcgaagaagcatacaaatacgttatcgaaaataccttcgctaaattgaacatgctcaaggcaacgcctggtgaagttttgcgtgagctacaggccgttcttgttgctgatgatattgctcagattggactggatcttcaagcggatgaatgtaacccagaagctacgcgtgaggttgagcagtacgtaacgctaaaagtcgagcgtaatgagcctgtttacttacgtgacatcgttgcccacttcggcaagcgcccgtatggctggccagacaatgaaatcttattgctcaccgcaaggctgggcttggctggaaagttatcttttagtacccaaggcacagatctggcgttgaaaaaagcttacgagccgtttaccagcgtgcgtaaacgcggcgagatccgtgtacataaaatcaggcaacatgacgagcgccaaattaaaaaggctgctggtcttgttaaagagatcttttctaaaacttttaccggatctggtgagaaggagctctacgaattagtgcgcgatgaattactggcttggaatgaaaagcttaaatcattcagaaccaagtcacagacaggccatttcccaggtaaatctcaaattgacgagggtcttgcattggtcgcgggtattcttgagcaaacttcaagcttcgctcttatcacccgattcttagaagacgctgatgcccttgaagagtttgctgaggattttgaggatcttgatgacttctacaatagccaatttcaaacgtggcaagcccttgctggcgcattgaacgagaagtttaaggccaatagacctgcgttagaaaaagacagtgaagcattaaaagcgctcactgaattagaacgcatttacaatatgccctcgccgtatgagcagctgcgccacattaatccgcttatcgagcaggtggcaaaaattaactcaacattggttgaagaaaaacgcactcatgccttagagcgtgttgatctgcgcatcggacgtgtaaaagaagcgctagctgaagctcatgcaccgtctgaattacagaaccaagcactgcgcccgttacaaatgtgcagacagcgcattgaagcaacctcttcaataccacaaattatcagtgagcaaactgaagcggaaggttacgaggacgaagcttatgagttgctgaatggctttatcgaagatcaacgcaaaaaagctgaagctgagcaaagacgtcgtgaactcgaacagcagacacgcgaagaggaagcagcgaaagccggtaaagcagctccagcacctgagccagtctctgaaccagtgcagccacagccggttgcaaaacgtaccgtaacgattaactcaaccgatgccatggctaagtcagtaacaaccggattcattgaaagtgaagccgaagttgatgcctatcttgccgctttaagagagcagctgattgctgcggtcaaagctggcgaccgagtaagaattaagtaa

SEQ ID NO: 303351 - DNA, 1128 bp, Proteus mirabilis
atgatattacgatttatattttctattgtattgttgtattcatcaatggcttactcacagcaagttgtaacacctgttactgacctacttggcagaaccgtgaatgtcaaattaccggtacagcgcgtcattttgggggaaggacgacagctttatttagtggctatgtttgataaagaaaatccagcacaaaggatagtcgcttggcgaaaagatttaatacagtccgatccggccacatggcaacagtaccgacaacaatttccacagttggcaaaaatccctacctttggtggcagcgaacaaggaacgtttgatatagagcaggcgattaatctgcaacctgatgtcatcatcatgaatatggacgcacgcaatactattgttgatgctggacacgaagctgcactagcccgagcgggtattcccattgtttatgtcgactttcgctatgatcctattgcacacattcctccaacagtgacgttatttggtaaattatttggccaaccagatcgcgcagaagcttatttaacattccgtgataaagagttacaacgagtgacatctcgagttgaacaattacagggggcattgccaaaagtatttttagagcgtcttgggggttattcagaagagtgctgtatgacctttggtaaagggagttttggccgttttgttaaaatagcggggggggataatattgccgacaatcttgctccgggaaccttttttacgctaaatccagaaaaagtggttgttgcaaatcccgatattgtgattattaccagcggcaattttcaggcatttgtgccgggtggaaagtggatcccacttgggccggggattaatattcaacaatcaaaacaccgactcgcatggtttacgactcgccctgcttatgttgatagtaacgctcgccgtcgtggcgcattttttgctatttggcatcagttttataatagtccctatgatgttatggctatccagcagctagctaagtggatacatccccaattatttgctgatcttgatcctgatgacacattccgtcgtttacatcaagaatttctacccatctcatatcagccgggatatatgattgatttggaaaaagaggggaggtaa

SEQ ID NO: 303352 - DNA, 411 bp, Proteus mirabilis
gtgctggataatttacaaatctcaggcaatctttctcttattgatgccgaacttatcaaatcgcctaaatctgatatccgtggtaacaaacccgttggcgtttctcctctacaagcaaatgtgggagtggaatatgaccttcctattttgcatggattgtcattaaacagttatgtcaattatagcgcaaagcaatatgtcaatcaggcaaatacacagtctatcaatccttggacaacggtagatatgggagcctcctataaaacacgtgtgtatggtgcgcctaccactttccgttttgatgtacagaatctatttaatcaccattactggtctggtgtcgcgtcatataccactattgcacagggagcaccacgtactttccttgcctcggtaagtgttgacttctaa

SEQ ID NO: 303353 - DNA, 933 bp, Proteus mirabilis
atggcaaatgatgtttgctttcctaatttaattaaagaaaacatgtgtaaacatgcagataatctatcaaatgaaataaaaaagaatttacctattagattaactgacaacatggtcctaacaaaaataaaatccgcggatcgtagaattattctcaccgcatcattatcttacgactttaacacattaaaaaatgtatttaacgatgataaatatttcattgatagagcaagacatatcaatagagaaatgtcgataaaaaatgtatgtgcagataaacatgttcgtgcattcatcaacctcggtggagaaattgaatatgaatacatatttaatgatggttctatctatgatgtggttaccatcacagattgttctcgcatagctggtaataaaaattcttctataaaaaattctactgataattcatttcaatatgatgatgagaaatcattcactctacctaaaaatagagggtgggatatacctttagatgaatatacaaaaccaacatcaaagacaccttcaagagtttatccaacacctgataattatgatggtagctttacgcttccatatactaaaggttgggatacaccacatgaagttggagttaatccaaaaccacctgagccaccattaacatttctagatgcatttgcctatatacctgattttgaaaccgtggatgattacaatccttatgatgatcctaatgaaataaatggttatgaatcgtgggctacaaaattcgcagactcacgttctcctcaagaaaccgaagctatcaaaaaacgaattgatgctcgtcgtgatgtatttggagtggaaactccgggagagtttgcatttaaaattacagcttggttagtcgccatcatcgctataattctatccgcaattatcttttctcgccggagcataaaaaattaa

SEQ ID NO: 303354 - DNA, 2949 bp, Proteus mirabilis
atgccaatttatccaacacctgataattatgaaagtagctttagagccccaactaatgctggctttatttcagaacatgaagttggaattaacccaaaacctcaagaagaaggcccatcagtgatgggcgctgcatttaggcagtataatatactttcagggttatttaatcctgcgcctgattttgaaagagaggatgattataacccttacaatgatcctaatgagttagatggttacagaatgtgggctataaaatttgcagactcacgttctcctcaagaaaccgcatggataaaacaacaaatagataatgaaaatcaggatagacagcatttagctgaatcaggttggcaaggtactctagcttctttcactgcggggttattggatcctataacactaggaagcctgttgattccaggtgcgcaaggagggcttattgcaaaagcatctactaccgcagcaacggttggtctaagcactgcagctagtgagtttatattacatcagcaacaatacactagaacatttgaagaaagcgtaatacatacaactgcaggtgctattttgggcggtatggttggtagtgctggccacttgataagcgcagaggtaaaaaagagagctactaatgaaattggtaactcattggctcaatcgctctctggtggtagtgttggcgctcaaagggtagcagaaacaacattagctcaagaagcaatgaaaggaccgaattgggctaattctgtcatgaaaatgacaccgatcgggcgtttaatggattcaccagccgttacctctcgtagaacagcacagttattagctgaaaataatttcacaacagcaaagaatcttgaaggaattgcgacacctgcagctgttgaaactaaaattagaatgtggtcacgtaatgaagctgcagtcattataactactaatagtggctatgctaaatatcgtgctgctggtggaacaggcagacgttttaattttgctgttgaagtgacaaaagcaatgcgtagaaatgatacaagtgcaaaccctgttgttcaggaaacagctcgtgcactgcgacctgctttagataatgtgagggctgaattacaagctgtgggtcttttaccaagtgatttaaagcttataggtggcatgagctacttccctcgcttgtatcgtgtaggtgaaatactttctagacgaagcgaatttaaaaaaatattaacggactactggtcaagaagcgaaaaggtagttttggaagacttagaagttgctgctgatgaagtaattaacaaaattactggagccatgagaccacaagactatgccaatgctttttcagttaagctacctggctcaactaaatctcgaactttagcgatacctgatgaattaattgaagaatttttggagaatgatgtccgctatgttttgcaacatcatatacgagatgctgctcctaatgttgagttaacgcgtgcttttggtgaatcttcgatggagcgaacaatacgcagcatcgaggatgaatatgacgaactcatgaaaggtaatccttcggtactaagaaaagaacttgaaactaaatatgctgataagaaaaataacatgtcagaaaaggagtattttaaatttattaatcaagagcttgatgcagcacaaaaagaagctattcaagcgctagaaaaatcaggtgaaattagacgcttaagtaagttgaagctacgtgatgtagaagacatcatggcgatgagagatagggctttaggtgtctataaacgtcctgatatcccttcaaatgcatttattcgagctggtaatgttctgcgtaatctcaacttcttaactatgcttggtggaatgactgtttcagcaatccctgatgttgctcgtgccgttatggtcaatggctttagtaaaacatttaacgtttatggtaaatggttatctcgtagtgatgtgtggaaagctggtaaggaagagctaagaaaaatgggcgttggtctagatgtatacttatcagaccgtagtcgagcaatagctgatttgacagatggatatgctcaacgtagtgccttagagtctggtttagattatatgactggtaaattcggaaatttgactctaatgaatcaatggaactcattccataagacaataaatggtataaatactgcggatattattctagggtctcaggtttctaatgctaggctagccaagctaggtattgatgaaggcatgctgggccgtattcaacaacaatttgctaaacatggtgaaacagttgatggactgcgtataggtaatagcagtaaatgggatgatcctgttgttcgcggtgcttttgaatctgccgtcatgaaagacgttaataatacagttataactcctggtattggtgatactccattatggtctagtggtctgtttggaaaacatatattccaatttaaatcgtttatttttggctcatttaatcgtgcaacaataagcggaatacaggctggagatgctcatttttattacggaatggctctgcaaattatgctgggttcattaacttatgcgattaaaaatacattagctggcagggatgtcgattggtcacctgagaaacttattattgagggtgttgatcgctcaggtatattaggtccattaatggaatttaataacatattagagaaagccagtgaaggaacaataggattaggtccagcgctaggtactggtacgcaatcacgctacgctagtcgtggtcttgttggtgccaccgcaggtccaacatttggtacattagaaaacttacgtgagatatcgagtggcattctaagtggtaactttgatgatggcccgatcagagcagcaagacaaataataccagggcagaatctgccttactttgctccgatacttaataaggttgaggagagcttaaagtaa

SEQ ID NO: 303355 - DNA, 2856 bp, Proteus mirabilis
atgcctaaagttcctacatacgataatagaacggttatgcctgagcagttaccgaataatgggttttctgttcaatcatcacctgatgctttcggcgctggctttggtcgtgttggtgagcaatatgtcggtttatttgcagaagcaaaacaaagagccaatgttgcactggcgcaagatgcactattgcaactccaagaccatgcagatgatctgtttaataatcctcaaacgggtttatacacgaagcaaggtaaaaatgcagttggtcaatctgatgaaataattttcaatatagaatcaaaagggcaagagttaatgtcacaattgcctgaaggttcacaagaagattttcttaaacaatttaatgtgattaaaagacagtatgctaatcagactaaatcttatgaattaaaagaagttcaatcatttgaaactagtcggaatgatgggattgtcgctggctatgcaaaaaatgcttctgatagtttcaataatcctcaagcttttattagttttatgacattggggcaacatagtattgttgaattcaatcgtgctcgtggtattagcgaggaagaaatttcagcaaaagtagataattttaacaatcaagttgcttggactgctgcacagaatgcaatggcaactgatgctatgggaacatttaatgtaataggtgaaccatcagatattggtggtgttattcgtgttccaagtaatacatcaaatagttcttttgatcctgatgatagaaatggaagaaataataatccgggtaatatcagagtttctgataacaaatgggaagggcaaataggagatgatggtgaatttgttcgttttgccacaccagagcatggtgtacgtgctttaggtaaaaatctacttacttatcgcaataacggtattgttacgataaaccagataattagccgttatgcgccagaaaaagatggcaataaaacagataaatatattgctttcgtctcagataaattaggtgttgatccgaatataccgattgatgttagcaatatcgaaacgttgaagaatatcacaacagctattatgcaaatggaaggaaagcatagtgttacagacgatcaagtaaacacaggtcttcaggctgcactagggtttactaggttaccacaaccagaggcgtcacaataccaaacgcaaagtaggcaaattactaatactaatagcccatggtggaatctactaacacctatgcagcaataccaaatcagaaaacaaggtgaagctgcgcaaagtgaaagaagaaagcagtattctgatgaaatatctttaattaataaaaatatttatgctgctacagatgaagggttgcagcctacaaatgttcctagtgaagctgcttataccagagcgtatggggaatataaaggtcttaaagcctatgcggaagtgcaagaacaattgaaatatggaagcataattgctgcagcaagagaggttagccctgatagccgctctgatattttagaacagaatagacctaaagaccctaacgctcctaactttgctgctcaacagcagagatatgaaaagatgcgtattaagttcaatgagtttgataaagcatgggaagctaatcaaggtgctcaaatggtttcaaatgcaattaattatggcattccacttgatccaagtagcaaaagtaataaagcagccaccgatagttattatgcatctcattttgctaaccttaatttaagcaatgaagaacaggtaacaggtgttcttaagctagttggaaatacagggattattcctacgcaattattatcccatcttaacgctgccgctgttacccaagatgcaaaaacagtgttgcctgcagctgactttgttagtcgattatatgaaacaaacccaacagcaataacaggtatgtcaaaagaaaagcaggcattttatttaaatgttaaacaatttaaggatgctggggctagtgatgatgaatctatcaaaatagcttttgatcaagtttataatcaaaccgatgccgtaaaaattcaattggcggatgaaaaaaaatcaaatggatataagaaagaagtattaaatgcggcggaaagttttataaatgaacgtaaagaaatttttagaattgatccatctgcaagcgatgaaactcctgaggctaaggcatttcttcgtgattataaactgctttatgatgccaattttgataaatcaggcggtaatgcagatacagcaaaaaaaattactcatcaacaaatttcaaacagatggtcgatcaccgaaataaacggcaaagcagaattaatgaaatatgctccagaagcattgcataaaggtgggcctgatggatggcaagcgaaacaatgggaagaagagaaatggaaattaaaatatggtgaagaacgtaaaaataatcaagatataggattcagagtaaataacacaacaggaggaattgatacttcagagaataaacctaaacccatagttgatggtgaaattattttagttgtcgatcataacacacctagaaatggtgattatgccatctttatttctaaagaagataaaaacggaataccaactttacagccttattatgatgaatcaggttctaaaataagatataagcctgaattagagagttataagccatatcaagatttacttgcagaagccgctgaatatgaaattaagcaagatgctaaaggtcaagcaaggagagcattctatgatcgtcatgatgagtttgataagcagtatgaacaagctcacgagcaacgtattgaaaggcaaaaagagcaattaagtagttatttttcttggggaggtaacaaataa

SEQ ID NO: 303356 - DNA, 996 bp, Proteus mirabilis
atgagcgatttaataaaagactataaaaataaaaaacatttatacgagagtttactaattcaaacaaaacactccatagagtcattattacataataaagatattgaaatattttcaattgaagcaaggttaaaagatgagaactccttcaaagaaaagctacaaagaaaatcaggttataaaattctaggtgacattgaagacctatgtggcttacgagttatttgttattacgagtcagacctaaaacaactaagaaaattaataacagaaaactttaatgttttatcagattcggataaaaaagaggaatctgatgttgataaatttggatattcttcaagtcatttcattgctcaatttaaagatgaatggttaaacaatccgatctatagcaatctaagagatttaaaattcgaaatacaaataagaaccatgttaatgcatacatgggctgccattagccataaaactctctataaatatgaatctgatgctccacgacacatgagaagaacatttagtcagttaagtgctctcatagaacttgccgatgagcaattttcaagaataaaagaaatgaaaattgattatcaaaatagcaacaaagatgtgaatgaggaagactttactcaattagagctaaattcagataccttgctggccttaattcaaaaatattttcctgaacggaaaataaatcattcatctattcctaccgttttaaatgaaataaaagaatatgataaattcgttggtgagtttgaaaaaagaataacaaagtgttttccatacataacagacatggaaaatgaagccgccaaatgttatggaaaaatagcaccattttggacagctgaaggtatttgtagattaatattagatattactatccaagaatattacgatagcagatggggagagattggatttgaaccatatgaagaagaattggaaaatatatataaaaaatatataaaaattgtaaatgattaa

SEQ ID NO: 303357 - DNA, 219 bp, Proteus mirabilis
atgagcaatgaacttaaagataaaaaatatacattacatccagttatatcagcaaaaaatgaaaccttaacactgcgagaccagttcgccatgtctgctatgcaggggattttgtccaacgaagccatgattgcaggtgtgattaaagagtctgccgagtgggtgtcgagagaggcttacatcatggctgatgcaatgttgttttctagagataaataa

SEQ ID NO: 303358 - DNA, 786 bp, Proteus mirabilis
atggcgaaaaaaccgacttattcagtacgttttgtagcaggtcaacctgtagaaaggattgaacctagtctacctttaggccaaatagaagagatgctaccgattgggatgccactatatacagaaggcactttaaaaattgctgtttggaatatttacaaacagcaacgggtcaattggcgtagtatgctggaaacgcttgccaccgatactcaactattacttttacaagaagcgcaaacaacacctgaattagttcgttttgcgggtaaaaaccatttaattgctgatcaagttcctgctttagcctttcaacagcaccctgcgggtgttatgaccttatcaagttctcatcctatctattgttgcccattaagagaaaaagagccttttttaaggcttgctaaatctgcattaattacggtttatccacttattactggtgagcatttaatggtgataaatgtacacgcgatcaattttagtttcggtgttgatgtttatcaaagacaattaaacagcttatcgactcatatcatcgatcataaagggcctgttattttggcgggggattttaacgcttggagtcgtccaagagttaatgtgttaaagcgttttgctagaagattaaaacttaaagaagtgatctttgaaaaggatttacgcactcgcgcttttggtaagccacttgattatatattttatcgtggattatcactaaataaagcggaaatcttaatcacagatgcatctgatcataatcctttggtggcaacattttcttaa

SEQ ID NO: 303359 - DNA, 1368 bp, Proteus mirabilis
atgcaaaaagagaataaactttcacgaggactatcagggcggcatattcgtttcatggcgctaggctctgctattgggacagggcttttttatggttcagccgcggcgattgaaaaagcaggccccgctgtacttcttgcttatcttattggtggtgccgcagtatttatggttatgcgcgcattaggagaaatggcggtccatcatccagtggcgggttctttttcacaatatgctagccattatatgggaccattagccggatttttaactggctggaactacgtttttgaaatgcttatcgtttgtcttgcagacgtaaccgcatttggtttttatatgaaactttggtttcccgatgtcgaccaatggatatgggtattaggcatagtctgttttattggtgccttaaatttatgtcatgtgaagatatttggtgaaatggaattttggctctctatcgttaaagtgactgcaattattgccatgattatcggtggtgtagccataatgatctacggctttggtcagcaaacagaacatcccattggtatttctaacctatgggagtttggtggctttatgccaaatggtatagaaggcattattgcctcactcgccattgtgatgtttgcctttggtggtattgaggttattggtattaccgccagtgaagctaaagatccagaaaaaacgatccctaaagctatcaatgcggtgccatttcgtatcttactattctatgtactgaccatttttattttaatgtgcatcttcccatggcaacaaattggccataacggtagtccatttgtacaaattttttccaatctgggtatcaattcagccgctaacattcttaatcttgtggtgatcaccgccgctatctctgcgataaacagtgatatcttcggtgctggtcgcatgatgtacggcatggcacaagaaggacaagcacctaaatcctttatgaaactgacgcgtaacggtgtaccttggatgaccgtattagtgatgtcagtggtgctattattaggggttgtgcttaactatcttattccagaaaaaatcttcgtacttattgcctctatcgcgacatttgccactgtatgggtctggttgatgatcttactttctcaagtggctatgcgtcgccaaatgagtgctgaagaggcgaaaaaactaaaattccctgtaccattttggccaatagcacccgccattaccattatttttatggcatttgtgatagcaattttaggctactttgaatcaacccgaatggcattaatcgttgggttagtatgggtggctattttaactgttggttactatattggtatcaaaccaagaataacgcagaaataa

SEQ ID NO: 303360 - DNA, 432 bp, Proteus mirabilis
atgacaaacttacttaaatctttaccagcacgctgctgggttatatcactggggctttttctggcgactttggctgcggctcatttttttccatcagaaatattaacggcatctgccaagttcgcggctttgccatttctgttctgcaccatgttttttttcagctacctgggatttaaagcaactgctagtcctatcggacttataaccatcaccactatgcttttagcaatcgcatattggcaagcgagttggacaattgttggcttgggactctttttcttagctatttgcactggaattagattcttgattagccaagttaaagattcgggtagaactttgagcattgaagaaaaatggtattggtataagctccattcgttttttgatggcttttatccaaagtatcccaaaaagccaaaaaaatag

SEQ ID NO: 303361 - DNA, 498 bp, Proteus mirabilis
atgttgtttgaatatttcattcgtaagctcattaagcgagatgggctacgcctgctaggtaagttcgagcaacgtcagcaaatagcatctggtgctctcagtggttatatgagaaaacttgaacctgatcttgttatagaaatcgatgagagtttattcgtatttgatgtgaagtataaagcatttgattcacaatttggggtgaagcgtgaagatctttttcagctacatacttacatagggcagtatggaaatgttgccgcaatcaagggatgtggatttatttaccctatatcagaagaacgatgggcttcacttaaccttgaaaaaacacagggtgtgatttcagatattattcaccagcaaggacaagagataccgttccatgtgctttttctaaaaatccctgaagatacgtatattgattttaataggaaaatgaaagagcagtgcagcatttttattaatgccctttattctaaggtttttaatcggtga

SEQ ID NO: 303362 - DNA, 567 bp, Proteus mirabilis
atgtatttttttcttggttttttgttgtttctaattgttttgatggttatttgcaggattagagttttatggttggcaagaaaaaacacaataactgaaaaggattttaaaaccttcaaagagtataacaatattgaagattatgaaaaagaagcaaagcaagctgtttatgcaacaacaataagcaaaactctttttgaaaaatgccaatgtctcataacattaagaacaatgcttgaatccctacacactgattatgaaaaatatgaaaaagtaaatctgttattaatggagctattacgcaaaaaatttacttttacatactccgctttcattactatctatccagaacccatcgaagaaagcgggctagaacgatttagtttaattaatacaaaaaatactgtccagaacatgtatggaaacatattctcaaatccgctatttataccaatgaagaattggatgactattttgggtcgcaggaattccccccactggagcggatgtgtacagatatggatttatataacgagtttaaaggcacggttttatttgatgaagtga

SEQ ID NO: 303363 - DNA, 237 bp, Proteus mirabilis
atggatttatataacgagtttaaaggcacggttttatttgatgaagtgatcgggtgctatgttaatgaagaaaacgaaggatctcaaatttttgataatgaggtttattctgttaccgaagaacagttacgccagtggctagatgaagagcttgcatttctgagttatgtcactgaaggtcttttgaatatttgtattgaatacataagaaaagagaatggaattataagggtttga

SEQ ID NO: 303364 - DNA, 1341 bp, Proteus mirabilis
atgagtgatcgttatgtgatagaggcctggctgcgaccggccgtggaattgaacagtgctctggtgtccggcggggcggcgtttgtgtgtgcggtagcgccctgggcagtggcattgtctccgtccgtgagttatgtcaccgccggtgcgtttgccggtttttccgcattgcgggcacatcagggattccgggtattacgttaccgccggaatctccggcgtctgccccgctatcaggtgacgttggcacaggtgccggtcagccggcagcgtctgtttctgggaaaagggtttcagtggcagcaaaaacacacgcaacgcctgctggaaacccagcgtccggaagtggagcggtatgttcagccgccggcacattaccggctggcccggcagtttgaactccgttttgaatcccgttttccggcggtttgccggcttttgcaaaaagacagttggctgaatccggtccgcccgctgacgccggtgggggggaatccggtgttacacggtgtggagccggatgaggtgaatgtgaccatggatttgcgtgaacgggttggtcatatgctggtactggggaccacccgtgtcggcaaaacccgtctggcggaagtgctgatcactcaggatatccgccgggggaatatcacgattgtttttgatccgaaaggggatgcggatttattgcgccggatgtgggcggaagcgcatcgtgcggggcgcagtgaggagttttatgtttttcacttgggctggcctgatatcagtgcccgttataacgccatcgggcgttttggccgagtatcggaagtcgcggggcgggttgccggccagttatccggggaagggaacagcgcggcgttccgggagtttgcctggcggtttgttaatatcattgcccgggcactggttgctctgggggagcgtccggattatgccaaaattttacgttatgtcaccaatatcggggaactctatcagacatattcgatgcaggtgattaaagcacaactacctgatttgtttgcccaaatcgagaatgcgcagaacgcgctgacggtcgaggatgtgccccgtcatctgcaaagtgatccgaaagctgtggctatctgggcaacggagctggcgttaagtagtgagaaagggaaaaaaatctatgatccgattttggacgggctgcgcagtgcgatccgttatgaccggacctattttgataaaatagtggcttctctgctgccgttactggaaaaactgactactggaaaaactgactaccggaaaaactgccgccctgttgtcgccggattacaccaatatgcaggatccccgtccgatttttga

SEQ ID NO: 303365 - DNA, 156 bp, Proteus mirabilis
atgttaggaggaatatttcaacaaaagcagcaacagcatgcagcaaaaattccttttttatcttcactgccattactagggatactttttagccataagcgtgaccaacatagtcgtcatgaattggttatttttattacacccaaattaatctaa

SEQ ID NO: 303366 - DNA, 423 bp, Proteus mirabilis
atggaaccgacactatgggtactaggtactctgattataagtatcttgctcattgtttttactataataaaacttaagtttcatccatttttagcactactacttgccagtttttttgtcggtatggcaatgaaaatgaacccattagaaatggtcagtgcaattgaaaatgggattgggggaacgctgggatttttagccgccattattggtttgggtactattctcggtaaaatgatggaaatatcgggggcggcggagcgcatcggtatcaccttacaaaaatgccgctggttatcaccggatgttattatggtattggtgggactgatttgtggtattaccctgtttgttgaagtaggggtagtgctacttattccattagcattctctattgctaaaaaacaaacacctcattattaa

SEQ ID NO: 303367 - DNA, 1092 bp, Proteus mirabilis
atgttcatacacgatgtgcctagcaatagaagattttgggtggttcgttcagatggtggtgcatattatagccactttctagctaattctttagttgctattgggcatttagataatatggattatagccaatctacattaacgaatgcagaagaaaaggaaaggttattaataggatatagacgttcgctcatagataataatgagcagttagcttctgcttcaaataaggcagggcaagtttctagatttataaatgaaatgaatataggtgattatgtaataacgttatccgctagccgaattgtagttggagtaatcacatctcaagcttataaaagtacagagagcgtcacaatattaaacgatgatggttcaaccaatgaatccttaatgcaatactcattaagacgaaatgtaatgtggggaaggtctcaggatagaggtgaattgccacttgtaataaataatagcttcagagcaaatcagacggttttttctgcgaatgagcattggaaagaactcaatcactggatgtctgtagcttttatttctgatggtgaagcatatatatctgcaagaatagagcaaagagaaggtatcaataatttagatattgcgcagtatgcaatcataataaacaagatagaagctattgctgagtcattggttcagaattcaactgaacatatgacaaatgaagagctgattctattatttaaacaaacgtatcgtcaattgagaactgataggtcatttactgtaacaactcagcaagtatttctatctccaggggatttatgggcaaaaatatcgggtggaaggcaaaaaagtttagtttttgtttgtgcattcctaatgatgtttggtaccccagtaacattttcaaatcaaaatgatgaaagctttataaatgagcatcgcactgcaattataactatgctcaatgaagttaaagtagatgaagattttgatgaagtcagggatgggttacggttacgtattccaagacaaaaaataacagaagaaagttctcaaccaattaataaccaaagtgatgattatgaattggataatttcgaaggtatgtaa

SEQ ID NO: 303368 - DNA, 675 bp, Proteus mirabilis
atgaattggataatttcgaaggtatgtaaggtatataaaaaaattaaaggttttataggtggcttgtggttaaatcatgcccaagctaataattttttctctggcatacactatttagctcttacgctagcgattattattggtggtgtatggggtgcatatacttttaacgctctaagtatggcatcaaatgcagagattcagctaaaaaaagctaaagaagagttgaagcaaatacaagaacagattaaaggatctgattctagcagtatttctattggtgtaatacccatggaaactcaaatgggcatgattattaatgtagtcattaaaaataatggcaagagaccgatttcatttaatacagctgatagtgccatttctgtatataaggtttctgtagatggtagcaaagtatcacaggagcagaaacttgaacccaaaatatatacacatataacggatggaatgaatggggatataaatcgaatactgccaaaagttcatgtactgataggcgcggaaaaaacattaagctatgcagtaagtcttaaatctaatggattgtattatataacatttaggtcaacgccagatgagaattttaagaaagatgatattaaaaataatcttccactagaatggtttgcatctacctatgttgaaattaaataa

SEQ ID NO: 303369 - DNA, 675 bp, Proteus mirabilis
gtgaataaatatattgctcctcaattttattccaagtcatttacctgccctcactgtaatgttctgtcccatatgcaatgggaatacacccatttcaaagcttattcgctgcagagtaaatcgcaatatatctattctgcatattgtagccattgttcgaatgcttctatttggattgcagattactacgccaatcaagatgtcaacgatattgataatataatgatattccctgatacaactaacatacctcatccatcagaagacatgcctgatgatgttaaaaaagactatttagaagctgctagtatctatcaaaaatcacctcgaggggcagcagccctcctacgccttggccttcaaaagttatgtaaacatcttggtggcaagggagaaaatataaatacagatataaatacattagcccaagatgacaaaatttcaaaacaactcatcaaagcagccgacatagtgagaataactggtaataacgcagtccaccctggaactattaatgatgaagattttgataatatagctataaagctcttcgacttgcttaatattatagttcgccaaggaataaccgaaccaaaagaagttgatgagctatttaataaaatgcctgaaggacctagacaagcggctgaaagtagaggtaagcctaaagcctaa

SEQ ID NO: 303370 - DNA, 924 bp, Proteus mirabilis
atggcagattacaagaaggtgagttgccaagaatatgcaggtaaaaacagaaaagccaacaggtgcgaactgctggctaatcccaaacaaaaccaagaaggaaatgtttcaatgaacgaattaactttagcatcacatgaaacaaatgtcactatgtcaagtcgtgagattgcagaattaacaggtaagaagcatgcggatatatgtcgtgacatacgtgtaatgttagttgaaatgtatgaaggaaacgaaaaggattatattcgtaacgcagatttgctttaccttacaaatcatggtgttagttgttttcattatgacaagtcaaaccctaatgcgtgggaatatttactagaccgataccattctgaaattttagtgactggttatgatgtaaaacgccgagcagcagtaattaagcgctggtatgacttagagtcaggaaaggctacaccaattgttgcacttaatgatcctgaattcttgcgttctgctttattaaattacactgaaaaagtattagctcttgaatcatcaaataaagaactaacaaataaagttgagtgtatgtctaacttattcaaagaaggtatgactccaactcagttttgcaaaatgcttaacggcgtaaacactcaacaagttcaaatgtggttagctgaaagaaactggctatataacgaaagtaagtcaggtaaaaatattcgctggcgtgtcgcttcatatgctcgtgataagtacatgacagaaaaccagagtgaaattaatccacatggtcacgagccttttattaagtatcaaccagttttattaaagaaaggtgctaaacgtctttatgatctctatcttgctggtgaactaccaatgaaaaagaactgggatggtttatttactcatgataaggaattcaaagaagtagcttaa

SEQ ID NO: 303371 - DNA, 882 bp, Proteus mirabilis
atgaaatcaaaaacattaggtttagatcttctgtactggcaatttgttgatcttgcaataaataaagagtacgtaacaactgctgactttcttggaaaattcagaattaaccaagaaagagtaaataaagtaatctctgaactagaaaaaacgaatgttattattaaagatggtgagaaatataaagttattggttttccaacagaattaaattggcgagaagtaagttcaacgcaaccacaaggtgacgagtggtatctaaatgaaaaatatacaaatgtactgacaatagaagaaggtaaaacatttgtttatcaggatttttataacagaggtttcacaggtaagcctgaatttcttatagatatacatggtgatattgcaaagtatcatccagttagttttggtagtgttaatgagagactgaggtatgcatatttatcagcttactggcctagagaaacaatagttgcctttcattatgacgatgaaataaaaacgttatttatagatgtagacctaccagaaattgaagacacgccagtatcaaatggtgaaagactaaaaacagcagaagaatactattatgattacgcaagacatgttcatgctatcgctttaagggtatctgctatcgggttcatggtttgcttagaaatagagagtgtcatcgtggctgggtattctcagatatttaatcatgatactggtgatgaagatgatctctatttaataaatgtaaaattgaatagggacaagtttgaaaggcttcctattaaaaacatctcaatgtgtgatcctattcagtatctatcaggatttgatgcgatagttaaaatggataagaattataaaatgaacgcaatcaacttgaagtggtaa

SEQ ID NO: 303372 - DNA, 1206 bp, Proteus mirabilis; identical to SEQ ID NO: 295114

SEQ ID NO: 303373 - DNA, 708 bp, Proteus mirabilis
atgggcgttgttgatgtgacaccgattaaagaagccaattggtttgctctgcctaccttttattcgccgcgttttgagtggagtgctatttttattatcttgccggcggcattagtggttattgccgaacacgtagggcaccttgtggtaaccgcgaatattgttcaacgtgatctcatgaaaaacccaggcttacatcgctctatgtttgcaaatggtttttcaaccattatctccggattttttggctctacacctaacacgacttatggtgaaaatatcggtgttatggctattactaaagtgtatagcacttgggtcattggtggtgcagcaattatcgccatcttactttcttgtgttggtaaattggcagccgcgattgcagcggttcccgtaccggtaatgggcggtgtctctttattactgtatggtgtaataggggcgtccggtattcgcgtattattagattcgaaagttgattataacaaaccacaaaacttgatattaacagcgatcattttaattgtcggtgtaagtggtgcatcaattcaaattggcgcagctgaactaaaaggcatggctttagcaacgatagtcggtattgttttaagtttagtatttaagttggtgagtattattcgcccagaaactgagttagtggatgatactctggagtcaattaacgaacatacaaacaccaagtaa

SEQ ID NO: 303374 - DNA, 1074 bp, Proteus mirabilis
atgaaatttactcctcaacataaaatggatgctgcattaatggcaggcgcatccttaaacacacccaataatcattcaatacaagagcaacatcatcgtttaaaagatgatgctaccgttagtgcttatatgagccagaattatatttctgtttctgtcgcagattcggttgaacatgtaaaagcacagctggttaatgatttaaaagatgaattaattccgacttatctgtatgtcgtagataaagataattatcttaacggtattttgccggttaaatcattactacttgctgataatgggctttttgtttcggatattatgcgccaaacatttttctcagtttcaccggagcaaagccgacatgatgtttatcagttaattagccaaagtggtttagacagtgtacctgtgatgcattttggtaagttagttggtgtattacgacctcaagatattgctgatttaattgaagatgaaaatacgctagatgcacaaatgcagggggcaacgtcgccattagaacaaccttatttagagacaagtccggtcactttgtggcgtaaacgtgttgtctggctattaatgctgtttattgctgaagcttataccagtacggtgttacatgcttttgaagacagacttgaagctgctatctctttagctttctttattccattattaattggtactggtggcaatagcggtacacaaattacctcaacattagtacgtgccatggcattaggtgaggtgagcttgcgtaatgtatggtcagtattaagaaaagagatcacgacctcgataatggtggctttaaccatgggaatagcaggatttattcgtgcttggaccttaggggttggcatggaagtgatgatagtggtgggattaacactaatttcaattacggtttggagtgctattgtctcttctattattccaatggtattaaagcgtattggtgttgatcctgcggtggtgtctgcaccttttattgcaacatttattgatggtactgggcttattatctactttgaaatagcatctcataccatgagtgtgtttgcttaa

SEQ ID NO: 303375 - DNA, 558 bp, Proteus mirabilis
atgaaccgtttcatcattgcagaccctaaaaagtgtattggttgccatacctgtgaagtagcatgtgttgtttcacatcagcaagcttcccaagataatttagcaatcgaccaaattagtgagcaaaatttccaaccacgcattcatgtggtgaaaggcttttcaattagtaccgcagttgtctgccatcaatgtgaagatgctccttgtgccaatgtctgtcctaatggtgccattattcataataaagattattactatgtcgatcaggataaatgcattggttgtaaaacctgtgtcttggcttgtccttatggcactatggaagtggtttctcgtccagttatgcgtaaattaaccgctctcaatacgattgaagcatttaaagctgaagccaataaatgtgatttatgtcatcaccgtgctgaaggtcctgcttgtgttgaggtctgcccaacgcaggcattagtctgtattgatagagatgcacttgaagatatggttaaagagcgtcgtcgtaaagcggcttttgaaacaggcgctgatttattgttctaa

SEQ ID NO: 303376 - DNA, 279 bp, Proteus mirabilis; identical to SEQ ID NO: 36698

SEQ ID NO: 303377 - DNA, 309 bp, Proteus mirabilis; identical to SEQ ID NO: 36697

SEQ ID NO: 303378 - DNA, 651 bp, Proteus mirabilis
atgatggacaaatcaaaaaattttttgatgatagcgttaagttcattattgctggcagggtgtgattcttctaaagatgccaataaatcaaactttgaaaaagcaattaatacaaaacttgagaatgaatgcattactatcaaccctctcggaatgcttgatagtaagccttatccagttcaattatctgtggctcagactaatcgatatacatctcaggaacgggcagacgaaataaacgccagacagttttccacgtttgatgcactggttaaagctggcttattgacagtaaaagatacccaggttgatgaaactatcggattttctaaaacaggtaaaaaagtacccggacgtgaatatgctctgacagataaagggaaaaaatatctgaaatcgccagagcgacctgacttctgtgtcggtcactataaggttgatgagatcattgattttactgaacctggtgatgcgatgggaatgaaaatcacgagggttaattacacattcagccctaccagtattgcagaatgggctaagcgtgatgatattcaggcggcatttcctctgattaaggttaatttgaaagagaaacaggaaaatcgcatctctctggtattgaaaaatgatggatggtctgctgaacgatag

SEQ ID NO: 303379 - DNA, 519 bp, Proteus mirabilis
atgagtgtgccgcaaacaaaagctgaactgcttttagctattgataaaaatttcagtaaattaattagttacctcaacgcaatcccaccagaaattacttcagataaatcaatggacggacatgccaaaggaaccgagatgagtgtccgtgatctagtttcgtatctgcttggatggaatgctcttgttataaaatggatcacttctgatactaaaggtctgccagtcgattttcctgaaactggctataaatggaatcagcttggccttcttgctcaaaaattttactcagattacagtgagctaagttatgatttgttagtagctgaacttcaagttgtaaaaaatgagattgtgaaccttattgatgatcgtaccgatgatattttgtatggaaggccatggtacaaaaaatggacgatggggagaatgatctcatttaacacatcttcgccttacgccaatgctaatggaagattaagaaagtgggcaaaaaataataatatcagtttaaagtaa

SEQ ID NO: 303380 - DNA, 624 bp, Proteus mirabilis
atgcctaacgtgatagcatttttaaatggtaaggggggggtgtctaagacaacctcggcagttaatattgctactgctcttgctcgtaagggttacaaagttgttgttgtggataccgatccccagggaagtgttagtaactggtatgatgacagtaagtgtgtttttgatgtagcggaagctacggcagaaaaagaaatttaccgtttgcggaaggcgcttcctttgcacgattttatcattattgatggtgctgctgcgatttcggcgatatcggcggctgctgttatggtttctgatcttgttattattccagttactccttcgccgcttgattttgctgcgtgtggcgcgatattggcagtgatagaagctcgtcaggatttacgcccggtgattgctcgctttttgattactaaaaaagtacagcaaacgcatatgttatctttgctgaaagaatctattgcagaaacaagcataccagcattaaaaacaggaacgtcgtacaggcagtcatatataagatctatgctggatggtggtactatatttgatacaaaagatagtgctgctaaaggtgaaatatcagttattacagaagaaatacttggactattaaaatga

SEQ ID NO: 303381 - DNA, 207 bp, Proteus mirabilis
atgagtaaaatgaaacttgggaatcataaggcaacaaacactgctctggatgcactgaagaaacctgcgggagcaaccagaaagttacaaatgaatattccagaagagttacatcttgcatttaaattagcttgtgtggaagatggcattgatatgacacaggtaaatatagaactcattcaaaactggttaaagagtcgtaactga

SEQ ID NO: 303382 - DNA, 1491 bp, Proteus mirabilis; identical to SEQ ID NO: 36692

SEQ ID NO: 303383 - DNA, 291 bp, Proteus mirabilis
atgagaacactggaagaagtaattgaggcccagtcacctgaaagtcaggctatcatcaaagctatggctgataagatgattctggaaaccggagtagaaataatgaatacagtgcagattccaacaggttcgattaagacattcgggctgtttggtattccttacgaggtaggggaaccagcacaggaacttcccgatggtgatattcttgtcaacattatactggttcagactggtgagaaagagctgtacaaactttcaaaactattacaggatcctgatgcagaataa

SEQ ID NO: 303384 - DNA, 300 bp, Proteus mirabilis
atgagaacattagatgaggtgattgccagtcgttcacctgaaagccagacacgaattaaagaaatggcagatgagatgattcttgaggtcggcttgcagatgatgcgtgaagaactccagttatcacaaaaacaagttgctgaggcgatgggtataagccagccagcagtaacaaaacttgagcagcgtggtaacgaattgaagcttgctacactgaagcgttacattgaggcgatggggggaaagttaagtctcgatgttgaattgcctacaggcaagcgtgtagctttccacctgtaa

SEQ ID NO: 303385 - DNA, 348 bp, Proteus mirabilis
atgtgggcggtactttttagccagcgatttgacgactggctaaatgagcaagaagacgctcttcaggaaaaggttttggctgatttgaaaaagctacaggtttacggacctgagttacccaggctatatgccgataccgtgaaaggttctcggtacaaaaatatgaaagagcttcgcgttcagttttctggccgtccgataagagccttttatgcgttcgatccgattcgtcgggctatcgttctttgtgcaggagataaaagtaatgataagcggttttatgaaaaactggtgcgtatagctgaggatgaatttacagcacatctgaacacactggagagcaagtaa

SEQ ID NO: 303386 - DNA, 249 bp, Proteus mirabilis
atgtttgagaaagttgaagataaagcaaaagaagtagccggagaagttcaggagaaatatggtgaactgactgatgattacggaaatcaggtaaaaggtgctgcccgtaaaatcgctgcacagggtggtcaggctgcccaggaggcggcggatgttgtacgtaataatgtagaaaataatcccttcgcggcaatttccatcgccgcgggtgttggcctgctgattggcctgctcatcggacgaaaataa

SEQ ID NO: 303387 - DNA, 354 bp, Proteus mirabilis
atgaatgcattaaaaacatggtttctttctgctatgctggtatcagcaggcgtactggctgatgcgtccactcataccgagcatttaaaaaaccaggccagtcagcaggccgaaaaaatatctaaccgggcagaagaagctgcgcacaaggccgaacatcggattgaggaaaaacaacagcaggttgagaaccgcctcaagaatggtggagaggtgagtacgactgataaagtaaaggaagatgcacagaaagcctggaacagaaccaaagaaacaaccgaaaaagcctggaacaggactaaagaagcagcacagcaggccggagatgctgtaagtgaaaaggtgagcgaataa

SEQ ID NO: 303388 - DNA, 402 bp, Proteus mirabilis
ttgacaacaggaaatatccagccgcgtggaccatcccgtagcctgatggacaatatacaccgtatcttcaatactcttacaggaatattgcatacccgccttgagcttattgcgattgagctggaagaggaaaagaaaaatattctggagttgctgctgatggtgggggtaaccctgatattcactgtatttggggttatatcgcttctgatattcattttgctgtcggtctcaccggaacatcggcttatcatatcaggtggtgcttctgctgtttttcttgttattgcattattttttgtgattttcattaaaaaaaagactgccggaagcaggatattatcagagacccgtaaacaactcagtgaagacctgaactgtctgaaaagggatgatgaatga

SEQ ID NO: 303389 - DNA, 402 bp, Proteus mirabilis; identical to SEQ ID NO: 36691

SEQ ID NO: 303390 - DNA, 1200 bp, Proteus mirabilis; identical to SEQ ID NO: 36690

SEQ ID NO: 303391 - DNA, 294 bp, Proteus mirabilis
atgaatacccggaaaacagaggagaaccgaaaacagaaactgttaaaacagattgagcaacaacgacagacactgggcctgttaaaggcagactggctcaggataacgtcgcctgttgaccgcggctggctgtcattatatcagtggcgtaatgttatcgttcccgcagttggagtagttgcattgtatgcgctgaaatccagacctcgtcgtctgattgtctggccacgcagagcactggcagtctggggagggctgaaatttatcaggcggcggttcccgatgcaccgatag

SEQ ID NO: 303392 - DNA, 720 bp, Proteus mirabilis; identical to SEQ ID NO: 36688

SEQ ID NO: 303393 - DNA, 579 bp, Proteus mirabilis
atgagcgagcagttaacggaccaaatgttggtcgagaaggtacaactgggtgaccagaaagcgtttaacttgctagttatccgctatcagcacaaggtagcaagtctgatttcccgttatgtacctcagggtgatgtgccagatgttgcacaagaagcctttataaaagcctatcgagctattggatcattccgtggtgatagcgcattttatacatggctttatcgcatcgctgtgaatacagctaaaaattatctggtagcacaagggcggcgtccgccttcaaatgacttagatgcgagtgatgttgaaaattttgaaacatcaaacgcattaaaagaaatttcgaaccctgagaatttaatgttgtctgaagagttacggagagtagtttttcaaaccatagagtcgttacccgaagatttaagggttgctattacacttcgggaacttgacggcttaagctatgaagagatagccgttattatggattgccctgtaggtacggttcgttcacgtatttttagggcgcgagaagctattgataataaggttcaaccattaatacaagagttataa

SEQ ID NO: 303394 - DNA, 213 bp, Proteus mirabilis
atgattaataaaattgatttcaaagctaagaatctaacatcaaatgcaggtctttttctgctccttgagaatgcaaaaagcaatgggatttttgattttattgaaaatgacctcgtatttgataatgactcaacaaataaaatcaagatgaatcatataaagaccatgctctgcgctgatgaatcccctaatgattttggtaaaaatcattaa

SEQ ID NO: 303395 - DNA, 1146 bp, Proteus mirabilis; identical to SEQ ID NO: 19181

SEQ ID NO: 303396 - DNA, 534 bp, Proteus mirabilis; identical to SEQ ID NO: 19180

SEQ ID NO: 303397 - DNA, 318 bp, Proteus mirabilis; identical to SEQ ID NO: 19179

SEQ ID NO: 303398 - DNA, 426 bp, Proteus mirabilis; identical to SEQ ID NO: 67466

SEQ ID NO: 303399 - DNA, 5487 bp, Proteus mirabilis; identical to SEQ ID NO: 25143

SEQ ID NO: 303400 - DNA, 708 bp, Proteus mirabilis; identical to SEQ ID NO: 25142

SEQ ID NO: 303401 - DNA, 708 bp, Proteus mirabilis; identical to SEQ ID NO: 25141

SEQ ID NO: 303402 - DNA, 819 bp, Proteus mirabilis; identical to SEQ ID NO: 36693

SEQ ID NO: 303403 - DNA, 1215 bp, Proteus mirabilis
atgactaaccatgtctctacgctcaacgtgttgctctatggtgaaccgatcgcaacgattaccaacgtgggtaatgacagaacactttttgcctttatggattcgtacattaatgacgaatcgcggcctgtgttagggcttggctttaaagattcgctcggtggcctgctgactagcttcaaacctacccaaactaagttaaccccgtttttctccaaccttttaccagaagaaaccatgcgtaattacctggctgagcgtgctggtgtgaacccagcacgggagttttttctattgtgggtgctagggcaggatttagctggcgcgatcacggttgaaccggcggatggtgaagcgctgccacctaatgtgcatcaaggcattgacgatgaaacgaaaattgaagcgccgatgcgcttctcattggcgggtgtgcagttgaagttttcagccgtgcaacaggctaacggcggcttgaccattccagcaactggtaaaggtggctcttggattgtgaagttgccgtcatctcgatttgacgctgtgccagaaaatgaatattcgatgatggaactggctcgcatgttggggatggatgtgccagaaacgcagctactcccgattaaccagattgctaatattccagcaggcattggcaaatatggtgacagtgcgtttgtgatcaagcgctttgatcgtgttgatggccaagcgatacacattgaggattttgcgcaagtgtttggcgtctatcctcaagataaatacaaaaaagccagtatgcgcaatattgctcaggttatcggcattgaaggtaaagacgaagacattgcagaatttactcgccgattggtgttcaacacgctaattggcaatgccgatatgcatttgaagaattggtctgtgatttacaaagataagcgcactgcgtctattgcacctgcttatgactttgtttcaaccattccttatatccccgatgatagtgcatcgctgaaggtgagccgtagcaagaaattcagcgatttcacgctggatgagatatcacacttagcggctaaagccatgttgccagaaaaattggtgttagatacagccaaacaaaccgtagcaggcttccatgaggtatgggcgaaagaaaaagcgcatttaccccttactaagtcagtcattgaagccattgaaatgcacttacgaagcataccgctacgctga

SEQ ID NO: 303404 - DNA, 321 bp, Proteus mirabilis; identical to SEQ ID NO: 36686

SEQ ID NO: 303405 - DNA, 192 bp, Proteus mirabilis
gtgatcgttgttgatcctgagttatcttattcttcagatttattggttgttgcgcgtttggatgattcgaaagaagcaacctttaagcagttggtcattgacgatgaacagaaatacctaaagcctctggactcccaatattcagcaacagcgatcaacgacaacggcaccatcattggtgtagcacgataa

SEQ ID NO: 303406 - DNA, 987 bp, Proteus mirabilis
atggctggaatattaggctctattttaatatttatggctaaccccaatgccggtttagccacctttacgggaagtatggctgggatgcaacaaaacatgatcaccttcacgcaaatgaacgaacaagaagctgatcggataggaatacaaactctttatcgtgcagggtttgatccacaaggtatgcctaattttatgcagatcttagcagaccaagtgcgctatagttctaagccgcctgaaatgctattaacgcaccccttacctgacagccgtttatctgatgcacgtagtcgagcagcgcaatatgctccgcgcaaagtgccacaatcggctaattttctctatgctaaaatgcgggtattaactatgcttgagaaaaaccccgcatcaagtaacgccttgcaaaccacgctggatcagtttaggcaaggaacggaattagaaaaatcagccgctaattatgcacaagccttactctattctcgtgatcgtaaatttaatgacgcgagaaaaatactcgcccctatgctggcaaaagagccaaataatatctggcttattgatgccattaccgatattgacgtagagcaaaaccgtgctgcagaagcgataacacgtttacaacaagcgcttaagcaatcacctaataacaaagtactgacggttaatttagctaatgcttatatgcaaaataagcaatataacgaagctaatcgattattatatcgctatacctttgacaaccctgacgatcctattggttggcaattggtggcggaaaatgcggcaaaacaaggtaatcgagcccaagagcttgcagcttacgctgaagatttggcattacgaggagattttgaaactgccattcgttatcttggtgatgcgagtcgtcaagtaaaattaggcagtaatgagcaagctcgttttgatgcacgtattgatcaattgcgtaaacttcaacataaagacagtcaatttaaataa

SEQ ID NO: 303407 - DNA, 357 bp, Proteus mirabilis
atgaccaacaaagtaacgatttatcataatccgcgctgttctaaaagccgtgaaaccttacatttattagaagagatgcatatcacccctgacgttattcattatttagatacgccgccttctgtcgatgagttaaaagcattactcaaagcgctagattttgacgatgcaagaaaattaatgcgcaccaaagaagaaatttataaaaccctaaagcttgctgatgagagctcacaagaagcattaattcaggccatgcataatcaccctaaattaattgaacgtcctattgtggtcgttggcaataaagcgcgtttaggtcgtccacctgagcaagttaccgccctttttaagtag

SEQ ID NO: 303408 - DNA, 1251 bp, Proteus mirabilis
atgaacatcgtacatagactcaaacttgtttcattcctccaattttttatttggggctcttggcttgttacgtttgcttcatatctatttgataaattacattttaaaggtactgacgttgggctaatttttagtgctttaggattagcatcactgatcgcaccggtgatcatgggatttattgcggacaagataaataaccgtaagctggtctttattaccctgcatattttatccgcgtttgctttagtgctgatgtcccaaatgaccacagtgactaccctcttctttgcgacacttctgcatttattgttctttatgccaagcatttctatggcaaacagtattatttttgagttactagagcaaaaacacctagagccaaatgactatttccccaaaatccgtgtttatggcaccgtgggttttattgctgcaatgtgggttattagcttcttaggtttcggtaatagctacgatcaactgtttgttgctgcaatagcctctattatcttagcggtatttgcgatgtttttaccggcgacaaaagcgacagataaaacagaagcaaaagaagaagtggccgcttttagcttatcgaataccttacaagtgtttaaaaagaaaaatgtggttattttccttttctttgccacattgttaggttcagtattgcaaattaccaatacatttggggttccattcttacaagatatggccaaagcacctaatgctgatgactctttcttggctcattatccttctgttttcttatccatttctcaaatttctgaagtggtctttattctatttttacccctgttattaaaacgagtgagaatagaaactatcgtattatttagtatgattgcatggatcttacgttttggtttcttcgcttacggtgattattcatcattaggccaaatcgttctgttgttatccatgattgtctatggttgtgctttcgatttctttaatatctccggctcactattcctagaaaaagagatcccattacaatatcgctctaccgcacaaggtatgtttatgaccttagtgaatggttttggtacttatttaggtgcgatgttaagtggctgggttattgatttgtataccacagatggtgttattgattggcagtcattctggttgatctttacgggttacactgtggctatcaccgcactttatctgatttacttagtggttccgcagaagaaaacaaaagttgtagaagcacattaa

SEQ ID NO: 303409 - DNA, 747 bp, Proteus mirabilis; identical to SEQ ID NO: 295113

SEQ ID NO: 303410 - DNA, 1206 bp, Proteus mirabilis; identical to SEQ ID NO: 295114

SEQ ID NO: 303411 - DNA, 708 bp, Proteus mirabilis; identical to SEQ ID NO: 303373

SEQ ID NO: 303412 - DNA, 174 bp, Proteus mirabilis
atgagcaagaaaatgtatttacacgcatcaactaacgctgtcggttctgaatgttcaactgagttagatataacagaagatgaatggaataaattaagcgaagaagaacaaaagcagattattggcgagttcatgagtgatgtttgtgagtggtgggtgcaaccagaggaatga

SEQ ID NO: 303413 - DNA, 534 bp, Proteus mirabilis
atgtcttatattgcaacagcaacaaataaacatttctattatctcgatgtacggatcgaagatatagatattcaagatattgcgacgggtttagctaatgaatgtcgctttaatggacaaattgataatttctattctgttgctcagcattctgtgtatgcaagttatttagttgcacctgaatttgctttagaggccctacttcatgatgccagtgaagcttatgtcaaagacctaccgtcaccacttaaaaagttattgcctgaatataaattaattgaattgcgtgtggaaaaaatgatccgcaaaaagtttgggttacctgaaaatatatctgatgaagtccattttgcagacctagtgatgttagccacagaaaagcgtgatttagacattgatgcaggtagtaactggttaatgcttgaaggtattccagctagcgattttgctgtcaccccgctaacccctcgacaagcaaaatccctattcttacgccgttttaatgagctttataaggaggttgagaatggctaa

SEQ ID NO: 303414 - DNA, 828 bp, Proteus mirabilis
atgtctcaattagacggtaatgctatttcgcaaattcaagatatgaccgtggcttcattaagcctcgaagcaatagaaaaatctctttgtccagcgattgtgcttccgaatgactttgaagtaagtagtttagaaaatttacaagaaggtcgtttccgttttcgcggggaaatgaaaacaaccagtatcagcgactttgttaaatactcaatcaagaatgcaattgatgaaggtgttagctgctttattgatgccgatgaaatgagtgccgaaactatttttaatctcggcacaataggtaaagcaggtcatgctgataacactgctattgtgaaattaaaacaaaccgccccattcacagcattattaaaaatggatggtgttaaatatcgtcaaaaacaattagccgagtggttagaagattggcacgattatttaatggcatttgatgctgacggtaatgttttagatatcaaacaagctatttctgctgttcgtcgtattacgattgaatcaacacgctctgctgaacatgaagatgctgattttagtgctaaacgctcagtgttagaaaatgttgaagcaagaagcaaagacattatgcctgctacattccagtttacttgtactccttatgacgaattaaaagaacgtagcattaaattacgttatagcgtactcactggtgatgatattcccgttttagttcttcgaatcattcaacttgaaaaacttgaagaacaaatcgctcaagagtttcgagatatgctttgcaatgaattcgatgaaagcaaaatcgaaacattcattggtaaattttcagcgtaa

SEQ ID NO: 303415 - DNA, 1521 bp, Proteus mirabilis
atgaataggctatttgatagcagagctttttggttatttttatatcttttatctttttgcgtatctctttatcttacttcgcgatacagttacttatggtcaggggatgctgatgctgccaatagcccaatggtatggagagcattcttggatcgtggatgggatgcattcgctcaatggcaaccgacatttgataactggtactttaccgtctatccagtaaactttactttgtttttcctccttggtgatgatgggttattgccattggtgatatcaagcacaatatttatatttgttatcacagtatgcgcaacagaacttgttaaatcctatgcaggaagatacttagctttccttgctttaatatgcataacatttatctctccagacctatacaggcatggatatttctcacatccattctcgcacaactctactaatgcatatggttttgttgtatttgttttgtatatatacagtttaaaaaacaaaaacatattgataccgattgcttgctctttaatatctctactagcgagcgcatctgatccatggcttcttgctgcttttttcctaccaatgataataacagaatgttctgtcatagcttttgagaaaaataaaaaaagaaatatcattatatattttgtgttttttgcattagctgtctcgaatgtaattcaaaagatcattggtcttcctgtgcactcgtttagcctagcaccttttgatgttattctggagaacgctaggcttgctgttgaaattactaccaagatattgccaataaccaatatagacaatgcgtattttatgtatgcaatattctttacatggtccattatatgtttgtatgctacgttcatatgcataaagattggtggcataactcgctacattgcaatattttctatcatgtctatagctggaatatattcttcttcgataataggggaccaaactccacatcaaagattttatcttaatgttgtcccaatggtgatcgtgatattggcaatagcatcatcttctaagcgaaccgtactattaacaatacctttgctgttaagttttgctacatgcatgtatgggtactcattaatgcctcttcgctacaagattaacaataatcctgtaaattcatatatagattttcttaagaaccatgatcttacttacgggtatggtagtttttggggaatgtctatgggagtaaattggttatctgatggaaaaattcacataacaccaatttacttccataataaaactggtgaagctaactttaaggacgctagagttcaaacaatgaaatactggcacacaaatgaatttattaaagataaaccatctcgtcaatttattgctattagcaaaggaaacactggtgacaggtgtaaggatgtttctttatgtgtaagtgctgtaatatcacaggttggagagccagcagaaatattggaatataatggcataaaaatattagtatttaataaccacatacatacaggtctttaa

SEQ ID NO: 303416 - DNA, 1023 bp, Proteus mirabilis
atgcaactatttaatgacgacgcactatctgtattaaaaacactacctgataacagtattgatttaatcgccacggatccaccgtatttcagagtgaagtcgtgcgcatgggataatcagtgggataatgttgagtcgtatctgtcttggctcgatgaagtattagctgaattctggcgagtattaaaacccaatggcagtttgtatttattctgtggttctaaattggcgtcagatactgaattgcttgttcgcgggcgatttaatgtattaagtcatatcatttgggctaaaccatctgggccatggaaaaaacaaaataaggaaagcctgcgcgccttttttccttcaacagaacgagtactttttgctgaacattaccaaaaaccagtcacagctaaaggttctgagttttcgttaaaatgtaaagagctaaagcaaaatgtatttaagccattgattgattattttagaaatgctcgtttagcactgcaggtgagtgcaaaagaaatagaccaagcaacaggtaagcaaatgtgcagtcattggttcagcaatagtcagtggcaattacctagcgaggaagactataaaaagttacaaacactgtttacacacattgctgataaacacgaaaaactatcaccgttatcccgccagtttaccgagttagagcgtgagcaggttacattacaaaaagactaccaagaattaataaaagaatatgggttattaaggcgaccattctttgtaactgcagatgtgccttacaccgatgtgtgggattatccacctgttcagtattatcccggtaaacacccttgcgagaaaccatcagccatgatggaacacattattcgctcaagtagtcgcgaaggggagctagttgctgatttttttatgggatcgggtgcaacactgaaagcagcactaaagcttaatcgaaaggttttaggtgtggagcttgagagagagcgatttgaacaaaccgaacaagaaataaaagcgctaacttgtaagtaa

SEQ ID NO: 303417 - DNA, 438 bp, Proteus mirabilis; identical to SEQ ID NO: 301398

SEQ ID NO: 303418 - DNA, 1521 bp, Proteus mirabilis
gtgattaaattattatcagcagcacaaaatcatcgtcctatttttgttgttatggctgtttttaccggagctattttatcaacactctttgtacgtatgttttctatctcattagcggatttaagaggcgtgtttggtttagatgttgaccaaggatcttggttgaatgtggctcttaatatagctcaattgatcagtatgactcttgtaccttggtttatggtggtttatggcgcagaaaaaatattaatcagtgcgagttttatccttttttgttgtggattagcggttcccataataggacaacagattggttttggcggactttttattgctcattttatgattggattttgtatcggagtctatttgccgatgacgatttcattagccttaaaaagtttaaatcccagtgtttggctaatcgttatggcggcttatagcttacgtgtttctgtaggaatggatgcgggagtggggatctcaggagaatttgttgaaatattgaattggcgttggatttattggttatccgctattttcaccttagtcatcctattttttacctggtggggaatgccactctcacctattaataaatcattgctcgctcaaagtgattggggaggaatggcgcttaaatgcttaggattaacgctattatatattggtgtcgttcaaggtgaattgttaggttggtgggattctgggctggtcgtgtcttgcttaatcggtagcgctatactgatggggacatttattattagagcttatatttataaacaaagctttggccacttaaattggatcaaagatagtaatttacggctctgctttattattgcctgtttatatggctttttgatgttacctaattcgttatttataccttcatttttgagtgttgttggtgggttgaaaccactacaaataggtcaagttaccaatcttgccttctttatctatctattatgtagtccaatagctatttttcttgcacggcgtttagagccacgattaatgatgttaataggtattatgattattggaggagcatgtttaatcggtcatcaaattgattatcagtggcgagctaatgatttctttattgtcatatctatgcaagcaatgggggaatgtttgctacttatcggattaattgcctcatttgttactaatatcaagccacaagaagcgttacatttaggggcatatatttcgatagcgagagtattaatgccagcccttgcaggagctattatcaatacatatttgaggatctcatatgatactcattatgatttgttaagaggatacatacaaactggtgagcaaaaattagcagggaatattgctgaacattatcaaacaacgatggcattagtaataagagaagcacatgttgcctcttttattgatggttttgatttgattatgctcttggttattttaggtgctctttgtatgtcatttttaaaatcgtcaccagaaaatccggtagtcccaaggctagtaaaataa

SEQ ID NO: 303419 - DNA, 321 bp, Proteus mirabilis
atgaacgtttctaactcataccctaccgataaatacccccaattaacatcaccgtcattagcaaaaaacagagaggaagctctggctcaagctattgcaatgattgaggggtgcttgccaaatacgagtgcgccagacagggaaaaacgattagcaatggaattgctacacataaacttggacgcatcgaaaaatcaccctcctattcctccacatattcaggcgttacgtgatgcagaaagggattctgtaccaagtaataaatctgaagtcgattactacggaagcgatcggcgtcaaggtcaatatttaggggattaa

SEQ ID NO: 303420 - DNA, 678 bp, Proteus mirabilis
atgacataccgagtagtagatacagaaacttgtgattttgacagcggaatagttgagattgcaagtatcgacattaacaacaatgaaattgattacacgtctcagaagtcccactttgtaaacccacagaaaccaatctcaataagcgcaatgacaatccatcacatcaccgatgaaatgattgctgattctccacttattgatgacgttatcggtaattacaaaggatctgattacctagttgcacataatgccgagttcgataagcgaatgatgccggaaatggatgctccgtttatttgtacgttaaagctggcaaggcgcttatatccagagttagagagccacagcaatcaatatctacgttacgcactaaagctgaatgttcatgtgccagatggattacacgcacacagagcgctatatgactgcattgttacagcatcattgtttaaacgaatcaaggacgattcagggtggtcagataaggaaatgttagaaataactaatcagccatcactattaaacaagttacgttttggtaagtacaaaggaatgacattcgtcgaaattaagaaagaaaatacaggttatttaacttggttactcaatcagactgatttagatcctgatgttgagttttcaattaaatactggctggagaaaaaagatgagtga

SEQ ID NO: 303421 - DNA, 618 bp, Proteus mirabilis
atgagtgaggtatataaagcaataagtaatgttgctaaggaactagcagaaaaaggaataagcaaggagagaccaaaaggcggtggtgttaattatgcatttagagggattgatgcagtttataacgccctagcccctgcattagttaagcatggattgcttatcttgactcgctgtactgaacgcttggtatgtgagagaaccagtaagagcggaggtgtattaaattatgtcactgtaaaagctgagtttgattttgtatctgtcacggatggcagtaaacacacagttatgacttatggagaggctatggatagcggagataaagccacaaacaaagccatgtccattgcatataagtacgcggcatttcaagcgttctgcattccaacagaagaaacagcaattgatgcagatgcggaaattcataatgtagcgccacggacggcagagcagatattggctgattacactaactttcttggaacagctacgaatcagtcacaaatcatggatgagtacaaaaaagcatggaatgcattggctggcactgaatcacaaaaggaatgtgaacgtgtaacaggcattcgaattaaagaacttaaggaaactgcataa

SEQ ID NO: 303422 - DNA, 339 bp, Proteus mirabilis
atgaaaacgctacatggtcgctgtattcgtcgttggaaactgagatttaaagatgtttgcgattcgaaggtttcaccctatttcagaaagcgcgacttaaagggattttgtcgcgaatctggcgtcactactgccgatggaatgattgaagatatggcttttaataatgctaaatttgattttgatggagagcgccacggatggtcgcctgaattttcaaagttctttgacgagaatcgagagaagtacattaccgaagcacatttgtttctcaacgaagaagctactaatgacgaaatagacgacttaatagaagaagaaatatctaattggaattag

SEQ ID NO: 303423 - DNA, 174 bp, Proteus mirabilis
atgagcaagaaaatgtatttacacgcatcaactaacgctgtcggttctgaatgttcaactgagttagatataacagaagatgaatggaataaattaagcgaagaagaacaaaagcagattattgacgagttcatgagtgatgtttgtgagtggtgggtgcaaccagaggaatga

SEQ ID NO: 303424 - DNA, 840 bp, Proteus mirabilis
ttggtaaactcatttactcgtgatcattgcggtggcaaccctgccggagtcgttctcaatcctcccaagctaacgacagaacaaaaaatcgccattgctcaacaagttggattttctgaaacggcatttgtctattcgggtgatgacactgattttaaagtagatttttttactgctgaaggagaagttgatttttgtgggcatgcaacattagcggtttttttcactctgtcatcgcttaagttactcaaacctggcgattatagccaaaaaaccaaggcaggaattttaaccgttaccattaatcacgataatattgtgatggaacaaacgcttcctattacccgtaaggggccttgtgttaacgatgccgcaaaggcgctgggcattctacctgaagtgatagaaaagacagatttaccaatagagattgtctcaacaggattaaacgatatttttgttcccgtacaatttggctatttagatgccttacagcctgactatcaagctatcgctgctttaagccataaatttgatactatcggctttcatgtctttgaacttagtcatgatcaaaatattactgcccactgccgaaactttgcaccacgctatggcattaacgaagaatcagccacaggtagctcgagcggtgctttagggtgttatcttgttcatcaccttttgccaaacaaaaggcaatttttgttcgaacaaggtagagcaatgcaatgctcttctttaattgacgtatttattgattcgacagcaaaaaacgtcactcgcgttcaagttggtggaaaagcgacattgattggtacaaaaataattgagatctaa

SEQ ID NO: 303425 - DNA, 246 bp, Proteus mirabilis
atgaggcgattattacccactggtgctattaatttagccgcttatgctttttttgagccacaggagccactgatcccttttattccttcatggtataacgtatgggaatctcatatgttacgtttagcgggtaaaaaaagcgcaggaaaaagttggagttttcaacgctatggggtcaatcatgatatgtatctacgtgaaggaataaaagggatcagtggctcctgtggctcaaaaaaagcataa

SEQ ID NO: 303426 - DNA, 240 bp, Proteus mirabilis
atgatatctcaacctgaccatcaattaattacttgtgcaccaggatattgtcgttattatgtgaaaacacattttcctgatattgtaacattacctatccctctcccccctgtgtttttagaccagcttcatctaccttttgttttattatggcataagcgtaatagccataatacaaaaattatatggctaagaaatacaataagaaaaagtattaaccaacaaatctccgatatctga

SEQ ID NO: 303427 - DNA, 195 bp, Proteus mirabilis
atgagcaatgagaacccaaaccaacttgatcgctactataaaaatcaccgaggtatcgttgttcatgttgttcgttatgacagagaaaacagcgcgttatttttatgcttgatggttgtgacgacccacagtgtgaacctgtacagcgttttaaagagaagtacacacgtattaagtaatgaggtggcaagatga

SEQ ID NO: 303428 - DNA, 210 bp, Proteus mirabilis; identical to SEQ ID NO: 297314

SEQ ID NO: 303429 - DNA, 192 bp, Proteus mirabilis
atgacgacacaagaagtagaatcttatttcggtgatgctaataaagtcgccacttttttcaaaataaccccggaagctttttatcaatggaaaaaaagacctggtcaattaataccaaaaaatagggctatcgaggctgatttgctcactaaaggaggtctcaaatataaccctaacttatacaaacaataa

SEQ ID NO: 303430 - DNA, 633 bp, Proteus mirabilis
atggacacagtgggaagcagaataaaaaagcttcggcaggcaacaaaaacaacacagaatgaattaggtaagtattgtggagtatctggtgttgctgttggttattgggaaaaagatcttaattcaccaaatggtgaagctttaattaaattagctcagttcttcaatacaactgaatcctatatcctttatggtatatcacagcaaaatgataattctataatcacctcaatgaagagattgcctgtgctttcttatgttcaggcgggaaaatttacagaatgtctttctaaagaaatatatgatgaaacaatggaatacattgaaacgtcaataaaggtttccccatcaagttttgctcttcatgttaaaggggattccatgaccaacccatcaggaatgccatcaatcccggaaggtgttaaagtcatagtggatcctgaggctgaggttataaatggtaaaattgtcgttgcacgccttactggaagcgatgaagttactataaaaaaactcattattgatggtccaaataaatatctttctcctttaaacccacgctacccaaatattcctattaatggaaattgtgaaatagtcggtgtagtcaagggtgtacagtacgaaatctaa

SEQ ID NO: 303431 - DNA, 333 bp, Proteus mirabilis
atggcttcaacggtatttgcattatcagcaacacaaaaacgttgtagcgcactttcaatgctcttgataactgcttttgaggtttcatgttttaatgcttctgccagcacatcacggttttcaccttggcgcgcgaataaatcagcggcttgtgtacgttgtttgggagtaccattcattaaaacatgggttaaattttcttttacgatttcagcaggtaaggtatttaaaataggttcagccgtttttttgacggttcttaaactgctagtggcaagtaaaacaataatatctgcaaaagtatcgcgtaatatcgtatttttatttagataa

SEQ ID NO: 303432 - DNA, 1176 bp, Proteus mirabilis
gtgcagatccaccagctcatcaatcacggttgcagtgctctccagcaccacggcggccagggtcgcatagcgccgctgcggctcgaacttgccgaggtctttgggcgtcatctgcccaccctcgcgggccagcttgagcaggcggttctggtggatgtgccggcccaggacttcgggcaagtccaccagctgaaatgtcttcagccgctcgatgtgctcaagcatgtgccgagagttgggtttcagcggtgcctggcgcagccaggtcaaccaggtgatgctgctgccggccttgagcttcaacagctcgtccagcttggcccgatgcgagtccgtgagcggttcaaccagggcgcggtagacccgccgattggcccgtgcaatggcctccgagcaagcccggtcgatcacgctcaacgccggcaggatgcgtcgcttctgccgcaggctctccagcgcctggccggccagcagcaagcccttgtcggtctgctgggccagttcggtcagctcgcgcaccagggcgcggaagtcggacaggccgaacggggccagttgaaggtaggtgcgcagttcctgggcgtgctcgcgacgggtcacatcgcgctcgccgtacttcgtccaactcgccggatcggtctggacttgcttggccacccacaggatgaccggttcgggcagctcgctgtcagtgcccaacgcatagccggggtagcgcagcaggcagagttgcacggcgaagccgaggcggttggcgtcgccgcgccgctgacggatcagcgacaggtcggagtcgttgaaggtgtagtagcggatcaggtcatcctggctttctggcaacgcgagcagggtgtcccgctccgtggccgagaggatcaagcgacgcggcatgtgtcagtcgtccgtgcggaggtactggtagagggtttcccggctgatgttgaactcgcgggcaagctgcgccttgggctcgccggccgtcgctcgctgccgcagggtagcagcctgctcatcggacagggctttcttgcggccccggtacgcgccacgctgcttggccaaggtgatgccctcacgctgccgctcgcggatcagggcgcgctcgaactcagcgaaggcccccatcaccgacagcatcaggttggccatcggcgagtcctcgccagtgaacactag

SEQ ID NO: 303433 - DNA, 2169 bp, Proteus mirabilis
atgagtagcacaacaatgggtgttagacttgatgaagaaacccgtaatagattaaaagatgctgcacaaaaattagatagaacatctcattggctaattaaacaagccatcttcaattatcttgaacaaattgaaaatgatcagctcaccctaacccctattacacaggctgagcaagatattgaagaaagcacagatcccctaacggcacattatcaaccgtttttagaatttgcagagcagatccacccacaatcggtgttacgctcggcaattacttctgcttatcgtatacctgaaacacaagcggtgcctatgctactacagcaggcaacactacctgagcatgaggctcaagccacgcataaactggcttactccattgcagaaaaattacgcaaacaaaaacagggtgttggacgctcaggtctggtacaaggcttactgcaagagttttctctctcttcccaagagggggttgccttaatgtgtttagccgaagctttattgcgtattcctgataaagcaacccgtgatgccctgatccgagataaaattagccatggcaattggcgctcgcatttagggcaaagccaatctatgtttgtcaatgccgccacttggggtctactgtttacaggcaaactcgtctctacccataacgaagagaaattatctaattctctaaatcgcattttaactaaaagtggtgaacctttagtgcgtaaaggcgttgatatggcgatgcggttaatgggggaacaatttgtcaccggtgaaactatctcccaagcgttagccaatgcacgcaaacttgaagaaaaaggctttagatattcctatgatatgctaggagaagcggccttaacggaaaaagatgcgcaagactatttagtctcttatcaacaagccatccatgccattggtttatgtttaggtgcatggcttaactggcgtttagttgcagggcgcttacgtttacaaacagaaaaaaacaataatgcactgactttaccagactatttaacttctcgctttgatgacaaaagcaaaatgctacgcattatttctgcgttagttattcttattttcttcactatttattgtgcatcaggtgtcgtcgcaggaggtatgctttttgagtctacctttggcattccttatcatgaagcgatgatttatggtgcactagcaaccattgcatatactttcctaggtggttttttagcggtaagttggacggatacggtacaagccacattaatgattttcgcacttattctgacaccaattattgttattttctcaattggtggaattgacacctctatagagatcattaaagcgaaagatcctacttatcttgatatgtttaaagggcttgattttattgctattgtttcattattagcttggggattaggttattttggacagcctcatattctcgcgcgttttatggctgcagattcaaatcaaactattcgtaaagcgcgccgtattggtatgacttggatgatcctctgtttaggcggaacggtggcggtgggcttctttggtattgcttattttgaagttaatccggccgttgcaggtccggttatggctaaaaatgagcgtatctttatggaattagcttcgttactttttaacccgtggatagctggtattttgttatctgcgattttagctgcggtaatgagtacgttaagctgccaattattagtctgcgccagtgcattaactgaagatttatataagccttttattcgtaaaaatgccagtcaaaaagagctagtttgggttggtcgtggcatggtgttattagttgcggttatcgctatttatttagcccgtgatccagaaaataaagtacttgatttggtgagtaatgcttgggcaggatttggtgctgcatttggtccggtgatccttatctctgtcacttggaaacgtatgactcgtaatggtgcttttgcgggaatgttaattggtgcattaacggtactggtatggatgcaatataaatggttcggtctttatgaaattattccgggctttattttcgcgtccatagccattgttattgtcagtttaatgggtaagtcaccaacggcagaaaatcaacaacgttttgatgaagcagaagcggaatatcgtaacacttaa

SEQ ID NO: 303434 - DNA, 996 bp, Proteus mirabilis
atggaattgttgtgcccagcaggtaacttacccgcattaaaagccgctgttgataatggtgcagatgccgtttatatcggcttaaaagatgacaccaatgctcgccattttgctggcttaaacttcacagaaaagaaattgcaagaagccgtcaattacgtacatcgccaccagcgaaaactgcatattgccattaatacttttgctcatcctgatggatttgaacgctggcaaaaagccattgatatggcggctcatttaggtgccgatgcattaattttggccgatattgctatgctagagtacgcagctgaacgctatccacagatagagcgtcatgtatcggtacaggcgtcggccactaatactcaggcaatcgcattttatcaacgcaattttgatgttgcacgtattgtactaccacgcgttctttctattcatcaagtcaaacaattggctcaaagtagtcctgttcctttagaagtctttgcctttggtagtttgtgcatcatggctgaaggacgctgttatctttcctcttatctaactggtgaatcgcctaatactgtcggagcctgttccccagctcgttttgtccgttggcagcaaacaccacaaggtatggaatctcgcctcaatgatgtcttaatagaccgttatgctcctgatgaaaatgcagggtatcctactttatgtaaaggacgttattttgttgataaacactactatcacgccttagaagagccaaccagcttaaatacactagcgctactacctgaacttatggctatgaatattgcctctgtcaaaattgaaggtcgccaacgtagccccgcgtatgttactgaagttgcaagagtatggcgtgcagctattgaccaatgtaaaaaagatcctcaaggttttaaaacccaaccgcgttggacgagtgcattaggaaaaatatctgaaggaacacaaacaacattaggtgcttaccaccggaaatggcaataa

SEQ ID NO: 303435 - DNA, 2013 bp, Proteus mirabilis
atgacacaaaattcacctgataaaatcattgttaccgcatccccctcacaagatccgcaaggaccaatttcaggtttagtggcaacaaaaacactatcaacaaataaaatacttagtgatatagataagacaccacaatcaatcagtgtcattacacgcgaccagatggatgcgcaagatgtcagttcagtctctcaagcattgcggtatacacctggcgtattcactgaatatcgcggcagttcaaaccgaaatgatgaaatatttattcgtggatatagctatgccccccgttttcttgatggacttagttatggtatgggagcctcatcttctacaggagctattgacccttggctattagagagagttgagctgatccgtggcccgtcttctgttctatatggtcaattaaatccaggtggtcttgtggcaatgaccagcaaaagacccacttcaataaccattaatcatattcaagcacgtgtaggaaatgataaattagcagagacagcttttgattttgcaggctcattaagtgatgataatcgtattctctatcgccttaatggattagcaaaaacacaacatactcaaattaaagactataaagaagaacgatttgcccttgcccctgccatcacttttttgccaaatgagcagacacgtttaacgttattaagttttattcaacaagagcccgaagcgggataccgtaattttttgccagcttatggtacggtcaaaaaaacacccgaaggcaccattccatttgatttcaatgtaaataatgctgattatcaccaatcatggcgtcaacaatatggcgttggttatgaatttgaacatgaatttaatgatagattaaaattgatccaaaatgcccgttatagccatatcaaacaaaaatataaatatcttgtttttggttcattaagaaaagataacccttatattctggaacgccgagctcaacaggaaaaacgagaaacagatacatttggtattgatactcgactacaagctgattttgatactgaaaaattagcgcatacagtaattataggtatggattatcaatggagtaaaaataaagacaatttattgcaagcgatgggcccagaatatgatctggattggcgaaatcctaattatcattatcctattgatatcagtttacaaaaaccggtgacaaatcaattacaaaaacacgaccagttagggatctatttgcaagatcagatccaatggaaaaactggatcttattagggggattacgccaagattgggcgcaagttcgtacctatgatcacatcaaaaacagcaaagaccaacaagacgatcagaagctaaccggtcgagtgggtctactctatgcctttgataatggtatttcaccttatattagttatagcacctcttttgaacctaatttacagacacgaagagctccgggtagtgcaccatttgagccaagtgaaggacgtcaattagaagcaggaataaaatacctcaccccaaatgaacagacattagcaacactctctatttaccaattacaacaacgtaatgtgactaactataacgctgaaaaagcctattttgagccagtaggtgaaattagaagccgtggtattgaagcgcaaattaatagccaattaactgaaaatatatcatttattagtagctatgcttataccgatactgaagtgagaaaaaccatcaccgcaggtacacaaggaaaagaattaccacgggttcctaaacatatggcatcattttgggggcagtatgatgaaacatcagggctatttaatggtgctaaagcgggctttggtgtgagatatatcggtgtatctcaaggcgatactaaaaatacgattagtgtacctgcagtcactttgtatgatgccatggtaggttattctttaggcgaattatcctcctctttaaaaggggctgaagttcaactaaatatgaataatattgccctgtctcttatacacatctga

SEQ ID NO: 303436 - DNA, 345 bp, Proteus mirabilis
atgctccagctatttgcacgatacttctctgttggtgttattaacactcttttacattgggtggtgttcggtattttggtttacttagttaccacaacacaggctactgcgaatctgatcgcattcatcattgctgttaccttctcattctttgctaacgctaagtttacatttaagaagaaagcaactggtgggagatacatagcattcacagtattcatgggtgtgttaagttatctgactggatttatagccgataaactcaatgcaatgccaataattaccttagttgcattctcagcaattagccttgttcttggctttttctactcaaaattatattaa

SEQ ID NO: 303437 - DNA, 471 bp, Proteus mirabilis
atgggtgagattaaaatcagtggattgtctgaactcgctcaacgaatgcaagacattgcccgtaaaaccagaaatcaaagcgcgcgtaaggcgatgaatgcaggtgcttcggcgttaaaagaagaaatcaaacatcgagtgcctatccttaaggaaacggtgcctcatcgacgcaaaggcactatcaagcgcaatattcgttctaaaacgaaagtacaacgcaatgggcaagtcaaaacgcgcatttgggtgaaatcattatcgggtaaaaaggtgtctgcctttaaacaagcaacggggaaaagtgcagcattgaacccaaatgatccgttttattggtggtttgttgagtttggtactgccaagatgcccgcacaaccgtttatgcgccccagctttgaggcgaaaaaggaagcgacggctaaagtgattgttcaaacacttaaagaggatattgaaaaagcaaggtag

SEQ ID NO: 303438 - DNA, 465 bp, Proteus mirabilis
  misc_feature (436)..(445): n is a, c, g, or t
atgtctttgaaacgtaaaattgcgctggggaaaaatgtattagaagctgctcaagagagagtccagtggatatttgatacttttgaacaaatcactctctccttttcgggagggaaagattctactgcgctttttcatcttgttgccgcacaagcgcgaaaacaacatagaaaatttaatgtgatgtttcttgattgggaagttcaatattctgcgactatagatcatattataaaaatgaaatctatctaccaagattgtattgaacggttttactggatagcactccctatcaccactgaaagtggcatttctcaatatgaacctacatggacagcatgggagtctggtaaaaaatgggtaagacaaccgccagaagatgcgataactgaccctcactttttccctttttatcacccaaatatgctttttgaannnnnnnnnngattttacccctgcatttaa

SEQ ID NO: 303439 - DNA, 642 bp, Proteus mirabilis
atgaccattgaaactataatttctgttttaaaagagtacctagcaaaactaaatgatgaacaaaaaattgaagctctcaataaaataaaaatatcgcttcatcaaataagcccatttaaaaatgaacctactgactgtgttctttggataaagcaacaacaagttatcgctaatgactataatcccaatgtcatgtctccgacagaaaagagattactagaaacgtctctggtaaaagacggttatactcagcctgttgttgtcttacctattcaacaatccaaaaataaaccaacacaatggcaagtcgttgatggttaccatcgttatttattgagtaaaaaaaatagcttaaacaagcgaattaacggctatttacctattactatacttgatgttgaaagtcatactatggctgaccaaatggcagcgactattcgccataatcgggctagagggcaacatcaagtggcagcaatgtcggatatagttagagatttatcaagattaggttggaatgaccaaaagattggtgatgaattaggtatgtcacaagatgaagtactacgtttaaaacagattagtggcttagctgaattattttcagagcacgacttttcagaagcttggacggttaagtag

SEQ ID NO: 303440 - DNA, 1092 bp, Proteus mirabilis
  misc_feature (1041)..(1050): n is a, c, g, or t
atgcaacacacaattaattcacaatatgatgaaatggttgattttctaaaggagttagtgaatatcgatagcggctcttatgataaacaaggggttgatacagtcgctgatcttttaattcaacgctaccaaaaattaggttttattgttgaagtatttgaaaatgaacaactcgggaataactaccgtttagttcataaagatgccacaaacccacaaatttttattgctgcacatttagataccgtatttcctaaagggacagtagcagagcgcccatttagtatcgatggctcccgtgcctatggccccggtgttattgatatgaaagctagccatgttttaacttactatgcgattaatgcactcaaacaaagtggcgatctctcttatcaaaatgttgaaatattgcttaactgtgatgaagaaatagggtcaaaaacatcgcgtcatttaattgaaaaatatgccaaaaataaagcttatgcattaattatggagcctgctcgtgcgaatggtgccattgttagcgctcgtcgaggtgttggaacttatgagctgttgattgaaggtaaagcatctcactcaggtattgcaccagaagcaggaattagtgctattcaagagctttcatacaaaattcaggccctacatgcgctttctcgccatgatgaaggtctttccgttaatgtcggactgatttctggtggtacatctgtcaatacggttgcaccccatgcacgagctgaaatcgatgtgcgtatttcaacggatgaacagggtattgaaattgataagcaagtcagagaagtttgtagtcaacctgtgttagcgggggttaaattaacgctaaatggtggcattaatcgccctccaatggtgaaaacacctgaaagtgccaatttaatagaaatcattaaacagcaagcggatttaattggcttagctattgacgatatttcaaccgggggaggatctgatgcctcatttactgccggtgtcggcacaccaagtgttgatggattaggccctattggtggnnnnnnnnnnatcaacatagtgataaagaatatctcgatttaccgtcattga

SEQ ID NO: 303441 - DNA, 885 bp, Proteus mirabilis
atgaacaaacttcgtattgtgcttttcttacctctttttggcttagctttaacttcttttcattctcacgcagcaacagttaatgcgatgttctcgtgggaatctgctgattatgatacatcgaataactattctggttatcgtgttgattttaatattaatccagacaaatcgaactggtattttgacgtcggttttcgtcagcgtgaacatgacaataaaaatcgttatcagcgttatgatttacaaggtagttatcgttttaaattaaataatggttggatacaaccaggattaaaaatacgtcaagatttaactaactatgataatggtagccgtttaactatcgacttttatgaatcaaaaacaaattatcaatttcctattaataaagactgggttttaaccggtagtgttttgtttggattacaaaaaaaagaggacaaacgaagtaatggcgtcactaatacggattatttaggttgggaaattgaacccggtattcgctactttatcaccccgaatctcaatacaacagtggcttattttgatggtggaaaacaagcaataagacatgaagagtatgatacaaaagaaacaaatcacaaccagcaattacgtatgtatgtaaactggacgacacctatcggtgttattatttctccctcaatgcgtaagtctatttttggaaaaatagaagacagaacaaataaaggtgaatatatcgataaagatatgactcgttataccttacaaatggcttaccaaatatctcctcaatggcgtgttatgacagaatattataatgagcgtgttgagaataaaaataacggcagcaagtcaactcaagattattttaaagtatcagtaagagcaactttctaa

SEQ ID NO: 303442 - DNA, 1632 bp, Proteus mirabilis
ttgcacgagaatgcgaataaagacagtaaagttatcccaacccaacgcgatttacttgcgggaattgtggctaaacattacgcaaaattacatatcctgccaagagatgtggtactcgctcatgagcgcggtgaaattcattatcatgatctcgattactcaccctttttccctatgtttaactgcatgctgattgatctcaatggtatgttaaccaacggtttcaagatgggtaatgcagaaatagaacagccaaaatccatttcaacagccactgcggtgactgcacagattattgctcaagtcgctagtcatatttatggtggcacgacaatcaaccgtattgatgaagtccttgcaccttttgtcaaagccagttacgacaaacactataaagtggcgcaagaatggcaaatagcggataaagaagcttatgccaacgcacgtacagaaaaagagtgttatgacgcttttcaatctttagaatatgaagttaacactctacatacggctaatggtcaaacgccttttgttacctttggctttggcctaggcacatcaaaagaagcacgtttaattcaacgctcaatccttgaaaatcgcatggcgggtttaggtaaaaaccgcaaaacggcggttttccccaaactggtttttgctattaaagatggcttaaaccataaatttggtgatcctaactacgacattaaacaacttgctttagaatgtgcaagcaagcggatgtaccctgatattttaaattacgatcaagtggtaaaagtaaccggctcgtttaaaaccccaatgggttgtcgtagcttcttaggcgtctatgaagaaaatggcgagatgctccacgaagggcgcaataatctaggggtgatcagtttaaacttaccacgtattgccattgaggccaaaggagatgaagccgcattctggtcgctgcttgataaacgtcttgaattggctaaaaaagccttaatgacccgaattgctcgtttagaaaacgtcaaagcacgtgttgcccctattctttatatggaaggtgcttgtggcgtacgtttaaaagcggatgacagtgttgctgaaatttttaaacatggccgggcctccatttcattaggttatatcggtgttcatgaaacgattaatgccttatttggtacgcaaaaacatgtctttgatgatgaaacattgagagctaaagcaatagcaattattcagcgtttacgtgaagcgacagatcaatggaaagcagaaacaggctatggttttagtctttacagtacacctagtgaaaacttatgtgaccgtttttgccgtttagatgcagcagaattcggtattataccgggggtgactgataaaggttattacaccaacagtttccacttagatgtagagaaaaaagtcaatccatatgataagttggattttgaagccccttacccgccattagccaatggtggtttcatatgctatggcgaatatccaaacttacaacataacctaaaagcattagaagacgtttgggattatagctacacccgtgtcccttactacggcacaaacacccctattgctgtctcttatacacatctgacgctgccgacgatactccttgtgtag

SEQ ID NO: 303443 - DNA, 339 bp, Proteus mirabilis
atgaaaaaacgcaatgtctatggtggtcgctgggcaaaggtgcgattagcatttcttaatgaacatccactttgcgtcatgtgccaagagcaagggcgcattactgcggccacagtagttgaccacattattccgcatcgtcttaaagaagcgcttgaatcaggtgataaagaacgtatcgcaaaagcccaagccttattctgggacacaaagaacttccaaagcttgtgcgaattgcatcataactccaccaaacaacgtatcgaaaagagtggcaaagtcattggctgtaatgcggatggcattccactcgatcccaattctcattggcatcaataa

SEQ ID NO: 303444 - DNA, 267 bp, Proteus mirabilis; identical to SEQ ID NO: 297332

SEQ ID NO: 303445 - DNA, 294 bp, Proteus mirabilis
gtgatatcgtcattaaacggcaaagtggtgacaccgtttatcgtgaagaatggacaggtggttattcatgaagccttaatggataaagcgtggatacaaaaattagtggtactcgattattttaaatcatcaggatttgataaagggaatggctttttattggatgctaaaaacaatgtttttcgctttacgagtggtaatggagggacaacattaaccaatcaaaatttatatgtaaaagacgaaactgggtataatgttgttattattggtgatattacaaatgagcgataa

SEQ ID NO: 303446 - DNA, 1152 bp, Proteus mirabilis
atgtcggtgcaagatgctacccgtatcaaaacgatcgagcgcaccaccaatcatgatgtgaaagcggttgaatatttcttaaaagaaaaagtggcggctatccctgcactacagcaagtttctgagtttattcacttcgcttgtacttctgaagatattaataatttatcccatgccatcatgttagaaacagcacgccaagaagtgctactaccagcatggcgcgagcttattgatactatcagtaaaatggcgcaagcatatcgtgatttacccctgctctctcgtactcacggacaaccggcaacaccttcaacggtaggaaaagagtttgcaaacgttgcataccgtatggagcgtcaatatcgccagcttgctcaagtagaaattttaggtaaaattaatggtgcagtaggtaactataatgctcacctagctgcctatcctgaagttgattggcaccaatttagtgaagaatttgttacttcattggggatcacatggaacccatatactacgcaaattgagccacacgactatattgccgagctttttgattgcatcagccgctttaatacaattttaattgattttgaccgtgatatttggggttatatcgctcttaatcacttcaaacagaagaccattgccggtgagattggctcatcaacaatgcctcataaagtgaatcctatcgattttgaaaattctgaaggtaatttaggtttagctaatgccgttatgggtcacctttccagcaaattacctgtttcgcgttggcaacgtgatttaactgactcaaccgtactacgtaacctaggtgtcggtatcggttatgcattaatcgcttaccaatcaaccatgaaaggcttaaataaattagaagttaatgaaagtcatcttcgtgaagagttagatagcaactgggaagttcttgctgaaccaatccaaacggttatgcgtcgctatggtattgaaaagccttatgaaaaacttaaagagttaactcgtggtaaacggatcacggcacaagatatgattgtgtttattgacggtttagcgctaccagaacaagaaaaaacacgcttaaaagcgatgacacctgaaagctatattggttttgccagtcaacttgttgataaattagattaa

SEQ ID NO: 303447 - DNA, 1452 bp, Proteus mirabilis
atgtcaaaaattaaaaataatgtttctatcactgaaatgagccggcgtggcttcattcagtctgcagctgttctttctggcgctgctgctgtagctggaacggtatcattacctttctctgctaatgctcaaacaccccagggtattcgtcctgatgagacgtctgaaaccatcaaatacagtgcatgcttagtgaactgtggtagtcgttgcccattaaaagttcatgttaaagatggcgtgatccgccgtatttccaatgaaaccatgtttgatgactcaacctttggtcttcatcagatccgtccttgcttacgtggacgttccgttcgttggaaaacttataatccagaccgtttaaaataccccatgaaacgtgtcggtaaacgtggtgaaggtaaattcgagcgtatctcttgggatgaagcgacttcaattatcgctgataagctaaaatatactatcgatacctatggtaatgaggctatttattaccaatatggtactggatctaccggagcgaatttacatggtagaacagcctgtaaacgtctattaagtacagtcggtggcttcttaagtgactacggtacttactcttattcacaattaaccggcatcgtcccttatgtgtatggtgatatgctggaatctctgttaacagaaatcgaaaactcagatctggttgtgatgtttggtcataatcttgctgaaactcgtatgtctggcggtggtcagttctatgaaacactgaatgcgttagataagagtaaaagtaaagtgattattatcgacccgcgtcgtactgatagtgtcacaacattaggtgcagagtggatccctatctatccgggtactgatgctgcattagtggctgcgttaggttatgtgatgatccaagagggtatcactgatgaggcatttttacgtgaatattgcatcggttgggataaacaaactctgccagcctcagcacctgaaaatggctcttacaaagactatattctcggtaatggtcctgatggaattgctaaaacccctgagtgggcaagtcaattaaccggaatttccgttgcgcgtattattcaattggcacgtgaaattggtaatgccagagcggcgtggatctcccaaggctggggtattcagcgtaccagtaatggtgaacaagcttgccgtgcaattatgatgttgccattaatgtctggtcatattggtcgtcctggtactaataccggatgttggggcggtagcattgaataccctgtcgcaagttttgccataccaaatccagtaaaaacccagatcccaacgtttatgtggtctgaagcggttgctcgtggtgaagagttaaccagtaaaaatgccggtgtcagaaataaagataagctggatacgggcattaaatttatgtggtgttactccagtaatgtgattggtaaccagcactga

SEQ ID NO: 303448 - DNA, 1527 bp, Proteus mirabilis
atggggaaagtgttacttattgtattaacgatgctaggttggttggataaaagtgaccaaacctattatatccttaactttatctttaatacggccttctattttatgccggtatttattggtttctcggcggcgaaaatatttaattgtaaccaatatttagctgcaatggtctgtttagcgatggttagccctgaatggacaagcttagttaaagccggtgagcctgtcgaatttatgcatattcctgtcgctttggttaaatattcatctcaactgatccctgctttaattactgtttggatgatgtcttatatagaacgctttattgttcgtattgtgccagaaatggttaaagtatttatggtgcctttattggtgattttagtttcgacacctattgcgttgattgcggtcggtcctgtcacttcatggttcgctcaattaattgctgatggggtgatcttaatccaagagcacaccggttttattgctattccattattagtggctatttatccatggttagtatctattggtatgcataaagcacttagtcctgtcagtattatgttagtggagcaaaaaggttttgacccgattattcgtgttatggcgctatgctccaacatgtctcaggctgctgcttctttagctgtttctgtgcgtactaaaaacaaaaccttaaaacaattagctttttctgccagtattaccgccttttttggtggtataactgaacccgctatgtatggggttaacctcaaactgaaaaaaccaatgtacgcttgtatgattggtggtgctattgcaggattatttgctggtattgttaagttaaaagcgtttgtctatgtcactccggggttattaagtttaccaatgtggatatctgatacagataaccaagtagtaaatgcaataatcaccttattgattgccagtgtagccacttttattgcaacgcttattattggttttgatgatcctactgacgatccaatccgtgacgaagaagaaaataataaacaagctgcatcaaccaacaaaaaaccacaaatagcgaatagtaaattacctgttgggttaatttcacctctgcaaggtaaaacggttgcactttcagaggttaatgatgaaacatttgcctctggcattatgggacctggcatggcaattatccccacaacaggaaaagtgattgcacctgcagatggcgttgttgatattaccttttcttctggtcatgcgattggcttaacactggttaacaatattgaaatgctgatccatgtggggattgataccgttaacttagcgggacagcacttcacatgctgtgtcgttaaaggtcagaaggtgacaaaaggtgatacgctaattgaatttgatttagatgcgataatagccgcaggctatgatccaacaacgatgatcatcattactaatgatgatcataagctagacgttgttcagaccgataaaaaacatgtcgaccaaaatacagttttactaaccgtgggttaa

SEQ ID NO: 303449 - DNA, 1206 bp, Proteus mirabilis
gtgaataaaagagcactttcgacaaagtatcgaaattcgatgtatccatcaatgataaaaaaaatagggggatacggtttatcgttattcttgataccaataatattctttcattccgctaatgcgttagagttatccgttcctattggctcaacaggttatttaggggaggtcactccgccagttggttcaacaacgaaaaattatgggatggtaaggtcagtgcttgaggcgaatacaccttatataggttttcggtgggagcctagtcgatttgtgataggtaaactgcctttttaccccgaaatcggtcgagtgggtgtggctatctacaataaaagcaatcccaaaggggcctttattgttttagcacccagtggatatggtacattgcgttataaaagagctaatggcacatatgagaatgcgtcattttcatttagtcgttccaaaaccaccgctatgacaaatatgtataataatttttcctctaattatgatgaattaagttggggtcttttgcccagacaaggcaatagtgattttttctcagcacgatacgtagatggtagtgataaagttcattcgttaacattaacaatatccagttattccgcgtatgccatcgggccattagaggccggtgaatatgccatgcgtgatggttcaagattttatgccaacattagcactagtccaagttcttctgcaaattctaagacattattaagttcaacggataatgtgaatattaaagcactcaaagcctgtgacgttatcccccaaacgtctaccaatattcagtttccgactcaaatcgcgaaaaattatgcaacacccactaaattagcagataatttagccagtatcagtgtcaattgcccttatgctaataaaaatatctatctcaccctgagcccttttaataatttagtctcaggcagtgaaacagggatggagctatccaccaatggctctgaaaatatcaccacactgccttatgtggtggcttctttaaaatctgcacaatcaagtatttgtcaagccaatgcacaagaggccttgcgactcgtcggtagtaataaactagcacaacaaaatatgaagagttttacgcaaaatataatttttaacctttgtgctaatggcaatatcaaagccaataaatatacaggggctattaatgtagcaattttaattgaatag

SEQ ID NO: 303450 - DNA, 1392 bp, Proteus mirabilis
atggccgtttcgccgatgctattggtgattatattcaattatttttttggtattagcccacggaaattactgcttaataaaatttcaacacgctttatggcagcccatgattttttcttagggaaaaaaactaaccagataacgctgagtgaaatactaggaacacaagcagaatgccaacgttatttgatggttatgaaaatcctttatctattaggtaaagaagatatccaatggttagaaaacatggttgataactcctatgcaatattagttatgtcaataacaatggatgacaatacctcaacatcgttacgttttatgttagcgaaaagatgtaaatatattgcggactgttttgccaaccactcgttagataacattaaagatagtgtgcaacgtcttcagccaataaagagaatcgctttattggataaatttaatactattttgctaacaaaacgaaccactaaacccattaaaaaagccacacccttttttgtaagcgatgcatttagtaatcctaatcataaatactttgctattaaaacaactcttgccgctattttatgttatttgttttatgattattttaaatggcaaggtatccatacagcgatgatcacttgctatgtggttgcacttacttcagtgggcgaaacggttcataaacttacactaagaataatagggtgtctgattggcgcattaattggcatgatctcactgctttatattattcctaatatttctgatatttttcagttgatggtattgatcttcttctgtcttttacctgccgcctgggttgccgccggtaatgaacgtatctcttatgctggcgtacaagtagggttagcctttttgctaacgacactacatggctttaaaccgagttttgatatggatgtggtttccgaccgtattttgggtattttattaggcaatattgttatgtatgtcatttttactcgagtctggcccgcgagtatcgtcaatacaatatacaaacagctcgccacgattttagatgactatacaaagttaagatgctctgccaataaaagtgagtgtttagatttagtcgcctctattaatgagactattgcacaatctaaagataatattgatttactgctgtttgagagaaaagataaagaaagaaacaaagtactcaccttgttttttaaacagtcattaagcaagatttcttacatcagtcgccatagttatgctgataggtttatttttgatgataatggtgagtattccgatacacttcctttatctccagatgattttaagaaaaatgtcttaactgaagaaataaagatgttgcccatcaatgaaagagaacaagtatttaaacagttaataagagaaaataaatga

SEQ ID NO: 303451 - DNA, 258 bp, Proteus mirabilis
atgtattttttgatcaagttttatgtcagttgttcaattcattatttgaataacttttctttatatagccgtgagaagaaaaaatttaacatatcctatcttattgttaatgaggtttttttaagtttacttgttaattttcctattgtttttccgctccagaacagtactgctttctcgttagagcaaggttatcttaatattgagtttattgttgcattaatcattcttttatatagcttaacgaaaaaacagtaa

SEQ ID NO: 303452 - DNA, 315 bp, Proteus mirabilis
atgttgcctaattatcattattatatgcaagcgcatcatcatactatgctaacacctatttatatcgcctcgatagtattaagtttatgctttattaataattataatgagttaagtttttggttattatttatgggtaactttgctatttttattgtcatcttactcagtgcagtgatgaatgagcgaatatattggcgatactgtctcttttctgaaaagttttatttaaaaaataataataaaagcgagataaaaaggacgataatatcacgttattttactgttttttcgttaagctatataaaagaatga

SEQ ID NO: 303453 - DNA, 501 bp, Proteus mirabilis
atgcataatcagatattaaaaaaactgccacaaatagagcaaatgcatcaaataaaactactttatgttgctgaaagtggaagccgtgcttggggcttcgcatcaacggatagtgactatgatgtacgtggtatttttatacggcctcgcaatgcatatctttcaattgataaacctaaagaaacatttgagtggatagaaaataattggtttgatgtaggagcttgggatattacgaaagcattgcatctattacgtaagtcaaatgctatcttatttgagtggttacaatcacctattgtttatcaacaatatgctggtatccaaaaagaattatttgagttggcacaattatattatcaaccccaaatcattgttcatcattatagagggatcgcaaaagccgttagtagacatcattttgaagagagtcatgcaagtaaagcgatagatgagcccataaaattaaaaaatatttctatctcttacgttcacttttag

SEQ ID NO: 303454 - DNA, 240 bp, Proteus mirabilis
atggagcttaatcagttaataaatatattaaccacagatgagcaaataattattcgagagttagtgagctttaaagcagataaagatgaacactttacttggctaccaaccgataatatgcaaaaactgatcacttttttatggcaagaaacagcaactcaattagcgaaacgcaccgtaccagatagtgaaatattaaataattggtttaggaaaatacttgatgaaactgaccattga

SEQ ID NO: 303455 - DNA, 282 bp, Proteus mirabilis
atgggtttaaccacgggtggcaatattggtgcagaaacagccgttactttagatgattgtgtcgcccttattaacgattgggcaaaagcagcaaaatccgtacgttctgacgtgattgtactttgtcatggtggccctatagcaacaccaaaagatgcgcaatatatccttgataactgtcctgattgccatggtttttatggcgcaagttcaatggaacgtttaccaacagaagtcgctttaactgcaacaacaaaagagtttaaaaatattaaacgctaa

SEQ ID NO: 303456 - DNA, 1026 bp, Proteus mirabilis; identical to SEQ ID NO: 301357

SEQ ID NO: 303457 - DNA, 471 bp, Proteus mirabilis
atgtctctcaaacagaaaatagcggcgctaacaacagcaggagcaacagccatcgcgttagtagtaatagcccattttgaaggtgtacgttatgaaccttatcgtgatgtggcaggtgttctaactgtttgttatggacatacaggcaaagacattattcaaggcaagagatacacacaacaagagtgtgacgagttactgcagaaagactttatcagaacgcaacagcaagttgacatcctggttaaagtgccggtcgatgataaaacaaaagcttctctatattcctttgcttttaatgtgggtaccacagcttttgcacgttctacattgctaaagaaattaaatgcaggtgatcagaatggcgcttgtgaagaaatgaaacgttggatatatgcaggcggaaaggtctggcgagggcttgtcagtcgtcgagaagcggagtcagcactatgtcatggaaacctttaa

SEQ ID NO: 303458 - DNA, 270 bp, Proteus mirabilis; identical to SEQ ID NO: 301233

SEQ ID NO: 303459 - DNA, 726 bp, Proteus mirabilis
ttgagaaatgcggccaaccaaattgccggcgctgtttatttttaccaagaagaaaatagtgttgataaaccagctgttgcattaacaatgtttggtgtaactacgccttgtattcaacaactgactaaaaaacttgaaaataattatgactgtttagttttccatgcgacagggagtggcggtaaagccatggaaaaactgatagacagccacttacttcatagtgttcttgatctaacaacaaccgaagtatgtgattatttatttgagggtgtccttgcttgtgatgaagatcgttttggtgccatcgcccgcactaaaacaccttgtatcgtctcttgtggcgcgttggatatggtgaactttggtcgccctgctaccgtacctgagaaatataaagatcgtcatttctatcaccataattcgcaagtcaccttaatgcgtacaacaccaagggaaaatcgtcaaatggggatctggatcgctgaaaaattgaatcagtgtgaaggcccactgacgtttatttttccacagggcggtttttctgctttagatattgaaggggggccattctgggatcctcaagcaaaccaagcattttttgatgcatttataacaacatttaaagagaccgagactcgtcaattagtcatcagtccttaccacataaattctgctgaatttaatcagcaagtttatgatttacaccaggaacttatttgctaa

SEQ ID NO: 303460 - DNA, 990 bp, Proteus mirabilis
atgcccaacgcaataaatctacctttaatgaataatgaagagcgtgcggctgtagggacttgctacaaacaacatggctctcaaaaagcggtagagttggggcatcaattagttaaaggcgagataaaagcacatcgtgttgctgcttggcgcgaggcttgcgagcgttttccttccggatttatttgctgtgctcgtggcggtatgcgttcacacattgttcaaaaatggttagctgaaataggcatcgattatcctttaattgaaggtggatataaagcgttaagacaagcgacgatcgaaatgaccaatgagctagtacaacgccctattatcttaattggtggttgtacaggtaatggtaaaacaaccttagtacgctctttaccagagggaattgatttagaaggattcgctcatcatcgaggctcctcatttggtcgcactgttgaggctcagtttgctcaagcgactttcgaaaattaccttgctgtcgatatgttaaaaaaatccccctatcattcgcgctgggtactcgaagacgaaggccgtgctattggtgctaatggtttaccggaaagtttgcgtatacaaatggcaacagcccatttggttgtggtggatgatccatttgagcggcgtatggcaagactcaaagaagaatattttgatcgtatgactcatgactttattgaagcgtatggtgaagaaaaaggttggcaagaatacagtgattatttgcatcatggattgtatgctattcgacgtcgattaggtgctcaaagagccgcggagttaacccaattacttgataatgctttagccgcacaaaaaataagtgcgaatacggaagtgcatttttcatggttatcgcctttactaaaagaatattacgatcctatgtatcgttaccagttaagtaaaaaacaagataaaattatctatacgggtagctatgaagaagttgaacaatggtttgctaaccattaa

SEQ ID NO: 303461 - DNA, 747 bp, Proteus mirabilis
atgctaatgacaatgattaaatcacttatttttatcccttatctattattaagtggatgtggtgagtatatcaatatatatctggataataaattccccgtcaatatgaataatgatggcaataaaatcacggtttattcaaccatttcccctgaaacggtagtggaagttattggtacttatacgtcaaataagtgtgaacgttctcattttaatgcttcttatactaaagtcacttattcctctttaacgcaacaagtggaagcagagcgtaaaatagcagaggataataaaaacgcgacctatatcgtgcctattgatggggggggatggtgtaattggaaattgataaaaatagaactagcgccaatctctaccatttataaaaatcatatggtgattagtaaggttatcccaattgtcgatgacaaacattcaaaaatagaactatttactacattggcccctgttatagtggaagaagatgatcaatccatctattattcaccatcaatcacggaaggtgagaaaaaactatctaataaatcaaatggagaaatttattttaattataaagttgagcctaaactaaccacgactatctcaaaagatgaaaaagttatttttcctaatgggagcattaaagatccaaccttttctatttatactggaatgattagttttaatgaaataatcgagaatagtgatgaaaaagcgtttacttcttttgttcgatatattgattga

SEQ ID NO: 303462 - DNA, 456 bp, Proteus mirabilis
gtgacgctttctgtcactattgaaaaacttcctgatgaaattgaacccccttattcaacagaagctccgttgaatgatacacatgaaccaattatagaactacctgtggtaacaaaactcatacctcggcgagtttctctgcgtaaagaatggttttttttagtttgtgctaccctgttccttgtgagcttactatttctatttaacaagcagaataccgactatttttctccacttggaacctacaatggttatcaattttatggtgtcaccaaagataatcgtactttagaaaatgccgtagaagcttatacggaactcagtagccaagtgtataagcaaaatggtaattttatttattatattcgtgttcctaatacgaatatttttgttcagtgtcttaatcagctgaatgttgaggagcccaaatgcataactataaaagaaatatactga

SEQ ID NO: 303463 - DNA, 669 bp, Proteus mirabilis
gtgtataccgcagtatcgacacctggcgatctgttttttcacatacgggcactaaaggtatccgcttgttatgaattagctgcaattattagccaaaaattaaactctattgccacctcagaagatgaagtacatggtttccgctattttgatggtcgctcaattattggctttgtggatggaacagaaaatcctgagtttgaagatgagcgtgtcgcttatgcggttattagtgatgaagatccactgtttaccggtggaagttatgcatttgtacaaaaatacattcatgatatggcggcttgggaaaaccaatctctcatcgagcaagaaaaagtgatcggtaggcataaattcaatgatgttgaactaactgatgaagaaaaagatccaggctcacacaatgtcgtcactaatattcaagatgaaaacggtgatgatttaaaaatcgtacgagcaaatatgccgttttcaaatccctccaaaaatgaatatggtacctattttattggttatgctcgctatttctcaacaacaaaccgtatgttagaaaatatgtttgcaggaacacctgaaggacataccgataaactactaaaatttagtacccccgtcacgggcacattattctttgtcccatctccggcgtttttagatgatatagaataa

SEQ ID NO: 303464 - DNA, 672 bp, Proteus mirabilis; identical to SEQ ID NO: 298405

SEQ ID NO: 303465 - DNA, 375 bp, Proteus mirabilis
atgacaatatccacactctcgcagcaattacgtgaaggaaatttattttctaaacagtgcccatccagagagatactcaaacatgttacaagtcgttggggcatactcattttaatagccctacgtgatggaacacatcgttttagtgatttacgacgtaaaattagcggagtaagtgagaaaatgctgtctcaatcgttacaagtattggagcaagatggttttattaatcgagtgtcatatcctgttgttccaccccatgtagagtactctttgacagatcttggtgagcaaataagtgagaaactcacgcttcttgcggattggatagaaataaatttacctaatatcttgtcacgaccagaagtggagtag

SEQ ID NO: 303466 - DNA, 615 bp, Proteus mirabilis
atggagaacgtcagaaacgtcactaccaatgcgcttaataatatgtctgatgcgttagccgattttgctttaacggggaaaggaagctttaaagattttgccaatgcggtgatctccgatatcactcgaatggtgatgaaaatgctggttttcaaagccattgaagcaggcgggcaggcaatgggctttgatatgggatggatgagcaaagggcatgcttatggtggctatacggggcatggcgggaaattcgaacctaaagggattgtacatggtggcgagtttgtttttaccaaagaagcgacggctaaattgggtgtcggcaatctctatcgcttaatgcatgcggcgcaaggttatgcttcggggggctttgtgggggcggtcgcagggcgaataccgattacaccgcaaccgacgttagcccgtgcaggcggggtgcaaatgacggtcgttaatcatattacggtgacaggaaatggtgacgctgtacttgctcaagcaatgaaagaagccgcacaacaagggacagaagcaggcgcacagaaagctcacgcgatgatgttacaagactttcaaagtaatggcgcagcacgcagaacattaggagtttaa

SEQ ID NO: 303467 - DNA, 135 bp, Proteus mirabilis; identical to SEQ ID NO: 296591

SEQ ID NO: 303468 - DNA, 162 bp, Proteus mirabilis
atgactttttccatcattgctttggatatgcccattgcgttgatcggatacactgctttatctgtacttaaacaaacgactctttttacactattagcaatagcagcttctaaaacattttctgtacctaaaatgtttgttttaacggcttgtattggatga

SEQ ID NO: 303469 - DNA, 324 bp, Proteus mirabilis; identical to SEQ ID NO: 302340

SEQ ID NO: 303470 - DNA, 873 bp, Proteus mirabilis
ttggcaataaccgaagccattcaagccaatttagctatttacaaacctaaagagtcattagttgacagaattaataatattcactgtgtaacattgcatgagtggttggataaatatcaagctgggttaaagaaaagaggattgaggaaaaaaacgttatatgattacaactctaaaataaaaataatcaagttaaatattgctgacgctccgctcaatgaaataaccacaaaggatattgctagctttatctcaaattattctaaacgctctatggcaaagttaatgagggtcactctgcttgatgcatttaatgaagctatagcagaaggtttactaaatgaaaatcctgtatcggtaactagagcaccgaaaacacaggttaatagagctagattaaccttggatgattttaattacgcaataaatcatacaaataaaaaatacaaaaatttatttttactagcattacttacagcacaacgaattagtgatatagaaaatatgaaatggagtgatataaaaaatgataggatatatataactcaaattaaaacgggagcaaaaatatcaataccgacgtccttaaaaatcgatgctgttaatgtctctataaaagaagtgcttggtaatatagaaaagaaaggtgattttatctgtggcgttaaagctcaatccataagaaaggctttcttgcaatccttacctcaaaaagacaatatgccaacattccatgagataaggagtttatcagcaaggttatatgaagatgaaaaaggagccgaatttgccaaaaagatacttggtcataagtccatgcaaatgactgacaggtatcttgataatagaggtagtgactatattgaattatga

SEQ ID NO: 303471 - DNA, 804 bp, Proteus mirabilis
ttgttaatatggggtaatgctattatttctcgtaagaataaagacttagataagtcaatatcattatatagaagtttagtttctagaaatcctaaattagtatttgctcgattacagttagcaatttcattatttgaaaataaagagaatgaggcggcattagaacaatttgataaactgaaaagcgaaagcttgaatgataacatcattgatattattaataaatattccgaattaatcaatcaccagaatgattggtcatttaatggtggcattgtttatttaaatgagtcaaatattaataactctcctaaattaggtgttaatgctgcaaattggaagagtacatcaaagcctgaaagtgctgagggtttttcttatgtaggggtagctgaaaagaagttatcgatatataaaaattacttttctttattgaatattcgaggaaagggaaaatattattgggataactctaaatataatgaaatatcttctagagtgaaagtgggattgggatataaagatttaactaatgaagtgttatttttacattttgtcgaatactcatggaatccaaataaaactcaacaaaatggttctacatttcatcgttattcaaatgcaattggaacagaggttgaaataaacaattggttaaataagcaatggaaaaattcactttcagttgagttatcaaggcaaagttatcataagacaaaactattggatggtaatgtttattctgtatctgatacactattgtatatctgtctcttatacacatctccgagcccacgagactag

SEQ ID NO: 303472 - DNA, 159 bp, Proteus mirabilis; identical to SEQ ID NO: 302085

SEQ ID NO: 303473 - DNA, 471 bp, Proteus mirabilis
atgtctctcaaacagaaaatagcggcgctaacaacagcaggagcaacagccatcgcgttagtagtaatagcccattttgaaggtgtacgttatgaaccttatcgtgatgtggcaggggttttgacggtttgttatgggcatacaggaaacgacatcattcaaggtaagacatacacacaacaagagtgtgacgagttactgcagaaagactttatcagaacgcaacagcaagttgacatcctggttaaagtgccggtcgatgataaaacaaaagcttctctatattcctttgcttttaatgtgggtaccacagcttttgcacgttctacattgctaaagaaattaaatgcaggtgatcagaatggcgcttgtgaagaaatgaaacgctgggtttatgctggtggaaaggtgtggcgagggcttgtcagtcgtcgagaagcggagtcagcactatgtcatggaaacctttaa

SEQ ID NO: 303474 - DNA, 270 bp, Proteus mirabilis; identical to SEQ ID NO: 301233

SEQ ID NO: 303475 - DNA, 459 bp, Proteus mirabilis; identical to SEQ ID NO: 296276

SEQ ID NO: 303476 - DNA, 648 bp, Proteus mirabilis
atgttagaaagtattggtatttcaaatatttggacataccttttaggcgttatttttattacactagtaccaggtccaaattcaattttcgtcctaacttcgagtgcgaagcatggcgtgaaaggggggtataaagccgctcttggtgtttttacgggtgatgcattattaatctttttggcatttttgggggttgcttcattagtcaagacttcacccgttttctttattgtgatcaagtatgccggtgcactttatttaacctatttaggtttaaaaacactctatgcgacattccataagaaaaaagagcagccggaacaggttgcagtagaggttgtaaaagcgaaaaacggcttatatatcaaagcgcttttcttaagtttattaaatccaaaaatgatcatcttttatgtgtcattttttattcaatttattgatcctaaatatgaaaatgcaggggttcccttttttgtattaggtgtaatattagaaatatgtagcatgctttacttatctgtacttatttttggtggcgttgctattactaataaggttaagcataacaaacgattagcatcattatcgaatagttgcattggtgctgtgttcttattatttggtgccaaactcgctttaacggcttaa

SEQ ID NO: 303477 - DNA, 660 bp, Proteus mirabilis
ttgtctgctgtagtttctttaactccagaagataaaaactcttatacttcttggctagactctacaaaacattttgtaataccgaatattattcatgcacctatagaagttctgccatatgaacaaaaaaagaatgtcatagtagcagtcggccgtttaactacacaaaaagggtttgaccttctactctctgcatggggggaaatagagcacaacggatggcaattaagaataataggggaaggagaagataaacaaaaattacttacccagataaaactaaaaaaaataaaagatgttacgctagtaaactatactactgatattgaccatgaatataatcaagccaaaatatttatactatcctcaagatatgaaggtttaggaatggtcttgctagaagcattgtcgcatggcttagcctgcattagctatgattgtccagcaggacccaaaagtatattaagcaaaaaaaatggaatattagtcagaaatggagatgtctcttcactcgcaataaatatatataaattaataaataatgaatccctaataaggcatttaaataaaataggcccatcctcaatcgatgaatacaaagaggactctgtcctaaaaaaatggatgacattgataaaaaatgtacaagaaaaaagataa

SEQ ID NO: 303478 - DNA, 456 bp, Proteus mirabilis
atggaaattcaaggtgtctatctacaacctatcacgatggacacagaggaaggccatcatgcaatgaagcacctacctgctgataaagctgatatccatttagaagcagatattcatgctgttgaagataatccgaatggttttgctgaaggtgattggatcccttatctcactgttgaatataccgtgactaaattagatgcgccggagaaaaaacagcagggaacttttatggccatggtcgccagtgatggtcctcattatggtgaaaacctaaaattagatggcaacggccaatataacgttacctataaaatttccccgccttcttacaataaagatgtcgtttttggtcgtcatatcgacaaagagacgggggtagccccttggttcgagccttttgaagtgtcatgggattttaactatagcggtactggtcgtaaaggcagttactaa

SEQ ID NO: 303479 - DNA, 306 bp, Proteus mirabilis; identical to SEQ ID NO: 297209

SEQ ID NO: 303480 - DNA, 270 bp, Proteus mirabilis
atgcgcatggaaaaattaaccaatgtaacttatggaaccgcaggcttaacggccttttttgccagtctttcgttatatgaatggggatttgtcatcgggatggcgttcagcatggttctcggtttagccacttactttatgactcgtcgagaacaacgaaaacgcactcaattatttgaagagcttgttcgacatgttgacccacaaaacccaactgaaaccctaaaaaggcttgctgaattaatggtgaaagcgccaaaggatatttaa

SEQ ID NO: 303481 - DNA, 360 bp, Proteus mirabilis
gtgccattacagcaaacctctcacttttggggtgctcaattactttatttctttaatttactatttaacttgctagtcacatcaggaacgggacaagcatcgattgttatgcctattatggtgcctattctcgatattcttgatcttacacgtcaaaccggtgtccttattttaaaactcggtgatggctttaccaatattattaccccaacatcaggtgtacttatggcggtactggcggtaggtaaagtgccgtggacgcgttgggttaaatttgtattccctattttaatgatttgggtcgtgataggtatggctgcaattggtattgctaccgcaataagttatggaccagtgtag

SEQ ID NO: 303482 - DNA, 447 bp, Proteus mirabilis
gtggagtttaaaaaaataattttagaaagctctttgtctatcaaacaattatatactccattatctacacaagatagctatcctatgtgtgccttaaatccatggtatgaagtttattttaaacaagatcacgccttgaatttcgcaccatttccttcggatgcaaaaccatcatatatggtgaaactagaacaaaaagatttggtgcacattaccgaaaaaacattaaattcattaaaattagccttgaattttttgagagaatataatctttttgaaaaaattgaaagaattgactacgtattatacttaataggttatttggcatttaataatgatgaaattaaaaatccatcaactattatacattggattgacaatactgatttcaccaaaaaagataatggtgaaagacgtgaaatattcaattcacttattaaactttaa

SEQ ID NO: 303483 - DNA, 231 bp, Proteus mirabilis
atgcccgaaagccacttgtgtgaatatgaagctttttatcgcaaacaaccctttggtttatggcgagaggattatcggatggcacaagtggcgcatcttctcgcgatgataaatcgtgatccgaaaacgtctccgcctgaattgatggattttatgccgatgtggaagaagaaaatcacggaagaagaggtgtgggataatgtcactgagagtgtattagctaatcgatag

SEQ ID NO: 303484 - DNA, 183 bp, Proteus mirabilis
atggctctaaattcgccaatgctaattacctttacgatctatatattggggatgctttttatcggctatctagcgtatcgatcaacaaaaaattttgatgattatattttagggggccgaaggcttggtagtgtagtaacggcactttctgcgggcgcttctgcttcatcaaaacgttgttga

SEQ ID NO: 303485 - DNA, 192 bp, Proteus mirabilis; identical to SEQ ID NO: 297212

SEQ ID NO: 303486 - DNA, 192 bp, Proteus mirabilis; identical to SEQ ID NO: 297212

SEQ ID NO: 303487 - DNA, 408 bp, Proteus mirabilis
gtggcattacttgctgcatgtttagcaaaacatcatgcgcatcagcaaggtgctgatgatgctatttttatcaaagagggttatatcaccgaagggagttcaagcaatttctttattgttaatcagcaagatgaaattatcactcgcccattaagccaagatattttaccggggatcacgcgacaagcgattattcagttagccaaagagcaaaaactcaccatcattgagcgtttatttacactcgaagaagcgaaacaagccaaagaggcttttattagttcagcgaccaccttaatttggccggtgatctccattgataatgaaaaaataaatcaaggtaaggtaggggcgttatcacaacgcttaagagagatttatcttgagaaagccggtgtgaaaccatag

SEQ ID NO: 303488 - DNA, 192 bp, Proteus mirabilis; identical to SEQ ID NO: 297212

SEQ ID NO: 303489 - DNA, 270 bp, Proteus mirabilis; identical to SEQ ID NO: 301233

SEQ ID NO: 303490 - DNA, 384 bp, Proteus mirabilis
ttgtatatatcaagtagtaatcaatattggttttctggaatagatttttatcataaagaagctaaaagtaaagctaatgcttttgatcgattcagtgtccgtgcaggttgggggcaagaatggttgcaaggtatttccactcgttttcaagttggttatgctaagcgtatttatcaaggagcaatagcagaagaaaataattattgggttcctgatttttataaaaaaccacaaaaaaatgatgagtatagtgtttatataacattgtggaatcgaaatttttatttttatggaattacacccaaaataacatgggcatatcaaaaaatagatagtagtaatttattttatagttatgataaaaataatttttatcttttttag

SEQ ID NO: 303491 - DNA, 231 bp, Proteus mirabilis; identical to SEQ ID NO: 303483

SEQ ID NO: 303492 - DNA, 231 bp, Proteus mirabilis; identical to SEQ ID NO: 303483

SEQ ID NO: 303493 - DNA, 162 bp, Proteus mirabilis
atggcgttagaactctatcaagggacgttaatttttgtttctcacgatcgtgaatttgtcagctcattggctaaccgcattattgaaattacgcctgaaaaagtgactaatttccaaggcacttatgatgagttcttggctaagaaagggattgatggttag

SEQ ID NO: 303494 - DNA, 231 bp, Proteus mirabilis
atgcccgaaagccacttgtgtgaatatgaagctttttatcgcaaacaaccctttggtttatggcgagaggattatcggatggcacaagtggcgcatcttcttgcgatgataaatcgtgatccgaaaacgtctccgcctgaattgatggattttatgccgatgtggaagaagaaaatcacggaagaagaggtgtgggataatgtcactgagagtgtattagctaatcgatag

SEQ ID NO: 303495 - DNA, 336 bp, Proteus mirabilis
atggatgaaggcattgcagttaatgatgcactttcatacgcttttttgatgataatactcgcggtaatatcagaacgaacaataccatttatcgaaacgttaaattgtgcagtacctaacccagcgctattaaattttgctttatatgtttttgtcttggcgtcaaatgttgttttattgagtgaaccaagctttggtgtaagaatgttaatactgacattgtcatttgtgatcctcacttgttcacctgatttatcaaataaagttaaggttagctcagaggtatcccctgatagtatagtgctaggatcaggttgtaacgtcgctgaattatag

SEQ ID NO: 303496 - DNA, 180 bp, Proteus mirabilis
atggtggcattattcaaatcaattgtaggtttactatcaataacgttaatttctgctgttgtttttaaacgaaatccttctaattcaacaaagaatttagccgtacctaccttagttgcattaaaattggctgtatattgggttgcactaatttttttagtcgcatctaggatcccgtaa

SEQ ID NO: 303497 - DNA, 1755 bp, Proteus mirabilis
atgactatgacagaaacatttgataaccgaaaaaaagcaatgcacctgtattttgccggttaccgcattgctcgcatcgcggaatcgctaggcgaaaaggcgtccactattcacagttggaaacgccgcgataattgggatgaaatcatccctaccgaacgcgcagagttaaccgttgaggcacgttattgcaatctaattttaaaagagagcaaagaaggcaaagattttaaagaaatcgacttgttagggcgtcaatttgaacgcatggcgcggatcagaaaatatcaaaacggtggcaatgaaacggaccttaaccctaaaatcgccaaccgcaacaaaggcgaacgccgtcagccagagaaaaacttcttttcagaagaacaaattgaaaaactggaagatatctttcgcaatacgttgtttgaatatcaaaaagtgtggtatcgcgccggtcatcaccgtatccgcaatattttaaaatctcgtcaaatcggcgcaacgttttactttgcccgtgaagcctttattgatgccctaaccaccggacgtaatcaggttttcctgtcggcaagtaaagcgcaagcctatatgttccgtgaatacattatcaaaatggcattggaggttgatgttgaattaaaaggcgatccattgatgttaagcaacggtgcaacgctctatttccttggcactaatgcccgcacggcacaaagttatcacggtaatttatatctggatgaaaccttttggatcccgaaatttcaggagttacgcaaagtgacttcgggtatggcgatacaaaaacagtggcgacaaacctacttttcaacaccgtcaaccatgagccatgaagcgtaccccttctggtcaggcaagctgtataaccgcgggcgcaaaaaagaagacagagttgatattgatatctcacatgaagccttagtcaatggacgtttatgtgaagatgggcaatggcgacaaatcgtcaatattgaagatgcactacgaggcggttgtgatttattcgatttagagcaactcaaaaaagagtatagcccggacgaatataacaacctgttaatgtgtcactttatggatgatatcgaatccctattcaactttaatatgatgcaaaactgcatggtggacagttgggaagtgtgggatgactttcaaccattagcgctacgcccttacggttatgatccggtttgggtaggttacgaccccagcaaaggcggtgaaaatggtgatagtgccggttgtgtggttatcgcgccgccgaaagtacccggaggaaaattccgcatattagaacgccatcaatggcgtggtatggattttcgcgcacaagctgacgccattaaaaaaatcaccgaacgtttctatgtggaatatatgggtattgataccaccggcttagggcatggggtttatcagaatgttatccagtttttccctgctgcgcgtgagtttatttataacccgaatgtcaaaaatgccttagtcattaaagcctatgacgtgattagtcacgggcgcttagagttcgacgcacagtgcgttgatatcattcaatcctttacatccattcgtcgtaccaccacaggaaacggtaaccgccccacttatgaagcctcgcgcagtgaagaaagcggacatgctgaccttgcatgggcgacgatgcacgcccttttcaacgaaccgttaaccggcaccacagagaacagtaataatattgtggagatttattaa

SEQ ID NO: 303498 - DNA, 828 bp, Proteus mirabilis
atggcgaataaaaccattctgaaatgggcggggtcaaaagtccgtatcatggataaattaatttcacatttgccaaaagcaaagcgcttagttgaaccgtttgcgggttcttgtgctgttatgatgaacacagaatataacgaatatttaattgcagatgccaatcaggatttaattagtttatatcataatgtcgtagaacatactgaaataatggcacgtaaagagttctatgcgtgggaagaaaacaatcataaaaatgattacattgctattagaaagttatttaattcaattaagatattagataaaaacgagtgtgatcaatatatacaatctgctcggtttttatatttaaatcgtcattgctttaatggattatgtcgatataacaattcgggtgaatttaatgtgccattcggaacatatgcccgtgtttattttccagaggaggaaatcagacaatttgctgagaaagccactaatgccattatcgcttgtttagaatggcaagatactttgtcactcgttgatttcggtgatggtgtttattgtgatcctccatatatgggagatgaaggtagttttactaaatatcatcacacggattttactcacgctcatcaaattgagttagctcaagcattaaaggcattaaatcaatcacaaggtaacccgattactgtctctaattccattcacgccaaagagctgtatgccgatctcggttttattattcacgagattgatgcgcctcgttctatttctgcaaatggaaaccgccaatcagcaaaagagattatcgccgttttgccggaggtgtgctga

SEQ ID NO: 303499 - DNA, 513 bp, Proteus mirabilis
ttggtgtggtgccatcctattgaaaaattagagcaagtttcacaatgggatgatcaaacaaccattgcacagttacaacgggattttggctggcgtttgggtaagattgaacaagtaggacagcgtcattgctatccattagttttgcaaaaagcacagcaaatgatcagccatcgtttagcattgataggtaatgcatctcaaaccttgcaccctattgcagggcaaggttttaatcttggtttacgcgatgtaatgacattagccaatacattaacctcggccatacaatcaggtcttgatatcggcagttatcgcgtattatcacaatatcaacagcttcgcgaacaggatagagaaagtactatcacgatcactgatggcttagtgaaagtgtttgcgaatcgttgtatgccgttaattatctcccgtaatctaggcttaatgacgatggaattagtgcctgcacttcgtaacaaattagcacaccaaacattaggttggacaaactga

SEQ ID NO: 303500 - DNA, 567 bp, Proteus mirabilis
atgaaaaaacaactattatcagcattatttatcagtggaatattttctatttctaccgttcaagcacatgaaaatacctcattagataaaacaacaatttctgcaggttatgcacaaataaaaattgccggccaatcaggcattatgcgcggtggtaatctctctatacgtcaagaattcaatcaacagctaggtattatggcaattgctacctatgcgcaaaatgaatatgatttaaataagcctttaaaacaattaataaaagatgttgatgcccgctattattcagtgatggcggggccaaccctacgcctcaatgactatattagtgtatatggtgtggcaggtatggctcaaatcgaatttaaaggtttagatactagacaagtacctgaaagtataatcaagaaaaatgcttttagctggggagccggtgttaccattaaccctatcgatatgctttctgtttccgttggctatgaaaacagccgttataaaatgaataaattaagtgataataaattaattattgatggctttattgcaaatattggttatagcttctaa

SEQ ID NO: 303501 - DNA, 927 bp, Proteus mirabilis
gtgactacaacgttatctaacgcattattgtcagatatattgcaacaaattcgtcctttaattgggcaaggaaaagtagcagattatattcctgctctcgctcaagtacctgctaatcaactggctatggccgtgtatacggttgatggtgagctttatcaagcgggtatggccgataaacgtttctctattcagtctatatcaaaagtacttagcttaacccttgcgttaacacgttatgatgaaagcgagatttggcaacgagtaggcaaagagccttcaggattaccttttaattcgttgatccagttagaaatggaaaaagggctaccacgtaatccttttatcaatgctggagcgatagtgattacggatatgttgcaatcgcgattaagtgcgccaaaacagagaatgttagaagttattcgtgcactgacgaatacagctgatatttgctataacaccgttgtggcaaaatcagagatggaacatttaagtcgtaatgctgccattgcctatctgatgaaatcgtttgataattttgataatgatgttatcaccgtattagaaacctattttcactattgctcgattgaaatgagttgtgtagagcttgttcgttgttttagctacttagcgaatcaaggaatatgtgttggaagtaaaaatcagattattacgccaagacaagcccgacaaataaatgcgttaatgttaacttgtggtatgtatgatggtgcgggagagtttgctttccgtatcggtattcccggtaagtctggggtgggaggcggtattattgctgtggttcctgatgcctttaccgtagcagtatggtcaccagagttggataaatctggtaactcattggcggggtgtgctgcccttgaattattagcaaacaaagtagggcgctcaatattttaa

SEQ ID NO: 303502 - DNA, 1131 bp, Proteus mirabilis
atgcttaagttaccaccattaagtttgtatattcatattccttggtgtgtacaaaaatgcccttattgtgattttaattctcacaccttaaaaggcgaagttccacatcaggaatatgtgcaacatctgctcaatgatttagatgctgatcttactcatgttggctctcgtgaagtgcaaactatctttattggtggtggcacgccaagcctattaagtgctgaatcaatggctgatttactgtatggcgtaaaagagcgcatagccgttgctcctgatgctgaaattacgatggaagccaatcctggtacggttgaagctgaacgatttgccggttttcaacgggcgggaattaaccgtatatccattggtgtacaaagttttggtaatgataaactgatccgcttaggacgcattcatgatgccgatgaagctaaaaatgccgcgagactagcaaaagagttaggcttacgtagctttaatcttgatttaatgcatggcttacctgaccaatcattatctcaagcactttcagatctacaacaagcaatcgctttatctcccccacatctttcttggtatcaattaactattgaacccaatacgcaatttggctcccgtccgcctaaattacctgatgatgatatgttatgggatattttttctgaaggtgacaaattactcaccgcagcaggatatcaacaatatgaaacatcggcttattgtaagccaggttttcaatgtcaacataacctaaactattggcgttttggggattatttaggtattggctgtggtgctcatggaaaaataagttttgccgatggccgaattatgagaacggtaaaaaccaaacatcctaaaggttttatggcaggacgttatcttcaccagcaaaattgggttgataatgatgaccgtccatttgaattttttatgaaccgttttcggttattagaagcttttcctcggcaagattttagcgactacacggggcttgcacaagagactatccgtagacaaattgatgaggcactcgcattaggttatatcagtgaaacagaaacccattggcagataacgccccacggtaaactgtttcttaattcattacttgaactctttctttaa

SEQ ID NO: 303503 - DNA, 1761 bp, Proteus mirabilis
atgccgcattcaacccccctcattaccaccattgttggtggattagcacttgcttacatcttaggcatgattgctcaacggctaaaaatctcacctttagtaggatatcttgctgcgggtgtgctcgctggcccatttacccccggcttcgttgctgatacctctttggcgcctgagcttgctgaaatcggtgttatcttactgatgtttggcgtaggtttacatttttctttaaaagatctaatggctgtaaaagctatcgcgatccccggtgccatagcacaaattaccgttgctaccttattagggttagggttatccactttctttggctggggtctatttagtggcattgtctttggattatgcctttcaacggcaagtactgtggtattgctacgcgcactcgaagaaagaggtttaattgatagccagcgcggtcaaatcgctattggttggttaattgtcgaagatctcgctatggtattagccttagtactactaccagctattgccaatatgcttgaaagtagtgaccaaacaagtatttcacagttattaattaacttaggtatcactattggtaaagtagttgcctttattttaattatgatgattgtcggtcgtaagcttattccgtggatcttagctaaaacggctgccactggctctcgtgagctttttaccctatgtgtgttagcactagctttaggtatcgcttacgcagcagtgacgctatttgatgcttctttcgcattaggcgctttctttgccggtatggtacttaatgagtctgacctcagccaccgagcagcacaagatactttacctctacgtgatgccttcgccgttctgttctttgtctctgtcggcatgctatttgatcctatggtattaattgagcatcctctaggcattttagccacacttgcgatcattattataggtaaatccttagcagccctagtgctcgttcgtatgtttgggcattcacgcagaaccgcattaaccatttcagccagtcttgcgcaaattggtgaatttgcctttattttagctggaatgggggttgcactaaatgttttagagccagatgcacgtaacttggttcttgccggcgccttagtctctattatgcttaatcctgttctcttctctttgttagaccgttatctagcaaaaacagaaaccaaagaagagcaagagcaacttcaacaagaagagatggaagaagagatgcctgtgcctgtcgatatttgtgggcatgccattatcgtcggttatggtcgtgcaggtagtatgctagctgaaaagctacaaccacaagctatcccattggtcattattgaaaatagccgtaataaatttgctgagttaaaagaaaaaggcttaaacgccgtactcggtaatgctatgaccaaagaatcgctggcattagcgcgtgttgattgtgctaaatcgctactactaactattcctaacggttatgaagcagcagatatcgcagaaacggcaagaaaaatgaaccctgatcttaatattatcgttcgtgctcattttgacgatattattgttcgtgctaactatgatgaagaagcttcctttattcttgagaaaggggcaaatcatgtgataatcgatgaagatcagaccgcttcagcaatggctgagatgctaataaaagaagtcgagttcggttgcgccattgatgacacacctgaagagggtcaacaaattattgcacccaatgcagcgcaataa

SEQ ID NO: 303504 - DNA, 309 bp, Proteus mirabilis
atgaaccgtaaaaacctgtttactcgcacagctctcgctgccattgtaggaacactttcctcttatgcaagcgctgccggttttcagttaaatgaatattcaacttcagcactaggtcgtgctttttcaggagaaggcgttattgcagatgatgcgagtgtaggtagtcgaaaccctgccgcattgaccatgtttgatcgtcctgagttttccgttggtgctatccatattaatcccagtgttgatattaaaggtaaatctccactctctggcgccagcactaatgccggcgcgccccaagtgctttag

SEQ ID NO: 303505 - DNA, 495 bp, Proteus mirabilis
atgaatatttttgaccctacagtttttcctgccgtcactgcattattgggttctattttcggtgttatcgctagtatattcagtgggttatatatggaaaaccgaagacatagaagaaatgtagaaacttactcagcaggatttattgctgaagttgaatccttagcgacaatcattagatatagaaattatattgcagagttagaggctgatattaaatcattatcccctaatgaaagaatatcgataagtattctaatacctgatagttatgcgcgcttttatgatacaaatattgcatatgtcggattattaaaacccacgacagctaaaaacctagttaccttccatcaattactacaatctattgtacaagacttcaaacctgaatcagccttaagtacattaggacatgaccatgattcattaaatcaactaattaacatactcaacaaagtcttagttttagctgatgaaattaaaaaaaataaataa

SEQ ID NO: 303506 - DNA, 387 bp, Proteus mirabilis
atggaaacggcttcctcaaaaacagagacaacaagctatcccgcaactagtgctggcgctcgccgagcaggtatgacagaagaacaatggcgtgcagcaattaaatttgacggcaatgatgtgggctgggttatcatgagtatcggtatggctatcggtgcagggattgtttttttacctgtacaggttggcttaatgggattgtgggttttcttactttcctccgtgattggttaccccgcaatgtaccttttccaacgcctatttattaatacgttggctgaatctcctgagtgtaaagactacccaagcgttatcaccggttatctcggtaaaaactggggtattttattaggtgcactctattttgtgatgttagtgatttga

SEQ ID NO: 303507 - DNA, 564 bp, Proteus mirabilis; identical to SEQ ID NO: 297818

SEQ ID NO: 303508 - DNA, 1002 bp, Proteus mirabilis
atgccgttattagacatacgcaacctaactattgaatttatgacacccgatggcccagtaaaagcggtagatcgcgtttccattaccctcagtgagggagaagtaagaggtttagtcggtgaatctggctccggaaaaagtttgattgctaaggcaatttgtggcgtgactaaagataatattaaagtgactgcggatcgctttcggttcgatgatattgatttacttaaattatcaccaagagcacgtcgtcgggtgattggtcataatgtgtcgatgattttccaagagcctcaatcttgtcttgatccggcgaccaaaattgaacaccagcttattcaagcaatccctggttggacatttaaaggccactggtggcaacgttttcattggcgaaaacgccgtgcaattgagttacttcatcgggttggtattaaagatcataaagatatcatgcgcagctatccttatgagttaaccgagggtgaatgccaaaaagtgatgatagccattgccattgctaaccaaccccgtttactgattgccgatgaaccaactaatgcgatggagccggcaacacaaacacaaatatttcgtttactcacccgtttaaatcaaaataataatatgactattttattaattagccatgatttgcagtggatgagtaaattagccagtaaaattacggtcatgtattgtggtcagacagtggaaaccgccatacctgaagaactattggttaccccctatcatccttatacacaagcccttatccgctctattcctgattttactaactctttgcctcataaaagccgtttaaatacgctacccggtgcgatcccctctttagagcacctacctgttgggtgccgtttaggccctcgttgtccttatgcacaacgtcaatgtattgaagcacctcgattacgtgcatttaaaaatcatgcggtggcttgtcatttcccattaaatgtggagacgacagatgttcgataa

SEQ ID NO: 303509 - DNA, 798 bp, Proteus mirabilis
atgcaaaaccagcgcctggaggtagcattccaaaacaatccaacgcaatattttgatgctctacatgtgctcagtgaagggcatgtccgctgcatagggctggctattttattggcaaaaaacatcagtgagcaatgcccacttttggtatttgatgatccggtcaatgctatcgatgacgatcacagagaatctattcgacgaacgctgtttgaagatgctttctttgcagataagcaaatcatcctggcatgccacggagaagagtttttcaaagacattcagaatttattgcctgcgccagtggctgcacagtccagaactttcagctttttaccgcgtctggatgaatcgcatatccgagtggattttaactgtgcccccaggaactatattatttctgcgcgaagccattatgaacgtaatgaaatcagggaagcgctaactaaatgcaggcagtcacttgaatctctgatgaaagggaaggtctggcgttatgtaaacaagcacggtgacggtaacctcagtcttaaactgaggtcagcaactgcacctattgaactgcgtaatctctcagatcaattgagaaaacaaatcggccgtaccgattttaatgacccaaataaaattgccgtgctttctcccataaatgttttgactggcattagcggagaatcacgtgaatggagatacctcaataaaggtacacatgatgaaaataacagagcagaatttgatagaacaactgtagaagccatgataggtgcaatcgaggcgctcgatcaggccgtgggttaa

SEQ ID NO: 303510 - DNA, 294 bp, Proteus mirabilis
gtgatcccagacagtaaatatatctttattgccggagagcgcgttaagttaacgtcaattaagtcttatcgtgtttatagcgaacaagtacccgttaaaacgcatattgataaagaaaatacaatattatcggttggtatgctaatgaacagtattaagcctaaatctgagtcggcagcagatcaaacgcgtactttgaaaaaaattgatatcattacttatcacggcaaagtattaacctttactgatgatgaagtcgatattgatgcaacagtcaaagtgattaaggcttaa

SEQ ID NO: 303511 - DNA, 300 bp, Proteus mirabilis
atgaaagaaaatccagatctatgggaacaaatatgcattgttctttattcaatgaaagaacaaggtatatcagccttactcgctgggggaatggctattcttcgaagtttatataacgccggaggatggaaaaaaacttttttagatggactgatgtgtgcaatgtttgcttggtttatcaaagatattctccttttatttagtattaatcatcaatttgcttacttagccagtgtctttattggttatgtaggcattgaacctgtaagcaaacttcttatcaggaaaaataggagttaa

SEQ ID NO: 303512 - DNA, 816 bp, Proteus mirabilis
atgagattagctgacttacctaagtatttttctccaaaaagtgttgtattaagtgatgttagaacgcctaaagctgttgattcattatccattacggatgtaatggcttcaataagcttagcgacacgtaaagggcgaatgggaatagagctatttttagcgaaacaccacattaaccgtcccgaagaagcgatagaaagcctgtatcaatgtgcattaactcaagttaaccaatataagatgattgataagttagctgaacatgataaagctaaagttttacatattatcgctgaatatgcttttcaggattatgccagaagtgcagccagcaagagagcatgtcctgattgtgatgatggctttatcgaagttgaagtttttaccaccaaatgccatggtcgaaaaacaacccagcaggttactcaaaatgccaaacctcatctaaaaacaacctcatcaaataaaccttcttttcgagaggtaagggaagtaacacgcgttatttgccctacatgcaaaggtaaagcggaaattcgtttagcatgccgttgccatggacgtggaaaaattgttgataaaaaacagactgaattacaaggagttgccgtatttaaaccttgtcgccaatgtgctggacgcggttatcctcgccttaaattcagcgaagtcttacaacaattgcaacatgtggtgagtatttcaaaaacggctgcttatagtcattataaaccgctatttgattttttagtggcggaatgctttaaagaagagtctttatcagataaatttctacaagaagttactgtaaaataa

SEQ ID NO: 303513 - DNA, 738 bp, Proteus mirabilis
gtggttaaaaatgactataagttagcattcacaaaaagactacaagaagcctgcctagactccgggattgcgggtagagggttaggtaaaagaattacagaggcattggctaagcaaggaataaaagtcagtgcgcccgcggtctggaaatggttaaatggtgaatccgttcctgactcaacaaatattttagccttaagtcagtggctagatgttcgagccgaatggttagaatatggcagaggtgccaagaaaaatgatggcatttcagtgaatgaaataatgcctgttaatgattgggataatagtactcctatagagcgagatgaagtggagatcccattttattcaacaattgaattggccgcaggttttggcagttgtaccactgataatcaaaaggtggaattattgagattctctcgttctacatttaatcaatatggtgtgcagccaagtgatgctgttgcttttaaagtgcatggcgacagtatgtcaccggttattcctgacagctccattgtaaccatcagtacagggcatactaagattattgatggtggtatttacgctattcagcaaggtgacttgttaagagttaaaatcttgcaccgcttacccaataataaaatcattattcgtagctataatacgattgattatcctgatgaagaatcaaccttagaagaagtaaaaatcttagggcgtgtttttaattggtcggtgatgggctggtga

SEQ ID NO: 303514 - DNA, 1020 bp, Proteus mirabilis
atgaacaaatatctcactgaaaataaatcgatagttttaacaggggatcggatcactggacctttacatcttggtcattatattggctctcttcagcaacgtgtcgaatttcagaataaagcgacacaatatatcttaatggctgatatgcaagggttaaccgataatggctcaacacctgaaaaggtcagtaaatttctttttgatgtggtggctgattatttagctgttggtattgatccgaaactttccacattatgcttacaatccgcactaccggctttatcagaactgactatgctgtatttaaatattgtcacagtatctcgcttagagcgtaatccaacagtaaaacatgagattttgcaaaaaaatctttctcgttcattgccggcgggatttttaacctatcctgtcagtcaagcggcggatattactgcatttagtgcagatattgtgcccgcaggagaagatcaattacctatgattgagcaaaccaatgaaatcgtcaccaaaataaatagcttaataggacaacccgtattgacaagttgtaaggtcgtagtagggcaagtcggtcgtttacccggtacagatggtagtgggaaaatgtctaaatccttaggtaatacgattaatttatcatccacagccgatgaaattaaaaaagcggtttattcgatgtataccgatccgcaacatattgatgttgcatcaccaggtcatattgaaggtaatgtggtgttcacctatttagatgctttttgccaagataaagccatggtgacggcaatgaaggctcattaccaaagaggaggacttggtgatatgaaatgcaaagctatgcttaatgatatcttacaagagcttctgcaaccaatacgtgaaaaaagagcgcaacttattaatgataaagcttatttattacaagtgatcaaagaagggagcgataaagcgaaagaagtgactcaacaaaagcttgatgaagtaaaacgtggtctaggattattgatcttgtga

SEQ ID NO: 303515 - DNA, 2634 bp, Proteus mirabilis
atgagcgacattgccagagaaatcacaccagttaatatcgaagaagagctgaaaagctcatatttggattatgcgatgtccgttattgtaggacgcgcattacccgatgttcgagacggactgaagccagtacaccgccgagtgctatttgcgatgaatgtactgggaaacgattggaataaaccttataaaaaatcagcccgtgttgttggggatgtaatcggtaaatatcacccgcacggtgacagtgctgtctatgaaacgatcgttcgtttagcacagcctttttctatgcgctacatgttggttgacggtcagggtaacttcgggtcagttgatggtgactccgcggcggctatgcgttataccgaagttcgtatggcgaagatcgcccatgaactgctggcggatttggaaaaagagacggtcgactttgttcctaactatgatggaacagaaaatataccggctgttatgccaacccgtattccaaacttgttagttaatggctcttcaggtattgccgttgggatggcaacgaatatccctccgcataacctcggtgaagttatcgacggttgtcttgcctatgttgataatgaagacatcaccatagaagaattaatggaatatattaccgggcctgattttccgactgctgcgattattaatggtcgcagaggaatattagatgcttatcgtacagggcgtggaaagatttatatccgtgctcaggctgatattgaaactgatgagaaaacgggtcgcgaaaccattatcgtgacagaaattccttatcaggtgaataaagcccgtttaattgaaaaaattgcggagcttgtaaaagataaacgtattgaaggtatcagcggattacgtgacgagtctgataaagacggtatgcgtattgttgttgagatcaaacgtgatgcagtcggtgaagtagtattaaatcacctcttttcacaaactcaaatgcaagtctcttttggtattaatatggttgcgcttcatcaaggccaaccaaaattattgaacctaaaagaaattatcgcagcctttattcgccatcgtcgtgaagtggtgactcgtcgtaccatttttgaattacgtaaagcgcgtgatcgtgctcatatcttagaagcacttgcggtcgctttggccaatatcgatcctgtgattgaattaattcgtcaagcaccaacccctgcagaagcgaaagcagcattaattgcccaaccttgggatctcggtagcgtgtctgcgatgttagagcgtgctggtgatagcaatgttgctcgccctgagtggttagagccacaatttggtgtgcatgacggtaaatactatctaacagaacaacaagcacaagccattttagatctgcgtttgcagaaactaactggacttgagcatgaaaaactgctagatgaatatcgtgaattactgctacaaattgctgagttattgcatattttgagaagccctgagcgtttaatggacgttattcgtgaagagctaacagcaatcaaaacacaatataacgatcctcgtcgtactgaaatcactgaaaataccgctgatattaatatcgaagatctgattaatgaagaaaatgtggttgtgacactatctcaccaaggttacgttaaatatcagccattgactgattatgaagcgcaacgtcgtggaggaaaaggtaagtcagccgcaaggatcaaagaagaagactttatcgatcgcctactggtggctaatacacacgatactattttgtgtttctcaagtcgtggtcgcctgtactggatgaaagtttatcagttaccagaagcgagccgcggtgctcgtggtcgcccaattatcaatttattacctctagaacaagatgagcggatcactgctattcttccagtaagagagtatgaagaaggtaaatttgtctttatggcaacggcgagcggtacggttaaaaagacaccattacaagacttcagtcgtcctcgtagtgccggtattatcgcggttaatttaaatgatggcgatgagcttatcggtgttgatttaaccgacggtagtaatgaagccatgctgttctcagcagatggtaaagtggttcgtttcgcagaagagtgtgttcgcccaatgggtcgtactgcgacaggtgttcgtggtatgaaactggttgatgatgataaagtggtttcactgatcattcctcgtggcgaaggtgatatcttaacagtgactgaaaacggttatggtaaacgtaccgttcaaagtgaatatccaaccaaaaatcgtgcaacacaaggcgttatctcgattaaagtgagtgagcgtaatggtaaagtggtaggcgctattcaagttgaagaaactgaccagattatgatgatcaccaatgccggaacgttagtgcgtacccgagtatcagaagtcagcattgtgggacgtaatacacaaggtgttaccttgatccgtactacagaagacgagctagtcgttggcttacaacgtgttgaagatgaagatgatgcattagatgatgatgaagttgatgaaatgatcagcgacaatatctctgatgttccagagtctgaaccaacagatgatgcggatagtgaagaagaataa

SEQ ID NO: 303516 - DNA, 738 bp, Proteus mirabilis
atgaatgataaaacaacctctttgcatgctaacgtagatcagcatgaaatcgacaaatttgagagtgtcgcatcaagatggtgggatcttgaaggtgaatttaaacccctacatcgcatcaatccactaagacttaattatatccaagaacgtgctgatggcttatttggtaaaaaagtacttgatgttgggtgtggtggcggtattttatctgaaagtatggcccgtgttggtgcagaagtaaccggactcgatatggggaaagagccattagaggtcgcacgtctccactcactggaaaccggtatccctgtcacctatatacaagatacggttgaaaaccatgccgcagaatatccacaacgctatgatgtggtcacttgtatggagatgttagaacacgttccagacccctcctccattgtaagatcatgtgccaaactggtgaaaccaggtggacatgtattcttttctaccatcaaccgtaataaaaaagcgtggtttatgctggtggtaggcgcggagtatattctgaatatggttcctaaaggcacccatgatgcgaataaatttattcgtccctcagagttattaagctgggtcgatgaaaccaatttacgtagcaaaaatatgattgggttacattacaatcctattacagacaaattccgattagcgccaaatgttgatgttaattacatggtgcacactcaagcgaccgataattcggatttgtga

SEQ ID NO: 303517 - DNA, 1023 bp, Proteus mirabilis
atgcaactatttaatgacgacgcactatctgtattaaaaacactacctgataacagtattgatttaatcgccacggatccaccgtatttcagagtgaagtcgtgcgcatgggataatcagtgggataatgttgagtcgtatctgtcttggcttgatgaggtattagctgaattctggcgggtattaaaacccaatggcagtttgtatttattctgtggttctaaattggcgtcagatactgaattgcttgttcgcgggcgatttaatgtattaagccatatcatttgggctaaaccatcagggccatggcgacgacaaaataaagaaagtctacgtgccttttttccttcaacagaacgaatactttttgctgaacattatcaaaagccagtcacagctaaaggtgctgaattttctttaaaatgtaaagaactaaagcaagacgtatttaaaccgctgatagattattttagaaatgcacggttagcactgcaggtgagcgcaaaagaaatagatcaggcaacaggtaagcaaatgtgcagtcattggttcagcaatagtcagtggcaattacctagtgaggaagactataaaaagttacaaacactgtttacacacattgctgataaacacgaaaaactatcaccgttatcccgccagtttaccgagttagagcgtgagcaggttacattacaaaaagactaccaagaattaataaaagaatatgggttattaagacgaccattctttgtaactgtagatgtaccttacaccgatgtgtgggattatccatctgttcagtattatcccggtaaacatccttgtgagaaaccatcagccatgatggaacacattattcgctcaagcagtcgcgaaggtgatctggttgctgatttctttatggggtcgggtgcaacactaaagtccgcattaaagttaaatcgtcgagttcttggggttgaacttgagaaagagcgttttgaacaaacagagcaagaaataaaagcatcaattcgtaagtaa

SEQ ID NO: 303518 - DNA, 789 bp, Proteus mirabilis
atgtttacagaatgcggttatcatagctgggaatgttcagcgagtgctaggataaaagatgtgttatgtcagaaatgtaattatggccaagcgcattgggatgaagaccatataacgttgtcaatcattgagagtttgagcaatattggttctaaaattcagtggtataaatcagatatagtcacagagtggaaaggttataagcaaaaagggaaacaagagcaacgtagtggtgatataggaatactagttaaaataagtacagaaaatggagcagatattgaaggtgttgcttattatgaagcaaaaaaaatagattggcagtggtgtcatactaatcctacttcaaagaaaagtgataagttaacaaatagatataaatcagtaaataatacgcaaattactaatttgctatcttatgcgaatattatagatattcttttataccacccgggtgctacagtggcattcccactagaattatttgattttgcattaaatggggaagtggaatatccaagtgaatactttatgggattaaaactatctagtgctcttgctttaaatctaaaagggataaaattagattttgactcacaatcagtttctgaatttaaaaatatagccagtaaaagtaatatgactctcattatagccaattctggttttggtgatgcgaatttagctcatgcatataatgacgatagtttttttgaaaacataaaaaaagaacgagaggaaatattcttcagaagaaatccatctgctaaaaaagacaataaactataa

SEQ ID NO: 303519 - DNA, 378 bp, Proteus mirabilis
atgtcagataacactattcaatttaaagtctcagtagatacaagtgagctagataagttagaagaacaactcgctcgcattaaacaactgatgcaagatgtaggtgtgaagcctaaatcaatcccaccattcttctttcagtcttctggtgaattatttattaaagatgcctttattaattttgctgaattcaaaggtgtgcttgtcagtaataagtcagagcatgacatcaaagctcaattggcagatttacgtatgctagctgataaacaagatgcaggtatcaatgagcttaaaaaagtaatggaaacccaacaacaagcatggtcacaagctgtgagtgagttaaataacagaacatggtgcagtcagaagtaa

SEQ ID NO: 303520 - DNA, 960 bp, Proteus mirabilis
atgagcaccatcaaacatagcaaacttattattttaggttcaggtcctgccggctatactgcagcagtttatgcagcacgagctaacctagaacccgtgctgattacgggtgttgaaaaaggaggacagctcactaccacaactgaagttgaaaactggcctggcgaccctgaaggattaactggtcctggtttaatggatcgcatgtttcagcacgctgaaaaatttaataccgagattatctctgaccatatcaacaaagtcgatctgaaaaaccgacctttccgcctatttggtgatgaacaagaatatacttgtgatgccttgatcattgcaacaggggcatcagcacgttatatcggtttaccttctgaagaagcatttaaaggccgtggtgtttctgcctgtgcaacctgtgatggctttttctatcgtaaccagaaagttgctgttgtcggtggcggtaatactgccgtagaagaagcactgtatttagcaaatatcgcctcagaagtgcacctaatccaccgccgcgattcattccgctctgaaaaaatcttaattgaccgtttaatggacaaagttaacagtggcaatatcattttgcataccgatcgtaccttagatgaagtgttaggtgatgatatgggtgtcactaaagtgcgcttaaaagatacgaaaagtgataaaaccgaagagctagaggtcatgggcgtctttattgctattggtcatagccctaacacggcaatttttgaagatcaattagccttagataacggttacattaaagttcaatccggtacgcaaggcaatgctacccaaacatctattgaaggtgtttttgccgcaggtgatgtaatggatcatatttatcgtcaagccattacctcagctggtacaggttgtatggctgctttagatgcagaacgttacttagacgcactaaaatctaactaa

SEQ ID NO: 303521 - DNA, 960 bp, Proteus mirabilis; identical to SEQ ID NO: 297937

SEQ ID NO: 303522 - DNA, 918 bp, Proteus mirabilis
atgacacataatcacattgatgatattgagttgaatatggctgagaaaacacaatctgacaaattcaaagcggccaagaaaagcacattggtcagtgtttttgttaatatctttttatccatatttcaaatcacaattggtttcttctcacattcccaaggcttaattgctgatggtattcattcactgtctgatttaattgctgacttcgtggtgttaattgcgaataaaggcagtcaaaagcaacccgatgccgatcatccttatggacattttcgctatgagaatgccgcttcattagtgttagggacgattttattgattgttggtttgggaatgatattttctgctatccataaaatgttagatccttcaatcattcctgatgttcatagcatcgcgctttatgtggctttattggcattagcggctaaagaagggttatttcgttatatgttagctgtagccaaaaaagtcgattctagtatgttagtggccaatgcttggcatgcgcgctcagatgccgcctcttctttagtggttgcaatagggatcattggtagccttgctggatttaaattctttgacccactagcagcacttattgtcgggctatttgttggccgtatgggatggcgttttacctatcaagctttgcaagatctcatggatagaggcgctgatgaagaaacacttgaacagatcaccaatacattaatcaccacaccaggagtacaaggggtacatgatttaaaaacccgtcgtgcaggtgattatttattagttgatgtccatttagaaattaaaggcgaattaacggtcaatcaaagtcatgatattgtggtcaatgcccatgatagagtacttaaacagcatgcacagattttaagtgtgatgatacacgtcgatcctgcttaa

SEQ ID NO: 303523 - DNA, 438 bp, Proteus mirabilis; identical to SEQ ID NO: 297935

SEQ ID NO: 303524 - DNA, 1149 bp, Proteus mirabilis
atgggggtattcttagcgactgacttgttcttattcttcttcttttgggaaatgatgttgatcccaatgtatttccttatctctctttggggacataaaggaagtagcgatgaaaaacatgttagtgcagcaactaagttctttatttatacacaggcgagtggcctgttaatgttgctggccattatcggtttagctgtcgctttttacagcaaaacaggtatttggacgtttaattatgacaccttactacaagcgcacaccttattaggtagtgaactgcaatttattctgatgcttggcttctttgctgcattcgcagtaaaaatgccaattgtccccgttcatggctggctagctgatgcacatgcagaagcaccaacggcgggctctgttgacttatcaggtattttgctaaaaacagccgcttacggtttattacgttttaacttaccgttatttccagaagcgtctgcattactggcacctgttgcgatgtggctaggcttaatcaccgtattctacgctgcactgttagcattccgtcaaacggatattaaacgtctggccgcttacagtagtatttctcacatgggctttatcgtaattgcgatttatgctggctctgttttggcttaccaaggtgcgattattcaaatgatcaccaatggtttgtctgctgctggtctgtttatcatgtgtggcatgctgtatgagcgtttaggtacgcgtgatatgaatcaaatgggtggattgtggaaaagcatccgtttcttaccagcattttcactgttctttgcggttgcctctttaggtatgccaggaacaggtaactttgttggtgagtttatgatcctatttggtacttatggccactttaagctgatcactattatttcggtctttgggttagtttttgcttctgtctacgctttgtggatgatgcaacaggcttactatggttcaccgaaaacagcagaaagaacctataaagggttaaatctgagagaatttttgatcctgtttatcttggtggttttattggttattttgggcttcttcccacaaccagtattagatacttcgatatcagcaatggaaaatctccagacttggtattccgcttctctttcaacagtaaggctgtaa

SEQ ID NO: 303525 - DNA, 993 bp, Proteus mirabilis
ttgtctaattatgcatttagtgatattaatgatcttatttgccaactagaacaccctaatgatatcagcaaagaagatttattaaggtatatttgtgctatgttttccgaactatcttactattatatcccaaaatgggaattagataaaaaaaaacgagccaaattaattccatctaatggatataatttattaataaaagaaattaatgaaattcttgatttcaaaactataatgcggaaattttatgatataaagggaggattcgaaatatcgactaataaaagtgtagcaataggaatagtagctaaagataaactttttataggtatccgtggtacagtattcatgtacgattggaaatcaaatttacgaatgaaaacagctccagtaatcacccatttagtaaatgataactgctttatttcatattctaatatggctactattcattttcacgaaggatttgcatatgaagctacgaaattatatccacttattaaaaaagccttaaaaaataaacctgaaattaaagatatttatatttgtgggcattcacttggtggtgctgtagctagtattcttactgaattatttaagtctgattatcatcaggaaaataaatatactatacatcctgcttatatttttggtgctcctcgatacgcaacattatcagcgtattttaatcgaacaaatatgctaccaattcagacaaggcgaccagacgatatagtaccaattttaccccctcgttttctcggttatattgaccacccatgtgaattacttacagatggcacggaatattttgatcctaaaccatactctggattatttggaaatatatttcgatgggggaaatttctgtgtgataaaattgaaccacataaaatagaaaattatcggaaagatataggaaaatcaataaaaattgatagcaaagattcactattagatgttgaaaaaataaaaaaagaacatcttagttaa

SEQ ID NO: 303526 - DNA, 1275 bp, Proteus mirabilis; identical to SEQ ID NO: 293970

SEQ ID NO: 303527 - DNA, 1815 bp, Proteus mirabilis
atgttgatattcgctatcctcatcggtctgctttacgcacttcctaacctatatggtgaggatccggctgttcaaatcactggcgcgcggggaaccgccgccaatgagcaaacactggatcaagttcgatctttattagataaagaaaaaattgaagcgaaatcaatcgcccttgaaaatggtgcgattttggctcgtttcagtaaccctgacattcagttacgtgcccgtgaagcgttgttacctgcgttaggtgacaagttcgttgttgcacttaaccttgcaccagctacgccaaaatggttagaagccattggcggtgagccgatgaaattagggttagacttacgtggtggtgttcacttcttaatggaagttgatatggaaaccgcgttaggtaaacttcaagaacaaaatgttgatagtttacgtactttattacgtgacgaaggcattccatattcttctatccgcaaaacggataattatggtgttgaaatccgtttccgcaacgctgatgaccgttctaaagcatcagattatcttgcgcgtcgtaaccaagatctcatttttagaaatggggataataactcgttaaaagctatttttaccgacgagcgtttacgtgatgcgcgtacttatgcggtacaacaaaatatcaccatcctacgtaaccgtgtcaaccaattaggggttgctgagccattagttcaacgccaaggtgctgaccgcattgttgttgaattaccgggtattcaagatacggctcgtgcgaaagaaatcctaggtgcaacagcaacattagaattccgtttagtgaatactaatgttgatccttcagccttagaaacaggacgcatcccgggtgactcagaagtgaaatacactcgagatggtagaccaaccattctttataaacgtgttgtattgacgggtgaccatattaccgattcaacgtcacaagccgatgagtacggccagcctcaagtaagtatttcacttgatagtgctggtggctctattatgtctaactttaccaaagataacgtcggtaaaccgatggctactctttttgtagagtataaagacagcggtaaacgtgatgaaaacgatcgcgcaattttggtaaaaaatgaagaagttattaacgtggctaatattcaaacccgtttaggtaataacttccgcattactggtatctctaatgcgaatgaagcacgtcaattatctctgttattacgtgctggggcattgattgcacctattcaaatcgttgaagagagaaccattgggccaacattaggtcttcagaacataacccaaggtttagaagcttgtttatggggtctgatagcctctgttgcctttatgattatttattatcgtaaatttggtgtgatcgcgagtacggcgctattagcaaacttggtgttaattgtgggggtcatgtcattattacccggtgcaacgttaaccatgcctggtattgcgggtattgtcttaacccttgcggttgcggtcgatgctaacgtactgatcaacgagcgtattaaagaagagttacgtaatggtcgctcagtacaacaagctatccatgaaggttataaaggtgccttctccagtattattgatgcgaacttaaccacgttaattactgccgtgatcctttatgcagtcggtactggctccattaaagggtttgctatcacaactgctatcggggttgcgacatccatgtttaccgctattgtgggtacacgtgcgattgtaaacctgctgtatggcggtaaacgcatcaagaaactgtctatttaa

SEQ ID NO: 303528 - DNA, 186 bp, Proteus mirabilis
atgaatttaggttatgaagcactatttccagatgaaataactaatgttagtccagcaatactttcatcactatcgccagatgcaaatgaaaatcatgatttcttttctggctcaggctcttcttatgttattggtaaaacgatcaataccgaagatgatgactgggcaattaatataatgcactga

SEQ ID NO: 303529 - DNA, 555 bp, Proteus mirabilis; identical to SEQ ID NO: 103787

SEQ ID NO: 303530 - DNA, 1425 bp, Proteus mirabilis
atggcaacagtagttaattttacacaatggccgtggcatcactgggcgcagcttaacccaaatgaaacggccatcatatccggtgattcacctataacatggcaacaattaagttgtcatatcaatcgattggcgaaccatttagcaaaacagggtgttaatactaaaagtaccgtgttgctacgtggtaaaaatcatattcatgttgtttttactctacttgctgtttttcaatgcggtgcaaaagtattaccgttagatcctcagctccctaagtctctacttgatgatttattaccccatttaaacatcgatttttatgctgatttaagtggatcaacacttgagttagatgcgaggttactcgatctttcaggtgtcgaattcaataacaaatcacatcaagataaaaataacatggcaggtgttgcatgggcatcttctcgtatggcaacactgatcttaacctctggatcatcaggtctacctaaagccgctgtgcatacttttcaagctcatctttgtagtgcagaaggtgttcttgaattgataccctttgaaaaaagcgacagttggttattgtctttacctctctttcatgtatctgggcaaggaattctttggcgttggttattacgaggcgctaccttggtagtgcgtaatatgcacccctttattgctgctttgcaaggctgtactcatgcttctttagtgccaacgcaactttggcgtttattacaaaatacacaacaggatagttcgcagcccatcacattaaaagctgttttattagggggagcgatgatcccaactgaattaacccaatgtgcggaaagtaaaggtattcagtgttggtgtggttatggcatgactgaaatggcctctactgtttgtgcaaaacgcgcagatggtaaagcgggagttggtacgccattaaagggtaaagcggtcagattagtggataatgaaatccagatcaaatctgatagtgttgcattaggatattggtttgatggtcaattaaagccgttatcacagactcaggatgattggtatgcaacacgggatagaggttgttttaaagagggggaatggtgcattttagggcgattagataatctgttttttagtgcgggtgaaggtatacagccagaagatattgaaaaggtgctaaatagtcacccgaatgttcgccaaacatttattgtcccgattgacgatattgaatttggtcaacgtcccgttgctgttgttgatactgatattgagacaattaatcaattaccacaatggtatcatacgcgtttagcaggctttcaacgtcccatcgcttgtttactattaccagaacagctaaagagtggggggatcaaaatctctcgtaaacaagtgcaacagtgggtgaaagggcaacaagtaaattga

SEQ ID NO: 303531 - DNA, 435 bp, Proteus mirabilis
atgccatcagaaacatcatcacaaatatcaaatgcaaccaatggtatcgaaccacctcgtggttatatcagtattaaagcttctaaagatggcatcttacgtcaagtggttccagagtatgagcgcctaaaaggggcttatgaattactgtggcaaatgccaagtatcgaaggttatttgcagttagtcggtattatgcaaaagtttgtcgaccaagcgatttctgccaacactaactacgatcctactcgtttccctagtggtaaggttcctatgaaccagctgctaaaagatttgctgctcgcctataaatatggtgtaaaaacactctattatcacaatacccgtgatggtgcagaagatgtacaaggtgatctggaagaagtcgttgaaacggcagattcagattgtgaaggcggcgcgtgtaaaatttaa

SEQ ID NO: 303532 - DNA, 492 bp, Proteus mirabilis
atggtctggatagattacgccattattgccattatcggtttttctgcattagttagcctgatccgtggctttgttcgtgaagcattatcacttatcacctggggttgtggtttttttgttgcaagtcagttttatccttatctagccgtctattttactcggtttgaagatgagctggttcgtaacgggattgcgattgtcacactgtttattgcaacgctaattgttggtgcggtgattaattatgtgattagctctcttgttcaacgcacagggttatcaggtacagatcgtgtgttggggatctgtttcggggctttaagaggtgtgctgattgtatcagcgttactttttgtcttgggtgcttttactcctatggcagacagtgccgattggcaacgttctgagcttattcctcaattcaaccatattattaggtggttctttgactacctacaaaatgcgtcaagtttcgtgtcggagaaaatgtaa

SEQ ID NO: 303533 - DNA, 639 bp, Proteus mirabilis
gtggcaagtaaatttcaaaatcgcttagtcggagccgttgttcttgtggcggtaggggttatttttcttcctacattatttgacggcgataagaaatataacgaagaccaatttgcctctattcctttagtccccaaacccggtgatgagcaagatattgaatcaatagcgccgattgagcaaaccacaacaccgtcaacgccatcagagggtgcttctgaggcgatgatctctgaagcggtgacgggggttgaacagcctcaagtttctactcctgaagtatcagagcctcaagtagcgccatcaacaccggttgttgagccacctaaagtggttaatccgcctgtagagccaccaactactccgccaccggcggtatcagaaacaaccgcgccgaaaggtgaggcttgggttgtgcagttaggtgccttgaaaaatgcggcgaaagttgaagaaattattgcaaaaatgcatctctccggttatccagtatataccgtgcctgctcgccctgtttcaggaaaagtgacacgtatctatattgggcctaatgcctcaaaagcagagttacaggcgatgttacctcgccttaaagagctaacaggcctgcaaggtgaagtaagagcctataaaccataa

SEQ ID NO: 303534 - DNA, 1299 bp, Proteus mirabilis
atgtctaatatcataactgctcctcaagccacatcgcctttgtcggtgtggctttcttatcttgaacacttacactcaagtgctattgatatgggacttgagcgcgtgggcaaggtaggtcaattactgaatgtattacgtcctgcccctaaagttatcactgtatcgggtactaatggtaaaggaaccacttgccatatgctcgagtcaattttgatggcttcaggattgaaagtgggggtttatagttcacctcatcttgtccgttataccgagcgtgttcgcattcaaggtaaagagctttcaccagctgatttttgtcaagtatttgctgaaatagagcaaaccagaggcgatatttcgctgactttttttgaatacggcacactcgccgcattgaaactatttcaacaagctcagcttgatgtggttattcttgaagttgggttaggggggcgtttagacgcgaccaatattgttgatgccgatattgcagctatcaccagtattgcccttgatcataccgattggttaggggctgatagagagcatattggtcatgaaaaagccggtatcttccgtaaaaatcactatgctgttgtaggcgagccagatatgccactttctattgcacaagtcgcgcaacagaaacaggctaaattatttcgtcgtggtgttgattggtcattttctattgatggtgatcactggcattggcgtagtgcagataagcagtttgaaaaacttcccatccctaatattcccttagccaacgcaggtacggcaatggcagtaatacgctgcttattgaaaagcgacgataaagtgagtcaagggatcacccatcaaagtatcgttgagggaatgagtaaagctcagttgccgggacgttttcagataatttcgcagcatccattagttatttttgatgttgctcataatccgcatgctgctgggtatttagccgaaaaactggcgcaattaccgcgttattctgataccaaagtgcgcattgttgttggtatgctgggtgataaagatattgcgggtacattagcgtgtttatcccctcaagccgatcagtggtatgttgcaccattgaatgagtttcgtggcgcatcagctcaggtattagctcagcacctcgactatccggcagtatttgatagtgtcgagcaagcatggcaacaagcaatatctgaggcgcaaaaaaatgatattgtggttgtatgtggatcattccataccgttgctcatgtaatggaactattggaaaaggagagtgcgagtggcaagtaa

SEQ ID NO: 303535 - DNA, 963 bp, Proteus mirabilis
atgagctggattgaaaaaattcttaataaaagcaatatcacgagttcacgtaaagccaatatcccagaaggggtttggacaaaatgtgatagctgtgggcaagtactttaccgcgcagagttagagcgtaatttagaagtgtgccccaaatgtgatcatcacatgcgtatttcagcacgccgtcgcttagaaacttttcttgatacaggaagcacgactgagctgggcagtgagttagagcctaaagatattctgaaattccgcgactctaaaaaatataaagacagaattgctgcggctcagaaacaaacccatgaaaaagatgccctagtggtgatgaaaggtacgttaaaagaaatgcctgttgtggccgcatcttttgaatttgcatttatgggcggctctatggcgtctgttgtgggtgcgcgttttgttcgtgcggttgaacaagcattagaagataattgtccactgatttgcttctctgcaagtggtggtgcacgtatgcaagaagcattgatgtcattaatgcaaatggcaaaaaccagtgccgcattagctaaaatgcaagagcgtggtttaccttatatctcagtgatgaccgatcctactatgggtggggtttctgcaagtttagcaatgttaggtgatattaatgttgctgagccgaaagccttgattggttttgctggtccacgtgttattgaacaaactgtacgtgagaaattacccgcgggtttccaacgtagtgaattcctgctagaaaaaggggcgatagatatgatagttcgccgtcctgaaatgcgtgatgagctagctgaattactggctaagctgactcagtatgatttagcgaaagacgaagatgaactgctaggcgaagaaatgatcgctgatgacatcgaatcttctgacaatgagccagaaattaacatcgaaacgaataaaaaagaagatgtctaa

SEQ ID NO: 303536 - DNA, 702 bp, Proteus mirabilis
atggaattattaacgcaatttgctgatttaataaaatttctaattgattttattttacacattgatgtccatttagccgagttagtcgctcaatatggtacatgggtatatgccattctatttttaattattttttgtgaaacggggcttgttgtcacgccattcttaccgggcgattcgttactgtttgttgcgggggctttatctgcgttagataccaatgatgttaatgttcacctaatggttctcttactgcttttcgctgcgattttaggtgatgcggttaactattctattgggcgcatttttggtgaaaaactctttagtaatcccaattcacgtatctttaaacgagaatacttagataaaacccatgctttctatgaaaaacatggtggtaaagcgataattttggcaagatttgtgccgattgtccgaactttcgcgccattcgttgcaggaatgggcaaaatgtcatatcgtcattttgctttttataatgttacgggtgccattgcatgggtactgctatttacttatgctggatacttttttggtgacttagatattgttcaaaagaacttaaaattgctaattgttgccattattgttatttctattttaccaggtgttatcgaggtgatacgccatcgtagagcgagtgcaaaggccaaaaaagagagtgataaccaagaggtttga

SEQ ID NO: 303537 - DNA, 870 bp, Proteus mirabilis
atgaacgaccaagagagtgctgatgtgatagcgcagtcaatcagtgagcctgcgattgtggcagaaagtacaccattaaagatagcgctaggcattgaatatgacggtagccactattatggctggcaacgtcaaaatgaggttcgtagtgtccaagaaaggttagaaaaagcgttatctcaagtagcaaatgagcctatctctgttttttgtgccggcagaactgatgccggagttcatgcaaccgggcaggttgtgcactttgagacaacggctcatcgcaaagatgcggcatggacgatgggggttaatacccatttaccacaagatattgccgttcgttgggtaaaaacggtagcgaatgattttcatgctcgatttagcgcaaccgcaagacgttatcgttatgtgatttttaatcatcgctatcgtcctgcaattttatcctcaggggtaacgcatttccattaccctctagatgcacaacgaatgcatcaagctgcccaatgtttattgggcgagaatgattttacctcgtttagagccgtacaatgccaatctagaacaccttggcgtaatgtgatgcatgtgaatgtttcacgctatggtgattatgtggtggtagatataaaagccaatgcttttgtccatcatatggtaagaaatattgtggggagtttattggaaattggctgtggtaatcaggctattacttggatggctgaattattagccttaaaagataggactaaagcagcagcaactgcaaaagcaaatggtttatatcttgtttcggttgattaccctgaacgtttcgaacttcctaaacctgcaatggggccgctatttttagcagataacccattttaa

SEQ ID NO: 303538 - DNA, 1011 bp, Proteus mirabilis
atgggagagggttggaatattgcgcttgtgggcgcaacaggtgctgtgggtgaagctattttagagcttctgcaagagcgtgattttcctattggcgaattaacggcgatcgccagtgaagacagtattggcaaaactatccgtgtaaagggtaaaagtgttgcagtacaaggtattcataatatcgaatgggcggatattcaactcgctttttttgccgcgccggttgagattagtgcgcaatacgcacaacttgcagcagattcaggttgtattgttattgattgcagtggtttatttgcgatggagtgggatgtacctttagttgtaccaggggtgaatacatctatgctggcagagtatcgtaaccgcaatattatcgctattgctgatagcatggtaagccaactgttacgcgctatctatccattaaccgaagccgcaggcttaactcgcttgaatgtgacaaatttgatgtcagtatctcgttttggtaaacaagctgttgatgaattagcggggcaaagtgcgcgcttactgaacggtgttcctccagaacttggtcgctttaataaacaactggcatttaatattttaccattgttagttgataatgaaggctctattcaagaagagcgccaaatggttgatcagatccgtaaaatcttgcaagacgatggactacctatctcagtaaccacattacaagcgcctgttttctatggtcatgcacaatctgtgcagttggaaacatcacgtccaatgggaagtgaagaagcacgggaaacattacaagaacatgactccctcaatattagtgatgaaaatgattttccaactcaagtcaccgatgcctccggtaatgttagcttgaacttaggttgcttacgtaatgattatggtgtgcctgaagcgttacaattttggtctgttgcagataacgtgcgttttggcggagcattaatggctgtagaagtggctgaaaaattagtgcaggagcagttttactga

SEQ ID NO: 303539 - DNA, 819 bp, Proteus mirabilis
atggtgtttgctgagcaagaaggatttcaattaacagataaaaccgttggcattgttggcgttggcaatgttggagggagactggcaaaacgcttacgcgcattaggtgtgaatgtactactttgtgatccgcctagagctgacagaggggatgatgaacaatttcattctttagaaacgctattaaagcaggcggatatcctgactttccatacaccgctaaataaatcgggtcgttataacagttaccatttaattaatgagagcaacctcgatattttacctgaaggtcgtattttaattaatgcaagccgtggcgaggttattgataatgctgcattattatcagccttaaaccaaggtaaaaagttacgcgttgttctagatgtttgggagccagaacccgatctttctcttgagttattaaataaagttgatatcgcaacaccacatattgccggctataccttagaagggaaggcgagaggaacaacgcaggtttatgaagcttattgtgattttattggtcaacctcaacacgttgaattatcaacactgttaccaaaaccgttgatctccacaatttctgtacaaggtgaattaactcaaacattactcaaacagcttattcatcttgtctatgatgtacgtcgtgatgatgcaccattgcgcaaagttgccggtatcaaaggggagtttgataagctacgtaagttttaccctgtccgtcgtgaatggtcttcattacaggtggtatgtgataacccgataacggcgagcttactcaatgctattgggtttaatgcaacacataaataa

SEQ ID NO: 303540 - DNA, 936 bp, Proteus mirabilis
gtggataaatgcaacctcacacacccaagaccgtcagaaaaaggcgacattcattaccgtgaggggcaacctacgtttattgaatattcgcatctctatgtcgtcattgacagtggggaataccaccgccaaaccgggcaacatcttgtaccgaaactgcatggctcacaactgccatggaaatcactctatcaaggagaaactcaagacagccttgaagataaagccccttatttggtacacattgccgccaatcaagccggtcagcggtttctggctcattacttgaatttaccacataaagcgagtctcggattatttatcaatagcctcaaaccctttaccgatattcaccggcaaatgcgaaaactcacctatttatataatcaaaaactggagagttggaatttctttcgtttttatgatgttaagcactttatcccatttattgagtctttgactcacggacagttaattaatgtggtcaatggggtaaatgcgttctacggctatagtgcacaataccccgatggggttgaaatcacctttcacccagattatctgtatgacggcagtaagcgagagccgttatttattaatacctatttatacaatcactacgcgaatatcacacagctgcaaactgtggctaaagctaaggcactgattgaacaattttctcaggtagaaggggatgagttagagggtgacgcattaatgggctactgtatacacgcagcaaattgcagttttttagacgatattcatcaatcaaaagcgttattgtacgacttgcaagcccgctatttgtgccgtcatcaaccgagaacatggcagatcgccaatgaaaaagccgcaccttataaatacaaccaagttttattgagttaccaccgttatatcgcctgtttaaatacccaaggagaaatgaaatga

SEQ ID NO: 303541 - DNA, 162 bp, Proteus mirabilis
atgctaggcggtaacggtggtaatcaggcaggaagccagaagacacagcagaatcaaggatggggtcaaccacagcaaccgcaagcacaaaaacaagcatcgagtaatcaaacaccacaaagtgaacctcctcaagattgggatgatcaaatacccttctaa

SEQ ID NO: 303542 - DNA, 2028 bp, Proteus mirabilis
atgggttgcaatatcagcccaggtgagcgctatggtgaattgcgccgtattgaaaaccgttataacggtacagtaaaccgttacttcctttgtgatcgtggtcgttttggctacggttatgtcaatttagcgagtagacctcgtcaacctaaaaaacgtttaggcagtaactggcttgaaatcagtgcagcacaagcaacgcaagccgctgcagaaatgctgaagaaagggcaacgtgttgtcggtatcggctcaccacgagccagtattgaaagcaactttgctttacgtgaagtggttggtgctgaaaatttctatagtggtatttcagctgcagagcaggctcgcttgaccttaatgctggatattttacaaaaaggtggcgtttatactccatctctccgtgagattgaagactatgacgcagtactggtgttaggtgaagacttaacacagacaggtgctcgtatggcactgtcagtacgtcaagccgtaaaaggtaaagcacgtgagatggcagccgcacaaaaagtggctgattggcaaattgctgccatcatgaatatcggtcaacgggcgaaatatccactgtttgtcacccatgttgatgaaactcgtctggatgatgttgccgcttggagttatcgtgcgccggtggttgaacaagcgcgtttaggttttgccattgctcatcatattaatggtgaagcccctgcggttgatggcttagatgaagcattgaataaacagattgacatgattgttcaagccttatcgcaagcgaaaaaaccgttaatcattagtggtagtcatgccggtagcgaagaggttatcaaagcggctgctaatatcgcttttgccttaaaagccaaggggagcgaagttggtctctcttatgtggcagatgatgccaatagcatggggctggcgatgatgaaagcgaaaccactggatgacgcattgaaagtgatgcgtagtggtcaagcagatagcgctattgtgatggaaaacgacttgtatcgccattttgccgccgacgtcattgatgacgcgattgctaaagtggatcacctaattgtgattgaccatcagcaaactgagatcatggaaaaagcacaccttgtgttacctgcttcctcctttgctgaaagtgatggcactatggtgagtcaagagggcagagcgcaacgttacttccaagtgtttgaaccttctttctataacaaagaagtggtgatgcatgaaagctggcgttggctaagtgctgttgattcacaatggcatgaaggtaatcttgactggacgcagttagatcatgtgattgagctatgtgcaacgcgtctaccgcaatttgccggtattgtgaatgcggcacctaatgcatcattccgtattcgtggtcaaaaattagcccgtgaaccgcatcgttatagtggtcgtacttccatgttggcaaatgtttcagtacatgaacagcgtcaacctaaagatatcgatagcccatttgctttctctatggaaggaaacaacagtccaacggctcctcgccagcaaattccatttgcatgggcaccgggttggaactcaccacaagcatggaataagttccagtctgaagtcgggggaagcttacgttttggtgatccgggtgtacgcttaatcgaatgcagtgataacacattaggttatttcactgatattccaccagcctttaacctagttgaaaatcaatgggttgtagctccttactatcgtctgtttggtagcgaagagttatcgcaacgttcacaagtgatccaacaacgtatggacaacgcttatttaaccgtgagtgaatctgatgccatcgcattagcattatctcaaggtcaacaagcgatgtttacttacgaaggtcgtgaattcaccttacctgtgaaaatcagtgctcacttaacccgaggtcaaattggccttccgttagggatggctggcatttcgccatcactggtgggtgtatcggttcgtcaactgcggggtattgcataa

SEQ ID NO: 303543 - DNA, 2172 bp, Proteus mirabilis
atgtctataacaaattcaaaaaaatatcaaaggctgggtgataaggatggcaactcactgagtggggataagacattaacccatggcggtggcagaacatacgcgcaagatctcgctttacaagagcaacatagacaacttatagagaagatcttaagtggcgacatgcaaagtggcttagtgtttacttgtcagattggtggattacccgaagagactttccaagtcacgcaattcgatttacaagaagggatctcacaacttttcaccctctccatccaagccgtcagtccactctcggaaattgattttaatgatgtgttaggcatggcttccagtttgacggtaaagcgagatggtcacattctgcgtacagtacaaggtatcttagcggcggcagagcaagggaataccgatggggtaaaaacctggtatcaatttgtgatacgtcctgaaatgtgggtaatgaccctcaaacaagatagtcgtatttttcaagataccaccgttcctcatattcttgagacattactcaatgagtctcacattaaatatgataaacagctttatcacccagaagagcatttgcagcgcgcctacaccactcaaaaacgagaaacaatgtatgacttttggtgccgtttagccgcagaagaagggattaatttttggtttgaagagggcccacagttattttatagcgaccgacatttgggcatgagagcggggatatccttaacctataacccacaatcggatacagatatcaccgatagcaccgccacaacgtggcgctatgttgaacaactctgtagcgatattcgcgttgataaagattacaatcaacttagaccttcctaccccttaagccatcaagtcacaggagaggttcatcaacaacatgaaatatttgaaagttatggacgctttgaagaagatgctcagggacaaccctttaatcagatacgttatgaacaatcacaaaatcagcgtcaagtaggctctgcgaccacaaactgcattgaattagcgccggggcgtatttttaccttgtctaaccaccccagtgcacgcatgaacaccacatggcaggtgattagtatctcacatcacggtgtgcaacctcttgccgacaacagtggcggtgaaggaacgcaattgagtaatcagctttcctttgtgccgagtactcaagagtggcgcccgccttaccgttttaaacctaccgccgatggtgatgaattagccactgtcgtcggcccgccgggcgaagaaatctataccaatgagcaaggtgccgttacggtctattttcattgggataggcgtggtaaaccagaccatagcgcatcatgctgggtaagagtcgctcaaggttggaatggggacggatttggctttatggctattcctcgtgttgggcaagaagtgattatctcttatttaaacaatgatatagataaaccgattatcaccggatgtacctataatggtcgcaatcgttcccccattgatttacctaaacataaaacccgtaccacatttcgcaccaaaacccataaaggtgacgggtttaatgaattgcgctttgaggataaaaatggcgatgaggaaatttatcttcatgcgcaacgcgataataatattcatattaatcataataaaacccaatacgttgggcatgatgatagccatactgtcgccaataaccgcaagcatgaagtgtgtcatgacgaatttatccacatagtcaatgagcaaacagtacaggttgatgtcaatcaatttgaacaaatagggaaagaccgtatcacacgcattgacaatagttggaaagaagttatccacgccagtcactttcaggaaatcggggaaaacaagcagtgtgatatccaaaatgattataccctgaaagccgcagggggtatccatacccataccaaaatccacaccttgcaagccagtgaaacggtcattatcaaaggcaaggctgggtcgattcaattggatgcacaaggtgtgactattacaggtaaaattctgctcaaaggcgatgtgtcaataacggggggcgccccagaagtggttactcagttagaagcagcggttaatgaagggttaccattagctgaggattgccgtgcgaaagcgatgaaaaaaggaacggcctaa

SEQ ID NO: 303544 - DNA, 723 bp, Proteus mirabilis
atgaaatggcaacgtaagcgattcgcgctttcgggcgatttaacgggcattacctgttcattattacccgttcacccgtttatttatggtgtcggacaaaatactgccacaggcagttatttaagccccaccaatgcgattaattatattgcgaataaaattcagggggcgggtgaggttgatattgtggtgacgatgatttgtgcccgtacccatgacgagtttatcaatgcaattcaaggcttttcgggggtgttgcctttacctgtgtttagccaagttgaacgtatggccaaaaccgccgaaagcctaaatattaccaaaatgcagataccggctaaaacgatagccggtattccaggcccgcaaacattatcaaccaataatagccgtgcagtgattaatgcgggattaattgagaaagcaaaaagtgaagtctcaagcggggcaagtgttgctgggttactttctagcgtaaaaggatttgctgaaagtcgaaagaatatcttgcaaggcatggccgattcattgacgggattactgggaaaatcaaccacggtttgggtgttccagggaaaaggtaacggcgcggaattagccgataaaatgaaaaaagaaatccctgaacaagatgcggtttacaccttggctacgctttttgcgggcgatattgatgcaatcaaaggaatgatgcatgacacagacaccactttacgaaaataa

SEQ ID NO: 303545 - DNA, 600 bp, Proteus mirabilis; identical to SEQ ID NO: 301831

SEQ ID NO: 303546 - DNA, 825 bp, Proteus mirabilis; identical to SEQ ID NO: 294515

SEQ ID NO: 303547 - DNA, 384 bp, Proteus mirabilis
atggtaaaaccaggtattcgcttacgtgaattaggtaaagccattcaaaaattcgttgaagggcatgatttttctgtggtacgcgaatattgtggacatggtattggcgaaggtttccacgaagagcctcaagtattacactatgatgctgatgacggtggtgttgtgttacaaaaaggcatggcatttactatcgagccgatggtcaatactggagattaccgtattcgtaccatgaaagacggttggacagtaaaaaccaaagatcgcggttggtctgctcaatatgagcatactttagtggttaccgacaatggttgtgaaatcatgacactgcgtaaagaagaagagccatttatttctgccgtattagttaacgaataa

SEQ ID NO: 303548 - DNA, 411 bp, Proteus mirabilis
  misc_feature (277)..(286): n is a, c, g, or t
atggttccttaccaacccgtattaaccttttggtttgaagaatgtaccccaaaacagtggtttcaaaaggatagcgcttttgataaagaaattaaggatagatttggtgagctatgtattagcgcaagtcgcgcagagcttgcctcttggcgcgagagcattgaagggcggttaggggaaattattattctagaccagttttcacgtaatatttggcgtgatacaccaaaggctttcgcccaagataatatggcgttaattcttgctcaagaagccnnnnnnnnnnattcgattacccgaatatctcaccctgacaccggtaaaacgcaaatttctgatcatgccatttatgcactcagaatcacaaaaaatccatcaagatgccattgcgttgttttcacaattaaatga

SEQ ID NO: 303549 - DNA, 348 bp, Proteus mirabilis; identical to SEQ ID NO: 297686

SEQ ID NO: 303550 - DNA, 273 bp, Proteus mirabilis
atgaaaaaggtcattatcctttcggtatcattagccacattatttcttgctggttgtactgcagatggaaaaatcaaaacctctcaactgacacccgttaactgtgtcggcgtatttaataaaactaatgaacaagtcagctttacggcaaaagatgttgatcagcgcttatacagcccagataagccaatagacagtgttgatggttggattgatgttaaagatgtttctggtcttctctgtgaggatgtgatcacggctaatgaagactag

SEQ ID NO: 303551 - DNA, 1536 bp, Proteus mirabilis
atgaatttacttaaatcactggctgcagtgagttcgatgacgatgttttcacgagtactgggctttattcgtgatgcgattattgcgcgtatttttggcgcaggtatggcaaccgatgctttttttgttgcttttaaactacctaatctattgcgacgcatttttgccgaaggcgcattttcacaggcatttgttcctattttagcggagtataaaagtcaacagggagaagaggcaactcgtacctttattgcttatgtatcgggaatgctgacgttgatcttagcgattgtcacagtaatagggatagttgccgcaccgtgggttatttatattacggcacccggttttgctgattcagcggataaattccaactcacaacggatctattgaaaatcacctttccctatattttattaatttcattagcatcattaacagggtctattttaaatacttggaatcgcttttctgttccagcttttgcacctacgttgttaaacgtgagtatgatcttttttgctctcgttgttgctccttattgtgatccacctattatggcacttgcttgggctgttttagcgggaggaattttacagttggggtatcaacttccgcatctgaaaaaaatagggatgttggtattaccgcggatctcgtttaaaaatagcggagtgtggcgtgttattaaattgatgggacccgctattttaggggtttctgtcagccaaatttcgctgatcatcaatactatttttgcctcattcttggtgtctggctcagtttcttggatgtattacgccgatcgcctaatggagcttcctactggtgtgttaggggtggcattaggaacaattctattaccttcattatctaaaagttttgccagcggcaacacacaagaatatcagaaattaatggattggggattaaggctttgttttttattggctttaccttgtaccttgggtttagctttattatcaggccctttaaccatttcgttatttcaatatggtaattttaatgggcatgatgcgctaatgactcaacaagcattagtggcgtattgcattgggttaatggggttaattattataaaaatattagcaccgggcttttattctcgccaagatattaaaaccccggttaaaattgccattgcaacgcttattttgactcaattaatgaaccttgcttttgttgggagtttaaagcatgtgggactggctctttcgattggattagccgcttgttttaatgcaggaatgctattttggcaaatccgtaaacaagatatttatcaaccattagcgggttggcctatctttttattaaaacttgctattgcgttagctgtgatgagtgctgtattagtcggcatgctatgggtgatgcctgattggcaacaagggaatatgctaatgcgtattttacgtttattacttgttgttgttgctggtgccgcaagttattttgtcactttatatgctgttggatttagaccgaagcatttttctctacgcgcattataa

SEQ ID NO: 303552 - DNA, 582 bp, Proteus mirabilis; identical to SEQ ID NO: 296346

SEQ ID NO: 303553 - DNA, 1203 bp, Proteus mirabilis
atggcactggtaacacaagctcgcaccttggggaaatactttctcctccttgacaatatgctggttgttttaggattttttgtcgtattccctttaatatcaattcggtttgttgagcaattaggctgggcgggtgtgattgtcggctttgcccttgggttaagacaacttgttcagcaaggcttaggtatttttggcggtgccatcgccgaccgatttggtgctaagccgatgattattaccggtatgctattacgtgctcttggctttgcattaatggctttagcggataaaccttggatcctttggttatcttgtattttatctgcactcggtggcactttatttgatccgccaagaactgccctcgtgataaaattaactcgcccttatgaacgcggtcggttttattctttattattaatgcaagatagtgcgggtgccgttattggggctttaattggcagttggttactcctttatgatttccatttagtttgttgggttggcgctggcgtattcgttcttgcggctatttttaatgcttggttactacctgcctatcgtatatcaaccacgagaacaccgataaaagaagggctaaaacgcgttattcttgataaacgttttgttcagtatgttcttactcttacgggatattttgtactatcggtacaagttatgctgatgtttccgatcgttgttaatgaaattgccggcacccctagcgcagtaaaatggatgtatgcaattgaagctttattatcattaacactgctttatcctattgcccgttggagtgaaaaacattttcgcctagaacaacgcttaatggcaggattatttttgatgagtatcagtatgtttcctgtggggatcacccactcattacatgccatatttcttattatcaccctattttacctaggcactattaccgcagagcctgctcgagaaacattaagtgcctctttagcagatcctcgtgctcgaggcagttatatgggttttagtcgattagggttagcttttggtggcgcgattggctataccggagggggatggatgtatgatattggcaaacaacttgaactgcctgaactaccttggtttttattaggctcaataggatttatcaccctttacgcactacatcgacaatttaatcgtaaaaaaattgaaacagccatgcttaccccatag

SEQ ID NO: 303554 - DNA, 936 bp, Proteus mirabilis; identical to SEQ ID NO: 303540

SEQ ID NO: 303555 - DNA, 1017 bp, Proteus mirabilis
atgattgctaaaggtaagctctccattgctgtcttgttactttttggggtaacggcattactctcaatgtggatcagtaacacggcaactgcggcaatgatgttaccgttagtgttaggcattttatctaacttagatattcgttcagaacgtaatactttcgtcttcgtactattaggtgttgcttatagtgccagtatcggtggtttaggtacgttggtgggtagcccgccaaatgcaattgctgctgctcaactaaatttagattttattacttggatgaagtacggtgttccaatcatgttagtgctattgcctatcatgtttattgtgatgtacctgatgctacgtcctaacctaaaacataaatttgatctgaaattagaagtgttagagtggaataacaaacgtgttattaccatgattatcttcttagtaacggtattttgctggatctttagctcctttatcagtagcgctttcggtggtgtgaaagatttagataccgtcattgcagtcagtgccgctattgtcatcggggtgacgggtgtagcaagttggagccaaattcaggaaaatacagagtggggcgtattaatgctgtttggtggtggtttaacactgagcgcaattttacaatcttctggtgcaagtttggttatggctgattttatgaaagatacttttggtaacagccattggtttgtcattattcttgctgtaacaacctttattattgttttaactgaattcaccagtaataccgccagcgctgcgttacttgttcctatctttgcaacggtggcacaagctttaggtatgcctgttatggcgttaacgatgattattggtatcggtgcatcatgtgcctttatgttaccagtggcaacgccacccaatgcgattgtatttggctccggatatattaaacagacagagatggtacgtgtaggtggggtacttaaccttgtgtgtatcttagttatctctctctttgcttggttcttctggttatag

SEQ ID NO: 303556 - DNA, 1311 bp, Proteus mirabilis
atgaataagcaagaatttttatcccgtcgtcaggcattattagctcagatgaaaccagcaagtgcagctatcttttttgctgcgccagaagcacaacgcaatgctgatagtgaatatccctatcgccaacatagtgacttcttgtatctcaccggatttagtgagccagaagctatccttgtgttgattaaaagtgatgaaacacataatcatagcgtactgtttaatcgggttagagatttaaccgcggaaatctggtttggtcgtcgtcttgggcaagaagctgcccctgaaaaattaggtgttgataaagcgctaccttacgaagatgtaggtgagcaactttatcaattactcaatggattggatattgtttatcatgcccaaggtgaatatgcgtttgccgatgaaatcgtctttaatgctctggataccttaagaaaaggctctcgccgtaatttaaaagcgccacaaacgcttattgattggcgcccaatagtgcacgaactgcggttatttaaatctgatgctgaaattgaattactgcgcaaagccggaaaaatttctgcgttagcccatactcgcgcaatgcaaaaatgtcagccaggtatgtatgagtatcaattacaaggggaaattgaacatgagtttatctctcatggtgcgcgtttcccttcctataacagtattgtcggtagtggtgagaacggttgtatcttacattatactgaaaatgaaactaaaatgcgtgatggggatttagtccttattgatgcaggctgtgaatatgaaggttatgcgggtgatattacgcgaactttccctgttaatggtaaatttagccgtcaacaacgtgaaatttacgaaattgttttaaaatcactcaatgtatccctcgaattgtataaaccgggtacaagcatcaaagaagtcactaaacatgtcgtgtatatcatggtggaaggcttagttaagctcggcattatgcacggtgatatcgaacacctcattgagacaaaagcctatcagcgcttctttatgcatagcttaagtcactggttaggtcttgatgttcatgatgttggacactatggcaccgatcgtgatcgtatcttagagccgggtatggtgttgactattgaaccaggactttacattgcgccagatgcagatgtaccacaagagtatcgtggtattggtattcgcattgaagatgacattgttattactgaaacaggtaatgaaaatttaacggctatggttgttaaagatcctgatgaaattgaagctctgatggtaggaaaaatttaa

SEQ ID NO: 303557 - DNA, 222 bp, Proteus mirabilis
atgtctattaattgcatgggtaagctaatgaaagctagtaagtgggcacatagagaatttgataaagactccattccaaacccaagaactataaaacgttgggtaaaagatggaatagtcaatgggagaattatcgatggatctgtttgggttttctcgagcgagaaaatgggtgttgccacttcaatatcaaatcatgtaaatgcattaatagaggattaa

SEQ ID NO: 303558 - DNA, 1182 bp, Proteus mirabilis
atggcgtcacgtccaagaaatcggcagtatagacacttacctgactttctttattttgataaagatcgaaaacgctatgtcttgacgttgatatcagggaaaagaaaaacaataggctctgatagggcctatgcgattgctgtcgcaaaagaatataatttacgtatgcgtccagaaacatcaattagcttagaatctttaattattgagtcaggcggaataaacggggaaggcgcaccactaagtgatcatattgatagattaatggaaagaattattaatgatgaaaacccagctaaaagcactcaatcaaattgggaaaatgatgctattcgtgtaaaggaattttttagtaatattccttgctgtgatattacactagaacatgtaaacgactacattaactactatcatgctgaaagttcgcctaacgttcaaaatagaaaagttctatttttaaaaaaaatcttctcttatgctgttgatgaatcgttgatgtatgacaatccagccaatcgtaaaaaaatgcgaagaatagaaggtaaacaaagacgacgtttgacattcgatgactttataaaaataagaagttctgcggatcaatggctcaaaacagctatggatctagcattacaaacagcgcaagctaggcttgaggtatctcgtataaaatactccataaaagtaccaaaagaaggcgtctgtggatgtatttggttagataatccagtaaatggaatttatggaacactttatattcatcgccaaaaagtcaaagataaagaggcttctcacgttgccattcctattggtgctgaactaaaacgaattattgatgaaagcagagatagcatagcaagtccatacgttgttcataggctacctaaaaaatatagcaatcctattagctcaatggttaaacaccctacacaagtagcaccagattacttaagccgtgcattttcagcattaagagatcgcattggagttaagtcagaactccccttagagcagcgccctacttttcatgaaataagagcgttatcagcttatttattcaaacagcaaggaatagatccccaagcacgcatggctcattccgatgctaaatcaacaaaaatttatacacaaaaccacgttgattgggttagtgttccacatgctgaaatcaaagtaagttaa

SEQ ID NO: 303559 - DNA, 861 bp, Proteus mirabilis
atgcatgcttgtggtcatgatggtcatattactattggtttaggggttgctcactggttagtcgacaataaagataaagtgagcggtaaagtaaaaattttattccaacccgcagaagaaggcgttcgtggtgcaagagcaatggcggaaagtggcattgctgatgatgcaaattacttcttaggctcacacttaggctttatcgccaatagtggtgaaatcgttcttaacccaacacattttttatgtaccactaaatatgatttccgttttaaaggtacgccttctcatgcgggggcagagccagagctaggtcgtaacgcattagcaggcgcttgccatgccgcaacacaaatgctggggatctctcgccatggtaaggggatgtctcgtattaatattggggtattaaaagctggtgaaggtcgtaacgtcactcctgccaatgccgaaatgcaaatcgaagtgcgtggtgagaatgaagagatcaatagctttatggctgccaatgctgtacgtatggcagaaggtgccgcacatagcttccaattagaaatggaaagcgaagtgatgggggaagcggttgatttaaccaatgaccaagaactgattgatgtgatggccaaagtggtgggtaaacacccagaactcactgcgatcccaacccgtccattcggcggaagtgaagatgcaacggtgttagcaaaacgagtacaacgctgtggtggtaaatctctttactttattgttggtgccgatagaactgccggacatcaccaagcaggctttgattttgatgaacaacaactgatgactgcggtaaatctttatacgggttgtttagaagaattactgaaataa

SEQ ID NO: 303560 - DNA, 957 bp, Proteus mirabilis
atgtcagtcccttcacaggaaaatatcacactaaccaaagaagacttacgccaactgcatgtttcaagttcactttatcgttggtttttgcgttattttccccatggaggtacttaccgtgctatccataatgaattgataaaacaacgtcaaacacaatggatagaaagcttaattcaatatatttatctgcgtcattttagtcagtcctcttttgccaaacaggaacaagaagtgatagaaaacatcttgtccctgttaggcaatgaaaaacaaaccggtgtgacattacaacgtttgccctatcaccaaccgcaatctagcgacgaaaacatccagttttctaccgaatggcatcaactgattgtcaaaagccaacaatttaacaccgccctcgcattatgtggtcgtgataatattgtcgccttttccggtgatgaaaacagtattgctaacactggttatagtaaccaattaatcaacagcggatttgctggaaagatcagtaatacggcagatcaatgtcgtattggtagcttaggaggacgctctcgtatttgtaatagtggcaacgatgttaaaatttacgcttctggtcaaggggcgcatattgccaatagtggcataagaaactttattaatgcgactcaatcccgtacaaaagtcaccaatactggtgatttagcacatattactgttactggcgataacgccattgctatcaacacaggtgataactgcacactctctgtatctggggataacagcgtgtgtatctcaacagggcatcttcagcaattttgcttaggaaaaggcggtagtgctgtgattgcctatcacgatggaaaacgcacccgctttaacgttttctatgaaggtgaagataatattgaggccggcattcactactacttagatgaaaaacagcgccctgttgcaatggataatattacttaa

SEQ ID NO: 303561 - DNA, 1233 bp, Proteus mirabilis
atgctgatgagtcacaacaacactgaaacgcaaattggcaatatcgatcttgttaagcaacttaacagtgcgattgtatatcggctcattgatcaacacgggccgatttctcgtattcaaatcgccgagcagagccaactcgcccctgccagtgtcactaaaattactcgtcagcttcttgaacgtggcttgattaaagaagttgatcaacaggcttcaaccggaggtcgtcgcgcaatatccattgttgtggaacatcgccgttttaataccgtcagcgtccgattaggacgcaatgatgccactgttgctctttatgatctcagtggcaaagccttagtagagcaacactaccctttagaacaaagcacccaacaagaagttgaaaccttgcttattaatgctattgatgattttattaaacaaaatcaacgtcgtattaatgagcttatttcaatttcaattatcttgcccgggttagttgatcctaataaaggcattgtccactatatgcctcatatgaaggtaaataactgggcactcgttgataacttagaaaaacactttgatctgccttgctatgcgggccatgatattcggagtctcgccttagcagaaaactattttggtgccaccagagattgtgaagattctatcttggttcgtattcatcgtggcgcaggggctggtgttattatcaacaacaaaattttgctcaaccagcgtggtaatcttggtgaaattggtcatatccaaatagatccattaggagagcgttgccactgtggtaactttggttgtttagagaccattgcgtccaatagcgcaatagaagctaaagtccgctaccaacttgaacaaggctatcccagccagcatttatctgcaacacaatgccaaattcaagatatatgcgatgcagcggtaaaaaacgatcccctcgctgttgaaaccattaaacaagtgggtcttcatctaggtaaagccatcgccattgcaattaacctatttaacccacaaaaagtggttctggcaggagaagtgaccgaagcggctgaaatattactaccgtcgatccaaagttgcattaatacccaagtattaaaagagtttagagaagcgcttcctgttgttatctccgaacttgatcatcgctcagccattggggcatttgcacttaccaagcgagcaatgcttaatggagagttactacaatatttattcgacaaataa

SEQ ID NO: 303562 - DNA, 1164 bp, Proteus mirabilis
atgtttgccttaacaaatgctgttatttatacaggttatgaccgtttagaagatcacgccattattattaacgggtcacgtattgagcaggtttgcccacaggatcaactaccaaaagatatagccactcgtgatatgcaaggtgcgattgtctcccccggttttattgatttacaagtcaatggctgtggcggtgtacaatttaatgacaccgcggaaaatgtcacagtagaaacgctagagattatgcaaaaagccaatgaacgcttaggctgtactagctatttaccaacattaattacctgttctgatgaattgatgaaaataggcattgaagcaactcgcgcttatatgcaaaaacaccaaaataaagtgttgggattacatttagaaggcccttatatcaatatcattaaaaaagggacacatgatcctcaatttattcgtcaaccaagtgcacagatgattgactatttgtgtgataacgctgatgtcatcgctaaaattacactcgcaccagaaatggtcgatgaaaaatatgttcgtcaattaatcacagcaggtattgttgtttctgcaggccactcaaatgccacctatgaagaagcgcgtaaaggttttcgtaacggtatttcattgtcgactcacctttataatgcaatgccttatatttcaggccgtggcccgggtcttgtaggggcaatttatgatacccctgaggtttacgcagggatcattgccgatggtttacatgtttcatgggcaaatatccgtaacagtaagcgcttaaaaggtgaaaaactgttattagtgacagatgcgacagctcctgcggggcttgatccaaataaaaatgagatggatagcttcgtttttgctggaaaaacgatatattatcgcaatgggctgtgtgtggatgcggacggtacattaagtggctcatcactcacgatgattgacgctattaaaaatagtgtacttcatgttggtattccattagatgaaacgttgcgtatggcaacactttaccctgcccgtgcgattggtgcagataacgaactcggtacaattgaagcaggtaaaatagcaaatattgcttcttttgataaggacttcaacctttgcacaacatttgtcaatggtattgaaataacagataactaa

SEQ ID NO: 303563 - DNA, 405 bp, Proteus mirabilis
atgggaggtgttggtaatgatggtcatatcgcttttaatgaacccgcctcatcactcgcttctcgtacacggatgaaaacactgactgaagatactcgtctcgctaattcacgattcttcgacaacgatatcaataaagtgcctaaatatgcgctaactgtcggtgtagggacattattagatgcagaagagttaatgattttagcgactggcatcaataaggctcaagcagtacaggtggcaacagaaggtgctgttaatcatctatggactatctcttgcgtgcaattacaccctaaagcaattttagtctgtgatgatccggcgacaatggaactgcgtgtgaaaacactgcgttattttcagcaaattgaagcgcaagagcgccagcaataccaagactaa

SEQ ID NO: 303564 - DNA, 1167 bp, Proteus mirabilis
atgaaaatcaccatctccggtaccggctatgtcggtctatctaatgggatactcctttcccaaaacaacaaagttgttgcattagatatcaataaagaaaaagtcgaactattaaacaaaaaaatctctcctatctctgataaagaaattgaagagtttttagccactaaagagctcgactttacggcaactttagataaagaattcgcttataaagatgctgaatttgttatcattgccactcctaccgattatgatcctaaaaccaactactttaacacctcttctgtagagtcggttattcgtgatgttttagaatataatccaaacactactatgattataaaatcaaccattccagttggttttactaaacagatgagagagaaatatcataccgataatattatcttctctcctgagttcttacgtgaaggtcgcgccctttacgataacctctatccgtctcgtattgtgattggtgagcaatctgcaagagcagagaaatttgctgagcttttacaacaaggggcattaaaaaaagatattgatgttctttttactgattctacagaagcagaagccattaagttatttgctaatacttatctcgcactacgtgtggcttattttaatgaactcgatagctacgcccaagcttacaatttaaatgcaagacaaattattgaaggtgtttgtttagatccgcgtattggtgatcactataacaacccctcatttggttatggtggctactgcttaccaaaagatactaaacaactattagccaactacgaatcagtgcctaataatattattggcgccattgtggaagctaaccgcacccgtaaagactttattgctgattctattatcgctaaatcaccgaagattgttggtgtttaccgtttaattatgaaatcaggctctgataatttccgctcctcttcaattcaaggcattatgaagcgtattaaagcgaaaggcattgaagtggtaatttatgagccagaaatgaaagaagagactttctttaactcaaaactaattcataatttagatgagtttaaagcaatgtctgatgtcatcattaccaatagaatggcttcagcactaaacgatgttgaagaaaaagtttatactcgagacctctttggtaacgattaa

SEQ ID NO: 303565 - DNA, 1854 bp, Proteus mirabilis
atgaataataaaaaagtattttttctttcaagtgttgctttaagtgttatgacgagcagtttcaacctatttgcacaggctgataatacattgagtgtgactgctaatcgttttcaacaacctacctcctctattttagcgccagtgactattgttgatcgtgaacagatcgatcgctggcagagcaatagtgtgcttgatgtattgcgtagaatgccagggattgatgtagcacaaagtggtggtatagggcagatgagttcagtctttgtgcgaggaactgactcaagacatgtattaatattaattgatggtgtacgtactaaccaagcagggatttctggctcttacgatatgagtcaactgcctctttctttagtacaacgtattgaatatataagaggccctcgttcggctgtttatggctccgatgcgattggtggggtcattaattttataacgaaacgccaaaatgatggtttaacgttaaatacaggaataggaagccatggatatcaaaattacaatggttcaatacaacaaaaggtaggtgagagaaccacattatctgcggcaggtggatatacttatactaagggaatacatgcaacggatgattctgtccctgttgccgccccttttcatgacagacatggatttatgaataaatcctattggtttggtatcgaccatatttttaatgataactttcaaggctacatgaaagggtatggttatgataatcgtactacttatgttgcatcttatcccggtaatacagatcaaagtaaaacttataatcgtaattatgaagcgggtattaagttcagtggtgattcctattttagtcaattaattacggtgtatagccaaactaaagactataactacatttcaacaaatggccgtgatggtaagggctcttctgtagataattctaaacaatataatgtccaatgggggaacacctttttaattccaagtggcatgatcagcgctggaatggattggcaaagacaaacgattgaagcgaattcagcatcagtacctcatcaaagaacaattgataatactgggctatatctcacatctcaaaaacaacttagttcagttatcgttgaaggcgctattcgttctgatcaccacgatgaatttaactggcatactacatggcaaaccagtgcaagttgggagttcgtcgataactatcgagtaattgcttcttatggtacggcatttaaggctcctacattggggcaactttatgcggataatcctgcatggaacacaaaaggtaatcccaacttaaaaccagaaaaaagtaagcagtgggaagtgggcgttgaagggttaactcaagggattgattggcgtttatctctatatcaaaatgatattgataatctgattgcttttagagataacacttacattaattacaataaagctaaaataaaaggtgctgaatgggttggtgagatggatactggatcattacatcatcaattaacattgcagtaccttgatgctagagatagtgataataaactattaagcagaagagcaaagcaacagtttaagtatcaagtagattggaatatcgcagatatagatattggaattaattatcaatatataggaaagcgctatgatacggactttaaccaatatcctacgaaaagaataaaactaggtggggtaagtctttgggatttaactgcgtcatatcctattacatctcatctctcaattcgtggtagaatagccaacctgtttgataaagattatgagacagcttatggctatcgcacgccaggacgtgaatatttcctcaccggaagctacaacttctga

SEQ ID NO: 303566 - DNA, 819 bp, Proteus mirabilis
ttgaaaataacagatgctaatggcgctgtagttcaattggatgatgtcagtattgctcaatcatcaaataaccaatacggcactctcagtaaaacgacctataacagcaaaacaggcacttataccgcaacttttaccggtaaaaatgtgggaacagaaaccttctatgtggttattcaacaaaccgtgttaagcgaggtgaaaacaactgttacagtggataaagtcataccgatcaccgatattgcttatattgattcgaataattactcatttgaattaaatgaaggattccctacaacaggttaccaattctcaagtttcagttttgtgatgaaaaatggaaccaaagcatcggattatacatggaaagcaaatcaatcatgggtcactctgactcaaaatagtaacaaaatgaatgtcatgttctccaaagcaccaaacagtgaaaataaaacggtaactattacagcacaacctcgtgtagaaggtgtaggaaccgcattctcctatacatttacactaaaacgttggtttacattctatggtggacaaccgttacctgctccgagagcatggaaaatatgtacagataatggattagataccacaccttcatccttacttacctcaggtacaaataaacgaggtataggaactgttttctcagaatggggtaaaggaggttcagttttccacgcatggtcttccgatatcaacgatcaacaacaggttggtttagtgaatctttatgatgggtcagttaaataccttaactcatattttcaatatgaccctgtatgtaaaacagacttgtaa

SEQ ID NO: 303567 - DNA, 429 bp, Proteus mirabilis; identical to SEQ ID NO: 297714

SEQ ID NO: 303568 - DNA, 1167 bp, Proteus mirabilis
gtgaaacagaacactactttggtacgcaaaggtgacagtacattagtacctgtcgcgggtttaacggtatttgctatcgcatcaggctatttaatgagtttaattccactatctatggatagttttggtattgatactttttatgctagctggttagcaagcatttactttattggattacttataggttcagtgatgatcgaacctattattgcaaaaatagggcataggctctcttttgtgctgtttttattgttgttagcattcaccgtgagtattttgccactgttaccttatttatcggtatggctagtatctcgttttttcggtggtatggcggttgcgggtatctttgttgtagtcgaatcatggttattaattggtgataatcctaaagagcgagctaaacgcttgggcttttatatgacatcactttatggtggcacaacattaggtcagcttgctattggtgccattggtacgcaaggggcaattccttttattgcggtattggcattgctattaattgcagtgttacctcctttgttttttaaacaaggacaaccccaatgccacgagcataaaagtttgtcacttaaacagattagccggctgaataaagcttctttagtaggctgtatggtttctggcgttgtgatggggagtatttatggcatgatgccattggctttaaatcaagggcaatttaacaccgaccaaattggggtgttgatggcagcaattattttaggtggtatggttgttcagcctattattagcaaattgtcggtgatgatgagtaaaaccctattattagccatgatgtgcttagttggggtatttgcgatgggcatgacttatctgtctaatgactatgtggtgttaattattgcattagctttattaggaatgtcatcttttgcactttatcctattgctatcacattagcttgtgatcatgttaatgcgagctatattgtggcaattactcaggtgatgctattaagttacagcgtgggttcagcaatggggccattaggcgctggtatgtttatgtcacaagcaagtaacggcattatgaactttttctttgtcgtgttattagtgacagctgtatatatgttatttgccagtttacgacgcaaaagccatattgtgcttaactaa

SEQ ID NO: 303569 - DNA, 846 bp, Proteus mirabilis
atgttatgtggaatgataatgttatcttctattgtgcaagcaagacctaatcaacaagttcctcaactcacaccacaagtatcaacctattatcacattatggaaaaagaggttgagcatcaaggaaagcagtatcgcttttttcttgcgatccccaaaaatacgcctaagacaacagtgctgtatagtgttgatggaaatgcacaatttccacttattgtgaatgaagcactagcgcaagcgaaaaagccattgcctgttattgcaagcctaggctatgtaggtgaaaaggcctattttatagcggaaagaactcacgactataccccaagagtacatggcgaagcctttgccaaaggcggtaatgttgaacagttttatcagtttatggtaagccaattaaaaccctatgtactagcacaggcggcgcaagaaaacatcactattactgagcaatcactatttggacactcctttggtggcgtgtttacgctatatgtattatttaatcatccagacgcttttcaacgctatattgctgctagcccatctctttggtggggaaaaggtgagtggatcactcaagataaatggcaacagatccccaataatgttgcggtgaccattacattaggtgaattagaagaaacccctgatttttctcaaatgagcgaagagcaacgcttgcgctatcaaacgcgtagtagctggcttactcctcgacaactctgtgattatcttactgatgccggcaaaacatgccaattttacctctttacgggtaaaggacatggcagttcaatccctgatgcaatcaaaaccgctttagaacaaagtacagaataa

SEQ ID NO: 303570 - DNA, 327 bp, Proteus mirabilis
atgctgggattacttgcgggtattatctgtattattaaccctttttcttcaggggtcgtggtcagtgttttcctcggtgtggtgttttttgcttgtgcaataaccagcataatggcggcctttaatagccggatctcttctggttggtcgatgttaattactttacttgctggttttatctatctatttttaggttatatttttattaccgatcctttaaatggcatgttaagccttgcatttattatcggttatttatttttccctatcagcaatactcagttgacttttttctattgtgattttcactgcattttttttctttaa

SEQ ID NO: 303571 - DNA, 780 bp, Proteus mirabilis
atgatgcaaaaacgtttacataaagatatgcaacatcgtagtgtttcagccattaaagtaatgcgtgaaatggcaattcaacgacagatgtctcatatagagatacctgtcgtttttacctgtgcattgggctataaacatgatgaaggttttctttctcatcattcatggctaaaacctgtttggggaatatcacaaacaccacaaacatggctagatcatcaagtatatgagtcagacggtgaattatatttaaactgggattttgtcgaacaattatttgactacacaaccattttttccatgttccagcaatatgaacatatactcactaaactggctactgaaccacaatcttggcaattgccactaaataaacttataccaagatgcaataatctcgtcatcaccccagttttcaatgccaaaaataatcaaaacacacattataaacaatctactgatacacaaaaaacaggtcagacaatacaaaaactacaacaacttgttaagcaagttattggaataacgttagcacctgaaacaaattttttcgaagcaggtgccagctctttacaattggttcaacttcatgcagcactacaaaaaaatggctatagccatattacaattactgatctgttcgctagtccaaatctaagtacattagcgcaattgctttggcaaaacacttcaccaacatgtgagcaatattccgaccgagacaaacacaaaaacaagagaaagaaacggttacaactacgaactcatagtagataa

SEQ ID NO: 303572 - DNA, 708 bp, Proteus mirabilis; identical to SEQ ID NO: 297864

SEQ ID NO: 303573 - DNA, 942 bp, Proteus mirabilis
atgataaagtcacctccatttaaaacatcatttttacagcccaaatattggctgacatggttggggataggattactctatcttctcgttctgctcccttatcccgttatctactggttgggtacacggctaggtcgtttatctaaagtctttttaaaaaaacgtgtacaaatagcagaacgtaatcttgagctatgttttcctgacatgcctaaaaatgaacgtgaagcgttagtgaataaaaacttcgaatccgtaggtatggggctatttgaaacaggaatggcttggttttggcctgattggcgtgtgaaacgttggtttaaaatcagtggtagagaaaatattcaaaaagtacaagaaactggccaaggtattattgtcgttggtatacactttttaactctagagttaggtgcacgtatatttggcatgctaaaccccggtattggtgtgtatcgccctaatgacaatccagttatggactggttacaaacttggggtcgtttgcgttctaacaaatttatgttagatagaaaagatgtcaaaggtatgatccgcaatttaaaagcaggagagatcctctggtatgcccctgaccacgattacggcccacgaaagagtgtctttgccccactttttgccgtagataaagcagcgacaacaacaggaacctatattctagtcaaaaccagtcatccggctctgatcccgtttacaccaaagcgcttacctgaagcaaaaggttatgaactgattatttcacctgccgtagctgattttcccatcgatagtgaagaaaacaccgctatcgcaatgaataaagtggtcgaacaagaaattttacgtgctcctgatcaatatatgtggttacaccgtcgttttaaaacccgcccacctggagaagcttctttatataatgagataaagaaagtacactag

SEQ ID NO: 303574 - DNA, 885 bp, Proteus mirabilis
atgattaagcaatacctacaagtcaccaaaccaggaattattttcggaaatttaatttctgtgataggtggtttccttctcgcctcaaaaggcgagattgactaccccctatttttcgcgactctacttggggtgtctctggtcgttgcttctggttgtgtttttaacaactatattgaccgtgatattgaccgtatcatggaaagaacgaagaatcgtccattagttcaaggattaatcgacccgcaaattagccttatttatgcctcagtattaggtattgcaggtgttgtgctgctctatgtagcagccaacccacttgcaatgtttatcgctgtattcggctttattatttatgttggggtttatagcctctatatgaaacgtaaatctgtttatggcacactgattggtagtttatcaggctctgcaccaccggttatcggctactgtgctgttagcggtgaatttgatgcgggtgcagcaattttattacttatctttagtttgtggcaaatgcctcactcttatgccattgcgattttccgttttaaagactaccaagcagccaatatccccgtattacctgttattaaagggatctcagtcgctaagcgccatattattctctatattctggcctttatgattgcaacgctgatgctaactttagtgggatatgcagggtataaatacctgattgttgcctctgcagtcagtatctggtggttgggcatggcattatctggttataaagcaaccaatgataaagtgtgggcaagaaaattatttatattttctatcattgccattacatcattaagtgtaatgatgtctgttgatcccaccagttcaacagaaacggttctcgcttatctgagataa

SEQ ID NO: 303575 - DNA, 1668 bp, Proteus mirabilis
atggtgggtctatgccttgccgtagttgaaggtctttttgctactattccgtatattctactctattttttattaattgatctttttgccaataaaatcacactagctcagttattttattactttttatcaatactcttatctattgttctgcgtattgtcattggtacttatagtatgccaatgatttttattggtgcttataaaatgatgggacaagcccgtctaagaatagccgatcatttacgaaaaatcccgattggctggttttcttctcaacgcagtggtgatcttgcatcacggcttactgctgatttagagatcattgaaaatatctggtcacatttcttaggaatgtttatcagtactttagcgatgcctgtttttctctcactattcttagtatgggtagattggcaactcactttaattatattattttctattccaatcgctctgttcgcattatccataagccataaaataatgttaaaagctgcacaacaggcagctgatgctaatgccaatgtacaatccgaattactcgattatatccaaggaattatggttattcgtagttttgggcgacttggtcctgcatggaaaaaactaaaagcagccttagaaacacaaaataaaacccaaatagttctagattccaagcctgccccttggattgcactttatggttttattcttgaatcaggttttattttattaatgataataggaacaagccgtttaattagtggctcactttctccttctcaattcgtttttttccttgtattagcactccccatttatcgacaattctttgatttaggattatccagtatgttgttaaattatgcacaaaaatcattacaacgcatagaagaagtaatgaaagtggttccactttctgagcctaaatatactcaattaccaataagaacagatatctattttaacaatgtaagctttatttatccttataatagtcaattaacattagataatatatcttgctgttttcctgaaaaaagctttactgctattgttggccctagtggctcagggaaaagcactttactacagcttatttctcgtctatgggatgttaaccaaggtgaaatattgctagatgatattaatattaaccaaataaattccgataaactctgttcatatgtatcttctgtttatcaagatgtcgttttattttcaggaacaattaaagataatattttaatgggaaaaacagatgctcacgatgatgaaataataactgcagctaaattagctaatgcacatgagtttattatacaaaaaccacaaaattatgatactcctattggttacggtggtatgttactctcaggtggagaacgtcaacgtctttctcttgctagaactttattaaaaaatgcaccaattttactgatcgacgaagcaacatcgagtatcgattgttcatcagaagtattaattcaacaagctttatcattgttatcaaaagataagacaatcattatgattgcccatcgattaaatagcattaaaaatgccgataacattatcgtaatggaaaatggaaaaatagcagaacaaggaaaacatgctgagttacttgcaaaaaatggcttatatgcacatttatggttacaacagaaagcgttatgctaa

SEQ ID NO: 303576 - DNA, 348 bp, Proteus mirabilis; identical to SEQ ID NO: 190917

SEQ ID NO: 303577 - DNA, 834 bp, Proteus mirabilis; identical to SEQ ID NO: 295273

SEQ ID NO: 303578 - DNA, 471 bp, Proteus mirabilis; identical to SEQ ID NO: 297673

SEQ ID NO: 303579 - DNA, 495 bp, Proteus mirabilis
ttgccgacaatattatcgcatttagataagtgtgttgtgttttatcataccaccaaccctcaagcggaagtgagctatttagcgcataaaaagcaattatacagttcagcccaaacagacatttatgtgtatgtattcgtttcaggaatggttttgaccccgaagaaacgttgggggttatcactgtacagtgaagatggagcacgggtctttaatacggactatctgccttttacccgaggaaaatcaatggaattgttattacgggaggggagtgtagagactccatatagcttgcctttagtctgtgcaacaagtcagtttgtgaatgcgtcttatcaggatgaccatattgattgggccaagcgcaatacggggatacgttttcggggaaaacagatttttgtgagcgaacgaatacgtgatgctcatcggcaacatcatgtagagcaacgtattcccttttatgtcctcaatggttcacattatttttag

SEQ ID NO: 303580 - DNA, 234 bp, Proteus mirabilis
atggtacctgtgccagagacaatagcagaccctgacacgtgggatgaagtttggacattcaaaagatatagcgagcgttatgtcttgattgatgatgtgggagggttaacatttgagtatcgatacgagttcttaggagaagaggatggctggataagtatgcctccgagtcgagaaggttctggattaatggaacaagggcttatgatagacgtttcaatgttagaagattaa

SEQ ID NO: 303581 - DNA, 1506 bp, Proteus mirabilis
atgaatgaaagaaaaactatcaaagtaaataagttactactagatactaacaattctagatttccagatttagccgataatcaaagagatgctatatctaaaatgttagaaaaccagggagataaaatttctaatcttgccaaagatatcgcaattagaggtttagatccttccgaaaatattctggttcacgaaagtgaagaagagcctggtttctatatcgtagatgaaggtaatcgcagagttacagcactaaaattgctattatctcctgaattagctcctaatgaaaaaataaaaaaaacctttgaaaaaatacaaattacaatgaattcagatatagatcgcgtagagaattgtattgtatttaaagatgattctgttgatcactgggtaaatatgaaacatacaggacaaaataaaggggtaggtagagttgaatggaccgcaccagaaaaagctagacacatggctaggaatggtaaattatcttttggccatcaaattcttgagaatatagaaattaacttcagtgataatataaaagataagtgtaaaaaacatataaaaatcaccaatattacccgtttattcggtgaccctaatataagaaatgcaatgaacatagatgttgttgatggttttttatactgtcaacaaccccattctaggtttttagagcaattaagtaaaattattaactctatgatagaagtagatgagcgaggaaaatcgctatttacagtaaatagaattagacataaagtagacagaactgattttatatttgatattggtatcacccctagtactattttagtatctaagccttggcgaatcatcgatgaaaaaaataaagattacatagaaaaaaaatttagaggtaaaactgataatccagagcctttaaatcctactcctgtacctttatctcctgatcccataaaaataaaacctggcgatccgggggacgtaattagtaaacctatagaaccacctatagatgataattcaacacctgatgatggtaattctagaataactagaccaccaacatctaatagaaataatcttattccaactaatgtccgccttaatttcaaatcgcataaaaaatgctcaagaatttttaacgaacttaaaagaagtctttcatttgatgaggctcctatctcaatttcaataatgcttagaatttttattgatctatctgtcactattttttatgaagaaaataaactttctaatacttttaagataaataataaaagctcaagagagcctggcttacatgataaagtcctactctgtgctgattatcttaaaaacaataaacagttaacaggttatgaagcaaccgcagttaaaactgcttcaagtcaaataaccaaggctagtggctcattacagcagtatgtacataaccctagttttttaccaacaaaagaaactgtaaatactgagtgggataatttccaacgtttattagaagaaatttggaaataa

SEQ ID NO: 303582 - DNA, 651 bp, Proteus mirabilis
atgaacaataatcgcgcactactatgtctggaaaaaattggctttcaactcgatagcaaaattattctagataatgtgactttctcactacaaccttctgaatttaaattgattacaggcccttctggctgtggaaaaagtacgttattaaaaatcattgcctctttattatcaccgacaagtggcacacttttctttgacggaaaagactacttaaccctttctcctgaacaataccgacaacaagtttcgtattgtactcaaaccccgatgttatttggtgaaacggtttatgacaatcttaaatttccttatttactacgcaaaatcgccgttgatgagaagaaattagcgaaagatttagattactttaatttgcccaatgagattttaaataaaggtattaatgaactttctggtggtgaaaaacagcgtatctcacttatccgtaacctacagtttttgcctaaagtgttattgcttgatgaaattactagtgctcttgatgaagacaataaaataaaagtcaatgagcttatccatcattatgtcaaagagcaaaaaatcgctgcattatgggtaactcacgatcaaaatgaaatcaaacatgccgatgatgtgatccacttaccgagtcatatgaacaattaa

SEQ ID NO: 303583 - DNA, 1389 bp, Proteus mirabilis
ttgacacagttataccaagcaccagaaaaaatttatttaccagataaaaataagctagagcatgatttgcgccaatttttaccagactatatgatcccaaaacatatttattttctaactgagttccccttaaccgcaaatggcaaaatagataaccaatcattaaaattgtattgtcaggaataccaagaagaatacctaaatcaacaacctatcaatggtaaagaacagatcatcataacaatatggcaaaagctccttggcaccaacaagatacaccgtcacagtcatttctttcgtgaagggggagatagcctagttgctattcgattgatctctgatttaaaccatattggctaccaagttgaactggagcatatctttgcttatccgatcctttctgattttgcacaaaatataaagcagagcgaagttttcgaaaaacagccagcaatttcacataacgaggcgtatagatacaatccatttccactcactgatattcagcaagcttacttagttggacggcaaaataattttacacttgggggtgttggtacacatttttttgtccattttatagcggaaaatttagatgtacctaaattagaacgtacaattaatcagttgatttctcgtcatgatatgttacgtggtgtcattattaatggacaacaacaagtacttaaaaaagttccttattattccgttaaaacgcattatatccctacagaaaaaagtgacgcttttctagtattacgagctcaacttgctaacattgtttatgatccagaaatttggcctttatttactattcaagttatcaagaccaaagaacaaccagatcatatttttattagccttgataacttattccttgatggaatgagtatgcagatatttttcagtgagctaaaaacactgtatatggagccaaatcaccaatttatccctctagatattacttttcgagattatattgattgtgatgcctatccgattaacacacaaaatgattgggaatattggttaacgcgtttaccacaattaccaccagccccacaattgccactaataaaagatccagcacagattgtgcaacctcgcttctcgcgtttacaaacatcattatctacttctgtttggcaagcactacaacaagttgctcagcaaaataatgttacgccagcagcacttttgattgctgcttattgcgccacattatccgcatggagtaaaagccctgagttaacaattaatttgacattatttaatcggcatcctgtacatcctcaaataaatgaagtacttggtgattttacctcattacaattactcgattggtatacctgtgtcaatatttcgccgttaactccttcacttttataa

SEQ ID NO: 303584 - DNA, 1008 bp, Proteus mirabilis
atgggaattgatttacccgttatttggttcatcatcatcgtatttagcacattaatgtatattgtgatggatggcttcgatctcggcatcggcatgctctatccttttataaaagagagagaagatcgcgatttaatgatgaatactgtcgccccggtatgggacggcaatgaaacatggctagttttaggtggtgcggcgctatttggtgcgtttcctttagcgtattcagtgatccttgatgctttagccatgcctttaactatcatgctagttgcgcttattttcaggggcgttgcttttgaatttcgctttaaagccgatgatactcataaagttttttgggataacgcctttattgtcggctctctattaaccacctttatgcaaggtatagtcgtcggtagtattgttcaaggtttacccattattgaccgtacttttgctggaagctattttgattggctatcaccctttgccctgttttgtggctttggtctagtcattgcctactcactgttagggtgtagctggctcattatgaaaactcaaggccatttacaacagagtttgtataaagtgatcttgccattaacgttcgttatgctagcagtgatagccgttgtcagtttatggacaccattagcacaaccggcgattgctgaacgttggttttcactacccaatattttctttttcttacctgtaccactgctagtgttatatagcgcttggttgattattcgcgcagtaaagaaaaaaggtcattacttacctttctttgcttctctagcgattatatttcttggttttactgggctagggattagtatctggccaaatattataccgccggcaattagttttatcgatgcatcagcaccaccggaaagccaaggttttatgctcgttggtgcgctatttatcattcccattattctcgtttatacattctggagttattacgtattcagaggaaaaaccaattatgaagaaggctatcactga

SEQ ID NO: 303585 - DNA, 396 bp, Proteus mirabilis; identical to SEQ ID NO: 297734

SEQ ID NO: 303586 - DNA, 693 bp, Proteus mirabilis
gtgaaaaatttatcatttgaaataaagccaggtgaaaaagttggaatacttgggcgtattggcagtggtaaatcaacgactttaaaattagcagctgggttatatcctgcagagcaagggagtatcacactagatgatgtcgatattcgccaaatagatcctcattatttgcgtaatcagattttgttattagaacaagagccaaggttatttttaggtagtttaagagaaaatcttgatttagcccgtatggatggcttctctagtgatcaagatttgattgtggcactgaagcggtttggtttggataaagttattaaaaaacatcctaggggattagatatgtccttgggagaaaatgggttaggtctttctggtggacaaaaacaaattgttgctttggctagaatgacgttgagaaatcccaaaattgttttacttgatgaaccaacaacggggcttgatcaatattcagaaattcaggcattaaatgccatttcagcatggtgtcgctcaaagacattattggttgttactcatcgacctcaggtactgagtattgtcaatcgaataattgttgttgataacggcaaagttgtgatggatggtcccagagatgcggttttacagcagttagctaaaaatgaaacagaaaaacaaataactgctcactcaaaaaaccaaaatagataa

SEQ ID NO: 303587 - DNA, 252 bp, Proteus mirabilis
gtggttcgccaccaagctgcaaactcttcacgtcaggttcgtcgtcaattagatagcggtaaaatggatgcggcaatggcgcgctttgaacaatttgagcgtcgaattgatcatatggaaggcgaagcgcaaagctatggattaggtaaagaaaaatcattagaacaacagtttgctgaactgaaagccgatgatgaaattagcgcgcaattagcggcattaaaagctaaaatcaatactaataaagagtaa

SEQ ID NO: 303588 - DNA, 231 bp, Proteus mirabilis; identical to SEQ ID NO: 295089

SEQ ID NO: 303589 - DNA, 357 bp, Proteus mirabilis; identical to SEQ ID NO: 295090

SEQ ID NO: 303590 - DNA, 255 bp, Proteus mirabilis; identical to SEQ ID NO: 295091

SEQ ID NO: 303591 - DNA, 336 bp, Proteus mirabilis
gtggctgatcctaacaaggttattgattatcaacctgactttaatgctataacacaactaccacttcccggtgtaatattgacggcgaaaggtcatgcgccttttgattttatttcacgcttttttgcaccacgtaaaggggttaatgaagatccggtaactggcacttcacattgtgtattagcaccaatttgggcaaaaaaattaaacaaagataaattaaatgccagacaagtttccgcgaggggaggcaatatacagtgtgaactcaaacaagagcgcttattgcttactggtgatgctgtactatttttaaccggtgaaataaccttttaa

SEQ ID NO: 303592 - DNA, 741 bp, Proteus mirabilis; identical to SEQ ID NO: 190889

SEQ ID NO: 303593 - DNA, 693 bp, Proteus mirabilis
atgtccgcaccgctgacagctgcacagtctgtttccggggcaacccgaccggttcagattgaggcggggaaatcggctgagagtcagacacagtcattgcagtatgaggcgcaggaatggggactgagtgcggaggagtatgcccgttttgaggcgctgatgaaagggcggcgcggtattcagtctcccggactggatcccctgacgacattgggtattgaggcccggtcagacgaagagcgccgccggctggctgaaaagtgggtacagcaggaatttgccagggcagaaaaagagctggcgtttcagcgggaagtagatgctgcctggaagcggctctatggtcaggtattaccggtcagtctgggaacattcggcaggatggaacagggaacagcgcagcgccggcaggcactgtttgtgcaggcggaaaattgtagcgcgtgtgatgcccgtctggctactctgctggccggcaaacagccgtttgatatttatgtgctggggacaaagggggatgataaccgcctgagggcttgggccagacaaaaaaatatcccggcagagcgcgtcagaaagcgggaaattacgttaaatcatgatggcggtctctcgcttcagtacggactgaccaccacaccggtggtgatgcaacagttaccggatgggcggtggcgtccgctcacaccttaa

SEQ ID NO: 303594 - DNA, 288 bp, Proteus mirabilis; identical to SEQ ID NO: 297738

SEQ ID NO: 303595 - DNA, 249 bp, Proteus mirabilis
atgattaagcttgaaatcaataatgcaggatatattgctcagttagaagaggctcgtttatctgtagataaccctcgtggctatctgtttatggatattgtcttttctgatccaaagcttgatgagaatacgtttgaaatgaagaatgttcgtagggaaccgatgaggacgtatatgactgaagatgtggctaaagagttactagaacaacttagtgaatattacaatcgtagaaataagtgcatataa

SEQ ID NO: 303596 - DNA, 123 bp, Proteus mirabilis
atgaatatccttgacgttgctatttttaaactatcttataagcaattaaataacctatatgcactcaataaaagtatcatcttagctatttctctctgtaattttgctaatccttttaaataa

SEQ ID NO: 303597 - DNA, 447 bp, Proteus mirabilis
atgatcgaaactaataataaaggtttagtgcatgtcactcgtgcattactaccctcaatggttgaacgcaatgtcgggcatattattaatatcagctcaacagcggcttcttggccttatatggggggaaatgtgtatggtgcaaccaaagcctttgttaagcaatttagcctaggcttacgtgccgatcttcaaggtaaaaaaatacgtgttactgatattgaacccggtcttgtggggggaactgagttctcattagtacgctttaaaggtgataccgataaagtagaacaaacttatgcaggagcagatgcgcttactcctgaagatgttgcacaggcggttttttggacggcaacattgcctgcacatgttaatattaatacgcttgagatgatgcccgtcagtcaatcttttgccggattaagtgtgcaccgacaaaattaa

SEQ ID NO: 303598 - DNA, 132 bp, Proteus mirabilis
atgaaaaatctcacccgttttattgagaataatgagaagaaagaatttatatatgacggtggtatggtgtgtgaattaagtagtcaaaattggaatgtaaatatattagaattaaatggggaagttgtataa

SEQ ID NO: 303599 - DNA, 432 bp, Proteus mirabilis
gtgttaattaaaggaaatgacttataccagatattatctcccgttgatattggtgagtctttaaagatagtagaggctatgaaattagctcatgcagatcgtttgaatcctttagttgacaaacatatagctcaattaacccatcttcttaatttggtaaataatggcgattatgctcatcaactcatgccttgcacaaggttgccaagtggcgcattacctgtaattaaaagagctaatattttaaaattaataaataagaatagctgtaaagcagataaaaaagagtcacctaaaaccattaatgctatggctcaatatatatatggattaacttgcgtgaaatatgggaaggatattgcagataaccctcgttctcatattgataaccctagaggggagataatatctggtataagtcatttcctttaa

SEQ ID NO: 303600 - DNA, 309 bp, Proteus mirabilis
ttgaaaactgttccattatcagtagcactagatgatcctgacgcattgataaaggctaatttagaaatgctgaatagcgacgccgtaatgccagaaaccttaattcagcacgcaatcccaataaataatgagatagttagaattgatggactatgggatgctatgttttgtggtgtgattaagcacttcaatgaatgcctttatagccaaggagttggacttaatgaaccattgagaagtttgtatggtgtaagagggattgtgttaattaaaggaaatgacttataccagatattatctcccctctag

SEQ ID NO: 303601 - DNA, 504 bp, Proteus mirabilis
atgttacatcaagatatgatcaataaactcaatgaacagctgaatcttgagttttattcagctaacctttacctgcagatgagcgcttggtgcgatgataaaggatttgatggcgctgccaaatttttaaaagcacattcccgtgaagaaatggagcatatgcaacgcttatttgattatttaagtgatacaggtgctatgcctttgttagggactattgaagcaccacccgctgaatttttatctttatctgatttatttactaaaacttatgagcacgagaagtttattacagctgaaattaataaactagctcacttagcaatgacaacacaagattactcaacatttaacttcttacaatggtatgttgctgaacaacatgaagaagagaagttatttaaatctattctggataaacttgctatggtcggtgatggtggtaaggcattgttcttgttagataaagacttaagtgctctttctacatccgcgcatatttaa

SEQ ID NO: 303602 - DNA, 951 bp, Proteus mirabilis
atgccaattgatgaaattgggcagggtaacgatgtgcggcatgtggcaggaagtgcctacagtttatttaatggtacagggcgcattcaaggtaataaagacgggggaaacaaagccgttttacgttgggcgattgtggcgttatcaacgggtgaggaagattttgaaacttacctcattcgtaatggtgttaccccaaaagcagggcaattagtgcgactggtgagtgtgccatttaccgatactgtcgagtttcacagccttgatgatggtgatttgcattcacgagcaataaaacgcgcatcaacgcagcattgcggggcagttggtagagcatggattgagtatttagccaacaatcaggacatggccaaccagaaagtgaccttcaaggaaaacgaatggttatcgagtttacccgaagaggcatcaccacaggttaagcgagtcgctacccgttttgccatgttggacgctaccgcagagctatcagcctcaattacgggttgggatagtggcgaatgtagccgatttattcgtaatagcttcaatgaatggctagagaactatggcacaggaaaccgagaaaaataccaagtcgttaaacgggcaagggattttattcaacgctatggattaaatcgctttcagccatacacctatgggaagcgcaacggagatttagaccgagtttacgcaggaagaataacaaaccttgcgggttacttggtttctggtcgcagagaggacggcaaggacgaatatcatattatcccgtcagtatttgaagatgaaatactctcaggtattcaaaagaaattgggggcggaggcgctcgaagaggcaggtattttagtcagaccggaatcagggcgtgtagacggtaaaactatcagcattaatggtagtcagcaacgatttgttgtcttaattgatagtgaggaagaataa

SEQ ID NO: 303603 - DNA, 804 bp, Proteus mirabilis
gtgccggttagctttattgatagagaacagattgcggcattagtacgctatcacggattacctttatggttaatggataaacccgatcctaaaaaagccttattagcggcttcgttaagagtagattgctatttattggcattgctggctaaggcggatgttctgggacgaagctgtgaagataagcccgctttattggataaaatagcgttatttacactttactgtgaagaattaaattgttggagaacacccgcacgatttatttctgatggcgctcgatttcactattttcatagtgaaaataatgtcgatcctcactatgaaccttatcctgagcaaggaagtgaagttattgtgctttgtgggctaccgggaatgggcaaagatagttatattcgccaatattgtgcagatatgcctgtggtaagtttagatgcattacgtcagcagcataatataaaaccagatgatcgtgatgcgaatggatggattgcacaacttgccaaagagcaagcgagaatatatttaagagagcataagccttttgtttggaatgcaacaaatattactaaacaaatgcgtaatcaacttattgctctgttttatcgttatcaagctaaagtgacattggtatatattgaagtcccttatttgcaatggaaaaaacaaaacagcgcaagaaaggaagcggttcccgataaagtgatggaaagaatgttgagcaaactggaagtcccaacaccagaagaagcgcttaacgtgatttattgggttgatggggaagctcaaaatttgatttaa

SEQ ID NO: 303604 - DNA, 516 bp, Proteus mirabilis
ttgctggtctttacctatttctttagcactatagccaatattatcgcttcgccttttaatggattattagcggaaaaattagaaggccaaataacgggtattaatcctccggataccggcttattaggtattacaaaagatattccacgtattttaaaacgagaaatcatcaaggtcgtttattatttgccaagagccattgtattgttattgctctattttgttcccgttgttggacaaactgtcgccccaattctttggtttatatttggcgcttggatgatggcaatccaatataacgactttccattcgataaccataaagtctctttcgccaatatgaaatcaacgctgaaaaaagacaaatggaacaatttacaatttggtatggtaattaatatcttcactatgatcccaatcttaaacctagtcattatgccggttgcaatttgtggtgccactgccatgtggtgtgatcgatatcgtcatcaacatgtacaagcaggccagtggtaa

SEQ ID NO: 303605 - DNA, 864 bp, Proteus mirabilis
atgcgttttaatcatgacgcttatcttggtgctgaggcgcttaaaaaagcgcaagaaaatcgtttatggcgacatagctacttattagaacgaagccgtgatgaaatattacaaggccaagtcactattcacacggaaggtgaaatggtaggccaaataaacggtctttctgtcttagattatcccggttatcccgatctaattggcgagccaactcgtattacctgtgtggctcatattggtgatggcgaactggtcgatattgaacgaaaagcagaattaggtggcaatatccatgcaaaaggcatgatgattatgcaagcctacttaaattctgaattacgattagatcagccacaaccttttagtgcttccgtcgtttttgaacaatcttacggtgaagtagatggtgatagtgcctcactagcagaattatgtgcgctaatcagtacattgtcacaacacccaattgatcaacaaatcgccgtaaccggtgccgtagatcaatttggtcaggtacaacctattggtggtgttaatcaaaaaattgaaggcttttttgatatctgtcagcaaagaggattaacaggatcacaaggggttattataccgctggcaaatgtgcgacatctggttttaaacgagagcgtgatacaagccgtcaaagaaaataaattccatatttggccggttgtccatgttgcagaagctattactttgctaacacatcggccttattacgaagagcaatgtgaaaatccacaatcaaatgaacacttgttagctattattcatgatcgaataacacaagcgaataatcaggataggcctaagttaccttggttcctacgcttattcagataa

SEQ ID NO: 303606 - DNA, 204 bp, Proteus mirabilis; identical to SEQ ID NO: 302017

SEQ ID NO: 303607 - DNA, 591 bp, Proteus mirabilis
atgttcatgttagcatctatgaagttatattttcttgaaatagatgcaaaaaaatcagctgaaatagcattagaattagaggcattagaagaaaaaataatggagttagagcctcataatatacataaaaatagactaaagaaaataagagaactagctgctgaagctaggagagttgctgatcaacagcaagcagaatataacaagatccagagtgctgttcttaaaatcgatgaagctaaacaagcagaaaaaagaaagttggaggctgagggtaaagaaataggatcagcacttcaatatatagaaagtgacaatattaactttaaaggtaaactagctattataaatagcgaagttttatttaatgcgagaaatattaatgttgatattgataaaacaatttcttatgtcagaaattctggtgtctcatttaatgcccatcaagataataactactcgggtagatttgctctgataaatagtagtatcagatttttaggttatcgaaatatcccgataggagatggtaacgacgataatagcttagataaaaataagcttaatgatattaatttaaataagttttaa

SEQ ID NO: 303608 - DNA, 165 bp, Proteus mirabilis
atgcttggttttggtcaaatttttgcacatggagataacataaatataacagatgttaaatttaaagaaactctttcagatgatggattaagcaaaacttatatagatttgatagctgataatgaaattaatattaaaggtcagtttaaaacttatttaaattaa

SEQ ID NO: 303609 - DNA, 264 bp, Proteus mirabilis
atgagaattgaatgttatagttggtcagatgttagtgaacaaattctggagcaagcaatagccttacagaattcagcttttgaggatatgaagggtaatttttatcaggttgatataccttacaagttggtactggcaattgatgataatcaggttatcggacatgtagctgtttatttacgagatgtttacctagattcatttcctgaaaccattggtatattgagttgtgtagtggtggctcacaaacgccttttactttaa

SEQ ID NO: 303610 - DNA, 327 bp, Proteus mirabilis; identical to SEQ ID NO: 303570

SEQ ID NO: 303611 - DNA, 183 bp, Proteus mirabilis
atgactatcgaaacaaaagaagaacgtttacaaaaaatcttaacagctgaaaactgcaaggataccgcaaaaacaccacctaagcctgttcatcctcaagctgatgagcctgatacagatcccgataaaaatacagttacagagattaaatataatcaaataaaaataattactaaacaataa

SEQ ID NO: 303612 - DNA, 522 bp, Proteus mirabilis
atgattgacgaggtacaccaacgcccgaaaggtacagcaaagcgcacattcaacacgcataaaaagcactttattgatggagtggattgttttttgctcactaagtacgtcatacgtaccgagttacccgaactggaaatagctggaaaagcaaaagagttaatgcttatcactgaatcaggttacttgatgatagccaagccatttacagatgatttgtcgtggcaggttcagcgctcaatggttaacagctactttcgtttgtctgactttccagaaattaaacacattcaaatacccacgctggcggaacttgaagccatgccaattggtgaggctcagaacttgattagccgcttagaggctgattcttatcaagggcacggtaggcgtggcagctatgccatgaacctacttcgcaaagagaagaaagcacttaaaccaatggtaatcgccattgagcaagcctcacagctacacattcaggatatgggagattatcacttgcttgttaatgcctag

SEQ ID NO: 303613 - DNA, 450 bp, Proteus mirabilis
ttgtcagagactttaataccacttgttttttatctttccaaggaaaaattaaattcagttaatgatgacttaagtaatgatattgagtggggaataaaagagtttgattttagtttaaaatataaaatttttgttgatggtttttcccatcatgaagatataagctcattattaaatgaactttgcaattatcatatatcgataaattttcctgaaattaactcaactgaaaactttaatcatgtaacttacaaattaataccttgtgaagtaatagtattacttagaatgagagagttaaataaattacctattaataatattgatcatcaactaataaatagatttaagatgtttttaaataaagatatacctttgaataattttaatcgttcattaagaaaatctattttacataaagcattacataaaattagtcagaatcactga

SEQ ID NO: 303614 - DNA, 264 bp, Proteus mirabilis; identical to SEQ ID NO: 297865

SEQ ID NO: 303615 - DNA, 192 bp, Proteus mirabilis
atgatggcaacccctacccaaactcaattcaaatttttgtttctgagtattaaacgctcagatacaacagctaaaccttgtcgtattgctgttacagcaccgaatgaacacgatgcaagactgatgcttgtacgtgattatatcctgtcattcgctggtcgcttacctgttaaggaggtggctcatgcgtaa

SEQ ID NO: 303616 - DNA, 174 bp, Proteus mirabilis; identical to SEQ ID NO: 297731

SEQ ID NO: 303617 - DNA, 237 bp, Proteus mirabilis
ttgtatgcacttagtgagataaaatctgcttttattataggtttctatctttatttgccttttattgttattgacttagttgtctcatgcattttattagcattaggtatgatgatgatgagccctattacattatctgtacctttaaaacttattttatttatcgccatggatggttggggactgttatctaaaggactcattaatcaatatcttgatttgatggcggtgaactag

SEQ ID NO: 303618 - DNA, 282 bp, Proteus mirabilis
  misc_feature (65)..(74): n is a, c, g, or t
atgttgattgcccgtatggtgagattggcgacattatcaacattgcaaacaaggacggtaatatnnnnnnnnnntatcaaaggaaaaattgaaattactgatgtttgggttcagcaagtaaacgatatcagcgaaagtgatgcagaagccgagggagttaacgggaaattaaatgcacatacttctgactttgctgtggaatggattgcaatatatggaattgatagctgggtaaataacgaatgggtatgggtgattgagttttactatataaagaagtaa

SEQ ID NO: 303619 - DNA, 231 bp, Proteus mirabilis
atggttgctattaataataatatcgaaataacttatgataaaattttaaatgaaaagatgaaagagataataaaacaactaaataataaaaaaccaaggctaggagagctattctcccatctattgagtcgaaataaaatcattaaagaagacagcgttgatattacgttaaaactaaataaaggacaactagtctcattaggtggagaatgctcatataatttttattaa

SEQ ID NO: 303620 - DNA, 438 bp, Proteus mirabilis
atgaaagcagagcgtcataaaaaaattgttaatctgatcaaaggtcatggtgcagtaaaagtttctgttttagcaaaagagcttagtgttaccaaagaaaccatacgatcagatttaaatacattggctgagaaaggcaataaagttgacgctaataatccacaagtcagtaattattttggcctagcagaatattatcctaatggcacttttattatgtttacccctgaaggtaaacaaaaaatgcaaggggattggtcaatgtctaatgatggaaaaacgcgtacattagttgccaaagatgcacaaggaaaaacactatttactcgtgatgtagaaaatatcaccatcaataatgatgagtatacctatcgtatttacccaactgaaggggataatactgtttattttaatattattcatcacgttaagaagtaa

SEQ ID NO: 303621 - DNA, 171 bp, Proteus mirabilis
atggcgttcagcatgcttctgggtttagccacttattttatgactcgtcgagaacaacgaaaacgcactcaattatttgaagagcttgttcgtcatgttgacccacaaaacccgaccgaaaccttaaaaaagcttgctgaattaatggtgaaagcgccaaaggatatttaa

SEQ ID NO: 303622 - DNA, 441 bp, Proteus mirabilis
atgtatgtcatgccagatgcctcacctatagcaagaagattagtcaaaacaacttaccaagcgatgtgggaaggtatcaaagaagttaaaccaggtgcaacactcggtgatatcggtcatgcaatccaaagctttgcacaaagtcatgggtatagtgttgtaagagagtattgtggacacgggattggtcgagaaatgcacgaagcccctcaagtattacattatggtattcgaggacaaggtgttgtactaaaagaagggatgacctttaccattgaaccgatgattaaccaaggtggacacaaaataaaaaccaaaaaagatggttggactgtagtcacccgtgataaaaaattatcggcacaatcagaacatactattttagttactactgatgggtatgaagtactcactttgcgtccagaagaaacacttccataa

SEQ ID NO: 303623 - DNA, 408 bp, Proteus mirabilis; identical to SEQ ID NO: 297440

SEQ ID NO: 303624 - DNA, 381 bp, Proteus mirabilis
atggcctattttttagctacaggtgggctcgttgttttaatgagtaccataaaagagagttacgatgtttttcctattgggtatgttaataaaaatatcggttacgattttatcggtcattggctaaatgatatggttaaagtggcgattattttggtttctcctgtattaattaccatgttcttaagtgaagttgcattaggggtttattcattattttgtcctcaattaaatgcattttctctctctctttgtatcaaaggtattatcgcttttttagtattactgctcttttttacctcagcaatgacgaatgaattatatcatttttttaacagtagatatttttattctatttttatgagtatttatcattgctga

SEQ ID NO: 303625 - DNA, 306 bp, Proteus mirabilis
atgccagcctatcgtttaagtgcctatataaaacaccacttaacaaataaattaacggggaatattcgtattgaccattttggtaagcaaaataaaactgcagaatatgaaacaccaaccacatcttataacagtgtgagcttaggtggagaatacctaggatctttggatcaagctgactataccgtttatgtcaaagttaataatctttttaatgctaaggggaaagatagtacttcttatattaaagatgaaatgtatttacccggtagaaatattattttaggcacaacacttacattctaa

SEQ ID NO: 303626 - DNA, 255 bp, Proteus mirabilis
atgaacgattcgacaaaaacactgcttattgactctcagctttatgattgtgttggtgttgcgccaatgaaatgcatgaaagtaaaagaattacctgctggtgaatggtctctcttctatcaaaatatcgaaggatttgattaccaagcgggaacgcagtacaaagtaaaagtcaaagttacagatattcctaatcctcctgcggatgcaccaagcatcaaatatacactggttgagatcttagataaaaagtaa

SEQ ID NO: 303627 - DNA, 297 bp, Proteus mirabilis
atggtaatagatacttatcaaggtcgcattttacattctgctgaaactgacgaagatttaaaaaggcgacacccgtataaactttggttggagcgtaacgttaaacgcctgatcccttttgagcaattgcctgagccacaagcgacaggagagcgcgcttttgatgatagcttactggcgacataccaaaaacagttcgcttatagccaagaagagctggaaacgattttgcatgtactggctgaaaatgggcaggaagccaccggctcgatgggagatgacacgccctttttctag

SEQ ID NO: 303628 - DNA, 186 bp, Proteus mirabilis
atgctcgttgatagctatttgctgaaagccttaaaagggcaatatcccacatgggaggcagttgctattagcttgatagagcaatgtgtcattaatggatatgtcacaggttatggtcgagaggtgtggcaaagcatgattaatgatatgggcgactctttagctgataagggggcgtttcaatga

SEQ ID NO: 303629 - DNA, 174 bp, Proteus mirabilis; identical to SEQ ID NO: 297731

SEQ ID NO: 303630 - DNA, 255 bp, Proteus mirabilis; identical to SEQ ID NO: 303626

SEQ ID NO: 303631 - DNA, 327 bp, Proteus mirabilis
atgtttagtcaatcattattaaagttaaatatcccttcggagtatgccgttattggtgaaagcgatatgcataatgaattaggctatccattagcattatcttatgttgtggttattatttgtttagatggcagggctgttattaatatagattttcaaacaaaaaccattaaagcgaatgatatagtgatactcggtgataatagaatggtcacattgcaacgtaaatcagctaattttcgtattttttattgttttcttaagaaatcttttgcctctgagatcgcttatgcactttcaaatagtttgtttactttcagcggttga

SEQ ID NO: 303632 - DNA, 153 bp, Proteus mirabilis
atggcagatatcactattcatcaagccgctgaaaaagcacaacagttagaactgattagcctgatgttgcctaactatcctcgtaacctaaccataagcgacatttccgctatatcgtcaatcatggcaaaggtgacaactcgcttaccttga

SEQ ID NO: 303633 - DNA, 210 bp, Proteus mirabilis; identical to SEQ ID NO: 297729

SEQ ID NO: 303634 - DNA, 162 bp, Proteus mirabilis; identical to SEQ ID NO: 296253

SEQ ID NO: 303635 - DNA, 168 bp, Proteus mirabilis
atggcattgttattacggaaggggagtgtagagactccatatagcttgcctttagtctgtgcaaccagtcagtttgtgaatgcgtcttatcaggatgaccacattgattgggccaagcgcaatacggggatatggggattcgttttcggggaaaacagatttttgtga

SEQ ID NO: 303636 - DNA, 231 bp, Proteus mirabilis
atggctgaccaaatggctgctactattcgccataatcgggctagagggcaacatcaagtggcggcaatgtcagatatagtcagagatttatcaaggctaggctggaatgatcaaaagattggtgatgaattaggtatgtcacaagatgaagtactacgtttaaaacagattagtggcttagctgaattattttcagagcacgacttctcagaagcttggacggttaagtag

SEQ ID NO: 303637 - DNA, 123 bp, Proteus mirabilis
atggttttaggtgactcttttttatctgctttacagctattcttatttattaattttaaaatattagctcttttaattacaggtaatgcgccacttggcaaccttgtgcaaggcatgagttga

SEQ ID NO: 303638 - DNA, 186 bp, Proteus mirabilis
atgaataaaacaaccagtaccgattgtgtgagcggtttaaaaaaggcaatcgataagtcaggtgggcagactcatctagcgaagctaataacagacatatcaggtaagaccgtaaagcaacagcaagtatggaattggctaaatagaaataagcgaattccttcagataaagttttatttgggtaa

SEQ ID NO: 303639 - DNA, 144 bp, Proteus mirabilis
atgaaaataaaccgagtgctgacgctcttaactgtttggcaagaagcaaatcaggacgaggaaacagcccatatgatagctattgccttcgctgctgtgaatgacgcactcaaggatattgattctgctatggagggtaagtaa

SEQ ID NO: 303640 - DNA, 150 bp, Proteus mirabilis
atgaaaataaaatcacttattgctatttcattattaagtgttagtgcttctctttttgccgctgaaagcaccagcacaacacaacaagttcagggcgtaactcaagcacaaaaagatctcaatgattatgaaaaagtcatggtgcagtaa

SEQ ID NO: 303641 - DNA, 480 bp, Proteus mirabilis
atggcttttaaatataaaataacaataatcatatttttgctatcttttattttttttatagtgtatgagttttttattcccgttaaagtcatggaggtacataaagatacgtatactacctctattctggttgaggattttccgataactgattatggaaaaataatatggtggaaaaacaatcaagatgttttagataaaaagtatgatttatttaaggataaagatagctccttctatatttatatatggaattacggtgatggatatttagaagaaggaaaatacgatcgattatgttttactgaaattaaaagtaacaaaaaatgtatagaaaaagataaagtgatgtcaataatgtattctttaaatgaagaggaagttaggataggtaattctgcatatattaaagataaaaatggttcttttataaagaaagacaaggatgctaatacaactatcactgcaattcttgattga

SEQ ID NO: 303642 - DNA, 417 bp, Proteus mirabilis
atgatagaatatattagaaacatacaacaacatagtattattccattagataaaggtgttgaatgtgaagttaaattgactagttttgaacaagtaataccttactttgcaactcctgatgataatgaaaatattggaagggaaatttataaactttgtttgtcaggggaatatggtaatatagcccccccaactaaaccgaataaatatgaattaatagctagtcaaaaagaaaaaagagattatttaataaatgaagcatcttttataattgatcctttaaaggacgcaagtgaaggtggatatataaataaagaagatattgataaactagaaaggtggaaaaagtatcgttatcaactaactaaagtcaatgttgaagatgaaaatttagaatggccatcaaagcctgagtaa

SEQ ID NO: 303643 - DNA, 603 bp, Proteus mirabilis
atgagtgatgaatcaaaaaaaaataaggagagaacaagaagaaaaatagatttatatatcttatctcttgctattttgtttgttttttttatttttattacaggtaaaatacctatatgcttctcatcacaatgtgagtttattggttttttagaattattaaaaattaatgtcgtccctattgtttgcatagttttattgatgtatgcatactacgcatatttaaggtttaaatatgatacaaaacgatctgttgaacttcctgtcgaaattataaagatagataaaataaactatgaacatttaacttttttggcgacatatataataccgttgataacttttgattttgaaaaagaacgctatattctagttttagctgtattattaataattatgggtattatttatataaaaacagatcttttttatgctaacccttctttagcattattaggttttaatatctataaagttaatataaagataggtaagaatgatataaaggaatgtgtaatagttataactcgtaaaaaattaaaaataaaagataaaattagttatatagtacttgatgatagggtttattattctggtgattaa

SEQ ID NO: 303644 - DNA, 1419 bp, Proteus mirabilis
atgagtaaaataaaaacccgttttgcaccaagtcctacaggctatctacatgttggtggtgctcgtactgcactgtattcctggttatttagccgtcacaacaagggtgagtttgtactgcgtattgaagacaccgatttagaacgttctactcaacctgccattgatgcaattatggacggtatgaattggttaaatctaaactgggatgaaggtccttactatcaaaccaaacgctttgatcgttataatcaagttatcgatcaaatgttagcagctggtactgcttatcgttgttattgttctaaagaacgtttagagaaactacgtgaagatcaaatggcgaaaggtgagaaacctcgctacgatggttgttgccgtcacggtgatcacaaccataccccagatgaacctcatgtagttcgttttttaaatcctcaagaaggatctgtgatttttgatgacaaaattcgtggcccgattgagtttagtaaccaagagcttgatgacttaattatccgtcgtactgatggttcacctacctataatttctgtgtagtgattgatgactgggatatggaaattacacacgttattcgtggtgaagatcatatcaacaataccccacgtcagatcaatatattaaaagcacttggtgctccagtacctgaatatgcacacgtatccatgatcttaggtgatgatggtaaaaaattatctaaacgctataacgcagtaagtgtaatgcaatatcgtgatgacggttatttaccagaagcgttattaaactacttagtacgtttaggttggtctcatggcgaccaagagatctttagcatcgatgaaatgattaaagatttcactttagaagctattagtaaatcagcaagtgcgtttaatactgacaaattactttggttaaaccatcactatattaataccttacctgctgaacaagtagccgtacacctagattggcatatcaaacaacaaaatattgatactagtaatggcccatcactggttgaattgattaaattactcggcgagcgttgcaaaacattaaaagagatggcggaaagttgtcactacttttatgttgactttgatagtttcgaagaaaccgcggcgaaaaaacacttacgtcctgtcgctcgtcaaccattagaagtagttcgtgataaattatcagcaattactgattggacagcggaaaatgtacataaagcaatccaagaaaccgctgaagaattagaagttggtatgggtaaagtcggtatgcctctacgtgttgctgtcacaggtgcgggtcaatctcctgcactagatgttactgttcatgctattggtaaagctcgtagcatcgctcgtattaataaagcattagattttattactgacagagaaaatcaagcttaa

SEQ ID NO: 303645 - DNA, 366 bp, Proteus mirabilis
atgatcagccgtacccaaaaagagcttaccgcagaggatatcgccactatcgctgataccttccatgcgtggcgcagtagtgaaagtgaattgaaacgtcgtattgctgacaaagaaatcggtattgagcagtatcaagataaggcaggcttttgcaaagttgctacccttgatgatatcaaggccaatgattttgtgttaacgccgggacgctatgtgggcgctgcggaggttaaagatgatggtgtggcatttgaaaccaagatgcaggaactaacccaaaccctttatcgccagatggatgaagcggcagagttggataaggctatccgtaaaaatatggaggtgttgggttatggggagtaa

SEQ ID NO: 303646 - DNA, 1350 bp, Proteus mirabilis; identical to SEQ ID NO: 302388

SEQ ID NO: 303647 - DNA, 3279 bp, Proteus mirabilis
atgagccatatcttcactgaagctaaattggaacaggcgataatagaactgttaggacaacatacaaacaatgctgggcaaacctgctatccgcattatctcggcattactattcctcgcaaaaacaacagtgaagtattgatagtggatgatttgcgccagtatcttgctaaacagtatcaagcagatggcatcaccgacggtgagatcactaagattgtacagcagttgcaatctctccctgcgagtgatctctaccaaagcaacaaaaccttctgccattggctcagtaacggctttttacttaagcgtgaagatcgcaaccaaaaggacctatatatcgaacttatcgatactcaaaccttgcccgaccaattagtaaaattatttgcaggggaagaagtgctatccgtggcagataataatcgctatcggctagttaatcagttagaaatagaaggtcaggcgcgagacgacggggtgcaactgcgaatccctgatgcgattttatacgtcaacgggctaccgctggtggtctttgaattcaaatcggcagtgcgtgaggaagaggcaacgctatttgatgcatggacacagctttgtgtgcgttatcgtcgcgatattcccaagttatttgtctataacgccttgtgtattcttagcgatggcgtgaataacaagatgggtaatctatttgccccttatgaattctactacgcatggcgtaaaattaacggcaacgaatcaacggaaaagcagggcatcaacggcctgtacaccttaattgaagggttattccaccctgctcgtttattggacgtactaaaaaactttgttttcttccctgataccagtaagcatgaagtgaaagtgtgctgccgctacccacagtattacgcggctcgtaagctctattacaacattgagaaagagcgtaaacagatcactgcggatggtgaaaatatcggtggtagtggtaaagggggcacctactttggcgccacagggtgtggtaaaagctacaccatgcagtttttagcgcgtctattgatgaaaagcgtcgattttgccagcccaacgattattttaatcactgatcgcaccgatcttgatgaacagttggcaaaacagttttgcaatgcaaaggcctttattggcgatgaaattattgtgcctgtcaccagtcgtcaagatttacgtgataagcttgcaggacgtgctagtggcggggtattcctcaccactattcataaatttactgaagatatccaactgctttctgagcgcagtaatattatctgtatctcagatgaagctcaccgtagccaaatcaatctcgaccaaaaaattatcatcaaccaagaagacggtacggttaaaaagacctacggttttgctaaatatctacatgattcactgccgaatgctacttacgtcggttttaccggaacgcctatcgacgccaccttagatgtcttcggggaaactatcgatagctacaccatgaccgaatcagtaaatgatgagatcaccgtgcgcattgtgtacgaagggcgtgcggctaaaattgcccttgataacagcaaactggaagagatcgaacgttattatcaagaatgtgaagcccaaggcactagcgaatatcagatagaagaaagcaaaaaagccatggcgaacatgaactctattttgagtgatcctgatcgtattgatacgttagcgaaagattttgcgcaacattatgaaaaacgagtagaagaaggttctaccatcaaagggaaagcgatggtggtttgtgctagccgtgatattgcttatgcgttttatcagagcctaaaattacaacggccagagtggtttgaagcgaaacaggcaattgacggtgtggaactcaccgaacaagagaaaagcgagttaatgcctttaccaatggtcaatatggtgatgactcgtgggaaagatgatcatgaggcgatgtacaacttactgggaacaaaagactaccgcagagagttagataaacagtttaagaacccgaaatccaactttaaaatcgccattgtggtggatatgtggctgacgggctttgatgtgcctgagctagataccatctatatcgacaagccgctacaaaagcataaccttattcaaaccatttctcgagtgaatcgtcgttttgaggggaaagagaaggggctggttgttgactatatcgggattaaaagccgtatgaatatggcgctggcgatgtattctaaagccgataaatctaactttgaagatgttcagcaatccattgtagaagtccgtaatcacctcaatttgctttcacaggtatttcatcaattcgatagtcgcgattacttttcagactcgccaacacggcaattagactgccttaatcgggcggctgagtttgtcctgcaaaccaagaaagttgaactgcgctttatgggcttagtaaagcggttgaaagccgcttatgatatttgcgtgggcagtgaagatatcacccaagatgaacgtgaacatatccatttttatttggctgtacgctctatagtctataaattaaccaaaggtgatgccccagatacggcgcagatgaatcaaaaagtgcgagagatgatagcggaagcccttaaagccgaaggcgtggaagagatcttcactttaggggacgaaaaagctgaaaatatcgatatttttgatgatgaatacatggctcgtatcaataaaattaagttgccgaataccaaaatgcaactgttgcaaaagatgctccaaaaggccattagtgatttccaaaaggtcaatcagctgcaaggaattaatttctccaagcgtttccaagcattggttgagcagtataaccaacgcaaagaaaatgatgtgctcaatggcgaagagttcgacgatttcactgcacaaatggcggatatgatttatgacatcaaggcagaaatgatgtcgtttgaggatatcggcatcgatatggaggagaaagcctttctcgatattttgcagcatatgtgccagaaatacgattttacctacgatgacgacaaaatgctggcacttgctaaggacatgaaacttattgtcgatgacagcacacaataccctgactggagcaaccgggaagatattaaagcgaagctgaaagttgacttgattttgttattacatcgttatggctttccacccgtggccaatgacgaagtatataaaagtgtactggaacaagccgagaactttaagaaatatcagttggggtga

SEQ ID NO: 303648 - DNA, 177 bp, Proteus mirabilis
atggcacaaccgtttattcatacctctgagctttgctggtcacctcaagaactaggcttaatggcccaagcgattgagtcttgctttttgcaatatcaaataagaggtgaggttgtcagttatgatgaaggcgcaacatttacactctttagaatcgaattgggtagagggatataa

SEQ ID NO: 303649 - DNA, 726 bp, Proteus mirabilis
atgttatggaaagttgttcgtattgatttcactgagcgttgtgcttgtgttttcggtagcaaaacgcactatatcacatcaggtaagggatatgtcgttgttgataatgaaggtaacgaaaggttctccggtcctaattgcgcgcgcaatcctgattatgttagtaatccagaggaaaaagttcctgatctgacgaagggatgtttagaacctgatagtgaagacgatggggcagcaccaagttctcggcttaaaggtaacaacgggaaagtgagagttgcttctacaatagatgaacatagcaaacaaaacgctatcgcatatctgttattgcgtgttcaaaaacttcaaagtatccctaaaattaaatacagcaaactcgatgctatttatagacgatatcaattggctagcttaacagataacgattttatttttttgtacaaattaatagacagtaactcttttccagaatattcacttaaaaatttgcaggctttttatgcttgtgaattttggatcaatcaatttattcaagataatcaggaaaaggatttaagctatgttgaaagtctacggagttatcttcatgctaaactagcattgactccgtctcaaattactggattgaataaatggttcgataatactaatggacgaaaaatggttagattaaaacctaacccatttgctatcgatccaacagtgtattggaagaaaaaataa

SEQ ID NO: 303650 - DNA, 189 bp, Proteus mirabilis; identical to SEQ ID NO: 302543

SEQ ID NO: 303651 - DNA, 768 bp, Proteus mirabilis
atgaagaattatcaagaacgttggattcataaatttgagcttaagaaagataaatgggtttatgtaccttctgagttaacaagaagtgaaggtataaaaatattaaatagtttatctactaaatggactcctcctgtatatttttatcattttcgaaaaggtggacatattgaagctttaaaagttcatttagatagctattattttgcttatattgatcttaaaggtttttttaattcaactagtcgaagtcgtgtttctagagcgttaaaagaattttactcatatgagcaagctcgtaatatagcgaaaatgtctacaataaaaaacccaacagactcaaggttagctcatattttgccttttggttttttacaatcacctatgttagcaactctttgcttacataaaagttatttaggaaatgtattattagaattatttaataaaaaaaatgtaaaaataagtgtgtatatggatgatatagttatttctgctgatgataaggatactcttgatgttatatattgtaaattgattcaatgtgttgagaaatcaaaatatattattagtgataaaagaacaccaccatcaactaaaattacagtatttaatatagagatagaacatcattcattaagaataacgcaaaaaagaatgttggagtttttaattgaatatattaaaaccaaatcaccttatgtaaaaaaaggtattttaacatatattaagacagttaatttagaacaatataactacataaaataa

SEQ ID NO: 303652 - DNA, 363 bp, Proteus mirabilis
gtgaatacaaatgaaaaaccacctaaatatagtgatatatcaatacaactccctgatgatctaaaggctgattttctgataaaatgtaaacaagctggcttggatgctggtgaagtaaaatatttttctgttggtgcgcctagtgttttgcgggtgttatatgaaacacttacaaaaaccacagttatggtgcctaagctattagggatattaaaaatgtttaaccaacaacgtaatatcagagttgaagtgtacacagataagaaaattatcgatttaaaaggttattcagaagaagaagcgcaacgcttacttgagaaatgcgatggtattcgtctttctcatcgtgaagaaaaaaaataa

SEQ ID NO: 303653 - DNA, 483 bp, Proteus mirabilis
atgacaaagaaaaaatcacacaaacccggctctgccactattgcactcaataaacgtgctcgccatgaatatttcattgaagatgaaatcgaggcgggactgtcgttacagggctgggaagttaaatcactgcgtgcgggtaaagccaatatcagtgatagctatgtaatcatgcgtgatggtgaggcgtacctgtttggtgccaccattacaccgttaaacgttgcctctactcatgttgtttgtgatccgacacgtacgcgtaaactgttattaaaacaacgtgaattagctaatctctatggccaaataaaccgtgatggttacaccgtggttgccctttccttatattggaaaaatgcatggtgtaaaatcaaaattggcgtagctaaaggtaaaaaagatcacgataagcgtgacaccataaaagatcgtgagtggaaattagacaaagcacggatcatgaaaaatgctaaccgctaa

SEQ ID NO: 303654 - DNA, 435 bp, Proteus mirabilis; identical to SEQ ID NO: 294834

SEQ ID NO: 303655 - DNA, 294 bp, Proteus mirabilis
gtgactaaaatatgggttgaggtagcctacgcgttaccagataaacaatatgttatccctgtagagctaacactgggggatactgttgagcaagcaatcattgcctcaaatattttaacgatttgtaatgatatcgatttaactaaaaataaagtgggtatctatagtcggcctgcaaaattgagtgataatgtgcgtgatggcgatcgcgttgaaatctatcgaccgttaatcgctgatcctaaagagatgcgccgtaaacgcgctgaaaaagcacgccaaaaaactgaatag

SEQ ID NO: 303656 - DNA, 363 bp, Proteus mirabilis
atgcgttttaaactgttaaaagttgccgccttatctttagtcgtaatgacttcaggttgctcgatgttcgaaagactggtttatcacccagatatcaatcagggtaattatttaacaccagccgaagtcgccaaagttcaacaaggaatgacacagcagcaagttcaatttgccctcggaacacctatgctgaaagatcctttcggaactcaaacttggtattatgttttccgtgaacagccaggccatcaaaaagtgcgtcaagaaactctgacactgacatttgataataatggcatactgactaagattgacaaacaaggtgatatgccgagtttttctaatcaaaccagtaaagactaa

SEQ ID NO: 303657 - DNA, 1662 bp, Proteus mirabilis
atgctgactcaattaactattagtcattttgccatagtccgtgaacttgaaatcgacttttctggtggcatgaccacaattaccggtgaaacgggcgcaggtaaatctattgcaattgacgcattaggcttgtgtttaggaaaccgtggtgatgctaatatggttcgccctggtgccactagagcggatttatgcgcacgattttcactctctgatactccttccgcccagcgttggttagaagaacatcatcttgacgatcataacgaatgcctattaagaagaaccattgcagcagatggccgctctcgtggttttattaatggtacttctgtccctttgtctcaactaagagagcttggctcattgctgatccaaattcatgggcaacatgctcatcaacaactattagagcctcgctaccaaaaacatttacttgatatctatgctaatgaacctgctttattaaaaaagatgaaagcggcttatcaaacctggcatcaaagttgccaaaccttagcgacttttcaacaacaatctttagaaagagaagcaaggcaacaactgattgattatcacttaaaagagcttaacgagttccaacctgttgcgggggaataccctgaattagatcaagaatataaaaggttatctaattgtggtcaatttctgaccttgagccaaaatagtttacagatcttaagtgataacgaagaacaaaatattttaagtatgctgaatgtggccaaacatgagatcagcgaactttccacaatggagagccaatttaattcactgttagatatgctggaagaagcaagtattcaaattagcgaagtgagtgatgaactacgccactacagtgatcgtttagaaatggatcctaaccgtttattcgaattagaaaaacgtatttccaaatatattagtctatctcgtaaacatcgtgtcacccctgaagagctatatgaattgcatcaacaattaattgaagaaaaagaggcactattacgccaaaatgatgactgtgatgcattaatggaacaagttaaaattgatcatgcagctgcattggacgtggcaaaacaacttcatcaaattcgtcaacagtatgcacacgaattaagccagttgattaccaatagcatgcatcaattatcaatgcctcatggctatttaactgtagatacattgtttgatgaaaatgtcttacaaattgatggtgcgacaaaagttgagttcaatgtcaccaccaacccggggcaacctcatcaagctctctctaaagttgcatctggcggtgagctatcacgtatcgctcttgctatccaagtgatcaccgcaaaaaaaatggatacacccgcgctgatttttgatgaagtggatgttggtattagtggaccaacagcagctattgtcggtaaattattgcgtgaattaggcgaatcgacacaagttatgtgtgttactcacctaccgcaagtagcaggttgtggtcatcaacactattttgttaataaagagactaatggtgaagagacagaaaccaccatgaagctgttaactaaaaaagagcgtttacaggagttagcccgcttattagcaggaagtgaagtgactaaaaacacccttgctaacgcaaaagatctgctggcagcctaa

SEQ ID NO: 303658 - DNA, 900 bp, Proteus mirabilis
atgccagataataccgtaacggaagaaaaacaatttaaatgcattggcatcgtcggtcatccccgccatcctgaagcactttcgacacatgaaatgctctattattggctccttgataaaggatatgacgtcattatcgatacccaagttgctgaagaattaaaactcaccgatgcacaaacgggcgatttaacacaagtcggcaaactcgctgatctggttattgttgtcgggggtgatggcaatatgctaggcgccgcccgtgttttatcgcgctataatatcaaagtgattggtgtaaaccgcggtaacttaggttttctgaccgatcttgatcctgataacgcattacaacaattaactaatgtattagcaggccattatcgtgaagaaaaacgcttcttacttgaagctcgcgtctgtgctgaaggacaaagaacacggattggcaccgccattaatgaagtcgtacttcaccccggcaaagtggcgcatatgattgagtttgaagtctatattgatgatcgttttgcattttcacaacgttctgatggtctaattattaccacaccaaccggatcgacggcgtattcactctctgcaggaggccctattcttacacctaatcttgatgcgattgcgctggttccgatgtttccccatacgctctcttcacgccctttagtcattagtagcgacagtcaaattcgcttaaaattctcacaaaccaatattgattatgaagtcagttgtgatagtcagcttgtgttacctatcaaagaaggggatgaggtaattattaagcggagtcgacaaaaacttaacttagtccacccaactgactacaactattttaatacactcagctcaaaattaggttggtcaaaaaaaatgttctga

SEQ ID NO: 303659 - DNA, 612 bp, Proteus mirabilis
atgagtagtaaagaacaaaacgtacatgaagagcaagtctcaaaagaaaaagaaggaatggaatcggtaatgaatgaatctcaagagcaagtgaaaagcgaagacgctcaggcggagtttgatgcacaagctgagttagttcaagcgcttgcacgcgttgatgagctggaaaaacagttgcagcaatcacaaaaaacggaacgtgaagcgatgatccgtgctcaagccgaaattgagaatattcgccgtcgtactcaacaggatgttgaaaaagcacataaatttgcgcttgagaaattttctaatgagctactacctgtattggataatttagagcgtgctttatctgccgctgatcatgaaaatgaacaaatgaaaccgatgattgaaggtttagagttaaccctgaaatcattcttagatgcggtgcgtaagtttggtattgaagtcgttgaagaaaaaaatgtcgccttcaatcctgaagtacaccaagcgatgacattaattgatagccctgagcatgaagtaaaccatgtcgttgatgtgatgcaaaaaggctataccttaaatggtcgtctattacgtccagcaatggtagtggtatcgaaataa

SEQ ID NO: 303660 - DNA, 681 bp, Proteus mirabilis
atgactacaccattaacttggcatgatgtaataggtgctgaaaaagaaaaaccctattttcagcaaattttgtctcaagtcgcacaacaaagacaagcaggcaaaataatttatcctccacaagaagatgtatttaacgcttttcgcttcactccctttgaaaatgttaatgttgtgattttaggtcaagatccttaccacggccccaatcaagcccatgggctttccttttctgtacgtcccggtgttccggctcccccttcattagttaatatgtataaagagcttgaacaagaataccctgacttcaaacgacctaatcatggttatcttgagagttgggctcaacaaggggtattactacttaatactgttcttacggtagagaaaggccaagctcactctcatgctaactatggttgggaagtttttactgacgcggttatcgaacaaattaatcaacgtcgtgaaggcgttattttcctactttggggcgctcatgctcagaaaaaaggtcgttttattgatactaataaacactttatcttaaaagcccctcacccttcaccactctctgcacatcgtggttttttaggctgtggtcattttaaacaaaccaataatctattagcgcaacaaggacgcacgctcattaattggcagcttgatcctattaaataa

SEQ ID NO: 303661 - DNA, 384 bp, Proteus mirabilis
atgattactggtatccaaattactaaagctgataacgacgatttattacattctttttggttgttagatgatgaaaacggcgaagcacgttgtatttgtgcaaaaaaaggctttgaagaaggccaagttgttagccgtgatgcattaggcaacatcgaataccgtgaagtaccggtagaatctaaaccggtagtacgtgtagaaggtggtcaacacctaaacgttaacgtattaagccgtgaaacattagaagatgccgttaacaatcctgagaaatatcctcaattgactattcgtgtatccggctatgcagtgcgttttaactcactgacaccagaacaacaacgtgatgtaattactcgtactttcactgaaagcctgtaa

SEQ ID NO: 303662 - DNA, 1356 bp, Proteus mirabilis
atgacagccacgacattttccagtcttgaacttgatgaaagtttattgaccgcattagaagaaaaaggatatcaacgtcctactgctatccaagcagaagctatccctgccgcaatggaaggacgtgatatattaggctctgcaccaacgggtacagggaaaacagcggcattcttacttcctgctattcaacatttacttgattatccacgaaaaaaatcagggccgcctcgtgttctgatcttaactccaacccgtgaacttgctatgcaagtcgctgatcaagcaaaagaattatgtgctcatacccatctagacatcgccactatcaccggcggtgttgcttatatgaatcacgcagaagtttttagtgagaaccaagatattgttgttgccacaacaggtcgcttattgcagtacatcaaagaagagaactttgactgtcgtgctgttgaaatgctgatcctcgatgaagctgatcgtatgttagatatgggttttgctaacgatattgaaactattgctggggaaactcgttggcgtaaacaaacattactcttttcagccacattagaaggcaatgctgtgattgattttgcacagcgaattcttaatgaaccggttgaactgaacgctgacccttctcgtcgtgagcgtaaaaaaattcaacaattttactatcatgcagataatcttgaccataaaactgccttacttgcacatttactcaaacaagaagaagttaaaaaatcgattgtttttgtacgtaaaagagagcgagtcagagagttagccgcagcattagaaaaacaaggtatcaaagccagctaccttgaaggcgaaatggctcaaacacaacgtaacgaagcgattaaacgtgtagagtctggcaaaatgcatgtgctgattgcgacagatgtggcgtctcgaggtcttgatttagaagatatcacccacgtctttaactttgacttaccgcgcacagctgatgtttatttgcaccgtattggccgtacaggtcgagcgggtcgtaaagggactgccatttcattagttgaagcacacgattatccgctacttggtaaaattagccgttatatccaagagccgattaaatatcgtgttgtagcccaattacgtccagtgactaaagcccctagtcaaaaagcatcatttaagccttctaaaaaagtattagcaaaacgcaaagcgaaaaaagtagaagagaaaaaaaacgtaaaagagaaagtacgcgcacgcgatcgtaaaaatattggtaaacgccgtaaaaccgctactgataaaaccaccatcactgcggaaaaaactaatcatataaaaacagagcaacaataa

SEQ ID NO: 303663 - DNA, 759 bp, Proteus mirabilis; identical to SEQ ID NO: 294843

SEQ ID NO: 303664 - DNA, 579 bp, Proteus mirabilis
atgagcgagcagttaacggaccaaatgttggtcgagaaggtacaactgggtgaccagaaagcgtttaacttgctagttatccgctatcagcacaaggtagcaagtctgatttcccgttatgtacctcagggtgatgtgccagatgttgcacaagaagcctttataaaagcctatcgagctattggatcattccgtggtgatagcgcattttatacatggctttatcgcatcgctgtgaatacagctaaaaattatctggtagcacaagggcggcgtccgccttcaaatgacttagatgcgagtgatgttgaaaattttgaaacatcaaatgcattaaaagaaatttcgaaccctgagaatttaatgttgtctgaagagttacggagagtagtttttcaaaccatagagtcgttacccgaagatttaagggttgctattacacttcgggaacttgacggcttaagctatgaagagatagccgttattatggattgccctgtaggtacagttcgttcacgtatttttagggcgcgagaagctattgataataaggttcaaccattaatacaagagttataa

SEQ ID NO: 303665 - DNA, 660 bp, Proteus mirabilis
atggctgaaccctcatttactgaagggtacttttacatgcaaaaagagaaactttctgcatttatggatggcgaagttcttgataaagaattaatgggatcgattgcccgtgatgaatctatgaaagaaacatggcaacgttaccacttagttcgtgatgcaatgcgtggtgatgtaggagaggttatccactttgatatcgcaagtcgcgtagcactcgctttagaaaatgagccagtccgcataagtcctgaacaacagcaagagcagcaacctgcgccttctcaatggcgtcagcactctttcttacaaaaattacgtccttgggctagccagttaacacaaattggtgttgctgcctgtgtgtcattagctgtcattgtgggtgttcagcaatataatggcaacaatagcgctgaggatttccaagttgatacgccggtgtttaatactcaacctattatggggaatggagcaccagtcagcttaaatttacaaagtgataatttaggccaaaatcaacaaacacgtctacaagagcgtaatcaacgccttggaattatgttgcaacagtatgagttagatcgccgtatctacaatgcaccacaagatgaagtgcctgtagcatcgcaaaacacaactcagcaacaggctcagtaa

SEQ ID NO: 303666 - DNA, 972 bp, Proteus mirabilis
atgaaaaaatcatggttatccgctttacttttagcgggttacctatcaataccaacacaagccttggcacaacctcaaataggaaatgccgaggctttgttgcaaaagatgggtaatacaacgcaaaccgctacttacgaattatcttttattaatatcaattctcaaggtattgttcctattcgttatcgtcatgcacttgtcgatggtaaacctgtggcacaattaatgcagatggatagcactcgtcgagaaatcgtgcaacgagggaatgaaatcagttattttgaaccaggtttagatgcgtttagtttgcgtaatgaacatatcgttgattatctccctgctatcatttatcaaaattttgctgaactcgctgagtattacaattttattgatgcgggaagaacgcatatcggcgacattccaagtcgtgttgttcgtgtgctatcaaaaaataatgaccgttatgaatatgtcttatttattgatgaagagagatatttgccattaagggttgatctgcttgataaaaataatgacgttattgaacaatttcgggtgatcaccgctaatcaaaataaagaaatcatcagtgagttagattcactcaataaagtgaatatgcccccgctattgttgatccccaaagccactcaagcactgaattacaattggcgtgtgacaacgttaccagaaggatttaaagaggtaaaacgtagcaatcatcaaattgctgaaaatgaatttagtcaatctattttatatagtgacggcttattcgatttctccatttatgttaacaaaagtggtcagcaattaaattcccccgaacgtgataaagcattgagatatggtcgtaatacaatttatacctatgataaagatggcaatgaaattacctttattggacaattgccatttataacagcacagaaaatcgtcaacagtgtggtgtttaccaaaaagtaa

SEQ ID NO: 303667 - DNA, 465 bp, Proteus mirabilis
atggttaaagagtgggcaacagtcgtacattggcaacaagggagggctttactacgttatggctcatcgtccggttgcgggagttgccaagctcgagcagcttgtggttcttatttattaaataaaataggccctgaaactgttcatcagttagaacttcctgttgaacaacctttagtggtggggcaaaaagtggaagttggtataccagaaaatagtttacttcgttccgctatgttggtttatcttactcctttgctgggattatttatcgttgcagggatagccagtctgtggctttctagtgagttggctattttttgtagtggtttagtggggggagtgttaggcttcttattagctaaaaatattgcccgctggtggagtaaagatgaaggatttgaacctattattttacaaataggacttccacctaatgaattgcaagtacaatatcaagaataa

SEQ ID NO: 303668 - DNA, 972 bp, Proteus mirabilis
atggctagcacgtttgccttgatcctaacgttggcaacgctaattacgggtattttttggtgtatagatcgttttaaattaaagccagcccgcaaagcgaagttaaaacgtttacaagagttaacgcagggaagtgaggatcagcaagagttagcaaaatcgattaataaaccaagctgggcagagacattaggctctctgtttcctgtattggcgattgtattgattttgcgttcctttgtgtatgagccgtttcagatcccatctcgttcgatgatgccgactttattagtcggtgatttcatcttggttgaaaaatttgcttatggattaaaagatcctattacacaaacaaccttgattagtacgggtaaacctaaacgtggtgatattgcggtatttaaatacccacgtgatccatcaactgactttattaaacgggtgattggtttaccgggggataaaatagtgtatgacatgacgtcgaagaaattacacatttacccaaattgtaataaagcaatatgtgatgatgaaatagcggtaacctatggtacagcgtatcctagtgaatggacattactgttacaaagtgtacctggtggtcaacgtattagcggtatgaaatcgattccgattgaagagccaatttctacagctacgcaatttcgccaagaagagagaattgaaacgattggtgatgtctctcatcgtattatgactattccgggagatgttactgtacctgaatttattcaaccgggattacctcaaggtacgtggattgtccctgaaggtcagtattttatgatgggtgataaccgtgatggtagttcagatagtcgtttctggggctttgtgcctgagcaaaacttagtcggtaaagccacaacgatttggatgagcttcgagaaacaagaaaatgaatggcctacaggtgttcgtttcagccgtattggtggcattaagtaa

SEQ ID NO: 303669 - DNA, 681 bp, Proteus mirabilis; identical to SEQ ID NO: 296996

SEQ ID NO: 303670 - DNA, 732 bp, Proteus mirabilis
atgtctgatattctacttggcgttaatattgaccatattgcaaccctacgtaatgcccgtggtacaacttatcccgatccggttcaagcggcatttattgcggaacaagcgggtgctgatgggatcactattcatttacgtgaagacagacgtcatattaccgatcgtgatttaatgctgatcagccaaacggttcaaacaagattaaatttagaaatggcggtaacagaagagatgattgagattgcttgccaaactcaacctgatttttgttgtttagtgcctgaaaaacgccaagaagtgaccacagaaggtggtttagacgtggtgggtaatgaagagaaagtggctgatgcgattaaacgtttatcattagcggggattaaagtctctttatttattgatcctgaccatgagcaaattaatgcagcagatcgtgtcggcgctccttttattgaaattcataccggtgcttatgctgacgctgaagatgaacaggctcaagagaaggagtttgttcgcattcgtgatgcggtaacctatgcagcgtctaaaggtttaaaagtcaatgcaggtcatggtttgcattatcataatgtacaacgtattgctgcattacctgaactttatgaactcaatattggtcatgcgattattggtcgagcggtatttagtgggcttgcaccagccgttgaagaaatgaaacgcctaatgagagaagcgcgtcgctaa

SEQ ID NO: 303671 - DNA, 381 bp, Proteus mirabilis
atggctattgttggtataggtatggatatcgttgagatatcacgtattgaagagataatagggcgttcaggagaacgcctcgcgcgacgtattcttactgataatgaatggattatatatcaatcacataaacaacccgttcgttttttagctaaacgatttgcggtaaaagaagccgcagccaaagcattaggtacaggcattcgcttaggattggcatttaaccattttgaagtcgctaatgatgaattaggtaaaccaacattgcactttttagctgtggcaaaagagatggcgcaaaaagcgggaataaatgctattcacgtgacactggctgatgagcaacgttacgcctgtgcaaccgttattttagaaaaataa

SEQ ID NO: 303672 - DNA, 222 bp, Proteus mirabilis; identical to SEQ ID NO: 295791

SEQ ID NO: 303673 - DNA, 531 bp, Proteus mirabilis
gtgaataaaattaaagatgatatttattggatgcataaagcgattgagcaggcacataaagcacaacaactcggtgaaatccctgtaggagccgtgttagtcgctgataataaaatcattgctaaaggttggaatcactccattattgataatgatcctactgcacatgcggaaattatggcattgcgtaaaggtgggaaacatctacagaattatcgcctacttgacgccacattatatatcacgttagagccttgcgttatgtgtgctggagcaattgtacatagtcgtgtaaaaagagtggtctatggtgcatctgatctaaaaacaggtgccgcaggctcatttattgatattttgcaacatcccggaatgaaccataaagttgaaataacatcgggtgttttaggtgaggagtgcgcacaactcttgagccagttttttaagatgagaagggcagagaaaaaacaactgaaacaacagcaacgtttaattactcaaggcttaatcatacaagagaaagccaaatag

SEQ ID NO: 303674 - DNA, 549 bp, Proteus mirabilis
atgaaaaacagcataataaagtcagctataacttgcttgttattgctctctcctagcacttttgctgccactgatattattggtggagagatggaatttaaaggcgttgttgttgcacatggctgtacgattgttgcgggagatgaaaataaagttattgatttcaaacaaatatctgcaaaagatctctattcactacaaaaaagcaaccccgttgcttttagtatcagtttagaaaattgtagccaagatatttataaaagtgtcactatcacattagatggtcaagcgcattcaacaatgcccaatcatatagccgttactgggagtggctcagaagagccgaaaagtattggcatcgcttttactgacaaggcacataatattattgaattaaaaaaaccaagtgctcctcaacagcttaataataaacgagtacaatttgattttatggcctatgttgaagcaacatcatcagctattcaaaatcaaacgatactcacaggaccatttcaagcacaagcaacctatacactcaattaccaataa

SEQ ID NO: 303675 - DNA, 1074 bp, Proteus mirabilis
atgatcctcaataaaaaaaacattcattccaaatcagtaatgctattttgtgccggcattgtttctttaatgccgttgcacgcaattgcttatttacaaggtgaagtgagaaccaatggtggccctaatattttctatgcagtattagatcacaccacctttcctaataacaaagcgggagaattagcaacagtaaagttttcgttgcctgatcgctatgatgggacagtatattgtcctaactcacgtatctatgatcgtgcattaacctattttaaagcaacgactgatttaccccctgttggtaataacttttatcaattaaatgagtatgttgatatcaaaattaattttgaaatttgggggcctaatcctttacccacagtgcccttttctgacatacctaataatagaaataatctacaaggttgcagagtcccctcttcacctaaaccgcatatttcctcgggaagtagcggacaactcaccttccgtttaagaaaacccattattaatggtgtcagtcttaatgggcaatctcttgcacaaatgtatgccatggtaagtcacagcggtgcgccaaaaacctatggttcagagcccatttctaaattagtgatcacctcggggatcattaccactaaagataaatgtatctttaataatggttcaccaattacctttgactttggtaatgtgggaaatacctctgattatctcaatgggcaaaactacaaaattactcgcaacattcccatcaagtgcgaagggggaagctttaccgatcctaatagcaaaataatgtttaaagttcagactggtagctcaggtattgcgagttttgattctaactaccttggtacaacaggctctgtagatagaagtaacttaggtatcgtcttaagagataagtcaggtacgattatcccacctaaccaatatttctcggttggcaaactcaataatttcaacggaaattgggaagtaagtgcagcccccatcgccaaagcgggcagtaaaattactgaaggtgagttttcagctcatgcgacactcattgcggagtttatgtaa

SEQ ID NO: 303676 - DNA, 765 bp, Proteus mirabilis
atgaactcattcagcacactaaaaacactattttgtggctctttgctggcactgagtctagtgaatacaacacaagcgggtgtttcactggatagaactcgtattgtattaacgggtaatgaaaactcagccagtgttaatttaaaaaataccagccctgatattccttttttagcgcaatcttgggttgaaaatgaaaatgggcagaagatctcttcacccttagtggcacttccaccgttacaacgccttgatggtgctcaaaaaggcgtagttcgcattacaaaaacagctgaagttgggctattacctcaagatagagaatcactgttttatttaaatgtgcgtgaaattccacccgcaccaaaacaagccaacgtattacagatggcgatgcagtcacgcattaaattattctatcgccctagtgccatagtacctgaaaaaccgggaatggtttggcaagatcaactggtgtttaaaaaacaaggtaataaatttattgttaataatccaaccccttattacatcacgattatctcactttctaataaattaaatggtgaggatagcgataaattaaccaccttccccggattaatggttgcgccaaaagcttcactggatataccagtaaaaaccagtaacgttaatcagttttatatgatgtatgtaaatgattacggtggacacccagagctcaaatttgtatgtcagcaagatagctgcaaagtagcccctaaagatcaacaacctaaatattaa

SEQ ID NO: 303677 - DNA, 2487 bp, Proteus mirabilis
atgttaattccttattcaccccacacaatatggaagaccatttgtgcgactttgctattaagcttggcgtttttctcacaagcagagcaggacgattctgtggaatttaacattcatatgctagacgcggaagatcgcgataatgtcgacctttcacgtttttctacctcaaattatatcattccgggtatgtactatttagatattcgtctaaatggtcgcgactttcctcgccaaaatattaattatattgaagtagcagataatcattccgtggcttgtatcgaccctactcttttaaaaaagttaacaatcaaccaagaaaaccaaaaatatatcaaacaaatatcaccagattgttttgatattagccaattacccggtatctcgattaaaaatgatggtggtgtacttgatatcacgttaccgcgctcattaatgaaatatgaagaatctgattggactcctccggagctttgggatagcggggtctctgggcttatttttgattatacactaacaggaacgtcaactcgccctaataaaggcaataataacaatacgttaactggttatggtcaagcgggattaaacttgggtgaatggcgtttacgagctgaatatcaaggcaattattcttctgaatattcgtctaacaatcgttttgattggaaccaaatttatgcctataagccattacctgatctcgcagccaaattaacggttggggaaacttatttaaactctcaaatttttgatagtttccgttttacaggagccaatttacaaagcgatgagagaatgttacccccttctctccaaggctatgcacctgaaattcatggcatcgccaataccaatgcaaaagtgacggtaacccaaaatggacgtttaatttatgagacaaccgtacctgctggccctttcgtgattaaccatctacaaaataccgtacagggtcaactcgatgttagagttgaagagcaaaatggtaagattaacgaatttcaagtgcaaaccgctaatttgccttatatgactcgcccaggatctgtgcgttttaatacctcactgggacagtcatccgtgaacaaccataaaatgcaaggccctcttttctatcaaggggatttttcatgggggatgaataatacatggtctctctatggtggtgctttacttaccgctaaagattataacgcatggtctttaggtatcggccatgatatggggcgttttggtaccctttctggtgatattacacagtcttatagcaaaacctatgataatgaaaaaatcaatgggatgtcttttaaactaaactatgcaaaaacttttgatgagtaccacagtaccattacttttgcaggttatcgtttctcagaaaaaacatttcgctctttttctcagtatattgatgagcgttataacggcatcaataataatggctatgaaaaagaaatgtacaccattaccggtaataaaactttttgggcagatgatgcagagaaatcgaccaccctctatctctcttatcgccaccaaaattattgggataaaaatactcaagagcagtatggtgtcacagtaagtcgcaatttttccattatggggattgagcaaatcaataccaacttgtcagcatttcgtacccaatataaagggaatactgacgatacgctctcttttaatatttcactaccattaggaagtggtcgcaatattggttataacttgcaagataacaatggcaaagtgacacaaatggcctcttatgctgataatcgtgattataataatttatggcgcataagagcaggcttaagttcggataagaaagccaataccgatggttattatcaacatcgttctcagtatgcagaaatcaatgccaatgcaagctatcaacaagataattacttagcagtgggcgcaacgataaaaggcggttttactgctactcgttatggcgctgcattacacagtagcagtatgacatctagcaccgcaagaataatggtggatactgatggtgttgcaggggtgccctttaatggtcaaagcacgactacgaaccgcttcggcattggtgtactaaccgacttaacaagttataacaatgttgatgcacgtattgacgtcgataagatggatcaagatatcgaaacgcgtaaagccattgcttcaacaaccttaacagaaggtgccattggttattaccaatttccggttcgtcaaggtgaacgtttaatggctgtcttacagacaactgataataaataccctccttttggtgcagaagtcaccaatcaaaaaggggaaagtattggtatggtgatggaagaaggccttgtttatattgcgggtgttaaccttaatgaatcattaaatgtaatttggaacggtaaaacacaatgttcaattaccattcccgcggaaataacagatcccttaaaacatcaatcgctcgtttgtcaggatcgttaa

SEQ ID NO: 303678 - DNA, 555 bp, Proteus mirabilis; identical to SEQ ID NO: 295785

SEQ ID NO: 303679 - DNA, 1470 bp, Proteus mirabilis
ttgaacaatataaggattaactatttcgttatcgttatcatagcgctattttcagccgcgattattgcactgaatattacttggcctgacaggcaaaaagcgcagataaataagattttatctcgtggtgagcttagagtgagtactatcccttcaccactgataacgataaatgataaaaaggaccccgtaggtttcgattatgaattagtaaaacgctttgctgattatcttggcgtgaaacttgtcgttaatatgcggacgaatatcaaccaactctttgatgatctggagaataataaagcagactttattgccgctggattaatttataataaagaaaggctagatacgacacgaagtgggccagcctatttctcagtttctcaacaactgatctatcgtaaaggcacattgaggcctcgtcgttttgatgagcttaatgggcgccttgtcgtcgcagccggttcagctcatgccagcttattaaaaacattaaaagaaacgcaatatcctgaactcgaatgggaagaatcagagactaaaacgacttcacagctacttgaagagttatctgaaggtaaaataacttatgtactggccgattcaatcagcgtcgcggtacaacaacgcattcaccctaatgttgcagtcgcttttgaggtgacggaaagtcgtccattaacgtggtatttaccaaatcaagatgataatagtctgtatgcagccatgttggattacttcaatcaactttcccaagacgatgtgctcgcaagactagaagagaagtattttggtcatgttggttcatttgactactttgatacactctcttttattaccgccattgactcaatattacctaattatcaacctctgtttgaaaaatatgccgagacttttgattggcgtttattagcagcaatggcttggcaagaatcacattgggatccccatgccacgtcaccgacaggcgtaagaggcttaatgatgctaacacgtccaactgcatcaagtatgggtataacagataggttagatcccgaagaaagtatcaaaggaggtgcacaatatttaaaacatcttctttctcgcctaccagatactatccctgatgatgaaaaaatctggtttgcacttgccgcttataacatgggatatggtcatatgttagatgcaagaaagctaaccgaacagcaaggcgccaatcctaatagctggttagatgtaaaagcgcggttacctttgctcagccaaaagaaatactatttagatcttccctatggttatgcgagaggacatgaagcttatcgttatgttgaaaatattcgtcgctatcaactcagtttagagggatacctacaagcaaaagagagtaaaaataagatcctatcgaaagacgaaaaagacgattcagccaatactgctttattaccgcctcgctccgtaggcacccccccttcatcttag

SEQ ID NO: 303680 - DNA, 3891 bp, Proteus mirabilis
atggaaatcctgcgtggctcccccgctttatccgcttttcgtattaataaactattaactttatgtcaggaaaaccaacttcctgtccgtggtatttatgcggagtttatccattttgtaaaagtggatggacagctatctgaagatgaacaagctaaattaagtaagttactgcactatggcccttcattaacagagcatgagcttgttggagagatgcgtattgttgtaccacgaccgggaaccatttcaccatggtcgactaaagcgacagatattgcccataattgtggtttaacacaagtggttagaattgaacgtggtattgcttattatatagatagcgatacgatggccgaagcacagtggcagttgttatacggttttatttatgatcgtatgatggaaacaatttttagcgattatcaacaagttaatgcgctatttgctgaacagacacccaccccattaaaaacaattgatgttcttgctcacggtaaagatgcgctagttgctgccaatattgaaatggggttagcgctagctgatgatgaagttgattatctagtagatgcttttaaacgtttgcaacgtaatccaactgatgtagaactttatatgttcgctcaagcaaactcagagcattgccgtcataaaatttttaatgcagattggataatcgacggtaaagcgcaagacaaatcattatttaaaatgattaaaaatacttttgagcaaactcctgattatgtcttgtcggcttataaagataatgctgctgtaatggaaggctccgttgctgggcgtttttatcccgatacggaaaaagggcattaccgttatcatcaagagcctgtccatatcttaatgaaagtggaaacgcacaatcacccaacggcaatttccccgtggcctggtgcagcaactggctctggcggcgaaattcgtgatgaaggggcgacaggccgtggggcaaaacctaaagcgggtttagtcggtttttccgtttctaacttacgtattccggggtttgaacaaccttgggaagaagattttggcagaccagaacgtattgtcagtgcactggacattatgacagaaggccctttaggtggagccgcatttaataatgaatttggtcgccccgccttattaggttatttcagaacctatgaagagcaggttaatagccataatggtgttgaaattcgaggctaccataaacctattatgttggctggtggtattggtaatattcgcgaagatcacgtgcaaaaaggtgagatctccgtgggtgctaagttaattgtacttggtggcccatcgatgaatatcggcctaggaggtggtgcggcttcttctatgacttccggccagtcagatgctgatttagattttgcctctgtgcaacgagataacccagaaatggagcgtcgttgccaagaggttatcgatcgctgttggcaattaggtgatgataacccgattttatttattcatgatgtcggagcgggggggctttctaatgccatgcctgagcttgtcaatgatggcgggcgtggaggtcgttttgagttacgtaacgttttaaatgatgaaccgggtatgagtcctctagagatctggtgtaatgagtcgcaagagcgttatgtattagcggtatccccagaaaaaatgccactatttgatgcgctatgccaacgagaaagagccccttatgcggtcattggcgaggcaacacaagagcgtgaattagtgttaaatgatacacattttgataataaaccaatagatatgcctttagatatcttgttaggtaaagcgccgaaaatgttgcgtgatgtcacatcacatcaaacagcaggtgaatatctcgatcgtaaagatatcgatttaaaagaagcggtttatcgcgtacttcatttacccgccgttgctgagaagacgttcttaattactattggtgatcgtagtgttacgggaatggttgcgcgtgaccaaatggttggaccttggcaaattccggtggctaactgtgcagtaacaacggccacattagatagctattacggcgaggcgatgtcaataggggaaagagcccctattgcactattagattttgccgcatcagcgcgaatggcggtaggtgaagccttaaccaatatggcgggttgcgatgtacagtcacttaatcgtataaaactttccgcaaactggatggctgcggcgggtcaccctggtgaagatgcgggattatatgatgcagtaaaagccattggtgaagagctatgcccacaattaggtattactattccggtgggtaaggactcaatgtcaatgaaaacgcgttggcaagatgaacaagggaaaacgaaagaagttatttcccctctctctttagttatcaccgcattttcccgtgttgaagatgtacgtaaaactgtcacccctgagctttctacccaagaaggaaaccgtttatatctaatcgatttaggtaatggtcataatgcattaggggcaacagcattagctcaggtttatcgtcagctaggacaaaaagcggctgatttacgtgatgtagagcagttaaaacagttttttaatgtcattcaacaattggtgagcgacggtaaattactggcttatcatgaccgctctgatggtggcttatttgtgactttggccgaaatggcgtttgcgggacattgtggccttaatgttgatatcagtgcttatgacgaagatattttagccggtctatttaatgaagagctaggtgcggtgttccaaattaaaggggagcatcaagaaagcgttgaaacactgtttactgaacatggtttagcggattgtttacattacttagggcaagcaacaccaagtgatgacattattattcaaagccgtgaaacggaagtttaccacgaaaaacgtagtacattacgtgtctggtgggctgaaacgacatggcaaatgcaacgtttacgtgataatcctgaatgtgcagatgaagaacatcgtgccaaacaagatagtcacgatccgggattaaatgttcacttaacctttgatccagcagaggatattgcggcgccttatattgctacaggcagtcgtcctcgtattgcggtattaagagagcaaggtgttaactctcatgtggaaatggcagcagcttttgatcgcgctggatttgatgctattgatgttcatatgagcgatttacatacggcacaacgctcattaagtgattttgatgtattggttgcttgtggtggtttctcttatggtgatgtactcggtgcgggtgagggatgggctaaatctattttatttaatcatcgtttacgtgatgagtttgcccaattctttgcacgtcaagatacgttatcacttggggtttgtaatggttgccaaatgatgtcaacgttggccgagcttattccgggggcagatttatggccacgctttgtacgcaatcgctcagagcgttttgaagcccgctttagcttagtaaaagtaactgatagcccgtcgctattattacaaggtatggcggggtcacagatgccaattgcggtatctcatggtgaaggttttgctgaatttcgtgacgctgcacaattagcgcagttagaagcaaaaaatttagtaggactgcgttttgttgatcactatggtcaaccaacagagcaatacccattaaaccctaacggatcagtaaaagggatcaccgctgttaccacaacagatggccgctcaacaatcatgatgcctcaccctgagcgcgtttttagaacagtgagccattcttggcatccagaaaattggggagaagatagcccttggatgcgcttattccgtaatgccagaaagcaatttgactaa

SEQ ID NO: 303681 - DNA, 1449 bp, Proteus mirabilis
atgatttcattgaaaaagtggcgtatttttccccgatctttaagacaattggttatcatggcattttggatggtgctgttaccgcttctcgtccttgcctatcaggcttatcaaagtttggatcagcttagtaaccaagccgctattaccaataaaaatgcgttagcggataccgagcgtagtgaggtgatgcgtaatttagctattgaaatggaaggaaattatcgacgatattgtgtattgcgtgataaaactgatgaagaaatgtatcaacagcgttatcaacaatacagcaaaatgttctctaccttgcagcagaccatcatccctctttctgagtctaaagaagcacaagccttgaatacttctttgaaaacgctcaaatcaattcaatgcaaaaatagtgaacccacttctcaaatgcaacaagcattagagcaattttcttatgccaataaccgcattgtcgtgttaaccaaagagattatttttagtcgtggcgagcaactacaaatggctattgctgaaaaagggcgttattttggttggcaaagtttaattgtttttgtttttagcctgattttaattgccttatttacccgtatgatcatcggtccggttaaaggtatagaaaaaatgattaaccgattgggggaagggcgtacattaaataataacttgaattcgtttcaggggccacgtgaattacgctctttagctcaacgtattatttggttaagtgaacgtcttgcatggctagaatcgcaacgccatgagtttttacgtcatatttctcatgagttaaaaacaccgttagccagtatgcgcgaaggaacagaattattagcggatgaagtagcagggcctttaaccttagatcaaaaagaagtcgtagctattcttgataatagtagtaaacaacttcaattattaattgagcaactacttgattataatcgtaaactttccgaagtacctcagcaaattgaggaagttgatttaaccacattagtgaatgatgtggtgttagcgcatagtttacccgcccgagcgaaaggcattaagacgataatttcacttgatctgaaaaaatgtcgagcagaaacgacgttattatcaagagttattgataatctctactcgaatgcggtgcactatggcgctgaatcgggtaatatctggatctctagttatcaaattgaacagaaaatagttattgatatagccaataaaggcactccgatccctgaatcagaacaaaaaatgatttttgagcccttttttcaaggttctctattacgtaaaggggctgtaaaagggagtggtttggggttaagtattgctcatgactgtatcaaaagaatggatggcgagttaaatattgttcattctgactatgctgatgtctgttttcgtattgaactaccgctactttctgagaataaataa

SEQ ID NO: 303682 - DNA, 1011 bp, Proteus mirabilis
atgcatatcaggtcacaaaaacaggtgtcttttcatcagtataaaaaattaaagcgaaagacactggctaatgagcaattatctatggcccctgcatcaattaagaggatcgcttcacactggaaacagtatctgtgttggattatgttgcctatgtttcttgctggatgtgcacaaaaatcgctgaccgaaactgctaatattgagcctgaaacccccgttgttaaacaaaaaactatcgattatcgttgggcagaatgtaaaactttagctgctttttatcatgaagggctcaataatccgctattttggttacgtaccattgagtgcacacagcgtattatgtctacagaagcacaacgtcaagccagtagtgttatcgttgccggatgggatggcgccttttataaaagtattttattagagagagcgggaatgacggttgctgaacgtcgtgctcagctggttttattagaaagctatcaattgcaatttccaagctctatgcgtgttctattatctacttggattgagaatcaaacgattacgcttgctctcgctgatgagaaaaatcgtaatcgccgttttgttacagaaacggaaaataaaatggatttactgaaaaaacaaaataatgcattagagcatgagttaaataccacacgtaaaaaactcgaaagcctcacacaaattgaacgtcaattatcgagccgaaaacaaggggcttctgtggatgctatttctcaagaagaagcgctgtctgatgttcaatcttcagatgcgagtaatgcagaaaaaccagccgataaaccgatagcggagcaatctaatacgtcaacggcaagtgagcaatcgataaccaaagaaaataatgaggtttcacaaccttcggtatcagcagttaaacctgaaccaccaaaagcagaacaagtaaaacctgatgcgaaaaatacctcgacagaaaaagagaatagcgcaacggttaaacctactgaaacaggatctaaataa

SEQ ID NO: 303683 - DNA, 1338 bp, Proteus mirabilis
atggctggccataaatcagcgaatcttttacttgtcgatgatgatccgggattattaaagctactgggtatgcgattaacaagtgaagggtttcatatcgttaccgctgaaagtgggcaagaagcacttaaactattattaaaagaaaaaatcgatctggtgatcagcgatttacgtatggatgaaatggatggtatggcgttatttgcagaaatacagcgccaacaacccggtatgcctgtgattattttaactgcacatggctccattcctgatgctgtcgcggcaactcaacagggggtgtttagtttcttgactaaacctgttgatagagatgcgctttataaagccatcgatgaagcattagaattagtgacgacggtatctgatgaagagtggtcaaaagatatcgtgacccgtagcccccaaatgttacgtttattagagcaagccaagttagttgcacaatccgatgttagcgtactgattaatgggcaaagcggtacaggtaaagaagtccttgctcaagcaatccaccgcgccagcccacgagctaaaaaaccctttattgctattaactgcggtgctttacctgaacaattattagaatctgaactatttgggcatgctaaaggtgcttttactggcgcggtaagtagtcgtgaagggcttttccaagcggcagaagggggcactctatttttggatgaaattggtgatatgccaatggcattgcaagtgaaattactgcgtgtattacaagagcgtaaagtgcggccattaggcagtaatcgtgatattgatattgatgtgcgtattctttctgcaacccatcgtgacttgccaaaagcgatggagcgtaatgaatttcgagaagatttatactatcgtttaaatgtggtcaatttacgtatccccacgttgagcgaaagagccgaggatattcctgttcttgctaaccatttattgcgcgaatcagcaaaacggcataaaccttttgtgcgtagcttctcaacggatgcgatgaaatgtctaatgacagcaagttggccgggaaatgtgcgtcagttagttaacgtcatcgagcaatgtgtcgctttaacgactgcacctgtgattagcgaagcccttgtcacacaagcattgcaaggggaaaataccgcattacctacttttgctgaagcaagaggccattttgagatgacctatttaaggaagttattgcagatgacaaagggcaatgtcactcaggctgcaaggatggcagggcgaaatcgaacagaattttataaattgttgtcacgtcatggacttgatgccaatgatttcaaagaatga

SEQ ID NO: 303684 - DNA, 1617 bp, Proteus mirabilis
atgagtcgtaaattaaaactcgcacttgctcagttaaactgggttgttggcgatattgaaggcaactgtgaacgcatgttagccaccgtaaaagcgcaagaagatgccgatctggttttgttttctgagcttgcgttatgcggttactctcctgaagatctactatttcgccctgatttccaacaacgttgtgaagagcaactggttcgtttagaacaagcaagtaagaaaacggccattgtggttgggcatccttggtggcaaaacggcactatttataatgcactgtcatttttctatcaaggtgagttacaggcgcgttacttcaaacaacagctacctaattatggtgtatttgatgaaaaacgttatttccaacaaggaaatgaacgttgtgttgtgccttttaaaggctatcatttaggattattaatttgtgaagatatttggatcaacgagcctattgatgcactaaaacaagcgggtgctgatctggttctttctattaatgcttcaccttatagtcgtgaaaagccgcatattcgtacccaattaattaaagaacattgccaaagaacgcatctgcctgtggtgtatctcaaccaaattggtggtcaggatgaattggtttttgatggatgttctaaagtctttgatgaacgaggaacaatcacccatcgtttagcggcttttgatgagcaagtggccgtggtggagtttgatgagttaactatcgtaccgatgcaagatgcggcaccagagctttctcctttagcgcaagtttatcaagcactagtgctggcaacgcgtgattatgtgacaaaaaatggttttaaaggcgctatattaggattatcagggggcatcgactcaggcttaacagttgcaattgccgttgatgcgttaggtaaagagagcgttcaagcggtaatgatgccatttcgctatacctcagaaatgagtattcacgatgcgaaagagcaagctgatttattaggtgttgagtttgatactgtctctattgagccgatgtttgatgcttttatggatcaactttcgcctatgtttaaaggtagcgctgtcgatactacagaagaaaatctacaagcgcgttgtcgtgcggttattttaatggcgatgtccaataaacgtcgtcggttagtgctcaccacgagtaataaaagtgaatctgccgtaggctactcgaccttatatggtgatatggcggggggctttgatgttttaaaagatgttcctaaaacactggtgtttgaactggctaaatatcgtaatactctttcacccgctattccacaacgtgtgattgataggcccccttcagcagaattagcaccaggacaaacagatcaagataatctgccaccttatgatattttagatgctcttcttgaaggctatgttgagcaagataaatctgtttctgacttggttgcggctggatttgatgaagccattgttcgtaaagtggtaaaattagtcgatattaatgaatataagcgtcgtcaagcaccggtaggaccgcgtattaccagtcgtaattttggtaaagatcgtcgctatccgatcacaagcggttttggtcgccataactggtaa

SEQ ID NO: 303685 - DNA, 339 bp, Proteus mirabilis
atgaaaaaaattgaagcgataattaagccgtttaaattagatgatgtaagagaagcactagccgaagttggtatcacgggtatgacggtaacagaggtaaaaggctttggtcgtcagaaagggcataccgaactttatcgcggtgcagagtatatggtcgattttttacctaaagtaaaaattgagatcgttgttgctgatgaaatagctgaaacttgtgtcgatactataatgactaccgctcaaacggggaagattggcgacggtaaaatttttgtttttgatgtgaatcgagttatccgtattcgtactggagagcaagacgaagaagctatttaa

SEQ ID NO: 303686 - DNA, 642 bp, Proteus mirabilis
atgggtaatatcgtgcttagctatttattaaagcgttttgctttatttttgttttccgccatgattgtggcaataacaacagggtttattttcctcgatattttggtgctgaataatggtatttctgaaacctcagcaaccgaactggggcaagaacttattgtggctataatatgtcttcttttctttatacctgcttataaacagccagaaatgagagggggatacacactgattatgggctttttcttgtgtatcttaattcgtgagttagatggtgtttttgaccaattagcacatggttcatgggtttggtttgcattaacggtaacatttgtctgtatagcgatcgctatcagagaagggaaaaaaacattatatggcttaacccattttataacgcattctagtcaaggaatgcttatggcgggtttgctcagtgttttactattctctcgcttatttggtatggggattttgtgggagaaattgttaggtgaagactataaccgcacagtaaaaaatatggtggaagaaggtagcgagttgttcggctatacactctgtttaattagtgttatttggtatcgctattcgtctaaatatcatgttataccgacatcaataaaagttacttattaa

SEQ ID NO: 303687 - DNA, 1191 bp, Proteus mirabilis; identical to SEQ ID NO: 302474

SEQ ID NO: 303688 - DNA, 1254 bp, Proteus mirabilis
atgttaaaacgtgaaatgaatattgctgattacgatccggaattatggaatgcaatggaaggtgaagtgactcgtcaagaagagcacatcgaattaattgcttctgaaaactatactagtcctcgtgttatgcaggcgcagggatctcagctgaccaacaaatatgcagaaggttatccaggtaaacgctactacggcggttgtgaatacgttgatgttgttgaacaattagccattgatcgtgccaaagcactatttggtgctgattatgcaaacgtacaacctcactctggttcacaagcgaatgcggctgtgtatatggcattacttaaaccgggcgatacagtattagggatgaatttggcccaaggtggtcacttaactcacggctctccggttaacttctctggtaaactctacaatatcgttccttatggtattgatgaagccggtaaaattgattaccaagatatcgctgagcaagctaaaaagcataaaccaaaaatgatcattggtggtttttcagcttattcaggtttggttgattgggctaaaatgcgtgaaatcgcagatagcgtaggggcttacttatttgtcgatatggctcacgttgcaggtatgattgcagcgggtgtctatccaaacccagtaccacatgctcacgttgtgactacaacaacacacaaaacattagcgggtcctcgtggtggtcttatccttgctaagggtggcgatgaagagttttataagaaattaaactctgccgtattccctggctctcaaggtggtcctttaatgcatgtgatcgcgggtaaagccgttgcattaaaagaagcaatggaacctgagtttaaagtttaccagcaacaagttgcaaaaaatgcgaaagcaatggtagacgttttcttagcgcgcggttataaagtagtatctggtggcacagagaaccacctgtttttattagatttagttgataaagatattacaggtaaagatgctgatgctgcactgggccgtgctaatatcactgtgaacaaaaatagtgtgccaaatgatcctcgcagtccatttgttacatctggtattcgtattggttctccagcgattacacgtcgtggttttaaagaagcggaagcaaaagatttagccggttggatgtgtgatgtccttgataatatcaatgatgaagcgaacattgaaaaagtgaaacaaaaagtcttggatatctgcgctaaatttccagtttacgcataa

SEQ ID NO: 303689 - DNA, 1176 bp, Proteus mirabilis
atgttaaaaatggggggttggatggttattccatcaacactgtggcttgccttagattattttacgtattttttctcatatggtattttcttgcctttttggtctatctggttaaagggcgagggggttgatcctgcgatgataggcttactacttggggtgggcttaaccgctcgttttgtaggaagcttgattttaacgccggctgtaaaagatccatcaaagctcattactgcactgcgactttttgcttttttatctctcctatttaccgttgcatttatgttgggcactcattgggcttggctctttttggtaatgaccggatttaacgttttttttgcacccatggtgcctttgggagattcacttgcgggaacatggcaaaaacaatttcctttagattatggcaaaattcgggtttggggatctattgcatttattattagttcctcattattggggatattgattgatgcttttggacacccgattattctttatggattgattgccagcactcttgcattattccttacctcaatgttacgtccgaaaatcatgccccaaggtaaggtcaaaaaaacggaacaccatcatgtttcatttatgaaactgatttcagatggcccagtctggcgttttctattatgtgtttctttactacaaggtgctcatgctgcttattacggttttagcgcactttattgggaaaaagcaggctatgatacagcaacgattggttatctttggtccttaggcgtagttgctgaagtggttgtctttatgtttagccgtcgtttattccgccgttggagtgctcgaaacttattattactttcagcatttgcagggctattgcgctgggggatgatgggcagttttacagcattaccggcgcttattattgtacaaattttgcatagtggcacatttaccgtatgccatttagcggcaatgcgttttattactgcacgtcaagagcatgaaattattcgtttacaagcggtttattctgctctagcaatggggggaagtatcgctattatgacgattgtatcgggatggttatatgaaaaacttcctaaccaagaataccttattttctggttgatggcggcattaactattcctgcaatgtttattagaccgaaagtacaaccgcaaaatacttaa

SEQ ID NO: 303690 - DNA, 1269 bp, Proteus mirabilis
atgaaaagtaaatcagtgatcccagctagtttttctttacaagaaagagaccgacgctggcagttagctagagacattatgagagataaccaattagatacattgattatttatggtgatagagaatcggcagcacctgcaccgttttgtattgaccactattttacaaatgacagattaggatcggttgttatttttcatgaagataagaaaccattgatagttacttttgcaccaatgatgatagctgatcatatgcaggcaaaactacgtggtgatttgcagtggattgatgaagataatcttgttgtaggaaaaacagggcgtagtattgctcattttctaaaagagatgggagtacaacaaaatgcacatattggtattattggcttagaaccttatcccccattttattttgatggtgcaatgccatttaatactctaaatggtattaaggaagcatttccttatgcaaaatttagcagtgtgtatcgtgatttctttagacgggcatcagttaaaagtgaagaagagctcgctcatgtaagatatgctgccgccattggtgaagcaatgagcgaggcaatgcgagtgactgcaaggcctggtgcaacagaggcggagcttgcggccgcaattactgccacttgtttatcaagggggggatttaccgctgaaattttaatgggatcaggatctgagtatatcggttggggacctcctgcttggcaatatcgctcacaagcacctcgtgaaattcaaatgggtgatattatattatcagagatttttgctttatatggaatgtatgaaacgcaacatcaagcggcggttgctgtaggtaaaattcacgaaaacttagaaaaagcagcattagttgcacgtgaatgctatgaaattggtgttgaacatttaaaagcagggataacctttggtgaagtcgttgatttaatggaaaaaccactattagaatcagggggatggcatgttcatccacttattcacagtattaatccttatggcccaatcggctttggcacagcgccaggtattgaatcattacctcttgctcatcgttataaacaaattgagcgattacctaatccagggagagaattagtattacaagaaggtatgacatttgcttttgaacctaattgtggcttcggccaccacttatgtaatttaggtggcactgttgtggttggcaaaagcaaagggattgagttaaattctaactcaacacaattaatgcgggcagatatatag

SEQ ID NO: 303691 - DNA, 675 bp, Proteus mirabilis
atgaaaaacaccagtaaaactgcagtaagtacagaacaaactcaagagaaattagtgcaagaaggtattaggctttttgcactatatgggatcagtggattgagaacgcgacaacttgcgcaagatgctggtgttaatcaatcagcaataccttaccactttggcggaaaattaggggtttatacagcagtgatccgatatattgctacagaattagcctctgaaattcagtttgaccaatttgataataagcttcagtttttattgaaagaaaaccgaccttataaaaatgaaaaagtggctgaattagttctattactagtcacaggtttaactcgtgcattattatcaccaaaacgccattattacagtcagttgatcctacgtgaacagttagaaccgacggaaaattacgatcttatttatagtaatctgatagagccttttcatcttcgcctttctcgcttagttggattaatggatacaaagagtgatgaagtaacaatcactattcgtgctcatgctcttattggtcagatattagggtttgtcattgcaagaaaagcttttctattacgtgttaataagcaagagataacatcacaactattagataagattgcacaagaaattagccaactttcagtaaatgcccttttaattgaaaacgcatag

SEQ ID NO: 303692 - DNA, 804 bp, Proteus mirabilis
atgcatccgatgctgaatattgccatacgtgctgcacgtaaggctggtaatttaatcgccaaaaattacgaaaatcctgaatctgtagaaacgagccagaaaggtagcaatgattttgtcactaatgttgatcgcgaagcggaacaggcaatcattgaaatcattcgtaaatcttatccaaaacacaccattattacggaagaaagtggcgagttactcggtgaagatcacgatatccaatgggttatagatccacttgatggcaccactaactttattaaacgcctaccacatttttctgtttctatcgctgtacgtatcaaaggtcgcacagaagttgctgtggtttacgatcctatgcgtaacgaacttttctcagctgttcgtggtcaaggtgcacaattaaatggttaccgcctccgtggctctaatgcacgtgatttagatggtgctattttagcaactggtttcccattcaaagcaaaacaacattcagcagcttatatgaatatgctgactaaactgtttgtaccatgcgctgattttcgtcgcacaggttcagcagcattagatttagcttatgttgccgcgggtcgtgtggatggcttctttgaaattggtttaaaaccttgggatttcttagcaggtgaacttattgctcgtgaagcgggtgcaattgtatctgactttactggtaatcacggctatctacaaactggtaatattgttgcgggtaatcctcgagttgtccgagcattattggcagaaattcgtagcgaattaactgatgctttaaaacgttaa

SEQ ID NO: 303693 - DNA, 729 bp, Proteus mirabilis
atgttagaaaatattcgcattatccttgtcgaaacttcacatacaggcaatatgggctcgacagctcgtgctatgaaaaccatgggattaacgaatctttattttgttaatcctaaagaaaaacccgactctcactctatagccttatcagcaggggcaagcgatgttattggcaatgctcatattgttgatactattgatgatgccattgaaggctgtgggttagtgattggaacaagtgcgcgtaatcgtacgctctcttggccaatgctagcacctcgtgaatgtggtgaacgttgcgtaaaagaggcagcaaataagcccgttgcggtgatctttggccgtgaacgcacaggcttaactaatgaagaattacaaaaatgtgattaccacctctatattcctaccaaccctgaatatggctctttaaacttagcgatggcggtgcaacttgtttgttatgaaattcgcatggctgcacttgctcaacaggaaaaacaagaggaaaatgcttcatcagagattgattatccacccgctgaagatattgaacgcttttatgttcacttagagcaggtacttaatgagtctggttttattcgtcctaaacatccaggacaagtgatgagtcgtttacgccgcttgtttacgcgcgcacgtccagaaacacaagagcttcatatcttacgtggtattttaacatccgttgaaaaatgggctaagaaataa

SEQ ID NO: 303694 - DNA, 495 bp, Proteus mirabilis; identical to SEQ ID NO: 294489

SEQ ID NO: 303695 - DNA, 1215 bp, Proteus mirabilis
atgaaattacccatttatctagattattcagcaaccacacccgttgatcctcgagttgctgaaaaaatgatgcaatgcctgactattgacggcatttttggtaacccagcctctcgttcgcaccgttttggatggcaagctgaagaagcgatcgatatcgctcgtaatcagattgctgatcttattggtgctgatcctcgtgaaattgttttcacctcaggggcaactgaagcagataacttggcactaaaaggtgttgcaaacttttatcagaaaaaaggtaagcacatcatcacatcaaaaactgagcataaagcgattttagatacttgtcgtcagcttgagcgtgaaggttttgaagtgacctacttagcaccaaaaagcgatggcttaattgatttgaaagaactcgaagccgctatgcgtgatgacactattttagtttctatcatgcacgtgaataatgaaattggtgtggtgcaagatattgctgctattggtgaattatgccgtagcaaaggcattatttaccacgttgacgcaacgcaaagcgtcggtaaattaccaatcgatctctccaaattaaaagtcgatttactttctctttctgcacataaagtttacggacctatgggtattggtgcgctttatgttcgccgtaaaccacgcattcgcttagaggcacaaatgcatggtggtgggcatgagcgtggtatgcgttcaggtacattagccgttcaccaaattgtgggtatgggtgaagcttatcgtatattgaaagaagaaatggctgatgaaactaaacgtttaaatgaattacgtttacgtttatggaatggcatcaaagatattgaagaagtgtatatcaatggttctttagaacatacagcgccaaatattcttaatgtcagcttcaactatgttgaaggtgaatcattaatgatggcactgaaagatcttgctgtatcttcaggttcagcctgtacatcagcaagtttagagccttcttatgtactacgtgctttaggattaactgatgaattagcacatagttctattcgtttctctttaggtcgtttcaccactgaagaagaaatcgattatgcaattgaacaaattcacagtgcaattggtcgcttacgtgatctttctccactttgggaaatgcataaacaaggcgttgatatcaacagtatcgaatggtctcaccattaa

SEQ ID NO: 303696 - DNA, 387 bp, Proteus mirabilis; identical to SEQ ID NO: 294491

SEQ ID NO: 303697 - DNA, 324 bp, Proteus mirabilis; identical to SEQ ID NO: 294492

SEQ ID NO: 303698 - DNA, 522 bp, Proteus mirabilis; identical to SEQ ID NO: 294493

SEQ ID NO: 303699 - DNA, 1851 bp, Proteus mirabilis
atgtcattattacaaattagcgagccaggacaaacacctgcgccacatcagcgtcgattagctgcgggtattgacttaggaacaacacactcacttgttgccactgtacgtagtgggcaagccgaagcgctttcagatagtgaaggtcgctatttattgccatctgttgtgcagtatcaagttgataatattaatgttggctggcaggcgaaacaagaagccgaaaaagatcccgccaatactatctgctcaataaaacgaatgctggggcgctcgctaaatgatataaccagtcgttatcctaacctcccttaccattttcatgacaatgatagtggactgccattaattaaaacacctgctggcattgtcgatcctattcaagtttctgcggatattttaaaagccttagcagagcgtgcaatacaatcattaggtggtgaacttgatggtgtggttgtcactgtacctgcttattttgatgatgcacagcgtcaaggcactaaagaagcagcacgtcgtgcaggtttacatgtattacgtttattaaatgaacctactgctgccgcgattgcttatggattagattccggaaaagaaggcactattgtcgtttacgacttagggggcggaacttttgatatctctgtcttacgtttaactaaaggggtgtttgaagtcttagcaactggtggtgatactgcgttaggcggtgatgactttgatatgatgttagccgactggatcagagagcgtgcgggatttggctatcaaaatgatgttattttacaacgtcaattacttgatattgcctcagaaactaaaatcgctttaagtgataatgatgtggctgatatcaatatcaatggttggaaaggggaaattacccgcgctgaatttgaattattaattcaacctttagttaaacgtacgttgttatctgttcgtcgagcattaaaagatgctgatgttgacgtggatgaagtgctcgaagtggttatggtgggcggatcaactcgcgtgccgctggtgcgccaaatggtaggcgattattttaaacgtgaaccattaacttcgattgaccctgataaagttgttgctattggtgcctctattcaagcagatattctggtgggtaataaacctgatagcgaaatgctcttgttggatgttattccgctttcattaggtttagaaaccatgggcggactggttgaaaaagtgatccctcgaaataccactatccctgttgcgagagcacaagaatttaccacttttaaagatggtcaaactgccatgagtgttcatgtggtacagggtgaacgtgaaatggtgagtgattgtcgctcattagcccgttttactttgcggggtattccgccaatggcggcggggggagcacatatacgtgttaccttccaagtggatgctgatggtttattaagcgttagtgcgatggaaaaatccactggtgttgaagcctcagtacaggtaaaaccttcttatggtcttagtgatacagaaatcgctaatatgatccaatcttcaatggaaaatgccaaagaagatttacaagctcgtcgtcttgccgagcaaaaagtcgaagccgctcgcgtgttagaaagtttaaccgcagcattacaagaagatgctcatctcttaactgaagatgagaaaacggctatcgataatgttgtagatactttaatagaaagcgttgagggaacagatcctgttgccattgaaaacgccattaaacaactggataagcaaactcaggaatttgctgcgcgtcgtatggatacttccattcgtcaagcgttggcaggtcattctgtggatgagatataa

SEQ ID NO: 303700 - DNA, 336 bp, Proteus mirabilis
atgcctaaaattgtatttttaccccatagcacactttgcccggaaggtgctgttgttgatgccactgaaggtgagtctattcttgatgttgcattacgtaatggcattgagattgaacatgcgtgtgaaatgtcgtgtgcgtgtaccacttgtcactgtatcgttcgtgaaggctttgactctcttgatgaaagtacagagctggaagacgatatgttagataaagcgtggggattagagccagaaagtcgtttaagttgccaagcgaaggtaactgatgaagatttagtcgttgaaatacctaaatattctatcaaccatgcgagagaacactga

SEQ ID NO: 303701 - DNA, 195 bp, Proteus mirabilis; identical to SEQ ID NO: 294496

SEQ ID NO: 303702 - DNA, 1296 bp, Proteus mirabilis
atgaataaacaaattatgcctatcatgctgtctaatgaacctgcagcagcatgttggggagaaaaagcactaattagcactaacgaaactggcatgaccgttcacttaacggaagaaaaccgcttaggggccattcagcgtggtggacgcaaaattgatggtcaaggtattcgtaatgttgctctagttggtgacggctgggatttagaacgtagttgggcgttttggttaggttttagagcacctaaaggcgcacgttcaatcgaatggccacaattaagtgaagcggacaaaaaagaattagagtcgcgtatccgcattgttgattgggtgcgtgacacaataaataccccagcagaagagttagggccagaacaactggcacagcgtactgttgatctgttttgtggtttagataaagaagatatcagctataaaatcaccaaaggggctgatctgagagatcagaactatgcgggaatttatactgtaggtcgaggctcttcacgtgatcccgtctatttagcattagattttaatccaactaaagatgccgaagcccctatctttgcctgccttgttggtaaagggatcacctttgattcaggcggatatagcatcaaaccttcttcttccatgaattctatgaaagcggatatgggcggtgctgcaaccttagctggtgctttggctttagctattacacgaggtttaaataaacgcgtaaaactattgctatgtattgctgataatatggttagcggtaatgcctttaagttaggagacattatccgttatcgtaatggtaaatccgttgaaatcatgaatacggatgcagaaggtcgtttagttttagcagatggtttaattgatgctagcaactttgcccctgaattgattatcgatgcggcaacattgacaggtgcagctaaagtggccgtaggtaatgattatcactctgtattaagttttgatgataaattagcgaatgaattattagcaagtgcagatcaagaaaatgaactgttctggcgcttaccattagctgatttccatcgtagccagttaccatcaagttttgctgatctcaataatattgccgcaccttcacataccgcaggcgcaagtacagcagccgctttcctttctcactttgtgaaagattataaaaaaggctgggtacatatcgactgttcagcaacttacagaaaatcatctgtagagcaatgggctgctggggcaacaggatatggtgttcgttctatcgctaatttattattaacaaaagcaaaataa

SEQ ID NO: 303703 - DNA, 426 bp, Proteus mirabilis; identical to SEQ ID NO: 294498

SEQ ID NO: 303704 - DNA, 5085 bp, Proteus mirabilis
atgaatcgagatcaatttagacagtacacggaaaaaagagggtaccgttggtgtacacttgcagtggtactggcttcagcattagctttaacaggctgtgatgataacaaaacagaagatgagcaatcttcgacgagtgataactcacaaccaacacaagttgcggaacaaaaaagcacatcgcaacaaacgacaacacaacttggtgataaaaccgcagttacaaccaaaacgaataatcaaactgcattaactagccaagaagtgcgcaatgaacttgctcgtcgttatgcaggtaaagaggtgactgtattagatgcctctgaattacaacgcgatggcgcaagtacgatggtagtgactttttcagtaccactcgatcctgaccagaaatttgatgatgttatccgtcttgttgatactaaaaaaggtaaattagaaggggcttgggagctatctgataatctgatggagttacgattccgccatttgccaccttcaacagagttaaacctgactattgatgctcaaattaaaggaattaacgaacgtaaattagtagagccatttagccaaaaatttactacagaagagatttttccatcggtcggctttaccagtaaaggctcattattaccgttagaagcaacggaaggtttgccaattagcgcattaaatgtcgaacaagtcgatgttaacttttttcgagttaaagatgatcggttaacacaatttttaactcaatgggaaagccgctctaatattaactattgggaatcagacgattttctgtcacaagcggatttggtgtatagcgggcgctttgaacttgatacagaaaaaaacacccgtgaaaatgtcttattaccactcaaatccattgaagccctaaaaaaagagggtgtctatatcgctgtaatgcagcaggcaggtaaatactcctataccatgccggcaacggtatttacttttagtgatatcggtttatcagtacatagctaccttaatacgctagatatttttactcaatccctgaaaaatggcgcagcattagacaatattgaaattcgtcttttggatgaaaaaggtaatttaatatctaaaacaaaaactgataatcaagggcatgccacattagaaaagagtgataaagcacgtttattactcgctattcgtaatgggcaaaccagtatgattgatttgcgtaaaccagctcttgatttatccgagtttgatatcggcgggccacaaggttatagcaaacaattttttgtctttggtccacgcgatctgtaccgccccggcgaaaccttaatcgttaatggtttattgcgagatggtgatggaaacccgattaaagagcaacctgttaaagttgacttattaaaaacggatggtcaggtttcccgtagttttgtttggcaacctgaaaatggtttttatcagttgaaactgatgatccctgaaaatgagagtacaggtattcggaaattacgttttgatttaggcgatggcactccacgcttctaccaattccaagttgaagattttatgcctgagcgtatggcattagagatcaccggtaaaaaaggcattttactcagtggtaataatgcttattttgatattaaaggtcgttatctttatggtgcaccggcagcagataatcgcttacaagggcaggtttttttaaaagcttcgcgagaagccgtcagtcaactgccgggttatgaatttggtgccgtaaaagatgaaaatttaagtcgtttattagatgaatttgaacttactcttgatacggatggtgaaggggcattaacggttgataaagaccgttatgctgaagtgaaatcaccgattaatattatcttacaagcaagcttacttgaagccggagggcgtcctgttactcgccgttatcaacaagcggtatggccagcgacacatcttgcgggaattcgccctgtttttgctaaaaaagaggtgtatgactaccgtaatgataaatataaatcaggctatagtgttgatgaaaactcaatggcggagtttgaaatcgtttataccgatcaagagggtaaaaaattacctgcagatgacctaaaagtaagatttatttacgaacgttatgattattattggcgttggtctaattcaaatggttgggagtctggctacaatcaaaaagatctgcaaatggatgagcagactatcaaaatagctaaagatggtaccgcaaaagtggctttccctgttgaatggggctcttatcgtatagaagtggtcgatcctaaaacagaacttgtcagtagcttacgtttttgggcgggctattcttggatggataatacaggcggaaccggggcagtaagacctgatcaagttaaattaaaattagataaagagagttacttaccgggtgaaaaagtcaaactcaatattgcagcccctcatcctggcaaaggttatgtgttattagaatcgagtgatgggccactatggtggcaagagattgatgtacctgaaaaagggcttgatgttgaagtacctattaataaagagtgggcaagacacgatttatatttgacttcggtggtggtaagaccgggggatacatccaaacaagcgacggtaaaacgtgcagtaggtattttgcatttaccactacaagataacaatcgccgtatagatattgcactggatgcacctgaaaaaattcgtccaaatcaagatctaaaaattcggattaaagctaagcccgttgcaggccagccattgccggaaaacatcaatgtattagtgtctgcagttgatacaggtgtcttaaatattaccgactataaaacgcctgatccgtacgaagctttctttggtcgtaagcgttatagcgttgatcaatacgatgtttatggtcagttaattgaaggtgaagggcgtttagccaacctacgttttggtggtgatggaagcgaagaaagcgcattatctcgtggtggtaaaaaaccattaacagatgtgcaaatcattgctcaacaagcaacacctgtaaaattaaatgcacaaggtgaaggtgaggtttctttacctatacctgagtttaatggtgaagtccgccttatggctcaagcatggactgccgataaatttggtagccaagaaggtaaagttgttgttgccgcgccattagttactcaactctcattaccacgctttatggctgggggagatgatgcgttactgtcattagatttaactaacttaacggatgcaccacaatctattacgttaaattatacggcatcaggattagttgatttagcgggtgtcgatagtaaaaccgtttcattatcgaaaggtgaacgaactcaagttcaaatccctattacggcaaaacatggatttggccaaggagaattttccctgtctatttatggtattaaagtacctaatgaagagataaaaccttatcaaaatacttggaaaataggtgtacgccctgcgtatcctgctgagacaatacattacgccaatacattagcagatggtgagtcttggcgcctaccaaacgaagcattaaatcaatttaatcgctcaacgcttgagggggaattattacttaccagtcgccctccgttacaggtagcgcgttatgttagagagttatttgcatatccttatggatgtcttgagcaaactgttagtggattatatccatccttgtattcaacagagaaagagttgaagcaattggggatcaaaacacaaacagatatgcaaagaaaagaagccatagaaaaagggattgctcatatcttaacaatgcaaaaatccgaaggaggatttgccttgtgggctcaaggtgggcgtgaagagttttggttaacggcgtatgcaacagatttcttatttagagcgtctcaacaaggttatgaagttcctactgatgcattaaaacgggcaaatgatcgtctactacgttatttacaagataaaaacattgttaatgaagagtatgtggttaaccaagatgcggctcgattctcagcaagagcatatgcagctttagttctggctaatcagcaaaaagcccctttgggagaattgcgccgtttatatctagaacgtaatcaagcgggtagtggtttagcgcttgtgcagttaggtgttgctttgaaattgatgggagataactctcgcgctgaaagcctaattgctgaaggggtcaccatgccacgtaaatataattacggtttaggtgattacggcagtactattcgtgaccaagcgttgattattgcgctactcagtgaaaacaatttggaaactcaaactcgtgatgccagtgttattacattatctgataacttaacagggcgtgaatggttctctacacaggagagtaactcactataccttgctggtcgtttctttattgatatggcagagaagccttgggaagtaaccattaatcgtcaagtgccagcaatgagtagtgatcgcgcagttaatgaagcattgacagcaacacaattgcaagaaggtttagagctaaacaaccaaggtggtacaaccatttactctcgaatgaatgttgtcggatatccaaaagttgccccagcgccttatagcaatgtattgaagatcaatcgtagttattacgatctaaaaggcaatcgagtcgatcctaatcgcttacaaagtggtgaaatgctggtggtaaaattagaggtttcagctaatagagatgtacctgatgccttagtggttgatctattacctgcggggcttgaaattgaaaatcaaaacttagcatcaagtagcgcaagcttaagcgatagtgctgctgatttgcaggagtttattgatgatatgggacaagccaatattaaacatcttgaatatcgtgatgatcgttttgttgccgcaatagcggttgataaatatcgtcctacgacattactttacttagcaagagcggtaactccggggagttatcaagtaccgccaccgcaagttgagtcaatgtatgtgccttattggcgtgccgtaggggcaacaaaaaataaaattgatgttgtgccttaa

SEQ ID NO: 303705 - DNA, 2322 bp, Proteus mirabilis
atgaaactaggatataagcggttaatcgccgcgagcgttatttttctattagtaacaccattattgctatggatagcagataagatctggccactgccagatcccgagcctcaaatcgccaccatagtaacggctgaagatggaacaccactttggcgttttgctgataaagaaggaatatggcgttatcacgttaccctttctgatgtttcccctgaatatttgcaggcgttgatagcttatgaagatcgctggttttatcagcaccccggtgttaaccctatagctattttacgtgccgcatggcaagacttaagctcgggaaaaattgtttctggaggcagtacgctttcaatgcaagttgcacgtttgattgacccccactcacggactttagggggaaaattaaaacaattatggcggacattacagctcgaatggtattactcaaaagatgagattttagaaatttatcttaaccgtgcaccttttggtggcactttagaagggattggcgctgcaagttgggcctatttaggtaaatctcccgctgatttatcagcaggtgaagcaacattaatggcggtattacctcaagcccccagtcgtttaaggccagaccggtatccagagcgtgctcaagctgcacgggataaagtattagatagattagcggaatatcaaatttggcccaaagagaaagtggctgaaataaagcaagagcaagtgctacttgcaccaagacaaacgccacaactcgcgccattattggctcggcgtatgtataacgagcaaaaagcgccggtgatcacaaccacgattgatattaatcttcaacgacaactagaagagctagccaaacagtggaaatatcagctagccgataaaacttctctggcaatacttgtggtcgatcacacggatatgagtgttaaaggctatgttggatcggcagactttaatgataatcaacgctttgggcatgttgatatgataagtgcatggcgttcaccgggatcaactttaaagccttttatttatggtcttgctttggatgaaggattgatccatgcagaatcactattacaagatgttccacgccgttttgaagattaccgtcctggtaattttgatactggatttaacggtgccgtgagtgccagtgaagcccttagtcgttcattaaatttacctgccgttcaattaatagaagcttatggcgcaaaaaaatttgcagctaagttgcgacataatcaccttgaaatgcgttttccttatggctctgaacctaatttagcgcttattttaggaggaacagcaacacgaatggatcaattagtggcgacttttagtgcgcttgcaaggcatggaaaaacagcgccgttacgttttacgccagagcaaaccatcaatgaacgtatgttaatgtcacccggtgctgcgtggatcattcggcgaattttagcgggagaggcacggcctcgtcctgatagtgctatttcagcggttgttcctttggcttggaaaacaggaacaagttatggttatcgtgatgcatggtcgataggcgttaatgcgcgttataccattggtgtttgggtggggagacctgatggcacacctgttgcggggcagtttggatttgcaactgctgtaccgataatgaatcaagttaataatttattgacgagttatttttatcaaaataaacagcggcctcctgttgatcctaggccaaatagtgtctcagccgcagctatttgttggccaacgggaaaagctttgcctaaagaagatagtaactgtcgagtcagccgacgaagctggatccttgataatactattcccccaacactattgaatgaaagccaagagggcattttaggcatcaatgaaaaagtatggatagataaagaaggaaaacgtacagggcctaattgtcctggtgctcaattaaaggatattgctttatggccgatagcattagatgcatggttgcctgaaaaagagcgtagagcaaaacgattaccaccaatttcattaacatgtccaccgattaaagaagatatgatccccttgtatatctctgggataagaaaaggggatttattgcgtccattgcctggtgaaactcagcttgaaataacggtttctacacaagggggaagtggtatgcagtggtggtttttaaatggtgaacaaatcggtaaaactgaaaatggggcaacgttctcttatttattagaaaaacgtggcaaataccaactttcggtgcttgatcttagcggtcaaacggatatggtgaatttcagttttcgttaa

SEQ ID NO: 303706 - DNA, 426 bp, Proteus mirabilis; identical to SEQ ID NO: 294501

SEQ ID NO: 303707 - DNA, 1182 bp, Proteus mirabilis
atgacccaatctaccactccagcgccaagcgcttctgtcgctgtttctaaagaaaatactgtgaatcaaaaaacaaaaatcaatctgttagatttaaatcgtaaacagatgcgtgagctttttgtctctatgggcgaaaagcctttccgcgctgatcaaatcatgaaatggatataccattattgctatgatgattttgatcagatgacagatatcaacaaagtgctgcgtgcgaagttaaaagagattgccgaaatcaaggcacctgaagtgtctgaagaacaacgctctgcggatggcactattaagtgggcgattaaagtaggctctcaacaagttgaaacagtctatattcctgaagatgatcgtgcgacgttatgtgtttcatcacaagtgggttgcgcgttagagtgtaaattctgttcaacggcacaacaaggttttaaccgtaaccttaaagtttctgaaattatcggccaagtgtggcgtgctgctaaaattattggtgctttaaaagagacaggccgtcgtccaatcactaatgttgttatgatgggaatgggtgaaccattacttaaccttaacaatgttattcctgctcttgaaattatgatggatgactttggctttggtttatctaaacgtcgagtcaccgtgtctacatccggtgtcgtacctgcattagataaattagctgatgcggttgatgttgctttagcgatttcattacatgcaccaacagatgatattcgtgatgaaattgttcctattaacaagaaatataatattgaaatgtttcttgatggcgtgcgtcgttatattgctaaatctaatgcaaaccaaggtcgagttactgttgagtatgtcatgcttgatcatattaatgacagcactgaacaagcacatcaattagcagagtgcttaaaagatacaccttgtaaaatcaacttaattccatggaacccgttcccaggcgcaccttatggacgcagttctaatagtcgcattgatcgtttctctaaagtgttaatggaatatggtttcaccactattgtacgtaaaactcgtggtgatgatattgacgctgcctgtggtcaacttgctggtgatgtgattgaccgaactaagcgtactctgaaaaaacgtctgcaaggtgaaccaatttcagtaaaagcagtctga

SEQ ID NO: 303708 - DNA, 435 bp, Proteus mirabilis; identical to SEQ ID NO: 294503

SEQ ID NO: 303709 - DNA, 963 bp, Proteus mirabilis
atgaatactgaaaacaaaaccgaagaagtgaaattaacagcgggtcaacttttacgtcaggcacgtgaaaaagcggggctaactcagcagactgttgctgatcgactttgtttgaagttaacaacagtatgtgaaattgaagctgatactatctcttctggtattgcaccgacatttttacgtggttatatgcgctcttatgcaaaacttgtcggtgttcctgaaagcgcaattctaggtctaattgatcaacaagccccaataaaacaagtcaaagtcacaacaacacaaaattactcattgggtaagcgtcataaaaagcgtgaaggctggttgatgaaattgacttgggttattgtaatagcaatgatagctttagtcggtttatggtggtggcagggtcatcaagccgatcaacaagaattagtctctatggcttcgcaagacataggacaaaatagtccgcaagaaaacaccaatacgatagaatctcctttatcaaccttagataataatagcccatcatctgagggtgaaaatgtacaagtgcctgcttctccattagtagataatcaggctaataaggttgccgagccatcagtaacagatgccacacctgaggcagaagttaaaacagttccattaccggtgtcaccattaaccacatcaacgacttctcgtgctgattctgctgaaggcaattcaacacccgcaccaattgtggaaaatcaactggtcttgatgtttgatggtgaatgctggttagaaattcgtaatgctcaaaataaagttttatttaatggtattaagaaagccggtgaccgtttggaatttaatggtgagcaaccttataaactaaaaataggcgcaccttctgttactcgtttacagtttaatggtgaagctgttgacttaagccgttttactggaaaaatagcaaaaataacagtaccgagcgcttaa

SEQ ID NO: 303710 - DNA, 1122 bp, Proteus mirabilis
atgcataaagaatcacctattattcgtcgtaaatcgacgcgaatttatgttggtaatgtacctattggcgatggggcacctatcgcggtacagtcgatgacgaacacacgaacaacagacgttgaagcgactgtaaaccagattaagtctctggaacgtgttggggtggatattgtacgtgtttctgtaccaactatggatgcggctgaagcattcaaactaattaagcaacaagtgaaagtacctttggtcgctgatattcattttgattatcgtattgcacttaaagttgctgaatatggtgtcgattgtttacgtattaatcctggtaatattggtaatgaagagcgtattcgtcaagttgtcgattgtgcccgggatcgtaatattcccattcgtattggtgtgaatggggggtcactagagaaagatattcaagaaaagtatggtgagccaacccctgaagcgctagttgaatcggctatgcgccacgttgatatcttagataaattgaactttgatcagtttaaagtcagtgtaaaagcttctgacgttttccttgctgttgattcttatcgtttattagcgaagaaaattgatcagcctttacatttagggatcaccgaagctggtggtgcaagagccggatcagtgaaatcagctattggccttgggatccttctatcagaaggtattggtgatactttacgtatctctttagccgcagatccggttgaagaagtaaaagttggctttgatatcttaaaatcattacgtattcgctctcgtggtatcaattttattgcttgtccaacatgctctcgtcaagagtttgatgttattggtacagttaatgaattagaacaacgtcttgaagatatcattacaccaatggatgtttctattattggctgtgtggttaatggtcctggtgaagccgaagtttctacactaggcgtaacaggggctaaaacacgcagtggtttttatgaagacggtgtaagacaaaaagagcgtcttgataatagtaatatgattgatttattagaggcgaaaatccgtacaaaagcggcaatgcttgacggcaacctccgaattaatataaatcaattggataaataa

SEQ ID NO: 303711 - DNA, 1284 bp, Proteus mirabilis
gtggcacaaaaaatccaagccattcgtggtatgaatgactacctacctgctgatacgcgggtatggcagaaaatcgaaaatacgctaaaacaaattttagccggttatggttttagtgaaattagaacacctatcgtagagcatacccctctatttcagcgagcaattggtgaagtgaccgatgttgttgaaaaagaaatgtatacttttaccgatcgaggtgaagacgcacaaagcttaaccttacgtcctgaaaataccgcaggttgtgtccgcgcaggaattgaacatggtttactttataaccaagagcaacgcttatggtatttagggccaatgttccgttatgaacgccctcaaaaaggtcgttatcgccaatttcaccaattaggtgcagaagtatttggcctacaagggcctgatattgatgctgaactgattatgttaacggcacgctggtggaaggctttaggtattgcagagcacgtgactttagaactgaactctattggttcactcgaagcgcgggcaaaataccgtgaagcattagtcgcatttttagagcaacacgttgatcaattagatgaagattgcaaacgtcgtatgtattctaacccattacgtgttttagactctaaaaatcctgaaattcagactttattgaatgatgcgcctgaacttttcgattatcttgatgacgaatcaagagaacactttgatggtttatgtgcattacttgatgctgtaggtattacttatcgtgttaatcagcgtttagtccgaggcttagattattataaccgtactgttttcgaatgggtaaccagtgcattaggttcacaaggaacggtatgtgcgggtggtcgctatgatgggttagtgaaacaattaggtggacacccaacgcctgcggtcggttttgccatggggatggagcgcatgatcttattagttcaagcggttaatcctgagtttgttgctgatactcatgtcgctgatgtttaccttgcgtcttttggtgataatagccaaagtgcagcattaatgctggcagaagaaatccgtgatcaattacctacattgcgcttaatgaccaatcacggtaaaggcaattttaaaaagcaattaggacgtgctgataaacatggtgctaaaatcgcgttaattttaggtgaagatgaaattaacgctggcacagtagccgtgaaagatttacgttcaggtgaacagaccattgtatcgcgtagcgaactggcccaacaattgacgctgttattaggttaa

SEQ ID NO: 303712 - DNA, 621 bp, Proteus mirabilis
gtggaagtttatagcaccgaaaacgaacaagttgatgcaattaaacagtttttaaaaaattatggtttaacgatcattctcgctattgtcattggcgtgggtggaatttggggttggaaatattggcaatcacatcaagccaaccgtctacaagagagtgcgggtgaatttgcaacaataaatgaagcattaactaaaccaacgcctgaaaatatcgcattagccgaaaaatttgtttctgaaactaacgatatttatggtgctttagcctctttagagttagctcaattagcgattgatgccaacgatttagccaaaggtgaaacacaccttactaaagcaatatctatggtaaagaatgaagcatttgcagatatgcttaaccttcgcttagcacgtgtgcaactggcattagataaaactgatgctgcgttaatttcattagagcaagtgaaaagtaaagcatgggatggaatgaaaaattatatccgtggtgatgtattagcgaaaaaaggcgataacgcaggtgcagccgccgcttatcgtaatgcattgaatgatgaaaatgcaggcgctattcgttcattggttgaacttaaactcaataatttatccaattaa

SEQ ID NO: 303713 - DNA, 1173 bp, Proteus mirabilis
atgcaactgcgtaaaactctcctgatcggtctactagcatcagcattattagctgggtgttctagtgagcaggataatgtgacaatgtctccattgcctgaggtgcagagccaatttaccccttatgtggtatgggacaaatcggttggcaatggtattggaaaatactattcccacttgtcaccagcatgggatggttcagttgtgtatgtcgctgatcgccatggggtagttaaagcattagaattagaaacgggtaaagagatttggtctcaagatctctcaactaaaaaaggtttcttctcctctaatgaatcagcattactttccggtggtttaaccgtctctggtactcgtgtttttgtcggcacagaaaaagcaaaagtgtatgctttaaatacagatgatggctctattgattgggagacagatgttgccggagaagcgatttccaaacctgttgttagtgatggtttagtgcttattcataccagtaacggtatgttgcaagggcttgatttgctgacaggtgaagtatcatggactgtcaacttagatacaccatcattatccgtacgtggtgaatcagcaccagctgttgcttatggtgcagcgattgtgggcgctgataatggccgtgttagtgcggtggtgttatctcaagggcaattagtttggcagcaaaatatttcacaagtgaaaggttctactgagatcagccgcttaaatgatgtcgatattacgccaattattgatgaaaatactgtttatgccatggcttacaacggtaatttagtcagtctagatatgcgttcaggacagatcatctggaaacgtgatttaggttcagttaatgacatggtacttttgggtgacaatctataccttgttgaccaaaatggccgagttttagctgtgcgcaaatctgatggtgtgacattatggacacaagaagatctactgcaccgtaatttaaccgccccggctatcgttgatggttatttagtggtgggagatgcagaaggctatctccattggattgataccagtacaggcaaatttattgctcaaaataaagtaaatagctcaggtttattaagccgtccacaggctgttcaagataaactgatgatccaagcacgtgacggtaaactttatctatatcgtcggtaa

SEQ ID NO: 303714 - DNA, 1491 bp, Proteus mirabilis
atgatacccgttattgccttagtagggcgccctaatgtgggaaaatccacattatttaaccgactaacacgcacaagagacgcattagttgcggattttcctggacttacccgtgaccgtaaatatggtcgtgcagaattagacggtgaagagtttattatcattgatactggtggtattgatggtgcagaagagggtgtagaaacccatatggcatcacaatcactgcaagccattcaagaagccgatattgtgctatttttagtcgatgcgcgagcaggattaatgccagccgaccaaggtattgctaaacacttgcgtggcgttgagaaaaaaacctatttagtggcgaataaaacagatggtatcgatattgataccgccttggctgatttctactctttaggattaggggaaatattccctattgctgcctcacatggtcgtggtgtttctcaactgattgagcaagcgttgttacctattgtgggtaaagtcgtcgaagaagagaaagaattaacagaagaagaagagaatgccgcttattgggctgctttagaagcagagcagaaagagcaagaagaagaggaagaagaggatgatttcgatccgacaacacttcctgttaaattagctattgtaggccgccctaatgtaggtaaatcaactctgactaaccgtatgttaggtgaagagcgtgttgtagtttacgatatgccaggcactacccgtgatagtatttacataccgatggagcgtgatggtaaggagtatatccttattgataccgctggcgttcgtaaacgcggaaaagtaaaagaaacggtagaaaaattctcagtgatcaaaacattacaagcgattgaagattgtaatgttgcactacttgttattgatgctcgtgaggggatttcagatcaagatctctctttattaggttatattcttaattctggacgctctttagttattgctgtcaataaatgggatggtatgacccaagaagatcgcgaacaagttaaagatatgcttgatctcaaattaggttttgttgattttgcccgcgttcattttatctcggcattacatggtagtggcgttggtaatctgtttgagtcgattcaagaagcctatacttgcgcgacacgtcgtgttggtacatcaatgttgacgcgcataatgaagatggcagaggatgatcaccaaccccctcttattcgtggacgccgtgtaaaaatgaaatatgcccatgctgggggatataacccacctgtcgtggttattcatggtaaccaagtgtctgatttacctgatagctataaacgctatttaatgaattatttccgtcgcacactacaagtgatgggaactcctatccgtattcaatttaaagaaggggaaaacccttatgcggataagaaaaataaattaacagcttcgcaaatacgtaaacgtaagcgtttaatggctcatttaaagaaatcaaaataa

SEQ ID NO: 303715 - DNA, 354 bp, Proteus mirabilis
atgggctttgctatttttttactttctggctgtgccacaccagaaaaatggcaagtaaatatgaaaaatcccacacctttagatatcgctaaaaatctatgcatgcaagaagcaaaacaacgctaccctgagcattatttgagttcaacgccaaattatagctatccttcttcttcaacgataacaatagatggtaaagaagttactattcctaattcaaattatcattcctattctcgttatgatgccaatgaatcagagcgtaaacagtattttgatatttgtatgagaggagaggggtgggaaaataaaaataaagtgactggattactcgcctttttatttaatgactaa

SEQ ID NO: 303716 - DNA, 909 bp, Proteus mirabilis
atgagtttacctgatattcatcgtgtgcaatcattttttttgtcgttgcaagatagtatttgccatgctattgaaaatatagaccaaaaagcaacctttcagcaagataattggcaaagagaagctggcggtggtggtcgtactcgagtgctcacccaaggtgctatttttgaacaagcgggtgttaatttttcccatgtttatggagatgccttgcctgcatcagccacggctcatcgccctgaattaagcggtcgtcgttttcaagcaatgggcgtttcattagttattcaccctcttaatccctatattcctacttcacatgcaaatgttcgtttttttattgctgaaaaagagggagaagctcctgtatggtggtttggtggaggctttgacttaacgccttattatggatttgaagaagatgttatccattggcataaagtggctaaatctgtgtgtgatccctttagccaagattattatgctcgatataaaaaatggtgtgatgactatttttatttaaaacatcgtaacgaaccgcgtggtgttggtggtctattttttgatgacttaaatactcctgatttcgatcactgttttgaatttgtacaacgtgtcgggcagggttatctggatgcctacttgccgattgtcgaaaaacgcaaatctataccctggggagagcgtgaacgtcaattccaactttatcgccgtggccgttatgtcgagtttaatttggtttgggatagaggcacgctatttggtttacaaagtggcggacgtactgaatccattttaatgtcaatgccaccattagttcgctttgcatatgattatcgccctgaacctaatactcccgaagctaagctgtatactgattttttaattcacaaagagtgggtatag

SEQ ID NO: 303717 - DNA, 438 bp, Proteus mirabilis
atggaaatacgtgtattccgtcaagatgattttgaggcaatcattacactttgggaacgttgcgacttgatctcaccagaaaatgatcctgaaattgatattgaacgaaagattaaccactcccccgatctctttttaatcgcagaggttgctggcgaaatagtcggtagtgtaatgggaggctatgatggtcatcgtggctcgctttactatttgggcgttcatcctgagtttcgcggtagaggaattgccaatgcactaatctctcggctagagaaaaaactcattgcaaaagggtgtccacaaattactttaatgatccccgaagagaacgatgccactatttgtatgtttgaaaagcttctctatgaagatcaaaatcaagagaatacggcttacactaaacgcctaattatcgatcaggacttcgatctttaa

SEQ ID NO: 303718 - DNA, 591 bp, Proteus mirabilis
atgcctaaattttggttacccttgtgcttaagcacaagtgtcttgctattaagtggctgttcatccatggggggaatgtctttttctgcacttaatccaatgaattggttctcaaatgagacgttaacggtttctgcaaatggattagataatatcaccgcttcaacggcagtgacagagcaagcgatcgaaaaagagctgggtagccgtttccattaccgacaaggaatggaaatgcaacaaggcaatattatagttattgtgcaagcacttgaagatgaaaaagtacaagtggctttttatggcaaagaaaagggcacagtagataaaatcacggtatctgatcctaatgcgaaaacagcgtggggaacgacaataggtacaccatttaaagatatttataaaaaagcatttggtatgtgcagtaacgggccgaaagtcgataaacaaaaaaccattcaatgccaatcagaacaagcaaaatcagtgagctatgtttttgctgggcaatgggatggccctgatggtctaatgccacccgatgaaacattagcaaattggcaggtaacacaaattgtttggcaaaaatag

SEQ ID NO: 303719 - DNA, 897 bp, Proteus mirabilis
atgtctcatgcacaaagcggtattttagtcgcacatagtaaattcggtctatttattgaagcaatggtggtgggggaaattgatcaactacgtcaaggctgccaacaatttatgcaatctcttagcgaattacaaaaacagtatcctgatgcttcattaggtgccgtggtagcttttggttcagatctttggaaaaaattatcagataataatagtgcgccagagttaaagccatttcgtccattaggcaaagggttagctcctgcgactcagcgcgatatgcttatccatatccaatccatgcgtcatgatgtgaatttctcattagcgcaagctgcaatagctgcttttggtaacgtgctccaaatagaagaagagatccacggtttccgctggattgaagagcgtgatcttagtggttttattgacggctcagaaaatccagttggtgacgagcgctatggtgttgctttaattaatgaaggtattgatgctggtggtagctatgttttagttcaacgctatgagcataacctaaaaaaatgggcgcgttttagtgaatcagatcaagaaaaaatgattggtcgtactaaaaaagagagcattgagttggatgaatcagaacgcaatattacctctcatgtatcccgtgttgctattgaagaaaatggtgaagagttagcgattttgcgtcatagcttaccttatggaactgctagtggtaaacatggcctctatttcttagcttactgtggtcgtttatataatattgaacagcaattactcagtatgtttggtgaagttgatggtaaatacgatgatttactgcgtatgagtaaacctgtgacaggtagctactatttcgctccttcttatgaagtattagccgctctgtaa

SEQ ID NO: 303720 - DNA, 1032 bp, Proteus mirabilis
atgggtactataatgaagaacaaaacaatccgaacttttgcattacaggcaaccgttgcattgtctttggttgcgagtagttatgcaaatgcagctcaattacttaatagctcttacgatattgctcgcgagttatttacacagcttaatagtgattttaaaacccaatgggatgctcaacatcctgatgacaaagtcactatcaaacagtcgcatgctggctcttctaaacaagcattagccatattacaaggtttacctgcggatgttgtcacttataaccaggtgacggatgtacaaattttgcatgataaaggcaagcttattcctgctgattggcaacaacgtctacctaataatagctcaccttattattccaccatggcctatttggttcgtaaaggaaatcctaaaaatatcacttcttggcaagatttgacccgtgaagatgtcaaagtggttttccctaacccaaaaacatcaggtaacggtcgttatacctatttagccgcatggggagcgtttgaaaaagcttatggaaatgaagcgcaaacccgagatgctatgacaaagttactcaaaaatgttgcggtatttgataccgggggacggggggcaacgacctcatttattgaacgtggacttggtgatgttttaattagttttgagtctgaagtaaataatattcgccagcaatatggtgaagatgattatcaagttattgtccctcctgtagatattttagcggagtttcctgtggcatggattgataaaaatgtgcaacgcaataaaacagaaaacctcgccaaagcttacctaaattatttatatagcccgagagcgcaggagatcatcacacaatttaactatcgcgtaaatgataaagcggtgatggccaaaaaagcagatcaatttccagcgacttcattatttaccattgaagatgtgtttggtgattggaaccaagtgatgaaaacgcattttgctacagatggcacgctagataaattattattagaaggacgccaataa

SEQ ID NO: 303721 - DNA, 834 bp, Proteus mirabilis
atgtttgccacagccagcaagcgagtattacccggatttgggcttagtttaggtagtacgcttttttatacttgtttgatcttattactacctatgagtgcgctggttgtgcagttatctgaaatgagttgggcacaatattggacggtgataacccaccctcaaattgtggcagcgtataaagtcactttgttgtcagccggtgttgcaagtatttttaatgctatttttggcatgttattagcgtggatcattacgcgctatcgtttccccggcagaaaatttcttgatggattaatggatttaccttttgccttacctacagcggtagcgggattaaccttagcaacgttgttttctacacaaggatggtatggcttagtgttagataagtttgatatcaaggtgatcaatacatggattggtattgctgtggcgatgtcttttactagtttgccgtttgtggtcagaacggtgcaacctgttttagaagagttaggccctgaatatgaagaggcggctgaaacattaggggcaaaccgttggcaaacgttccgtaaagttgtgttacctgaattgtctccggcgttattagccggtacggcgctctcttttacgcgtagtttaggggaatttggtgctgttatttttattgctggcaatattgcatggcagaccgaagtggtttctttgatgatatttattcgattacaggagtttgattatcctgcagccagcgcggtcgcttctgttattttattggtttcattagtcttactgttttcaattaatggattacaaagccgctttggcaagcgattaagggggcattaa

SEQ ID NO: 303722 - DNA, 843 bp, Proteus mirabilis
atgtcggatatagcgcaacaacgctctctttatcgtcgccaaattgattgggtaaaatggggattgatccttacaggcgttgtgttatccattttatttttagtggtgcctattgcgtggatctttatgactgcgttttcaaaaggcatagaaatatttaccgacaacttgctagatagcgatatgttacatgctgtttggcttacgctacttatcgctttaattactgtaccgataaatatgttgtttggtattagtatggcgtggcttgttacgcgctttcgttttccggggcgtcagtggttaatgacgctgattgatatcccatttgcggtatctcctgtcgttgcgggactgctctatctacttttttatggtagcaatggttgggcagggcagtggttggaacaattcgatattcagttaatgttctcttggcccggtatggtattagtgacggtatttgtcacttgtccttttgtcgtgagagagcttgtcccggtgatgatgagccaaggaagccaagaggatgaagctgctgtgttattaggtgccagtagttggaaaatgttttggcgagtgacattacctaatattcgttgggcattgctctacggtgtggttttaacaaatgcacgtgctataggggaatttggtgccgtctctgttgtctcgggggctattcgtggagaaacctattcactgcctttacaggtcgaacttttgcaccaagactacaacactgtgggggcttttacggcagcagcattacttgccatgatggcaattattacattaatggttaaaagtgcgttgcaatggcatttagaacgtcagcaataa

SEQ ID NO: 303723 - DNA, 1089 bp, Proteus mirabilis
atgagtattgaaattaatcatgtcacaaaatattttgatcgcactgaagtgttgcatgacgtgaatttaacggtcaattccggtgagatgatggcgctattggggccatcaggctcaggtaaaactactctattacgtatcattgcaggacttgagcatcaaacggaaggtaaaatctgttttgcagggcaagatgtcagtcgcttacatgcccgcgagcgcaaagttgggtttgttttccaacactatgcgctgtttcgccatatgacggtatttgaaaatattgcctttggcttaagcgtattaccacgtcgcgaacgtcctaacaaagccgtgattgataaaaaagtcacgcaattattagagatgatccaactgcctcatttagcacagcgttatcccgcacaactttcaggagggcaaaaacagcgcgtagctttagcgagagcattggctgtagagccacaaattttattactcgatgagcctttcggtgcgttagatgccaaagtgagaactgaattacgcagttggttacgggaattacatagtgagcttaaatttaccagtgtttttgtcacccatgatcaacaagaagcaatggaagtcgctgatcgcatcgttattatgggaaatggcaaaatcgaacaagtgggtacaccgcaacaagtttggcacacgcctgaaagtcgctttgttttagaatttctcggagatgttaatcatctccaaggtgaaattaatggtgcgcaattacaaattgctggctatcacttacctttatcggttacgccgctctatcaaggcaaagttgatgtttttttgcgcccttgggaaatttcacttaacccgcatagtgatagcttatgtaaacttcccgtcaaagtaatagaagtgactcctaaaggacactattggcaattggttttacagcctattgagtggggaaatacgccaattagcgcggtatggaatgatatgacatcaataccccataaaggtgatatttactatatgggtggtgcaaaagcgcggttatatgcacaagatcgtcccttaacaacagtttcactggcatacacagcttaa

SEQ ID NO: 303724 - DNA, 882 bp, Proteus mirabilis
gtggcaggcttagaacaatttattggtaatacaccattggtcaaattacaacgactttcacaaggattagatgcagaaatatgggttaagcttgaaggcaataatccggcgggttctgtgaaagatagagccgcgttatcgatgattgagcaagctgaattacgcggtgaaattaaacctggcgatacattaattgaggcaaccagtggtaatacagggattgctttagcgatgatagcggcagtaaaaggttatcgactaaaattattaatgccggaaaatatgagtaaagagcgtcaagcatccatgcaagcgtatggcgccgagcttattttggttagccgcgaaattggtatggaaggggcgagagatttagcgcaagaaatggagcgtaaaggtgaagggaaggtattagatcagtttaataaccccgataaccctcgagcgcattttacttcaactggccctgaaatttggcaacagactcaagggcgtattacccattttgtttctagcatgggaacaacaggtacgataactggggtggggagttacctaaaaacacaatcggacacagtaaaaattgtcggtttacaaccggaagaaaaaagtcaaattccgggtattcgtcgttggtctccagcctatttacccggtatttttcgaaaagagttggttgatagtgttatagatatgtcccaaacagaagcagaacaaaccatgcgcctattagcgagtaaagaaggtatattctgtggcgttagttctgggggagccgtagctggtgcaatacgcgttgctaaagagaacccaggggctgtgattgtggcgattatttgtgatagaggcgatcgctatttatcaactggggtgtttggttga

SEQ ID NO: 303725 - DNA, 510 bp, Proteus mirabilis
atgggtctgtttgataaattaaaatcactggtttcagaggaaaagaaaggcagtggcacgattgatattgttgcaccactttctggtgaaatcgtcaatatcgaagatgttcctgatgttgttttcgctgaaaaaattgtaggtgacggtattgctatcaaacctgctggtcataaaattgttgcaccagttgatggtactatcggtaaaattttcgagactaaccatgctttctctattgagtctgacaacggtatcgaattatttgtccacttcggtatcgacacagttgaactaaaaggtgaaggatttaaacgtatcgctgaagaaggtcaacaagttaaagtcggtgatactgttttagaatttgatttagcggtattagaagaaaaagcaaaatcggtattaacaccggttgtgatttctaatatggatgaaatccaaggtttaactaaaatgacaggcccagtaactgttggtgaaaccgttgtaatgcagatcaaaaaataa

SEQ ID NO: 303726 - DNA, 1728 bp, Proteus mirabilis
atgatttcaggaattttagcttcaccgggtatcgcatttggtcaagctcttctacttaaagaagaacctattattattagccaacgtaaaatccaaagtgacgaagttgacacccaaatcgaacgttttaaagatggtcgtaataaatcagcgcaacaactagaaatcattaaagcccgtgctgaaaaaaatcttggtgccgataaagctgagatttttgaaggccatattatgttattagaagatgaggaactcgaacaagagatcatatccctcatcaaaagtgacaagaaaaccgcagaagcagcggttcaatctgttattgaagatcaggcaaccgcattagaagccttagatgatgagtacttaaaagagcgtgcggctgacgttcgtgatattggtaagcgcttaatgcgtaatatcttagagatgccaattatcgatttaagtgctatttctgaaaaagtgattttagttgctacagatttaacgccatcagaaacagcgcagcttagcttagacaatgtgttaggctttatcactgacttagggggtagaacatcacacacctctatcatggcgcgctctttagagatcccagcgattgttggtacatctaatgcaacagaaaccattaaaaaagaagattatctggttcttgatgcgattaacaataaaatcattattaatccttctgatgaagagctcgaagcattaaaggctatcaaagaagagtacctacatgaaaaagaagagctggcaaaactaaaagatttaccagcaattacccttgatgggcatcaagttgaagtttgcgctaatataggtactgtacgtgatgtcgcaggtgctgagcgtaatggtgcggaaggtgttggactctatcgtactgaattcctatttatggatagagattccttaccaacagaagaagagcaattccaagcttataaagctgtggctgaagctgtaggcagtcctgcggtcattatccgtactatggatattggtggcgataaagacttaccttacatgaatttaccgaaagaagagaatccattcttaggttggcgtgcaattcgtatttgtcttgaccgcaaagagatccttcatccacaattacgtgctatcttaagagcgtctgcttttggtaaactacgtattatgtttccaatgattatctctgttgaagagatccgagcattgaaagcggaacttgaaatactgaaaagccagcttcgtgaagaaaataagccttttgatgaatctatcgaagttggtgttatggttgaaacgccagcagcggctgttatggctcgccatatggcaaaagaagttgactttttcagtattgggactaacgatctaacacaatatactctggctgtagaccgtggaaatgagctgatatctcatctatataatccaatgtcacctgctgtacttaatctgattaaacaggtgattgatgcatcacacgctgaaggtaaatggactggaatgtgtggtgagcttgccggggatgaacgggcaacaatgttgcttctgggcatgggattagatgagtttagtatgagtgctatatcaattcctcgcatcaaaaaaattattcgtaacgccaattttgatgatgcaaaagcactggcagagcaagcacttgctcagccgactgcaaaggaattaatggacttagtagaaacttttactaaagaaaaaacactgtgctaa

SEQ ID NO: 303727 - DNA, 258 bp, Proteus mirabilis; identical to SEQ ID NO: 295502

SEQ ID NO: 303728 - DNA, 954 bp, Proteus mirabilis
atgagcaaaattttcgaagataactcgcaaactattggccatacccccctagttcgtttaaaacatttcggtaatggcaatatcttagctaaagtagaatctcgtaatccaagctttagtgtaaaatgccgtatcggtgcaaatatgatttgggatgcagaaaaaaaaggtatcctgaaacccggcgtagagctagttgagccaaccagtggtaatactgggattgccttggcttatgtagctgctgctcgtggctataagctgacactgactatgcctgataccatgagtattgagcgccgtaaattattaaaagcattaggtgctaaccttgtgttaactgaaggcgctaaagggatgaagggagcgattgataaagcgaacgaaattcgtgatagcgatcctagccgttaccttctactacaacaatttagtaatccagcaaacccagaaattcatgagaaaaccacaggccctgaaatttggaatgacactgatggcaaagttgatgtagttatcgcaggtgtcggaacgggtggtaccatcacgggtattggtcgctatttgaaaaatacccaaggtaaagctgtcaccatggttgcggtagaacctaaagattctcctgttattagccaagcattagcaggtgaagaaattaagcctggtccacataaaatccaaggtattggtgcaggttttatccctgaaaacttagagttatcactattagatcgcgtgatccaaattactaacgaagaagcatttgaaacagctcgtgacgttatgaccaaagaaggtattttagcgggtatttcatccggtgcggcaattgcggctgcagtgaaattagctaaagagccagaatttgctaataaggaaatcgtagtgattttaccttcttcaggtgaacgttatctcagcaccccactttttgctgatatctctgacagctaa

SEQ ID NO: 303729 - DNA, 771 bp, Proteus mirabilis
atgacaaatttgacagaatcgaccaaaaatttaaatggatttcactattttgcacttgggtggcgattaattactcgcccgggtctaaaacgttttgttattttacccttacttgccaatattattattctcggtagtgccttttggtggttatatggccagattggtgaaatggtcaattggatgatggaaaaagtccctgattggctacagtggttaagctatgttatctggccactgtcagttatttttattttgctggtctttacctatttctttagcaccatagccaatattatcgcttcgccttttaatggattattagctgaaaaattagaaggtcaaataacgggtattaatcctccggataccggcttattaggtattacaaaagatattccacgtattttaaaacgagaaatcatcaaggtcgtttattatttgccaagagccattgtattgttattgctctattttgttcccgttgttggacaaactgtcgccccaattctttggtttatatttggcgcttggatgatggcaatccaatataacgactttccattcgataaccataaagtctctttcgccaatatgaaatcaacgctgaaaaaagacaaatggaacaatttacaatttggtatggtaattaatatcttcactatgatcccaatcttaaacctagtcattatgccggttgcaatttgtggtgccactgccatgtggtgtgatcgatatcgtcatcaacatgtacaagcaggccagtggtaa

SEQ ID NO: 303730 - DNA, 1056 bp, Proteus mirabilis
atgatgcagcaaaatttgcgtctgatattaatcgttgttggtgcgattttaatcatagctttgttattacacggcttatggattggtcgaaaagagcgttctaagcttttccgtaatcgcccagtaaaacgtcagaaacagaattatcagtcagatgagaacgatgatgaaccccagtatactgaggcaaatcatcagatgtcgtctttaacttcaacgcaggaggctcaaagtgtgccaccgattaaatcggagccaacacttgcgccacaatcctcagttgcagataaagatccacttatgtctggaacaccagcacagggacattctaacgatacttcattacaacgagagcctagtcttggtgtttttgatgttattgaacaaaataatgactctgcgcctcagcaaaaacaactgatacccgaggtagaggtaaaccatgctgatgtaaaagaaggtgatattagtgagacaaaacttgccgatgtagagccgataccagaatcgtcgaactctgttgctagtgatgaaagacataccactgatacagataggccattggatgctgaaacctcatctgatgtgaaacaagctgagcaagctttatccggaacagaagagccaaaagcagaagaagagctggtattagtattaaatgtcagcgctcatcatggtcaaatgcttgacggtgaggtgttaatgcagagcattattcaagcgggtttccagtttggtgcgatgaatattttccatcgacatcttaacccgacgggtaatggccctgtattgtttagtcttgccaatatggtaaaaccgggtactttcaatattgatacgatggctgaattaaccacgcctggcgtatccatgtttatgatggtgccatcttatggtgatgctaatcaaaactttaaattgatgttgcaagcagctcagcgtattgcctctgatgtgggcggtgttgtgcttgatgaagagcgcaaactgttaacaccacaaaaaattgaactttataaatctagaattcgtagaacactagatttacatcaatag

SEQ ID NO: 303731 - DNA, 2028 bp, Proteus mirabilis
atgaatcaaaatattcaacaacaaattgatgaacttcgcgttacactacgtcaccatgaatatctctatcatgtcatggacgcacctgaaattcctgatgctgaatacgatcgcttaatgaataagctaaaagcattagaagccaaacatcctgaactcattaccccagattctcctactcaacgggtaggggcattacctttaacggcttttgagcaagttaggcatgaaattccaatgctctctttagataatgcttttgatgaaacaacctatttagcatttgataaacgtttacgtgaacgtctgaaaaataatgaagagatcactttttgttgtgaattaaaattagatggacttgcggtaagtctactgtatgaaaatggtcgcttagtacaagctgcaacccgtggtgatggtaccactggagaaaatattactgagaatgtcagaaccattaaagccattcctttgcgtttatatggcgataatatccccgcacgaattgaaattcgtggagaagtctttatgactgaaaaagggtttgagcatttaaatgaagaagctcgacgcacgggaggaaaagtatttgctaatcctcgtaatgcagcagcgggttcattacgtcagttagatcctcgtattacagccaagcgccctttgactttcttctgttatggtgttggcgtgcttgaaggcggtgaattaccgacaagccattatgcacgtttacagcaatttaaaaaatggggattacctgttagtgatgctattaaattatgtaccggaactaaagctgtacttgatttttaccatcatgtagcagaaattcgccctaatctaggctttgatattgatggtgtggttatcaaagtagatgatatagctctacaagaagagttgggatttgtgtctcgtgctccccgttgggcgattgcttacaaattccaagcccaagagcagatgacggtgattaaagatgttgaatttcaagtggggcgtacaggggcgattacacctgtcgctcgtttagatcccgtacaagtggcaggggtaatagtcagtaatgccacacttcataatgctgatgaaattgaacgtttaggattacgcattggtgatacggtggttattcgccgtgcaggcgatgttattcctcaggttgtgagtgtgattgaagaaaaacgccctgagaatgcacaagaaattgtttttccaacccaatgccctatttgtcaatctgatattgagcgtatagaaggtgaggctgttgcccgctgcacggggggattaatttgtgcagcgcaacgtaaagaggcgcttaaacatttcgtttctcgtcgtgcgatggatgttgacggcatgggagataaaattatcgaccaattggttgaaaaagagtatgtcaaaacaccggctgatttattccgtttagatgaaaagatcttatctggtttagaacgtatgggggagaaatcagccaaaaaactgcttaatgcattagaaaaagcaaaatcaaccacttttgcccgttttatctatgcccttggtattcgtgaagtaggagaagcaacggccaatggattaaccgctcattttgtttcattagaggcattacgtgaagcaaatattgaagccttaaaggcagttcctgatgtgggtgatattgttgcaaagcatgtggttaattttttccaagaagaacataataaaaatgtgattgatcaacttgttaatgacattggcattacttggccggcaccggttgtggctactcatgaagcaggtgataatccttttgctggtaaaacagtcgtgctgacaggctctctttctcaattaacgcgagatgaagcaaaagatagattagttgcacttggtgcaaaagtgagtggtagcgtttcgaaaaagacagatatggtcattgctggtgaagcggcgggttctaaattagccaaagcaaatgaattaggtattactgttattgatgaagacgaaatgatccgcttgcttgatcaatctaaataa

SEQ ID NO: 303732 - DNA, 924 bp, Proteus mirabilis
atgaataaattaatcgtatcaaatgatcttcctttagtctctgttataattcctacatatggaagaccgcattttttagaaagagcaatagacagcgtattatctcaatcatataaaaacatagaaataatcgtggtagatgataattctagtaatttacaccacgaacaaacagtcaaaataataaaaaaatataatcgcaataataaaataatatacatttttgatggtatcaatgtgggtggttcattagctagaaatagaggaattatcgaatctaaaggagaatatattacttttttagatgatgatgatatatatttagaaaaaaagatagagagtcaggtggaacatattatcaataataatattgatgtcagtgtatgtaatatgttttttaaaaaaaataataatttcttggatattagcaattgttatagtagagtaggaagcattcaagaatttatcttaaatggtaatgcttacactccaatgattatgagtaagaaagaatcactattagaagtaggattatttactcattcccctcgctaccaagaccatatattaatgctaaaattattcatggcaggtaaaaaaattaaatcattaaatgaaaagctctttattcataatgatcataatgaaaaaagaataactaatagtaataaatcagaggaagcttatagaataagacagtcgtatgaaagaaaaaatttatataaactaaatgatatagaaaaaaaacaatacaaaattattgaatgccttattaatgcaaagatattgcgtgcaaaaaaaaattatcttaattcattaaaaagtgttatttctgcatttacctatataacaaataggaatgatctatataaaataataaaaacattaattagaatacatatcctacccaataaaaaaatataa

SEQ ID NO: 303733 - DNA, 939 bp, Proteus mirabilis
atgaaagaatttataaaaaaaacatataaaattattaacaatcatttggaaaacccggttcatatagcctttgctgttgatcataaatttattaattacgcaggtatttccatatattctatattaaaaaataattgcaataaagagattatattccatatatttactcctttattagaaaagaaaaattttcatgagtttaaaaatctagaatttaaaaacttttctcttcacattcatgaaatagatacaacaatttttgataatctaccatcctcattagaaataacaaccgcaatgtattatagattagttatcccagaattcttatataacataactgaaaaagttttatatcttgattctgacatattgtgctttaataactttgggaatctttttgaaatagaatttaaaaacaatttaatagctgcagttaatgacgaatttgtattaataaaagataaagagtctcttaatataaaaaaaacaacaccttattttaattctggagttatactatttaatactaaagagtgggtaaaaaacgatatactaaccaaatttatcaatttgataaataaaagaaaatattattatcctgaccaagatgttttaaatattatattagaagataaggtgcagtttctaacaaaacaatttaattgtttttgccaagaaaatatacctattcttaaggatgctatatttgttcattacgcaggatatcctaaaccatggtctatgatgcaccataataatatagattatctaaattatcttctttcttcaccttggaaagacatacccttggtaaagcccactaattataaagaaataaaaaaactatcaaaagttttattaaaaaagaaagaatacacaaagtttatatactggtatataaattatatagtgaaaaaaataaagtcagataaataa

SEQ ID NO: 303734 - DNA, 792 bp, Proteus mirabilis
atgataccgaaaaaaattcactatgtctgggttggcaaagctcctaaatcagatttagtcaaaaactgcatcaccacctggaaagaaaaattaccagattatgaatttattgagtggaatgagcaatgtattagtgaaataaattgttcatatctttcagaagcttattccaatgaaaaatgggcctttgtttctgatgtgataaggctttatgccctctatattaatggtggtatatatttagatacagacgttgaagtgattgattcttttgatgagtttttaacattagatttttttagttgtcatgaatatcatgaaggcaattgctggcctatcacatcagcagttatgggagcatgtaaagaaaatcatataattaaagacttattagaactctatatgactttacggtttgaaacaaaagaaggtcttgatttgacagcaaacacacaaagaataacagagtattttaaaacaaaattctctttaagtccgccattttatgaaaataacactctcaatcttaccaaaaatgaaatcatatttccggcatattatttttgttgccctaaagtaggatatcatggattttctatccaccatttttcaggttcttggctaccatctcactcaagaaaagaaaaactttcgtttttcaaaagatttaagttattgagattaataaagctaagagaaacaggaaattttcctttaactcgctcagagaaaattatacttcaagttagtctaaaaggaaaaatttatatgctaataaagaatactttatag

SEQ ID NO: 303735 - DNA, 951 bp, Proteus mirabilis
atgaatataaattcaagttatatagagaattattcagttttatgcgcagaaaaatcttttgacggtaagagtaaaaactttaacatagcgtattcagtagataataactttataaagtatgctataatttcaattatttcaatcattaaaaatgataaagaaaaatatcatttccatattttctattctaatatatctgatgataatttggataaaataaaaaagttggagttagaaggatgtgctcttacactgtataagattaatgttaatatatttaaaaatatgcaagtgaaagaaaatttaccaatctctatgtattttagacttattatacctcaggtattacacccttttataaataaagtattatatttggatgcagatattatttgtataaataaattaagtgatatttttagctataatttaaaaaataaaattgcaggtgttattaatcatgcctatatagacccttatgtgagtagtttatctttgaataataccgagtattattttaattctggtgtaatgttgataaatacagaagaatggaagttaaataaaattttagaaaaatttttaattaaaattaatgagagtaattataaatatccagatcaagatgtacttaatattttattggaaaataaaatattatatttagatgggaagtataatagatttattgagaatgttagaaaaaatgataatacaacattgattcattatacaggaacacctaaaccgtggaaggcatggtataacaatgatgactttttctatagatgttttattatatctccatggaaagaagagagtttagaattacctgaaacatataaacaagctaaaatttattcaacaaaattatttaaagataataaatttataaatgcaatctattggcgtgttatatactgttattggaagattatagggaaaaagtag

SEQ ID NO: 303736 - DNA, 993 bp, Proteus mirabilis
atgatgaataaaaaaagtctacctgtagtttctgttattattccagcctataatgctaaaaaatatttggagcgggctgttaacagcgtattgaatcagagttataaaaatgtagaagttatcattattaacgatggttctagtgatgatactttgagtattataaaaaaactatccgttttgcataaggaaattatatttttttcacatgaaaatcaaggaatttcaaaaacaagaaacaaaggtattgaactggcgaaaggaaaatatatttgttttctagatagcgatgatacttatgaacctgattttttgatgatgctgcttaaagaaacagaagaaaataatattgatttttcatattgtttatttaataaggtatttgataataatgatattagaccatctaaagaatatatagataataatacaataattaattttttaaattttgattattttgatatttgttgtctttttcttaaaaagcaatttatagaaaagcatcaaattaaatttgatactaatatgatagttggcgaagatgtttggtttatattacagagcctttatcttggtaagtatacttgtgtaaatgagcatttgtataattattatcatataccaacatctataatgaataagaaatggaaagttaataattatttagatgaaataaatgcttgggaagctatcttggaaaacacgaaattacattataccttaactcaaaaggatgaattattgaataaaataaatataaaattgttgaatttgaaaattcagtttatgtggaagttattgtcttctggatattttgaatatttagatgattatcttaataaatttagatatgatgaacacttatttagtaaaattaaaaagtcaagaaagtataaatttagattaaagattattgaatctaaatcttactttctttggaaaataactaaattttttatagcaaagaaaaaaaatattattgaactttga

SEQ ID NO: 303737 - DNA, 1017 bp, Proteus mirabilis
atggaaacagtatttaatacgtttcatgatcttttatttaactatgaagagaccgaagtgctatttgtattctttgaaaacaaaaatcatgtttgcaatcatgaatggttaggtaatagaaaatttataaagttagagtcaaaaataaataataataaaattaaacgattacattacgcatataaattatccaaaataataaaaaaatataaacctgataatataattacttatgatactattggttgttatatttgccattgggcaagaaaactatcatgctttaaaattccaatttactcttggaaccatttttccttacataatatgtataagtcacaatacctttttttagcagataaacatcttgctattagttctggtataaaaagacaattaatatctatgggtatagaaaaagaaaaaatatataccatatataaccctataataaaaaaagaggaaataatcccacgaagcgaagatgtgaattttctttatatgggaagaatccaatttgctgggcaaaaaaacattcaggaactttttcatgcattatcaaaaacaattggtaaatatcagttacatatagttggttctggtaatgaaaatgacattataaagttaaagtcactagctaacactttaaaaatagaagaaaatattatatggcatggatggcaaaaatcaccatggatatacattaaaaacaacataaaaaacgtaacaagtttagtattaacatcaaattatgaaggattcccaatggtattgtgtgaagccttatcttatggtatatattctataagttcaaattgcaaaacaggacctgaagatattattgtgaataaaataaatggccaattataccaacaaaataatatcgatgaattagctagcatcctccaatttttgataaataaaaatatattatctgaaaacaaagaaataaagaattctatcaatttattttatgatgaaatatatattaaaaatgtaatttctatattaaaataa

SEQ ID NO: 303738 - DNA, 252 bp, Proteus mirabilis
gtggatgcggacggtacattaagtggttcatcactcacgatgattgacgctattaaaaatagtgtacttcatgttggtattccattagatgaaacattgcgtatggcaacactttaccctgcccgtgcgattggtgcagataacgaactcggtacaattgaagcaggtaaaatagcaaatattgcttcttttgataaggacttcaacctttgcacaacatttgtcaatggtattgaaataacagataactaa

SEQ ID NO: 303739 - DNA, 486 bp, Proteus mirabilis
atgaacgatatatgtaatgaggttgctaaatctgcttttgatgagatacaaaaacaagcaggtaatccagtagtgaatagcgcagtgcatgaacttgctttggtgtttaatgaactaaagcctttaattatgactagcgttggacttgtaattttatcaattgttatattgcttcactcaaataaagtgtatagatttttcattaattccacgcaaaaaagtgagctaatatctgcattactaaaagaaagaatggatatcgaccgctacggcaatgaaagaagaccaaacatggatttaattgattgctgcaaacaatataaatatgattcccttttcccagcagtcttaagcgagttatcacatgctgattatgtcgaaatccttgccttatgggataatttgaaagatgcgaagattagcaaagaatccccactagaacaggtgaaaattattgataaaatagttagtaaactaaaatcctaa

SEQ ID NO: 303740 - DNA, 405 bp, Proteus mirabilis
atgtcgtcacttgaccaactaaagagtataaaccttccgggtaacgtagaaaacatacctgataatgattccaaaacagataaaccgtcaaaatcatcgaattttgacggtaacttaattcttttggaagatattgaggaccgaaaggctgacagagctctcagagagaaatttggagataaagcatacaatgttgtgaaaaaaacattgtatggatgggccgtcgttctaattacaacggcgttttgcaagttgttttttgacaaggaagtttttactgatactgtattggtagctataacttccgcagttacattaaatacttttgcagcattccttggagttatacgtggcttattcccttcaaatagaaagtgtggtagtggtaatcaaaagaaagaatag

SEQ ID NO: 303741 - DNA, 468 bp, Proteus mirabilis
atggcatattcagctgtagcagtagcaaacgccttcattcaaagggcgatagatggcgagataccagatttaaccccgatgaaattacaaaaactcatgttttatgctcaatcttggtctttgaagttgtatggagagccaatttttgatgatttctttgcaaagtggcaatatgggccagttattccatctctgtatcataaagtaaaaagatacggagcaagtaacataacaagaaaaattaaagacgtagagtttgaggatgacgaatttttctatgttcaaccaaccgtccctagctccgattctaaagtaaacaacttaatcgacagaattgttgaggtatatggagagttaagaggtactcagttatcttatttaacacatctccctggaactgcttggtatgttactgaaaaagatggtgctgtaattacaaatgacttattaaaagaatgtatagagtag

SEQ ID NO: 303742 - DNA, 489 bp, Proteus mirabilis
atgaaccaagttccgaataatttaatggcggaacaaaatgtcattggaggactcctgctcgacccgcaaagtgataatgcgcaatcaattttttcactgctaaaacctgaagatttttatacccgacaccatcaaattatctatctcactctgcgagaaatgtatacccaacgtatgccaatagacatcatgacggtgacggattatctggagtcaaaagggcgaattaatcaatcaggtggttttgcctatcttgctgagatggcaagagaaacaccgagtattgctaacattatggcttatgcgaaaaaaatccgagagtgttccgcacagcgttttgttatcgaaaagacggttgaaattcaaaaactcatgatggtgccaagtgagttaagttttacggataaaattgaacaagcacaacgcttgcttgatgaagccacttcgtttggaaaaatgggaaaaaaaaacagggttgcgccgaattga

SEQ ID NO: 303743 - DNA, 1668 bp, Proteus mirabilis
atgattactgttgaagaatggcaaccagcagatgagttgattcttgagccaaatgcgttacgtgcagcaaaagaacatgagtattgtctggcattgaccgccggaccaggtgccggtaagacagaaatgctagcacaacgagctgactttcttttgcgtacaggaacatgccgataccctaagagaattctagcgatttcttttaaggttgatgcctgcaaaaacttgaaagagcgagtagaacgacgatgtggcttcgatcttgcgtcgcgttttgatagctatacctttcatgcatttgctaaacgtattattgatcgttttagacctgtacttgtaaatgagtataccttggattttggttattctattgttgataaaaaaaatggtccttctcgaacagaaatagagtttggtgatttagttccgtttgctattcaaatactgcaaagctcagaaattgcccgtaatgcaattcgacaaacttacagtgatatttttttggatgagtttcaagattgcactaatttgcaatatgaattggtcaaacttgctttccaaggaactaggctccgtctcaccgcagtaggtgatacaaaacaaaaaattatggcatgggctggagcactggatggtattttccaaacatttgttaatgattttaatgcagtgccacttaacatgtatcgcaatttccgttctaaacccagattattacgtgttcagaatgaaattattcgtacgttagatcctgcttctgttatgtctgatgaacaattaaggggagatgagggggaagtttatgttcatagttttgaagatagtcggcaagaagctatttatttagttgatttgattgataagtggatacatatagaacaaataccgccagcggaaatatctgttttggtttctaaacaattagatctttatgctaaccaccttatggttgagttgggaaatcgtggtattccatatcgtaatgagcaacaaatgcaggatattacggtggaacctgtagcacgcttgatcgtggactatttgtcttgtctttatagcgaacgtgaacctaaggcttggattcgattgatgaatcagcttattccttttgctgatgaaggaattcaatctagtgcacgtaaggatcttgatctgctgattagaaaacaaagaaaaattgtatttaatgcaaggagtacagagctgccattttcagactggtggcaattagcgatagattttttaaagaacactagcatcgaaactttggtggctttatcccctgaatacgaaaatcgtaagcgtttaaaggaagttattcgagaaacttctattcggattcaagacttactaaggttggaaccagatttgcttaaagcattgggacgctttactgatgatcaagctgtaagaattctgactattcataaaagcaagggattagagtttgattccgttataatcatggcggttgaaaatgagattttttttggcagtaaaaatgaaaatcgttgtgcattttttgtcggtgtttctagagctaaacgaaggttagtattaacccatgcacaacaacgagagcgcccattagatgctaaacgatgggatgtaaagagaagtgcccaagaagaatatttcaactacgtaaaaccatttgtaaatggttag

SEQ ID NO: 303744 - DNA, 1182 bp, Proteus mirabilis
ttgaaaagaaatatgacatcagtctttttaactgaagaaagtcggcatattgatgcaaatgaatttttagataacgcagatcaggaaactatctttctgtttcggagaaaacttgaagaaaaccgaacgtcaaaccctatagcattatgcagtgaatgctttcaacccgttgttttaagagctaatatttatagaacaatatttttttctcatactaataaatcagaggattgccctgtaaaaaccactacaaatctcactagtgatgaaatattagcattaaaatacaacggtcagaaagagggaaaaaaacataaagagaataaaaaattattagcaaatttattaaaatttgatccttttttttctgataaggtatatgttgaatcgacgttcagggaaactaatccttatggaattgccaaacgttggcgacgaccagatatcactacatctatttatagtgaaaatagagagcaatcaatcgtttttgaactgcaagtatctacaacttttattcaggttatagtcgatagagaaaatttttataaagaaaataatacatacattatgtggatatttctagaatttgactgtgagcagttcacgcaacttgatatttcatatgcaaataaatcaaatgcatttgtatttgatgaagaagccagaaacctctcaataaaaaacaaaaaagtcatcatgaaatgctattaccgtaagccttacatgactaaaaatttatctattgattacacatgggaacatcaattagttaattttgatgaattatcctttgattttattaataaaaaaatatatttttctgacccagtttttatgataaatcagatcaatgatgaaattattgctgagaaacaaaaaatagaaaaagataagatagaacgagaaaaaagagccgcagcaatgcgtggagacctatggaaaaggcgttcctatagtgaagtttcttctgaagaagagcaacaaaaaagaacaacatctaatcgagatataatcacttacccaagcaaaagaaacaaagccaatctaaatctttcatcttcttattctcataaatcatttggtgacgcagtaaaatgtcctcattgtaagaaattagttaagaaaaaaaagattcgaaagagtttactctgcaatgaatgcctacaacctcttgaatag

SEQ ID NO: 303745 - DNA, 276 bp, Proteus mirabilis
gtgctttggataaaatggaagcaattcggcggcccatgtactatcaataatgggttggcattatgcgcattacaccactctgcctttgatatgggcgcaatcagtattgatgataatatgaaattattagtttctagcggtgtgaatggtaatcaaatggtagagcaattattttggcaattttcaaataaggtaattggcctacctaaaaacacaaaaggacatccgaaggatacatttatccattggcatcgtgagcaagtgtttaagctatag

SEQ ID NO: 303746 - DNA, 528 bp, Proteus mirabilis
gtgtaccgcccgtcagtgtcgccagctgacgccggacactatttttatagcgtactgcgggctgaccgcccgccggatggtgataacagccggcggcacggatccaactacccggtgacgcctcataacagcggcgcaggatgcgggcggccacatgcaaattggtataaggatcaaaggcctcccaggcggaacggaagtgatgcccgttccagccccagttcacctgtgcaatccccacatcaatacgtctgggggatgtcgtctgtaaaaacgactgtaaagcctgccaggcggcctgccgtgtcggataacggtatcctttaccagccacattcagcgtccacggccagggatggatttcaccggcctgcgggtgatgtgccggtaatgtccaggatgactccgtcagtgccagggaatacagggcttctgctggtacattctcctgccgggccacctcacggtagcccggcggcacctcccgagccggtaacggcacggaaaacagcagcaggacaagagtga

SEQ ID NO: 303747 - DNA, 438 bp, Proteus mirabilis; identical to SEQ ID NO: 296602

SEQ ID NO: 303748 - DNA, 468 bp, Proteus mirabilis; identical to SEQ ID NO: 103796

SEQ ID NO: 303749 - DNA, 864 bp, Proteus mirabilis
atgataaatgaaataaagttttataaagatgaaaacttacacgccattgcaaattacaaatctattccatttaatgaaacacatgaagatgatggttttattattcgcgttattgaattatttaagtttactaaaattaaaaataaattaatgcagttgcaaaaacttacggggttgaagttagataatatcgaaccctcgatagaagaagttattgcattaattgaacgagggaaagctatttcaaagcgaaatgaagaaatcgttactgaattatcaaagaattatgatttagcaaaaaatataaaagaaagagccgaagaaggtgggcttacaaaacctaaaaatgccatatcagtacgggcttggaaagaagatattattgccgacgttagtcgctgtaaaggaaggcttaatgatgcaaaagaaacgctaacaaatttcaatggtgtgtttggattattacgttttattattcaatcagttgaaagcgtaaaggaaattaataaaaaacagcttaactgtatcccaaatgaagaatacaaaagccataaatttaattcatatttaagaaataatacttattgggagtttaaagatgcttataaatatattgaatcatcttttgaaaaactgaatggaaatatcttacgcattcttaattcctgcacaccatctaatgatagatacaaactgcgaatgtgggagcatcaacgaggcgttgagttatatcaatattattacagtcagacggattggattataaaaactattttgagtgcagatgattatgtgaattatattctaactcaagagaaagaagttcacgataaaaaatacttaatgactaaatcatttatttaa

SEQ ID NO: 303750 - DNA, 231 bp, Proteus mirabilis
atgagcttattatctgagggtagccttcgccctaaaaaaagtcggctaataaggatgccagatgttatttcactaacaggcttatctcgttcttccatttatttcaaaatgaagaagaaagaatttccacccaaaatacaaataggtgagcgatctatcgcttggcttgaagccgatatatatgaatggattaatgataaattaacaaaaggaaaaaataatgataaatga

SEQ ID NO: 303751 - DNA, 759 bp, Proteus mirabilis; identical to SEQ ID NO: 296217

SEQ ID NO: 303752 - DNA, 897 bp, Proteus mirabilis; identical to SEQ ID NO: 190877

SEQ ID NO: 303753 - DNA, 4425 bp, Proteus mirabilis
ttgatcaactggaatgggttttttgctcgtacttttgatttagatgaattagtcacgactttatccggtggtaacggagcgggtaaatccaccaccatggcggcttttattaccgcgatgatccccgatctgactttacttcattttagaaataccactgaagccggttcaaccagtggctctcgtgataaaggattatatgggaaattacgcccgggagtttgttacgctgttttagatgtgattaattcccgccatttacgagctgtcgttggcgtacgcttacaacaagttgccggacgagataaaaaggttgatatcaaaccttttatgatccaagggctacctattgctgaaaatccaacagaaattttgacgcaagctgtcgatggacgccaagcacgtgttctaccacttaatgaattaaaagaaaaagtagaagcgatagaaggcgttgtttttagacaatttaactcgattactgatttccactctgtactctttgatttaggggttattccgaaacgtttacgctcagcaagcgatcgggcaaaattctatcgtcttattgaagcttcattatatggcggtatttcaagtgccatcactcgttctttacgcgactatttattacctgaaaatagcggagtaagaaaagccttccaagatatggaaggggcattacgtgaaaaccgcatgaccttagaagctattcgggtcactcaatccgatcgtgatctgtttaaacatttagttaccgaagcgacctcttatgttgccgcggactatatgcgtcatgctaatgaaagacgagtacaccttgatcaggctctatctttacgtaaagagttgtgggatcagcgtaaagcgattaacaatgaagcttatcgctttattgaaatgggcaaagagttagaagagcaacaagcgttatcggctgatttggaaacggattatcaagccgccagtgatagacttaatcttgtacaaaatgcggtgcgccaacaagaaaaaatcgatcgctatgttgcggatgttgaagaaatcacattccgtttagaagagcaaagtgaagttgttgaagaagcaacatcaaaaaaagaagagttggaagcgcgagttggatctgcggaagaagaagttgatgaactgaaaagtcaattggcagattatcaacaagcgttagatgttcaacaaacccgagctattcaatatcgtcaggcggtacaagcattagagcgtgcgaaagcacaatgtggcattgatgatttagatgaaaccaatgccgagctatgggctgaacgtattcaagcaaaaattcaatccatcacgcattcattactttctatggagcagaaactcggtgtttctgatgcggccaaaacgcaatttgatcaagcctataaattgatcacctcgattgttggggaagttgagcgtcaaaatgcgtggagtgtggctaaaagcgcattacgtgaatggtcatcacatcgccatcaagccgatcgtgttcaccctattcggatgcaattagctgaattagagcaacgtttacagcaaagaaataatgctgaacgtcaacttgcagagtttaataaacagtatggcaaaaatgttgagcctgatgatctatttactctacaagaagagctagaagcaaagattgaagagctgagcgattatgttagtgattctggcgaacagcgtatgcaaatgcgccaagagcttgatcaactaaaacaacaaattgaaaaattaagaaaacaagcgccagtttggtttgctgcacaagatgctttaacgcaactgtgtgaacaaacgcatcaatcttttgaaacaagcaatcaagttactgaatatatgcaacagttacttgagaaagagcgtgaagccacggttttgcgtgatgaaaccgctgctcgcaaacagcaaattgaagctcaaattgaacgattaagtcagcctagtggggctgaagatggccgattaattactttagcagaacgctttaacggggttttattatcggagatttacgatgatatcaccttagatgatgcgccttatttctcagcattatatggacctgcgcgccatgcgattgtggtacaagatctcagtgcgatcgaagagcagttagcttctttagaagattgcccggaagatctctattttattgaaggtgatccacaatcctttgatgatagcgtatttaatgcccaagagatggaaaaagcggtacttattaaaagttcagataggcagtggcgctattcacgttatccagaaattccattatttggccgtgcagcacgagaaaaccagctagaaatattatcccgtcaacgagatgagctgtcagagctatatgctacacaggcctttgatgtgcagaaaattcaacgtgcacaccatgcatttagccaatttgttgggcaacatatttcagtggcatttgatgccgatcctgaagaagatattcgccaattaaatcaacgtcgtaatgaattagagcgcgagttatcacaatatgaagagggcactcagcaacaacgtcagcattatgcgcaagccaaagagtcgctcaatttattaaataaactcattcctcaagtcaatttattattggacgaaacattaattgatcgtgttgaagagctacgtgaagagctttataacgcagaagagtcgatgcgttatttacagcgtcatgagaaagcattaactgcgttagagcctatagcctcgattttacaaagcgatccacaagagcatgatcaattaacacaagattatcaatacgcaaaagaagagcagcaacgttatcaacaacaagcatttttgctggtggaagtggttcagcgtcgtccacattttagttatagcgatgcggttgaaattgtcagtgaaaataacgatcttaatgaaaaattacgtcgtcgtttagaaatggctgaaacagagcgagcgacagcgagagagttatatcgtcaacagcaggcacaatgtgatcagtttaatcaagtactagcctcactaaaaagttcttttgataccaaatcagaactattaagagagcttgagcaagagatgaaagagactggcttgcaaattgatgcgggtgcagaagcgcgagccaaagagttacgtgatcaacgttatgctgcggtgagtgctaaccgtacgcgtattagccaacttgagcgtgatattgcgcttagtgaagctgaacgtgaaaatatggcgaagaaaattcgcaaattagaacgtgattatggccaaatgcgtgagcacgtcgtcagcgctaaagccagttggtgtgctgttatgcgtttagtgaaagaaaatggtatggagcgccgtttacatcgtcgtgactttgcctatctttcagcggatgagttacgttcaatgtcggataaggcgctaggtgcgttacgtcaggctgtggcggataatgaatatttacgggatgcattacgtcgctctgaagacgcaaaataccctgatcgtaaagtccaattctttattgcggtttaccaacatttaagagaacgcattcgacaagatattatcaaaaccgatgatccggttgatgctatcgaacagatggaaattgaattagctcgcttaaccgaagagctaaccagtcgtgaacaaaaactggcgatcagctctcgcagtgtggcaaatattattcgtaaaactatccaacgtgaacaaaatcgcattcgcatgctaaatcagggcttacaagcggtttcctttggtcaggttcgtggtgtacggttaaacgttaatattcgtgaaagccatcaaatcttactggatgtattatcggaagaagaagatagccaatatcaagatctatttaaaaaccaaaacctaaccttctctgaagcgatggcaaaactgtatcaacgcttaaatccacaggctgactttggtcagcgtatgccacaaacggtgggtgaagagctacttgattaccgtaactatcttgagatggaagttgaagttaatcgtgggccagaaggttggttaaaagcagaaagtggtgcgctatcaacaggtgaagccattggtacaggtatgtctatcttagtgatggtggttcaaagttgggaagaagaatcacgacgcttaagaggaaaagatatttcgccttgtcgtttgctcttccttgatgaagccgcacgtttagatgcgaaatctatcgcaaccctgtttgaactgtgtgaacgacttgatatgcaacttatcattgctgcaccagaaaatattagtccagaaaaaggcacaacttataaattagtgcgtaaagtatttaatggaagcgagcatgttcatgtggtcggattaaaaggctttgggcaacaaagtgaaaaagataaacatttatccgaaaatattgcagatagttga

SEQ ID NO: 303754 - DNA, 2616 bp, Proteus mirabilis
atgaaattaaagcagagtgcttgtctcgcttttatgatgtttccggcgctgtcttttgctaataatgagtttaattttgtcattgaagattttgaccgttatttagaagcacaacagcccgttgatattaagcctgaaccctctgcaacaatttcatcttcatctactcccgatcagcgtagtggaacggtgcgttccactgtgacattaaaggaaaagccaccacaaaaaccacaacaaaaaattcagcctaaacagcctgttgtacggaatgaacatcaaaccgtggtacgcaatgagcatcggccagtagtggcgactccctctgtacctcaggtgactttgtctgaacaatgctctgtggtatctacaaataccaacaaaataaacagtgattacactcattatttaacaccactgctttcgtttgtaccgattaaaccgcaatttacccctgaggacttgaatcggtattatcaaagtaaatccgtggtctataatcctctaatgctttatacgcgtaagcgttatccagggcagccatatcagtctactgataatactttattagattttattccaaatacagtgtattcagtgactgaaataccttttcattttttatatcaatttaaacgttctttgcttgaccataagcaacctctctttaataaagagctattaaatcgtttagcaaatactcgcgaaaaatatcaacgtctgtatcagaaatttactgaacaaaccgcgttattaaccgaaagtttaactaacctgcaaaccgcagaagaaaaagttcaacaattaacagcggaattggcaaaaacgcaagataaactggctgtagcgaataatttacttaatgatgatagcctaaaacagtctgtggctaagttaaaaaatgaattagcacagtctaaaaaagagcaggataccttgcttgcacaattagctgaaaaagatcagttgctgtttgatgcgacagaaaaaaataaagtattaactaaacagcaagaagattttgatattcaggcacaaaaattaaatcaattgactacccatgttgctcaacttgagcaacaaaaacagcagctacaatcacaatatgggcaggctcaacggttattaacaaataacagtgctaaaaaagagattgaggtactacaaaattctttaactaatttatcagcagtgcgtcaatctttagaaaatcaattagctaaaaacaaagcctcttttgaagctactatagctaagaataatcagttaattgatacccaacgccaacagatagctcaacttaacgatcacataaaaaaaataaaccaagagcaacaacagttaaatcattcgttagtgactcttcaacaacaaaaagcacaagcagatgataaattaacacagatcccagcgttgaagcttgagttacaaaataaggttaatgaattagctgagctgaaaaaaagtttatctacgggcgaggaagcttttgatgctttgatttcagaaaaaaatggtgcaatcgctaaattagagaaagctcaggcagatctcgccaataagtatcaagcattggatacccaatttaaagagaacaataccaccattgggcaacttaaagagagcaaaatagcgaacgataacgcttatgctcaattagagaaacaactagcagaaaaacaatcgcttactgataaattaacgacacaattaacacaagctaaagatcagttagcaaaacaaaattctgaaagtaaccaactaattgcttcattaaaacagcagcaagtagaatcgacggctcaatttaagcaacaagaaagtgttttagcgaattctcaaaaagagtttaatgaagtctctaagcagcttgaagctcagcgtgcgctaacgaaaacacttgaagaaaaagaattaaaattaagtgagcaactaaaagaaaaagagagtgaaattaaaaaaataaatagcgaaaatgcgaatgctcaaaaagagtttaatgaagtctctaagcagcttgaagctcggcgtacgctaacgaagactcttgaagaaaaagaattaaaattaagtgagcaattaaaagaaaaagagagtgaaattaaaaaaataaatagcgaaagtgcgagtgttcaaaaagagaataaaacattaaaacagcaattggataaagctatgggagaagggcagattattgcaagtcagcttgcatatgcctattcaattatcggtaaagataatgcccaacgaaataaatcaattctgtcggaaatacaaaaacagaactatgtgcaatacgatgataacacttactttaaaatcctaaaacaagggaaacctgtggattcaattgcaggtaaaacagttgttttcgctatgcatgaacaattaaccgatggtacagtaacacttaattatgacaaagctaagccgttaattttaccataccgccaacttccactgcctcttaatacttttgttgctaaagcaggcttaaatggcaaagctaaaatttatattaaacctgatggagggtatgggaaagatggtatcccagggcaagtacctccagaatcgatgtctatagtgacaattgaaattttagctatcaaatag

SEQ ID NO: 303755 - DNA, 1212 bp, Proteus mirabilis
atgagtattagtcgtcgttcttttattaaggggatgggtataggatgtgttggttgtacggtgggaagtttaccaccaggggccctcgcacttaatccagtaacatctcttaagggtcagtctaaattaacaccaagtttgtgtgagatgtgttcttaccgttgtcctatagaagctcaggttgttaataacaaaactgtctttatccaaggtaaccgaaattcaccacatcaaaaaactcgagtctgtgcgagaggaggcagtggtgttagccttatttatgatccgaaacgcattgtaaagcccatgaaacgcaaaggccctagaggtgccggagaatgggaagttattagctgggaacaagcttatacagaaattgccgaaaagatggcaagcatcaaacaacattatggtgctgaaagtatctttttctcatcaaaatcaggctctctctcctctcatttatttcatttagcggcggcatttgggtcaccaaacacctttacgcatgcatcaacttgtcctgcgggcaaagccattgctgcatcggtaatgatgggtggtgatttaaaaatggatctcgcaaattctaaatatattctttcttttggtcataatctttatgaaggaattgaagttgcagaaacctatgaattaatgacggcacaagagcgtggtgcaaaattagtcagttttgatcctcgattgtctgttgtttccagtaaagcaaatgagtggtttgctatccgaccaggtggcgacttacctgttctaatggccatgtgtcatattatggtaaaagaaaatctttatgataaagattttatagaaaaatttactgtcggtttccctcaattagtggaagtattacaagataccacgcctgaatgggcacaagctcactctgatgttcccgcaaaagatattattcgcataacacgtgaaattgcagctaaagctcctcacgcattagtcatgccaggccatcgcgcaacctttaataaagatgaaattaatatgcgcagaatgatcttcaccttcaacgccctactgggaaatattgaacgtgaaggtggcatgtatcaaaagaaagctgctgcaaaatataataaattagcgggtatcgacgttgcccctgaattagctaaaccaaccgttaaaggcatgcctaaaattacggcaaaacgcgtcgatgctacagcgcctcaatga

SEQ ID NO: 303756 - DNA, 750 bp, Proteus mirabilis
atgattatatttatcaccggtgcttctgcaggttttggagaagctattgctcgtcactttattaaccatggacacaaagttattggtactgcgagacgtcttgataaactacaagctcttcatcaagaactgggcgatctattctatcctttacaattagatgtcaccgataaaaaagcagtcagtgaaatttatcaccaattaccagaacaatggcgctcaattgatgtattagtcaataatgcaggactcgctttaggattaagtaccgctgataaagccaatcttgatgattgggatactatgatcgaaactaataataaaggtttagtgcatgtcactcgagcattactaccctcaatggttgaacgcaatgtcgggcatattattaatatcagctcaacagcggcttcttggccttatatggggggaaatgtatatggtgcaaccaaagcctttgttaagcaatttagcctaggcttacgtgccgatcttcaaggtaaaaaaatacgtgttactgatattgaacccggtcttgtggggggaactgagttctcattagtacgctttaaaggtgataccgataaagtagaacaaacttatgcaggagcagatgcgcttacccctgaagatgttgcacaggcggttttttggacggcaacattgcctgcacatgttaatattaatacgcttgagatgatgcctgtcagtcaatcttttgccggattaagtgtgcaccgacaaaattaa

SEQ ID NO: 303757 - DNA, 627 bp, Proteus mirabilis
atgggattagatattgtcatgtttaaagatcaatttacaccacaacaaaaaatggatatttgcacttttgaagaaggtgatccgacggaaaacccttgggttaaagggaaacctgcccaaatacacattgaaattgtcccccataatcctaattggcttatacaatttaatgaacaaaaatcgttaattcagaatgcattgtcagatatagcattatcaattgagcacataggatctactgcggttgcaggattggctgctaagccaataatcgatatcgatttaattatagaaaatcctaaagatgaatcgtcctatattccccaattagaggcattgggctatgaactcattattcgtgaaccttcatggtatcagcaccgtatgcttaaactgagtaatccgatggttaacttacatgtatttggaaaaaattgtcccgaacattggcgccacctattattcaagcaatggttaacaacacatcctgatgatttagccaattatgcgacgattaaacagtttgctaagcataatgtaaagacgactcaagattataacctgaaaaaacagagccttgtacgtgcaatttatcagaagatttttacctcattgattggcgactaa

SEQ ID NO: 303758 - DNA, 564 bp, Proteus mirabilis
ttgtattataatcgctttcgctattatgataaggaaacagggcagtatctttccccagaccccatagggttattgggtgggctgaatccgtatgggtatgtgcattgcccgacggggtgggttgatccgtttgggttggagtgttgtccaggaaaaataactggagattctaagactctaagagaaaaaattaatttagctcgatcaggagatgtttctgctcaagcagaattggcttatgctaaatatatgcgtgacaaaggacataacattcattttaatacgcctccaaatcgttctatatcaatggctgatttcacagtagatggggttcaaattgatactaagctattaagtggaataggtggtaatgcagctaaaaatattacgaaaggtgtaagacaagttggtgataatggagtggttcaagtaattagaaactcagattcacctataagcttagaacaatttcaagggtttattaatggatataagtctccaaacccttcagttaaagttgagctaatcgatcaatcggtcctgaagccttactgggatttttaa

SEQ ID NO: 303759 - DNA, 1740 bp, Proteus mirabilis
gtgccacaaataaaatataataacgagataacaagtatcataaaagagagacgaaaagtttttctctctattgggctatttaccgctttaattaatatattaatgttagtcccttctatttatatgttacaaatttacgatcgagtattaccatcaggtaatgaaatgacactattgatgctaacaatcattatgttagctctttttatctttatgggaggattagaatatttaagaagcattattgttatacgtatgagtaataaattagatttatcacttaattcacgcatttatactgcagcttaccgagaaaaattaaacaaaatagcgaatattaatccaacgttagcattaacagatctaattactttacgacaattcattactagtcatgccatattcactttctttgatctaccttggttccctatttaccttttagttattactttatttaatccttggttaggattatttgcactttgtggtgcccttatcttatttgctttggctatccttaatgaatatctatctaaaaatcatttaaaaaaagcgaacaattttgccaatcaagcacaactaatacaaagtcatcatttagaacatccacagactatcgaagcgatgggaatgcttagtcaattacgtaaacaatggcaaacctctcatttcaaatatttacaagcacaaacacaagccagtgataatgcagctggtattaacgctatcacaaaagtaacacgtatggcattacaatctttaatgctaggtttagggggatggcttgctattgataatactatcagtcctggaatgatgattgccggttcaatacttttaggtcgagcattagcccctattgagcaagtgatcaatgtatggaaaagttgggatagtagtaaagcagcctacaatcgattgacaactttattaaaaacataccctcaagaaaataaaaaaatggccttacctaagcctcaaggccaattacttgttaatatcgatgaagccgtgtatccacacagtgacagaatattactaaataatatcaattttgctctattaccgggagatatactaggtattattggcccgagtgcttctggtaagtcttctttagcaaaatttattgtcggtatatggcaggtcaaaaaaggcattgtacgattagataatgcggatatctttcagtggagtaaagaagaaattggtccacatattggttatttacctcaagaaatcgcccttttccccggcactatcgctgaaaatattgcacgctttactgaggttgatcctcaaaaagtgatccaagccgccaaaatggcacatgtacacgagatgattttacgctttcctcaaggatatgaaacccaaattggtgctcacggtgaaggattatccggcggacaaaaacaacgtattgcattagccagagcattatatggcgatcccacgttagttgtcttagatgagccaaattctaatttagatgatttaggtattagagcgttaacacaggcgatcgaaacattaaaacagcataaaaaaaccgttattttaattacccaccaaaaacagctactttctgtcactaataaattattagtgatatttgatggaaacaccaaattattcggtccaacggcgtctgttattgctgaattaaataatccaactatcacaaaaacggcaaacactatttcttcaacaccagcaacctcaaataacgcttaa

SEQ ID NO: 303760 - DNA, 615 bp, Proteus mirabilis
atgtatgaaattactcaatttatcgtaagtgataacaaaaatgtagattcaggcttgattataggaggtaataaagcatatgtgtctaaatggcctattaatccaaaaggaaaggagctattgcatcttttctctatagattgtgagaaagtaactcctcagatcgctgatggcattttgcccaaaactggttatttatctatattttcaacatatgatagtaatgattattttcttgatgaaataacttattttggtgatgagaacgagttaggcctgattaaatcaggctttacttttgtatcttattcattaactggtagtttaagtaaaacaaatgaagactttatacctgaaactaaagttgatttattaaatacaaaaattaatagtgaagattatccaatgatatcatttttttcaaaagatattccaaatggattaactggtgtggatgagattttgaaaaattatcattttgtctgtcaggtatattctgcagatttccctcccccttttaaagacgtattgggattgtccgatgccatcggatacttatttattaaaaatgaaggaaataatatagagggccttttcttcgtgcaaacagcataa

SEQ ID NO: 303761 - DNA, 333 bp, Proteus mirabilis
atgaaaacactgactgaagatactcgtctcgctaattcacgattcttcgacaacgatatcaataaagtgcctaaatatgcgctaactgtcggtgtagggacattattagatgcagaagagttaatgattttagcgactggcatcaataaggctcaagcagtacaggtggcaacagaaggtgctgttaatcatctatggactatctcttgcgtgcaattacaccctaaagcaattttagtctgtgatgatccggcgacaatggaactgcgtgtgaaaacactgcgttattttcagcaaattgaagcgcaagagcgccagcaataccaagactaa

SEQ ID NO: 303762 - DNA, 546 bp, Proteus mirabilis
atgaaaaaatcattattttcactattaattctatctacactttctttatcaacacaagctattgcacaacagattcaccttggtggttataatatagatatccaaggcagagtaattgacgagaaactaacttgtgtcgttcaagatattgctccaattcaattggatgatgcttacgttgattctttactacttactcctgaaaaacgatttagtgtggatttttctggctgtactaatcaagcaagagatagaaaagtcaaagtagtttttggacaaaaaaacactactcatttaatgaatactggttcgacagaaaatgataccaatgctcgagtagcattattgcgttctacaggtgaacttattccacttaatggtgagaattcagaacgtacattttcttcggaggttgccggtgaacgtggtagcttagaatttttattaaaatatgatagaccagcatcgattgatgatgctgttaccgcaggtgctttcagtgctgccttatctcttgatgcttacgtcactgatgatatccaataa

SEQ ID NO: 303763 - DNA, 546 bp, Proteus mirabilis; identical to SEQ ID NO: 300300

SEQ ID NO: 303764 - DNA, 252 bp, Proteus mirabilis
atgctgccaaaagttgagttaaaatggtatcgcacgtctgttgaaggtaaacaagagcacttctttaccaccacactgactgacgcgacgatcgtgaacatcgattgccaaatgcctcattgccaagatccggctaaagccgacttcacgcaacttatcgaagtctccctctcttaccgcaaaattgactgggagcacactgttgctggaacgtctggtgcggatgactggcgtgcgcctctcgaagcgtaa

SEQ ID NO: 303765 - DNA, 147 bp, Proteus mirabilis
atgtttactctatatacagattcttggttgatttcttttatatcatccgttttgataatttttaatgtaaatttatcatttggtgctaatcttatcaaactaggagaaatgataaatggtgcctcactattatcttctttgttatag

SEQ ID NO: 303766 - DNA, 660 bp, Proteus mirabilis
ttgattaatttaccattacatatagagcggttaagaatagtttcgttagatcaggcagcattagccatagctggattagcaggcaaagttaataacgttgaggaagctgttagtggtaactatactggtcacgaaatcgcttcaagctatagagaaatcatcatacaagctataaaactgaaagaaattaatccacttcaagttctagtctctccctcttattattctgaccttccctttaattcgaaagaaataattgataatgataaagtcactataaacagcccaattattgatgctaatttctatgccaaagatatttggggctgggttgataaagaactagatagtgaatcgcagtctgttcccattaatgatcaactaaaagaaaaacaattatcggaacaatgtgatgctaatgaatggggggaatttgcaggtaaagatacagcactaatgtttattgctggacttacaatagctttagaaaaatcaggttcatataaatatggtacaaaattgaacaaaagcagagttgctgaggctgcaattaaggctataaatgagtatggtaatggaacatttataaccacaaaatcattaacgacattaattaacaatgcgttggatatgtatggcactaagctagataaaaactga

SEQ ID NO: 303767 - DNA, 219 bp, Proteus mirabilis
atgccagcagtaacaacttcaaaagaaagcctcatccgcttaccagaagttcagcgtcgaactggctatggtaaggcttggatctataaactcatcaatgcagggaaattccctcaatcggtaaaaattggtactcgttctatcgctttcattgaatctgaagtggatgagtgggtagcaagtaaaatagctgagtcacgttctggcgaggtggcataa

SEQ ID NO: 303768 - DNA, 393 bp, Proteus mirabilis
atggaaaagaaaaaccactcgctacaggtggcttctcagaataatgatgcgctatcaattctaacaaagaacccaccaaagaaaaataaagcatggatttgttttttatattcataccaggggatcactgaaaacgatattttacgacagtgccgattatcctctggccgtaattatttaactgagcttgaacgattactcaatattaaattagagcgtacagacgaaccgaacccagacggaataggttcgcattatcgttaccgtattcgtaaccagaaagatgcaaagaggattattgaccttatcaatagccgagcttgtgctggtgggtatgatggtatttctatctatcaatcagatttgattttatcgctttacccaatcgaataa

SEQ ID NO: 303769 - DNA, 276 bp, Proteus mirabilis
atgaaaaataaaatgaccgtaatgggtcagggattcgctcaccttgaaatcaggagtggaaatattctaaatgttatttctgattttatttattttattgatataacagcgaaatataacggttttgaaaggggcgatttaagtttaaaaggactatcacagtatctctgcaaattcacgcaaaataatgttttttatattcatgtacggttttgcgagtgtttgcatacaaatttagtcaagctatctcatgttgtcgcgacagctcttaattaa

SEQ ID NO: 303770 - DNA, 795 bp, Proteus mirabilis
atgaaagataaaaatatggccataactggtcagggattcagtcagcctgaaaacgagctaacgaacacatttgattatttaattcctgttattaataaccgtattaacgggaaagaaattcaatcagtaagtagccgtaaattacattcatttctaaaggttggtcgtgactatacgagctggattaaagggagaattaaacagtatggctttgttgagaatatcgattatatcgttgtggaaaatttgagctcaccaaaacgggggagcgcaaaatttagacagcaattcgagcatgactatattgttagcctgagcatgggaaaagagctgtctatggttgaacgtaatgaccagggcaaattagcacgccaatattttatcgaatgtgaggagcgactgcgcagagttgcgccagaagaacataaagccgctatacaaaactggcgcaaaaatcgtgttgctgcatgtgaagatcataaaaatatggctgaggcgatgaaaggctatattgagcgcacaggtgacaaccaaaaaggctttgcgtatagcaatgagtcacgctttatcaacaaattggtacttggtatcaatccgactcaatgggctaaaagccaaggcattaagtctaaagaaatcagagataacatgagtgcggaacaattgaaattactcgcttatttagaagatcgtaattgcgctttccttgatatagatacgccctcagtacaaagaaaggctcaattgactgaattggcacaacgttggttagctcaacctttggaggcgaactaa

SEQ ID NO: 303771 - DNA, 639 bp, Proteus mirabilis
atgaacgcctaccaagcaaataatttcttaccgagggatggtgggcttactgagttttcggactccataaaaaagggcagctatttagcgacccaatttaatcagttctttggctcaatccctaagcgttcaagctcattacggccaagcgttttaagccagtttcctaggctcattccggcatttgatgctgcggattcaaattgtgttttgagttctggtgtgattctaatttggaaagtaggagataacccttttcctttctcagttttgtctctttttggcgttgacatgtacgtacataatctcttagtatgtggtttgttatgtacgtacattaacatgaagtatgtgcaaaataaaacgcccttgaatgatattaccagtatcactcaagggctaaccaccagcgataccaaaactatcgaggtagctatgcaagatcatatcacacccttaactgggcggaatagtcacacccaaaatatcgtttttatatggcgttttgctgagtgtcagcaaaataaagccacctatcacttagttattgctcataccgaaaatgaagcccgttcgatgcttcctaacctttcattggtattcaccgcccgtattcgagtaggggtgactcatgcttaa

SEQ ID NO: 303772 - DNA, 195 bp, Proteus mirabilis
atgcttaaaacattccatcttacaggctatacaacaagtaaatgcggcttaagcgttggtttcagcctcaatattaaggctgctgatgctaagcatgctcatacagtgttattgaatggttttgccgagatgggttgttctcttactcgtattacaaaaatcaatggagctgatagaggggctagccatgcttaa

SEQ ID NO: 303773 - DNA, 207 bp, Proteus mirabilis
atgcttaattcaacccaaattaatcaaaatgcggaaaaagcctttcaaatcgagattattgcttccctgatcaaagattctgattttgacctcgaaatgagcgaaacagccgctattttcgcactgatcaaaaggctggcgggtgagattggcggaacgttatttagctgtgtgaatgaaaatgttaacgaggtgcctcatgagtaa

SEQ ID NO: 303774 - DNA, 198 bp, Proteus mirabilis
atgagtaagccattgccgctagatgctgccgcctacaaagcacagcaagtcagttctttgtatgccgttattttagagcaggcggatacagagtgttccagtgagttattagacctgatttcaatcgcttgtgatttaaacggtgaaatatggcaagcgttaaaaagtcatgtggaggcggggtcatgtgcgcaatag

SEQ ID NO: 303775 - DNA, 309 bp, Proteus mirabilis
atgtgcgcaatagataattttcgaaattcgctaaaagctcaagatttttataataaaacaactgaggaactccagcgtattagtacaactcaacgagaagcggtaggagcgttattaggtgggctatccgctacagctaacttggcattttttgcaacggagcatgaagactataaagaaaacggcgatgcaaataacgatctacaaaaattgagctatagcatgacgtttaccgctgaaatcttacattgccttttatataactctgaacatgctgaattagcactgcgtcaacggggtaaatcataa

SEQ ID NO: 303776 - DNA, 543 bp, Proteus mirabilis
atgaactataaaacggttgttaatggcggttatagccatgtatttacacaaacaacgcataatgcgcccttagaaatagcaactatctcactggtcagtattcctaatcgaattgatttaggtgaatgggatgcgttacctgagttaggtttgttgctccttaatgactattggaatagtgatagaggtagtcataccccagctgatttaattaaaacgtttcgttggacggtagcaacggtttttgttgtttactgtacccgtaagaacggaaacgcaatctatgcctaccaagggcgtgaactgcctttattgtttgagcgtgttagacgagtgcttaaaacgtgtgttgataaaccactccatcaacaatacaaacaagccgttgcggatgatctcattattggtacttatcgcaatatgttagatgacagccgtattttgtccttatcaacggatggtcacgaaataatgaataggctttatagccagatcgttagccaagccggttctaaaaaatccacttcggcgtattggtgttga

SEQ ID NO: 303777 - DNA, 2718 bp, Proteus mirabilis
atgcgccatattgatgtgatccgtgacgtgaagttgaaagcgaacgggcaatggcaaaacatattatctaaccttggggcagaggtgcctctaaatcagcataccgcttgccctcattgtgggggtaaagaccggtttagattcgataacaaagatggtaacggtacgtttatttgtaatcagtgcggttctggtgatggattagatctcgttcaacgtgtgttaggtgtcagtgtaaccgaagccgcaaaagaggtcgctggcatgattggtattgatacccgttcagagtatccaccagcttaccgtagccatgaggtaaaagcgcaacaggacgcactgagggcgcagcaagcagaaaaacaagctaatgaacagatagagaagcataaacgctttattgaacggtataaccgtgctattggcaatgttcagcgtggggagtctaactatctcaaggctaaggggctacatggctttgaaatggatttattactggatggctcactgattattccgctggtggatgctcgaggtaaaattacaggcgcacagaccattaaacctaatggtgagaaacggttattagccgatagcattaaatcagggagttactaccaaattaatgagcctgtagccgttactacggtgattattgctgaggggctagcaaccgcaataacgtgtcatttaattcagccggaagcactgacagtgtcagccatagacgcaggtaatttaattcatgtggctaaggctatgagaagtcaattcccaacggccaagattattattgctgcggataatgactcacaaaatgacattaatacaggaaaagttaaagcggaggcagcagcgcaaaaagtgaatggccatgtttccattcccccttgtgatggtgattggaatgactacctacaatctaatggtgaggaagccacagtaagcattttcaacgcaggaatataccaaccagaggggataattgacgtatcagatagcgaggttatatcgactgtaccggttaaaagtgacccgatgaagatccgtatcgaatcacgagaagatggtgtatttcttgttaccccgaaagcagacaaagaaacaggggaaatcattcatcacgaacaatggttatctaaccagatcaaacgcattacgaaaggggttaatgatttagaccaggagtatttaattatcgaatggggtaagtctaatgttcaggcgatcccaatgggtgatatcggagagcgtgaggggtggcgttctctgaaaaatgcagggctattagtcaccaccaaatcagggctaaggcagtctttgtctgattggttattgcgtcaaccgtttaaagaaaattggaatattacggctaaatcaggctggtacaaaggcgcatatattatgcctgatggttcagtaattggagagccagagcagccaatattatttaatggtcaaagcgcagccgttacggcttacaaaacaagcggaacattggatagctggcggaatgatgttgcacaactggcgaacaaaaacagctttatgatgtttgctattggggcagcactggccgcaccgatgaccagtattacacaagcggatagctttggtattcacctttacgcccaatccacagctgggaaaagcactaccgcagatatggccgtgagtttgtacggtgatcctgatttacagcgtttaacgtggtatggcactgaatacggcatgactaatgaagcggtagcgcacaatgacgggcttttataccttgatgaagttggacaaggggctgaccctaaacatgtctataaatcggcttacacgctatttaatggcaaaggtaagatccaaggcgcaaaagagggcggtaatcgacaggttcagagctggcgaacagtcgccattagtaccggcgaaaaagatattgaaacctttctattaaattcaggggtaaaagtgaatgctggccaactggtgcggttactcaatattccaatagagcgagccacagagttacacggctgtgaaacagggaaagagcacgctgacttaatcaaggtgaattgtcgtgctaactacggcacggcagggcgttattggattgagtatctatcaaaccacaaggaagaagccaaggaagcctatcgagccgcacagcaacgatggggtaaattaattcccagtagttatggggaacaggtacaccgcgccagcgatcgcttttctgctatagagtcagcgttattaatggggcgagtgattacgggttgggatgaacaggattgtagagacgcagttcaagccgtatttaatgtctggttggctgaatttggcaccggcaataaagaaattgaacagataacagaacaggctttagcgttcttaaatacctatgggataagccggtatgctccactaccttatgacgaacgtgatttgcctattcgtgatttagccggttatcgagagcgcaaaggcagtcatgatgatgcgccaattcttttttatacattaccgaatgtatttagggctgaggttgccaaggggtttaatgccgaaacgttcgcagaagtattagccactatgggaatactgaaaaagccagccaaaggaaaacgtctgcagggaaagacaccccgacttaaacaccttggtggaactcagcaacgagcctacatcatgatgttagttcaggatgatgatgacgattaa

SEQ ID NO: 303778 - DNA, 315 bp, Proteus mirabilis
atgacaataaaacaacgtccaccagccacgacaaaacgactgaagcaaaaatctaaatccgggatcacttctattgtttccggtgttgtaatcaaagcaccggaacgaggcaaaacagttacgggtaaagtctatgcaacgatgacaatcgaagctgaaagcgaatatcgcagcgattatccattacgtttagttgcttttgatattgatgctatagaattgatgatgtgtaagcatggagataaggttacggccaaaggctcttatggctggtttaatggttatcagttgtctggggctagattgatacagtga

SEQ ID NO: 303779 - DNA, 339 bp, Proteus mirabilis
atgagaacatacacagaactttttaatgaaggattacaagaatttatagacgaaaataagagcctttatcgcaaaatatgcgatgacgcatctattcatagttccatcattggaacatctcaagagcaacttattgacgataaaataaaaaaagcctttattgagcatttacatacaagatatggcaacaatattgacattttcaccactgtagtgacattaatggctagtgatgaatttgaaaaaactcaagtattaactgagcattatactaaaatagcagaaagcattggaatctctcttaatgattttttaaggcagaataacataaccatctaa

SEQ ID NO: 303780 - DNA, 192 bp, Proteus mirabilis
atgaacgttcaacacaccgtcgctaatgatgaattctgctcagatgaatatcatgagtcgattgactgtgttcatagaaataatagaaattcatcacctaacgtagtaagtatagaattaataagagaaaaaaaaatctataacgatgcaataaaaagagcagcagctgtagcagacacgttagattggtaa

SEQ ID NO: 303781 - DNA, 1554 bp, Proteus mirabilis
atgggtaatcctgctaaagttattgatataactaataatttaagtgatgttgaaaattttgatagtgatttcaaagatgtggaatctaaaattaaagaacgtcattctaatgaattaattattgcattatgtggtaccgttggttcaggagtacgaaaattaaaggaatcattaattgagcaatttgaaaattttaattataaagttaagcatataagaattagtgatttaattgcagagcaaaatgaatcaccgcaaaaaataaaaaatctttcgggttattctagatatgaaaaattacaagatttaggtgatgaattaagagagaaaaacacaaataatatatgtgctcagttggctattaggcgaataaatatttggcgtcataggacatatggaaccgaactaaaagaaaatgaatcacctaagcatacaaaaaccttagataaagtagtttacattattgatcagctaaaaaatcctgcagaggttggtttatttagaacggtatataaaaataatttttatctaattggtttgttacgaaatgttaatgaaagagagcgtaatttacgagctgacggattagatgatagtgaaatcaaattattaattaatagagatagaaagaataaagcatcatatggtcaacaggtcgaggataccttacagctttctgattactttattagaaatatagagcaattaagtgaaataaataaatctgtaaatagatttatctctttaatacatggcgtggatcatatcacacctacaaaagatgaaattggcatgtttacagcttacaattcatcattaaggtctgcttgcttatcaaggcaggtaggtgcttgtatcgtcgatgatgaaggaaatgtgttgtctactggatgtaatgatgtcccaaaattcaagggaggactctataatgcagagagtgtttctgataatcgatgccataatgttggtcgttgttcaaatgatttacataaatcaatgttacgaaaacaaataatagatatattacaagatgaaagcatagatgatgcagaaaatttagcatctaaaattatgaataatacaaaagcaaaatatatcatagaatactcaagagctattcatgcggaaatggatgcgattatgtctcttgcaagaaatacatctgttggtactgtagataagataatgtactgtacaacctatccgtgtcataattgtgcaaggcatattgttgcagcgggtataaaaaaagttgtatatatagagccttatgaaaaaagtcttgctagagaccttcatgatgacgctatttgtcatacagatgatatgagtgaaagtaaagtgttatttgctaattttgaaggtgtttctcctaataggtattctagcttttttaaatatcatagtgctcgaaaagataaagatggtagggttttaaatcaaaaagtaatcacagccaaacaagtcgacccaacagggttagattcatattttgactacgaagctaaaacagttcaagacgtaaatcttcgtttaggtgaagagagaagttaa

SEQ ID NO: 303782 - DNA, 129 bp, Proteus mirabilis
atgaacttaagtggcgatcacaggagtccatatggactccttatcattgatttaaaaataaatattatatttaacaatgaaagttatacacaattctatacacaaattttatttctaaatagggtataa

SEQ ID NO: 303783 - DNA, 759 bp, Proteus mirabilis
atgtttactacatatattgttaatttaaaagaaaacattgatagacgtgatgctatggaaaggcaacttgaaaatgctaaccttaactatcaatttattgaggctgtcagaggcgctgatttaaccgatgagcaaattaaatcgaaagtacaagactacccagactgtcttcttacaaaaggtgaaattggttgtgctttaagtcatctaaaaatatatcaaaaaatgattgatgagagtattgagtatgcgctcgttctcgaagatgatgcggtcttacctaaaaatttagaaaaaagtatcaataaaattatacagaaagatattaaacacaatagaaatatctatttactttccgaagttatcaattatatagaaaatagaaacttacataccaatatttattctgtatatgatgctagtggtgcacatggttatttaattaatttaaaagcggctaaaaaattattatctgtacttaatcctatacgctatgaggctgatatgtggtggatatttcgatttttaaaatatgtaaatgtctattgcattattcctcatctaatcaatacaagcgatgaagataaatctaattctgtattagaagaagaacgaattaaaataagaaaaggaagggaagcatatagaaataaattgcgtaaaagtgaaaaatattaccaactataccgtatcttagataattttagcaaaaaacgtttatacaaaataattaaatataacagagatacaatagcttaa

SEQ ID NO: 303784 - DNA, 225 bp, Proteus mirabilis
atgattagatcaactgaaaaaatcacataccgcaatgggtttatgctgaatgataaacctgctcatatttcagaaattgaagatatttttgagagtagacgtgttattgcgttgttagtttgggagcagtatgagaagcaaaaacaaaaattactgtcgaagaatttaacgcctgcacagtatcaaagcgcatgtcgctccatagctaaatcactgggggtgtaa

SEQ ID NO: 303785 - DNA, 186 bp, Proteus mirabilis
atgaaaaagcaagatgtacttaggtattttggcggtactacaaaaacagcaatagcgttaggaatatcaaaatcaacagtaagcttatggaaagaaaatattccttggaaatatgctttgttgattgaaaaaataactaacggttcattattagcgagtataccgacaaattcagttttaaattga

SEQ ID NO: 303786 - DNA, 657 bp, Proteus mirabilis
atgacaaaacaaacaatgagcgatcgcattaacctgagaatgcgtgagctaaaactaaaaagtaaacacatcatggatgcaacaggcgcatcaaaaggaactgttagccaatgggttaatggtggctcagaaccgtctgctaaattcctttcctcattagctactgtattaggtgttagtgaaaaatggttaattgatggaggcttgatcgaagaaacgaagggaaatgccacccttggcccagatatcactagacgagtccctttagtttcatatgtacaagcaggactgtggaaagatatgcttgagcaacaagttgatgaatttacagagtgggttgaaactacagcaaaagtatctaataaatctttctcacttagagttattggaaattcaatggttgatactacaggaagaagtcgaatatcaatacctgaaggagcaatagtaattgtagatccagaaaaagatatttataacggaagaattgttgttgcaagactaaaatctagtaatgaaacaactataaaacaatatattacagatggccctaaccattatctgatgcctatcaaccctaattacaaaccaataccatttgatgattcttgtgaaattattggtgtttgtgtaagaattgaacaagatttaatataa

SEQ ID NO: 303787 - DNA, 288 bp, Proteus mirabilis
atgggctccgataacaagttggcattcgtcaccattaataccagcaaaatggaagagaaaattaaaaaaattatctcgctacttccgccggaatcggttgataagttcctgactaagcttcttagcctgactgatgatgtcatgttcagtaattactctggaacagtgcaaacaggagtgaccgacgagatcgtctattttatcgattttgacaatggtttctacagcaaaatcctgtccacagcccgggcacttaatgcggatattactcataattcagttccttaa

SEQ ID NO: 303788 - DNA, 981 bp, Proteus mirabilis; identical to SEQ ID NO: 294799

SEQ ID NO: 303789 - DNA, 243 bp, Proteus mirabilis
atggataaatacaatagagaacaaatgaaattaggtgttctatatgctcgcaatcatttaattagctcatataaagcaaactttattgaatgtgacgaatgccagttcgcaatgtttatgaatacattgtctctcgttgcaaacgaatcaatagatattgaattaatgatggatagtgttttgtcatgcaatgatgaagctgaaaattggattaaagaaattctaattaaatattctaaataa

SEQ ID NO: 303790 - DNA, 204 bp, Proteus mirabilis
atgattgaaaagccgatttattatatgtcagcagaaagagcaaccattaaagaaagtcacttctcactttgcatcgttaaagtctctattgatggttgtgagcttttagctgaaaagaagtttgcagtaaaaccaacaaagcgacaaatacggaaagttactaaatttgtaatgaatcacattaaaaggtggagtgatggataa

SEQ ID NO: 303791 - DNA, 681 bp, Proteus mirabilis
atgaagatgagaggaatgactcaggttgaattagctgagtcagttgggatggcgcaacctagcgtctggaaactcacgtctggaaaggctcaaagttcaagaaaggccgtagagatagctaaatcactaaacgtcgaccctgtatggctaacgactggaggtggtgctattcctgatttcttacaaaaagaaaaggatggtgttagtaaagatgagctatcaatgcgagaagtatctgagtggggaaattcaactccgttagatgatgatgaggtagaagtgccctattttaaaagtatagaattagctgcgggggttggctgtacaaataacgaagatcacaataactttaaattaagattttctagatcaacactaagaagatatggaatatcaccaagcggcgtgtgtgcatttcctgttcatggtgagagcatggagccaataatacccaacggaacaacggttttcgtgaattgcaacgataagaaaattgttgatggaggagtgtactttatagagcaagatgatctatttagagtaaaggtcttattaagacagcctggcggtaaactgataatcaggagttacaattctgtagattaccctgacgaaatagcagacattgaaagcgtaaaagttgtaggtagggtttttaacatgtctgtaatgttaatataa

SEQ ID NO: 303792 - DNA, 213 bp, Proteus mirabilis
atgagaaataaattaattgataaggctattggcatggttggtagtcagcagaaactggctgagatatgtaacgtaaaacaaccttctgtatgggcttggttacatggaaagaaaaaaccatctgccactagcgcaaaacgcattgaactagcaacaaacggagtagttcaagcgagcaagttaagacctgatttacacgaaatttttagttaa

SEQ ID NO: 303793 - DNA, 177 bp, Proteus mirabilis
atgaagaagaaagttaatcattggtttaatcgtcacgaagtgcataaaaacatcatgcgagataagacgttacgagaagtgacaccgttaggaagtaaacgtctaaaggaagcattcgaagatgcaaaattgagaaatgagcatcgtgagaaattactaggagggtcgcatgagtaa

SEQ ID NO: 303794 - DNA, 441 bp, Proteus mirabilis
atggctagcttggcagagaacaatgtcgttcagttgaggcctcaggttatcaacttggaggaaagagtggctagagtcgaggatggttacacaaaactagccaatgaactttacgaagaattaattggcgcaaacctaacaaaaaatcaggcaaaagttgctcatgctatttgcaggaaaacttatgggtttaataagaaaacagaccgcatatcagacagtcagttggcagagttaactagactaccaagacagaaagttaacaaggcaaaaaatgagcttatcgctatgaaagttatagtgaaagttggtatggcgatagggcctaataaaaacctaactgagtgggatattcctgattgtcaccaaaagcgtgacagcgctgtcaccaaaacagggatacacaaaagaaactattacaaaagaaaagaaagaaagtaa

SEQ ID NO: 303795 - DNA, 282 bp, Proteus mirabilis
atgaaaggaacaacgttaagagagctaattaatcgatatgacttacaagcaatggcattggctgatagacaacatcctattgatagtgaatattcaatgccgttctttagagctcacttgaaatacagggaaaagttaatgcctaggggcaatgtgatgatcaggttaatgaaaatccaatgcgcattcattaagtatcgaaaaagtgaagaataccttcaaaagaaaattgatgaatacaatgcaaaatatcaacaggaggcatctaatgcagggaactaa

SEQ ID NO: 303796 - DNA, 222 bp, Proteus mirabilis
atgcagggaactaattgggttaatagaaatgagcgaacacctgatgaagatggaaaatatttaatctacggcccacgtggcattacaacaggttattggcagtcacgaataaacaaatttcaggacgctgaatcaagcgataacgaggggatgatggggtggaaagggattctaactgttactcactggatgccactcccaccaatgccggagggtaaatga

SEQ ID NO: 303797 - DNA, 642 bp, Proteus mirabilis
atgcaaagtttaaggcgacggcgctgtaaaatatgccgagaatggtttcaccccaagtacagtaacatttggtggtgtcgtccagaacatggagcagaactggcaataaggcgaataaacaaggaaaaggaaaaagtattagcgaaacgtaaaaaggagcaaagagagaaggaagttaaagcaaaagacaagctcaaagcccgcaagttagcagtaaaacccctctcatatttcagacagcaagcccaagtagcatttaatcaattcattcgacttcgagaccgtaatgagccttgcattagttgtggtgaaaccaatcctcctgatcttcacggcggtcaatgggactgtggtcattttttgtctgttggtgctcatcctgaactccgatttgaagagagaaatgcatacaaacaatgtaaatcatgcaatgcgggggcggggaaatattcacataaaaatgccaccgttactcagaaatacgagctgcggctggttgaaaggtttggacaggagttggttgactggttacgtggcccgcatgagataccacactggaagcgagaggattatatccgaatccgcgatgagtacagggccaaagtgaaggaactgaagaaaaaaggagacttcgatgtgtaa

SEQ ID NO: 303798 - DNA, 672 bp, Proteus mirabilis
atgtgtaagtgcaaagttgtcggttgtgaccgccaagccatgtataagtcgcagatggtttgccaaatgcattatttcaggatgatgagaacaggaagctacaaaaagaaaggtcggtcgttaagaactcataatgcgaaggggtatcagatgctatatctaccagatcatccattagcaatgaagaacggatatgcatatgaacaccgcgtcgttatgcaccagttacatggcgataacccaatgaattgcaacaagtgtgggaaagcgattgattggagtacggtgcatgtagaccacatcaatgaagatgttaaagataattcgccagaaaatcttaggttctcatgtaacggatgtaatgtgatgagaactagaaagcatcagaaagaacacaccaagaaaaggagagtgggtattacatgtaatggaataacgttgacggcaacagagtggagcagaatgcccaatgttaaagtttcaagaggaacaatttccagaagaataaaaaatggctcttcaccgtatgacgctatttatggagaaaaagagacgcacatatcaactctccctaaaagtggttatacccctaaatataaaaatacccacgttgattcctgcataacccactaccgagccaaattaaaggagatgaaagatgaggagcgataa

SEQ ID NO: 303799 - DNA, 216 bp, Proteus mirabilis
atgaggagcgataaatacaaaagcctgccagttgctattactgtggcaagaagattatccagagaatcattgaaaaggcaaagttttagcgttgttcagctacctatgggcatcttatcagtattggttactagcgatgcaaagcgtaggaagaaatctattgtctactcagtaagtggtgatggtcatcacacagtattaccggaggcgagatga

SEQ ID NO: 303800 - DNA, 405 bp, Proteus mirabilis
atgactagacctgcacgcggtgagcgaaacaacaatccgggtaatattcgtcatggctcaaaatggcaagggctatccgcacagcaaacagatccgagcttctgccaatttgtatcacctgaatatggtatacgggccatctataaattactgcagacataccaaaagaaatacgaactcaacactgtcgagtcgattatcgatcgatatgctccgccaaatgaaaacaacactgccggctacatcaatcgagcagctaaagatattggtgttagcgtaaatgaacctattaacgtttcatctaaacccgttgcgattgcattagctacggcgatcgttggtgttgagttaggttatcagccatacagtcagaaagtctttgaagatgcttggttgttgttatga

SEQ ID NO: 303801 - DNA, 204 bp, Proteus mirabilis
atgagaacgatgctttataaatctgatggtgatgtgaaaatttgggggatgagtcttcaaattatcactgtcaacgatgatgaaattgaaaattacctgaaagatggttggtgtaaaaatccaaacgacactaagaagaagactgaagataaacccgctaccaagaaaaaggcggtgaaagatgcagatcacaacgaagggtga

SEQ ID NO: 303802 - DNA, 297 bp, Proteus mirabilis
atgaatctagaaagaaggaagaatatattttttcttactatttttttagcatggctttattgtttttttgtgttagatgtgagcctagatgattactcatggccaatcaggattggatttattggtgcaatatatactttttacattatttttattatgttcccgttttactcaggagagttagataaacaaatgtacataaatagtcatctaaccaatgagttaagtgatttgagagatgagttagccagccttaaatgcaaattgcagatcattgaaagtgatatagataaataa

SEQ ID NO: 303803 - DNA, 396 bp, Proteus mirabilis
atgagttactacatatctaatgcagtgtcatctcaaagagattatgaatcttcattctttgatatgatcaactatgatattttgaataaaattggaagtgactatgataaagtgataataacaggaaaacctagctacagcagagcgacatcattgattataaataatcataaaattgtggatatgtttgtcacacctgcatttggttttcaagcatcatttatgcttactcaaaaaggtgttatgcgagttgagccagcatatggtaaggataaaatatataatgaatttattaacaaaattaaaaatgatggcgtaaaaccaatatcatgcaacaatgaatactctatatactataatgataaaatcgtagctataaaatttggtaaatgctaa

SEQ ID NO: 303804 - DNA, 216 bp, Proteus mirabilis
atgaaaatagagtatttaagattatttgttgataatataggtattgatatcaacattaaaagcacgggaaatgtaacaatagtccttgccattattggagggtttttcaataaaatagcaggcccaagtaacgaaataaaaaatattactatagagataaatattagaaataataaaccaatgcgatttttatatttatataaaataaaagaataa

SEQ ID NO: 303805 - DNA, 258 bp, Proteus mirabilis
atgaaacaaagtagcttcttggtcgcatttgatttacttgaccagaatgcggattttaatgcaaaagttgcctatgagccgattgatgttgtgctcgcggaggaaaaagtagatgcaacagaagaaatagctaattttattaaaaagcgtgaaatcaaagttaaaaatgagcaattttgtagtgaactagccagtaatgtgtttgaggggaaatcggaagatagtccattttcaatagccgcagggctttctagctag

SEQ ID NO: 303806 - DNA, 297 bp, Proteus mirabilis
atgaaaaaactaaaattgcagtaccagaaccctgaaaattattttggaataaaaagggaatggaaatactaccctttccttcgcagttggatacacaaaaatttcagtaccaaacaagagaaaggttactactttttacacaaatttgagtataaagattacccgttaagactacgctctgctagaggaaagcaactggcaactccctgggatgactacccaacaatgacttataagcttggaaaaagctggaaacataactccaaaagaaaaaatcaatattttcgacagagctga

SEQ ID NO: 303807 - DNA, 486 bp, Proteus mirabilis
atgtgtataagagacagatatgtaataggcttacttagtagcactctaacaattattggtttttccaataaaaattacacaaactacatctctgataactacttatatatattagtatttataattatcgcgtctctatatctttctagagaaagaaattctataaatataaatatttctccaaaagtaaagctaacaataaaatataacgatatattttcagagaaaggaattgttatcatacctgttaatgactattttgatactcttgttgatgatgaaataatctcaagaaatacactacatggaaaattcataaataaattttattccgatgatatcaatcaattaaataatcaaataaaaaaagaactacgaaaccatcatggtgaaaaaattccgagtagaaaacatggtaataaagtaagatacccactaggtactacaattaagatacgaagagatgatcaagtttttttcttgtag

SEQ ID NO: 303808 - DNA, 228 bp, Proteus mirabilis; identical to SEQ ID NO: 298588

SEQ ID NO: 303809 - DNA, 255 bp, Proteus mirabilis
atgcaaatttcatacagctactcgaacggaactcgggtagtagacgacaaaacagtcatggaatttgacgaaagtagcaaactcagtattgagacaggaagtttcgctgagctggctaaattaacagaaatcgacccagttgaagctctgcaatggattatgcagttcgacaaggaagagattgacaggattgtcaatgaagcaagcaaggatgcacctgtttctaagatgaatctgctaaggagggttgcgtga

SEQ ID NO: 303810 - DNA, 276 bp, Proteus mirabilis
atgagagatattatattagataaagccatttattctcagtgggttataagaaattctttatattggatgtctatttatagtaactggcttctagaagaaactgatgaacaatggaaaataacatttaaaaataatgatgaatcagtattgtttgaatttaataaattgctgaatgattatattttaagagaaataatagaattaaagacaggaaaatttagagaatctgttattaataaagtacttgcaagtatgaatgaaaggttaattacatga

SEQ ID NO: 303811 - DNA, 768 bp, Proteus mirabilis
atgtttgatagtttactgagtatcgaatctattgtcgcactatctattggtgctatatttagcttcaaaattggaaaagtaaatatcagcattaagaatgactttagaaatcaaagccctgagataaatggtaataataacttagtcatttataatcaagcgatgggaaatgttagaaaagagattgcattttctataaaaattgcaattgttgtgatgatgattgtatttcattggtttcctactttttttctgaatctcttgatatcattttcattctttctaccgatatttagtttattcggtattgtgaatgttatacgacttaatggtatttatagaggatgggattttttatatttttttgcatcattaatgatggggatattgttttattgttcagcaacaatgatgactaattatatgtctatttatccagagttaacagcaatttacacaaaaatgtcagaatatagacttatggggctttttgatgcgccaaattatctacactatttcattcttgtggttatgactagtattgcttgcccagccttaataattataggtttttatcttacttttgcatatacaaaagcaagggatggaaacgaggttttccggtatgcatctacattactgctttctggatatgtagcttacttatttatatcaggtgttttcttttcgccagaccgagcaaatcatgagcaatttttattaattctggcttacccatttaaagttgttttatcattttttgtttaa

SEQ ID NO: 303812 - DNA, 444 bp, Proteus mirabilis
atgatgaactcaacaatattagttagtgatgactttgtaaatattcaagccaatatagtgacgctatcagaaaggcaggatttttggcaaacccactttggcagagtgaaaggcttcgccacatttgaagaggtgattttcactattatgggccagttctgtgatgagtacacgggaggctattgggagtactgcaccttacccaacggtggtgcatttatttacccagatttggcctctgaaaaactcacgttattcaatatgcacaatggtaatgaagcaatactcagtccagaagcagcaggtgtcgctgtttgcttgatgctgtatagccagtggccatttagaaccgaaagtgaattactggttgaacggttttatcagcttcgtgactacgcaattcaacatcctgaaagctcagctattttccatcttatcgattaa

SEQ ID NO: 303813 - DNA, 339 bp, Proteus mirabilis
atgttttcaaaattactcaataaattaattgatcattcaagaaccctaataattttattggctctccttggtattggtgtcttgtataaaggatgcagtggtgaggaaacaacttactatcgagtaggggaagttaaaggtgttcaatcttgtgggcaggtaggcgcaaatagttatttatgtggtgtcgatatctatgatacaagcactcagaaattgctggctaatgaaaccatagggctgaagtctagaccgtatcccgggaatatcttaataagtcagtgcacgttgaaaggctccaaaatggcgtgtactaatgaatgggcatatatgcgttaa

SEQ ID NO: 303814 - DNA, 705 bp, Proteus mirabilis
atggcacaggagatgagggatatgcagggtaatgaagctcgtcatgaccgcttagcggttcggctatcactgattattagccgattattggcaggggaaacattatccttaaaagcgctcgctgacgaatttggcgtgtcggaaagaacgcttcaacgagattttaatcagcgattatctcatcttgaccttatctcagataaagagggatatcgtttgtctggacgtttaacggcttggcgtccacccgatattttcacctttttacaaaaagtagggctatctcgttattttccgggactaacacgcaaggctgttaatcacttactgcatagtgacattcattatccttgtttagcttggcatacctcgattgaggtacatcccaccagcgcagaatgtttttatcgaattattacggcaattacgtcaaccgttgatattcgcattcaacaaacagatagcgagtggttacaactgacaccttatcgcttagtgcttcaaggcgcacactggtatctcattgcttgtttcactcatcggttagtcgttattcctctggataaaattcaagctgttcatattacggagattatgagttatcgaagacaagatatctgccaactatcacaggaagatgacttcattcgagggttaccttatttcgaaagttttcaacgaacaatgacaggtattgattattag

SEQ ID NO: 303815 - DNA, 483 bp, Proteus mirabilis
ttgacttatcaatttctaacagaacagtgtggctatgataaaacacggttcctttttgttttaaatcaagccgacaaaattgaaccatgtcgagagtgggatcttgaacagcatagtccttcagataaacaatatcagcacttacagcagaaagtagatagggttcagcgtacctttttgcctgtatatccagtcattgctatttcagcgaaagagtcatatcaattggctcaatttgtggagaccttaattgcagcgttgccatcacatgctagcagtagtgtggtcagccaactacaaacggcataccgaactcagcccgttgaatgtattgctcgtcaagggtttaaccgaagtgtggcggaaactatcgactccattattcatgaacttcccttatcaacactattgaaaacggtcctaataaaagccaaagacgttttagtggatgcggtgacttcattgtggcggtggttattttaa

SEQ ID NO: 303816 - DNA, 405 bp, Proteus mirabilis
atgtcaacatcaaacctcatttctaatgtattaactaaaacactgcctcaatccctttcacatctacatgctcaaatcgaaagcaaattgaatgccatcattcactattccccgacgattggtttaatggggaaaacaggtgccggtaaatccagcttatgtaatgctttatttcaaactaatgtttcgcctgttagtgatattcacagcggtacacatgaagctaaacattttgaaatgcagctaggcacacgaacattaacttttgttgatttaccgggtgtcggtgaaagtatcgcgagcaacgatgcttatcactcgcaatatcagcaattattaccgaaacttgatttaattatctgggtattgagggctgatgaacgtgcgtggatatcggatgattga

SEQ ID NO: 303817 - DNA, 885 bp, Proteus mirabilis
atggctaagcgtgtcactgttaacattacctcgacaaaagtacagaactatcttgataagcaaggatcacgatccgctgcaattaataaaattcttgaagatacaattccagaagagagcttagactatcaggatgagaaggatgataattttactaaaatagggtcaaaagaattatctaataacttgatgcatatttactataagaacaaaaatcgtcacgatgataaacatggtcatacttgtgaagaagagctacacattgatttagttcgacaggttattaaatgccgagggaatggttatctaagcataccaatagaaaaaaagggagaattcattaatgctaaagatgaatttaattttctcaatatgttaaaacgccatgatttagttcatcaacttataagcgaaagagtgaaatttagagctaaagggaatgaaaatacttataaattttttgattttatcatccatctggttaatcaagtagaaattaaaattgtagaaataaaatataatgacgagccttatgtgaaggtttttattgaattttcatgggatatgatatttgtagatataaaaaatagttcattcagaatttatgattacaatagcattaattattatcgatatagtcattacatgacgaaatttaataatgaagggaaacctaagtttagtttaactcaagggaaatatggtgggtattttattgattttttaggtacggaaaaaccgactagttatttcatgagtttagtttcaaaaagcagaaaagagcctattctctatatccataccgataatattaaaataaaaactaaaggtatgattagaatggatgaactgaatgagagcgttcagaactctgtgtcgcgttaa

SEQ ID NO: 303818 - DNA, 636 bp, Proteus mirabilis
atgaaaccacataatgaaactaagacaaagaagcttaaaacaatcaatccaaatatcagtaggaagatagaacgaaccttaaaaacagccttagataaacatcctcgattatttattatcagaatagatcttcggttcccacaacacaccgaatgtaagaaagattctcgcgtgatatcacggttctttgattctctaaaagcccagctaaaagcttatgagttgaaaaaacgtaagcagggtcaacgtgtctatcctaatgggttaaaaaacctatgggttagagagataggtcctaaatgtgagaatccccattatcactgtgttctgctcttcaacaaggatgccttcttcacattaggtcgttttcaatgtgatgatgagtggggggaaacaaccaagaatttatattcaaggatcaatcaggcatggcatagcgcattaggaattgaaatgctgaatgatgggattattcatgtctgtagttacgatattaatcctatccgatacctgcataaaggctccgatagctttgagaaggattataaaaactgtgttgataagcttagctaccttgctaaggattacagcaaaccctacaaagatggaaaccgagttgtaggttgtagccgataa

SEQ ID NO: 303819 - DNA, 297 bp, Proteus mirabilis
atgacaccaagtgatatctctttccttcaatcgatatcgcttctgaatttaattcaagcaggagctgttctcatgacaaacgcaacgactacttcaacacccgcttctcttctcgcagacaagcttattgacatgaaattcattacgcagttaacaggcttaaccgataagtggttctataaactcattcaagacggtgaattccctaaaccgattaagttaggtcgtagctcacgctggctcaagagcgaagtggaactatggctatctgcacgaattcaacaatcacgcgcttag

SEQ ID NO: 303820 - DNA, 396 bp, Proteus mirabilis
atgacaacaacattaccggaattagagacgcctcgcctgtatattgcaaataccccgaaccttaagcctatcggtgtccgagcggcggttagtgaccctttagtacaatacacgtgccttcattgtggagagaatctgagcttaataaccgatgacgaaacttattggtttgagcatagtgataaatcatcagagaaacgttgtatccactgcttgagttttatcaatcagcaaatcagaaatgaaatgcaggaaggtatttatcgatggttaaaacctttagtgcctataacagactggttttgtgtgctttgccaaaatgaatacagtggttcaaagtactgtcctacatgtaaggatggtatctatagcattgctgcactaagtaaagattaa

SEQ ID NO: 303821 - DNA, 438 bp, Proteus mirabilis
atgtcaacttttcgtaatgccctgctttcttttttcgctgtagggttactctcgccaatagcgatggcaaatacccatactgtcactgtcttccaatgtgccaataaaaatcaaaagcaagttaatattagccttgtgaatgagcagtatatttatcagttcggcaaactcaatcaaaaacctgatatcattatcacgagaaaaccagaacaattagaagggcgttatttaaatccgaagggagatacgggtacagcccaaatctatgaaatggactttagaaatggtaactatacttataccatttcctcttcttattttgattcaaaacacgaagctctggttgatgtgtaccaaaacgataaattacttactaccgtcaattgtttaccaaatactattgttgataaccttagtgagcacatttttgccatataa

SEQ ID NO: 303822 - DNA, 1509 bp, Proteus mirabilis
atgaatataaatgaatttatagggcaataccgtaaccaccccgtattattcataggtgcaggtatgagcctaagatacctagataatgcctttacatgggatggattgttaaaattcatttcatttgagctgaaaggtaataatgagttctatttagatataaaagctgagtgccaagataatggtaaatatgattatacaaaaatcgcaacaaagcttgaacatgaattcaataaagatttaggaaataacaggaatggaaagttcaaagaaatcaatgatattttttatcatgaaatggagcgagaaaactgccttagtcgattcaaaatttacatttcacatttagttagtaaactttcctataaagaagaaaaaaaggaagaactagctgagctaaaaaagattcgtaaaaatataggttcagtaattacaacaaattacgactctcttatagaaagtatatttagctttgaacctcttgtagggaatgatatattattaagcaatccttatggttcagtttataaaattcatggttgttgttcagatccatctaagataatcattaccgatgatgactactccaaattcaatgaaaagtatgaattaatacgtgcgcagttactttctatttttattcataacccaatcatattcatgggatatggaattggtgatgataatattaaaagtttactaaaaacaatatttacttatgttgaaccaaactcaaatgacgcaaaaaaaatcagacataattttttattagttgaatacagtgaaggctctagttcacatgaaattagtgagcatgatatagatttagaaggtttttcaacaatacgaataaataaattaaaaacggatgatttcaatgagatttataaatcattgtctagtttaaatttaccagtttcagctatggatattagaaaagttcaaagtattgtaaaagatatatactctggtgcaagagaagatggcagcagtgttacagttaacataactgaagatattgactctcttaataataacgataaaattctagtaataggttctagaaaatcaatcagttatgaacatagaaatgcatcaagctttatgtcagactattttgaaataattgaggaatcgaaccatccattaattcgactaatagataaaattaatatagccagctctcaatggtttcctatttatggcttcaacttaatttacccagaacttgaaaaagcagaaacattaaaagaacaacaattaaaaaaaataaaagataatatagaacgtttgcctattagtgcaaaaacaaaacatactaatatagaagaaatttatcatgatgaatcaataacgggagccaataagcttaatgctataatgtggggcacatggaataataatcttaatttagatgaagttgaaaacactttaaagttaatgcctgataaaaaagggactggatacagaagaatattatgtgcctatgactataaaaaaaaccagtaa

SEQ ID NO: 303823 - DNA, 183 bp, Proteus mirabilis
atggcaaggattcagtcatttcctgataactttgtatttcgctcaaaagtgactactggtgggcaaatgcgtaaatttgaagtacctcaatatactcaggtgggaaatgctgtgccaccgttactaggtttggcaattggtaaagtggttactgagttgcttattcagctaactaaaaattaa

SEQ ID NO: 303824 - DNA, 942 bp, Proteus mirabilis
atggctggattacgggaaaaagatagcgacaaaaatatgcttccttgggaatttgctaagtttgttgagtatgtgcaacctaaaattgctgttttagagaatgtaacagggatcttaagggcattcaaagatagcgatggaaagcccttttatgcttggtttgaggttgcaaaagcatttgctgaaaaaaaatatattccactatgcttacatgtgaacgctaggtttgcaggcgtcccacagaacagacctcgttttatcatgatagcaatacgcgctgatatatttgaagatatcaaaagctcttttgatagtgagagcattgattataaattacttttttcatcagagaaattctacaaacttgttcaaaataacccagacaaagcggtcatgggaacacttgaatgttatgacccagtgaagaatatttcgttgtttgaaggttcatttttgcaccatcttgttggtcatgagcctgtatcagtcaaagaagctttagatgatttaaaacaaacatctccgacaaaatcatcgaaatttgttgaaagcttgaatgaaacattctcaactgtattgttagagcatgagaagctaagtaaccacgaccatagaagtaatggttatcatgttcagcgtagatttcggttataccaagttgtacaacaaagccaaagtacaacggtaaagaaagaaatattcgatatattgaaaggtgattcttgctcattatcagatgtagtctgggaacaagtaaaaggctatgagtttttaaaagataacaacaaaattgaatgtttcgattcaaaagacagttttattgaatatttacgaaatcacccaactaagaagcattcacaaaaagcgttagatcctaatcaacctgcgccggcggctttatcgatacctgatgatgcatgtcattatgataaaatgaattga

SEQ ID NO: 303825 - DNA, 192 bp, Proteus mirabilis
atgatcataacgaattccaaagctcagttgactgttgatgccattgctaaagtcgctgaaggtcgtttgactattaataatgtaactaaacttctcaataaatctagacgaactattgaacgttaccttcaacgatatcgtaaagtggatgtgcaattcattgttcatagtagtacagtaaatctcccataa

SEQ ID NO: 303826 - DNA, 1611 bp, Proteus mirabilis
atgtacaatgaagaacagaagaaaatagctagaaaagaagttattcacacagcaattgaaaagttgacagttaaaaggtcagattcaactttatgccctaaggattatataagacgagtgaaatctttttataaaaatgaaagcgatgatacgagggcattccttgtagataagttatctgattcaacaattaaaagatgggaagatttttatagctcaataattcatgataaaactgcctctagcttgaaaattgcttatttatcaggtccaaatcctgaaaatgatattaatgaaatgactaatctaggaatactgccggaaaacatttgggctttcgaaagtgattctaaaatatataatgaggctgttatttctgcattgtcttcaaagtttccttttataaaattgattaaatcaaatattggtgatttttttgaggtatccccgcaaaaatttgatattatttacctagatttttgtggtccattgccgagtaagaaaggtgggcaaaaaacattaaaaacaattactactatattaaagcatcatgcacttaccccactaggagtattgattacgaatgtcagtcttccatctaaaacacaaaatgaagaggaccacattaatcttgcaacattaactgctgactatttatatcctaagtcattcttagaaacaaatgatccaaaatggaattgcatggatggggcaatatctcatggcttcgatccagataaatggcgaagtgaggtggctgataatatagaaaattattacggtcagtatattacaagactattaattgatacgatttctgttatatccccttatgagaattttgtatcgtctaattcattattcaaatatatgtttaaattgggagataaacaaagtatacaaaaaaaaatcgattcattatatcattttgattgtgattataatgggggggatgttattacagatgcagcattttatcccataatgtggacgtttgcggctataaatgaaaattataacaagaatgataaaaattattcacagcacatttacactaactcatcgtataataaattttgtttatcatttttatctcaattaagtatagataatgatgctaattcactaataagaaatatatccacaatgcatttccttatgggagaaggttggggggagaaagattattataatgaatctctgatcgaattatcaaaatttaattggcataaaacattatatccattttgtgatttgtttttatttcatcaagttaaagaggttctgttcagacaattatcagtaccctatcatgttaatattgaacaaactcaacgatggacttataaagctaaagatactcaaatgtatatggatttgtttgttttggatgagtgtcgttatttatatgattggatgccttcttttgatatgttttattcagggatgcaagatgtcgaaagacagtacagctttcgatttatattggatgccgttgcgaaacataggatgatatataataatgaattctttttcggaacagcatccgtttgtcgaatggaggacgggttcctagaaaaaatattaaaagttagagatgaaattctttag

SEQ ID NO: 303827 - DNA, 519 bp, Proteus mirabilis
atgccaactccttgctatatttccattgaaggaaaaactcagggcaacatcactgcaggcgcgtttactgcagattctgtcggcaacatttatgtacaaggtcatgaagaccaaatgttggtacaagaattttctcacgtagtgacggttccgactgatccgcaatcaggtcaaccttctggccaacgtgcgcataaaccgtttcgttttaccgtggcattaaacaaagccgttcctctgctgtataacgcactggcttccggtgaaatgttgccaaaagttgagctaaaatggtatcgcacgtctgttgaaggtaaacaagagcacttctttaccaccacactgactgacgcgacgatcgtgaacatcgattgccaaatgcctcattgtcaagatccggctaaagccgacttcacgcaacttatcgaagtctccctctcttaccgcaaaattgactgggagcacactgttgctggaacgtctggtgcggatgactggcgtgcgcctctcgaagcgtaa

SEQ ID NO: 303828 - DNA, 213 bp, Proteus mirabilis
atgattaactatttaattttgttatatttattggtatcagtaactctttttatatacaggactattaaatctaaaaagagttatcacgataaatatagtttgggtgaagcgatagattattcaacgctatggcctctttatatttttgttgcaccatatttttttatttcagagaaatatcgcaaatttattggtatgagcgaggatagataa

SEQ ID NO: 303829 - DNA, 537 bp, Proteus mirabilis
gtgaaaaagattgaggcaattaaaaagctcttagaatatgacaagcgcggtcgctgcgtttttactaattcagatctggccaacatctttcatcaagataatgaacgagcattgcgtgcaggaattaaacgtttgcaagacgatggcttactcactaggatcattaatggtgtgtacttatacaatttagcgcagtcaaaaggcagcgatacgttggagcaaattgctaaaactattcgacgtggggaatataactacattagcttggagtctgccctttctgattttggtgttatttcgcaaattccagtagatcgcttaactgttatgacaacgggacgttccggtgaattcaaaacgcctttgggtacaattgaatttacacatacaaaacgagctccaatcgacattatagagaataccactttagtcggcagaccacttagattagcaacaaaacaaactgcatacagagacttaaaacgagtcggccgaaatacacatttagtaagcaaggaggaactatatgaaaattga

SEQ ID NO: 303830 - DNA, 279 bp, Proteus mirabilis
atgaaaattgaagttggatttccaattaagtcatttagattcacagatggcgctattgaagaatttaaggataacttaaatttttccataggaactgtatccaccttggaatcaaaagttgttattactaagattttatctgatgatgataattctagcctgacattgcgatatgaagaagattttaatcctgatgaggggttaaagcacttctttggtagagcggaggaatatgctcgaaattattttcatacaatggttaaagcgcaacaaaactga

SEQ ID NO: 303831 - DNA, 531 bp, Proteus mirabilis
atggaacaagataaatttaatgaaaaatttactaaattcccttacagatcagattttattgatggaaataaaaataatggaggaataaatttagtagaacacccagaaaaaatagaagaaattcatgaaatattagagtatccattcatgaaagatattttattgaaaattaattccaccgatacaatttttatgacttttggctgtgattttggagttcaggataatcaccattgtgggtatattgatttttcatacaaaagcaacctcatccctaatgattatacaaagataagaaatttagatagtgaattttatcaatacctctctagtttaaacgttccttggggggaagtagggactccagttgactacgccaaaagtgctctttattgggagtattcagatctagtggtttacgattcgcaaaaatacgagaaagtttctctttggatgaaggcgagagagtattctgcgttagagtggcttgcaactcatttttgtaactttttaattgcttataagtcataa

SEQ ID NO: 303832 - DNA, 1407 bp, Proteus mirabilis; identical to SEQ ID NO: 298192

SEQ ID NO: 303833 - DNA, 663 bp, Proteus mirabilis
atgcaaactatttttgaagttatcagttttattgcatcaatagcatctttaatacttgctattggagcgatttggttatcaattgtattttttaagatgtctgaacacgcatcaaaagaaacaagtaaatcagcagataaaatacaatctagtgtggataagttagagaagttatttgataaattatattccgatacattttcaatgatgaaggataccgttggagatatgcgacagcatatttatcatagccccgaaaaaaataatttatcttttgaagataaacttaattcaatgaaagataacataactaaagattttaaaactctcttagaagaacgatttaaagatcttcatgaaaatggaaataaaatcaaagcattagagttagaagtggaaaaaattctagaaaaacaaataacaactgcgataagtgatgatgaaaaaaatgaggaaataataaaatcaagaataatggaaatattaaaagactactataaaataagtgctaaaagaataattaatataatgatgtcaaaatatggttatactgaagaggatcatttgcatcaatatctattttctttaagagaagaaaataaaataacgtggaatggtagtaatgataaattaaattataatgacattattattgttatttag

SEQ ID NO: 303834 - DNA, 414 bp, Proteus mirabilis
gtgcattgtccgacggggtggggtgatccgtttgggttggagtgttgtccgccaactctgaatcgaactcaagccttaaacaaagctaaggatttggctggaatacctcgctcacaacaaccagttcgacaatggacagttggaaatgaccctaagagaagagggcaaacaaattatcaatattcagaagattttggttcacatgggcgttattacgaatatagagatgctaatggttataaaaaagttgtgttagaacatacacatgatccaagagcaccatatccacatgcacatgcacatgcaggacaagctaagacaggtgctgacccaagaacatatgactttaagcaagatagatatttgaaaatagatgaccctaaaactaaggatcaccacatttattatgaataa

SEQ ID NO: 303835 - DNA, 474 bp, Proteus mirabilis
atggatatattatttgagctttttcttccaaaagatataaaccttgaatcgtttgacttgaatgaaatttttgttgaatgggcaggtgaaaaatattcacaagatcctaaacaatatcaatggaaggattttgttatctttgaggaatataaagatacagatagttacaacaagttaataggaaatgaaattatattagaaaactataactcttataccttaaaaggaaattcgataaacttattgcaagagtttataaatgaaggtaagtcaatagaaaataatgaattatacctgttttttaaagaggttctcagtaagataaataactgggtcgtgctaaccttaatagattatgatcaatttgacaaaatatataaaataagtggtgttgatgatgctttgtctcttctagagaagagttgccattcagaaaatcctgaaggtatagcattgataaaaaacactatttaa

SEQ ID NO: 303836 - DNA, 540 bp, Proteus mirabilis; identical to SEQ ID NO: 297523

SEQ ID NO: 303837 - DNA, 1566 bp, Proteus mirabilis
  misc_feature (1552)..(1559): n is a, c, g, or t
atgaatataatcttttttgaaaagaattcaaacgagaaagtacaattacaacctcatgctaagcatactataacggcgaaagcaggggatgtgtatcagttaattgattcagatactcaactttctccattagatattcaagcgcatcgtaaatcggatgatcttattttatctagtaaagaacaaaatatagaagttgttattaaagatttttggcaagaatgccaaccaggggaacaacaatgttacaccactttaaatgttttagattcaaatggtgtaatgggacaagcaactattactcaagatggtcctgttttagaacatttagttgctggtgaaacaggtactctttctgataatgatgatggaattggtctatttttatgggttgctggttcaatcggtagtgcattagcgatctttttagctaatagaaatcatggtggtgacaataataaaggtaatgaggctgatattaccgcgccgagtaagccaggattaactgcagaagatgatggttctgtttctatcgatttaccaaaagatgccaataaaggtgattctgtagatgttacttttgaagatgaggatggtaattcaaatactgtcacattagaaaagggagataatggctggacatcaagtgatcctgaattaattcctgatacagataataatcaagtcactatccctaatgataagataaaagataatagtgatgttaccgcaagtgcgaaagatccgagtggtaataaaagtgatgatgttactgtaacagccaaacctgatcccgtatcagatatgcctgttttaagcattccagaagttgacgatggttatgcgaatgcagaagagctgaaagacggtttacaagcagaagttactttgccagcgggtacggttgaaggggcggaaatcaccttaacggtcactcgcccagataatactacagaaaccgtaacgcatacagtcactaaagatgaagctgctgcgggtaaagcatctgttgatattcctaaagatgcggtacaaaacggccaaaacagtgtcgatgtcagcataactcaaggcaataatccagccaaaccaggaaacaaagtagattttgctgttgatggacaaatcccgggcgataccgatggtgatggtacggtggataccacgccggtagtgaccattccggaagctgcggacggtgtaaatgctgacgagctaaaagatggcgtacagaccgaagtgactgtaccgggggggagtgcggcaggtgacacactgacactcactattactaaaccagatggatcaaccgatactgttgaacacacactgactgcagatgaagtggcggtaggcaaagctgatgtgactatccctgcagataaagtgacagcagatggtaactattctgttaccgcagaaattactgatccggcgggtaataccagtggtcagggtaaacctactgactttatggttgatacgcaaattccgggcgatacagatggtgatggtgtggtggatataacaccggtagtgaccattccagggnnnnnnnnacggtga

SEQ ID NO: 303838 - DNA, 672 bp, Proteus mirabilis
atggtaagttttttgagaacaaagtccgctgtcttattatcaatagttatttttcctattttctttttattatcaggctgtttttcattcgggttaatgttatcaactaaaaatgataatggttatcatcgttctcattggaaaggcgattcaattaccgcactctctctagcaaaagatagtaacggtactagcggatgggtatttattggtgatcattttgattatttattaataagaggtggagataacgcagtaaatattttaagagatcctcttatccaccatgataaattgagcgtagaaaatccagttgaatttattattgataatcaaaagaagcaatttaatgggaaaattaaaataaattataactgggtaactcaaaccgataaagaagcagcactaacttacggttttatatgtaaaaaagatataaacacctgttcactaaaaatagataatttacttggaacagttcatcaaaaaaataaagaacaaaaaaatgagtatttactaccttttaaccatccctttaatgttgaattctaccaatacaaagaaaatcttattggtgccagcacaccaagaatattattacccgttactttggcgctagatatagtcacatctcctttacaattgctgatgatcccaatactaagcaagtag

SEQ ID NO: 303839 - DNA, 1185 bp, Proteus mirabilis
atgactaaatatgttatttttagtttttttttagtattgatttatcctcttggtgttgatctatacttaactggattaacagcaattgctagcgatttaaatgcttctgaagtgacattacaccatgcattttcaatttatttgatgggaatggtgtcatccatgttaattgctggatggtgcagtgacaatttaggtcgtaagcctgttattttatttggtactctgatttttttcttagcgtcattaagtgctgggctttcgataacggaaaaacagttcttaatttcacgattttttcaaggtagtggctcaggtttttgttacgttgttacttttgcgatattaagagatacattaacagaacaacaacgtgctaaagtactttctatgataaatggtattacttgtattattccggtattagctcccgttctaggctttattattttaatatattgcgaatggtcaatgatgttctatcttatgggggcttattccctattggtttttatcttttgttttttggggataaaagagacttaccataaaaaagaaattaaaaataaaaaagtaaatctatctgtaataaaaccaacaacagactcttttttcactcgctattttttaagtcgtttacttatttcctgcttaggaatggccgttattcttacttatgtcaatatttcccctattgtagtgatgcaacaaatgaattattcaacaggagagtattcaatattaatgacatcattagcaatgataagtatgaccatttcttttttaatgccaaaaatattaatgaaataccgctataagcatattttatcagtagggtttatatgttttggaataggtattattttcctttttatagggaaaaagagtgacatgcgttggttttttattacctttgcattatgcggctcaggatttgcgttattatttgggattattatgagccaagcactttctccctttagccaacgagccggcgttgcgagctctgtgctgggtatttcacaattaagtttttcttcactttatatttgggtaatggggtggattgaagtatcctcaataaatatgttggtggttattttatttatcagttgtattgtaggtactctttttctatgctttcctcggttcacagaacaaaaaaaggttaaatataatgtctaa

SEQ ID NO: 303840 - DNA, 1101 bp, Proteus mirabilis
atgagtaaattaagagtcgctattatttttggtggaaaatcaaccgagcaccaagtttcattacaatcagcaaaaaatattatcaatgaattagatcgaacgaaattcgacctttgtttaattgggattaatgaacaagggcaatggcatgaatatgctgaagacaattatttaattaatagcgataacccctcaactatctcattaagccaacctttgcgtccagtggctattattcctggcagtacccgtcagcaatttatctctttaactgatgggcaacctcttgcacaaatagatgtggtatttcctattgtgcatggtgcttatggtgaagatggcaccctacaaggactattacatatgattgatatgccatatgtaggccctaatatcatgagttctgcagcatgtatggataaagatatcactaagcgcttactggatgatgcaggattagcggttgcaccatttattacactgatggctcaccaattaaatgatatttcctataatgaagttgttgaacaattagggctccctttatttattaaaccagcaaatttaggttcttctgttggtatcagcaaagtcaataatgaagccgagtttaatgctgcattatccatggcatttgaatatgaccttaaagtgattatcgaaagtgctattgttggccgtgaaatagagtgtgccgttttaggtaatgaagagcctgaagttagcccttgtggtgaaattgtgttaaatgatgctttttatgcttataacacaaaatacattgatgacgatggtgcaaaagtagtagtacctgctgatttagataatgcgattagcttacatattcgccaaacggcattgaaagcttaccaagttttaaactgtttaggtatgtcgcgcgttgatgtattcttaaccgaagataatcaagttattatcaacgaaattaataccttaccaggttttactaatatcagtatgtatcctaaactgtggcaaagtacgggattagattatcaatcactcatcacgaaattaattgaattagcgctagaacatcataaaaaaacagccgtattaaaaactaagtgtgagctttaa

SEQ ID NO: 303841 - DNA, 717 bp, Proteus mirabilis
ttgcacgattcattcatatcatatgcagaagaagataatgattttgtgtcagatgtggcgtttggtttgaagagaaatgggttaagtatttggtttgctcccatgtctcttaaggttggagaacgattacttgattcaattgaaaaggggttgaatgaatcacggacaggaattttagtattaagtccagcttacctttcaaaaaattggacgtcatacgaaatggatattcttattagacaaaatattgatgggagcaaaaaaatacttccgatttggtttaatgttactaaggaagatatcgacaataagcatataggattgagtggaatagttggaattacagatgtaaccgatgcttctaaagttgtatctaggttggttgaagtactatcagatggtgcgccatatcgaggtgttattcctagctgggaaaatccagaatatcgttttttgaatggtcttggtgaagtaaaccttcaaactattgatggtaaaacagcaacaattttcgaacttttaatatacagtaaagatgatcagtttcctttttggcttgcgggaaagtcttattctaagagggagcttttaatggaagtttcccgaattataggtgccgatccaactagagtaaaaaaatgggtttcagatgatggttataagctgctttgggatatgtgtgttgaaaatggtcttgatccgaaaatattttactag

SEQ ID NO: 303842 - DNA, 711 bp, Proteus mirabilis
atgaaaaaaacattactcagtcttgttatgctgactgtaatatcaacgccagtattggctaaaacgcctatcgctaatttgaaaatcaatggtgatatcaaaccaccaacttgtactattaatggcgcaacacaaagtgatgttatttttgatttaggtaaaattagtccatcgctgatccctaaatcatcaaattatatatatcctcataatacaacctcgactaacgtcactattgaatgcgatgcaaacacttatcttacatttaaagccactgatacttatgtaaacagtcagcttgatcttgatcaaaccagtaaaactaaagctagtgggatatttcacctggttaataaagaccaggtagacacttccgtggggggaatactattcgtttggtacaatgtgactgtagatggaaaacccgcatttattagccgggcaaatgatgcaacggtaggtttttcagataataaaactgttatagttaaagaagtcactaatggttggacgacaaaacaacaagaaaatgtagataaaaatagtttagatttaatgccaggtcagattttttctaccagcatttcagcagggaaagcatcttctgcatttattttatctaaagattcattaaataaaaaaggcatagatatttctaacggattagattttatcggcgaggctgttctcacttttaactttggtgtctaa

SEQ ID NO: 303843 - DNA, 1134 bp, Proteus mirabilis
atgcttcataaaaaattacatagcgaaatgtcatgggaacaacttggtgagtactataatgaaattagtgatatgtccggtgttcgacaagatccgatccaccatgctgaaggtgatgtagctattcatacacaacaggtgatccacgctataaaatcactccctgaataccaagagctgtcagaaagagagcaacaaattctatggattgcagcacttttacatgatgtagaaaaacgttcaactacccgtgaagagaatgggcgaattatttcgccaggccatgctcgtaaaggagaattaacgacaagacgttttttatatgaaaaagtgccggttagctttattgatagagaacagattgcggcattagtacgctatcacggattacctttatggttaatggataaacccgatcctaaaaaagccttattagcggcttcgttaagagtagattgctatttattggcattgctggctaaggcggatgttctgggacgaagctgtgaagataagcccgctttattggataaaatagcgttatttacactttactgtgaagaattaaattgttggagaacacccgcacgatttatttctgatggcgctcgatttcactattttcatagtgaaaataatgtcgatcctcactatgaaccttatccagagcaaggaagtgaagttattgtgctttgtgggctaccgggaatgggcaaagatagttatattcgccaatattgtgcagatatgcctgtagtaagtttagatgcattacgtcagcagcataatataaaaccagatgatcgtgatgcgaatggatggattgcacaacttgccaaagagcaagcgagaataaatttaagagagcataagccttttgtttggaatgcaacaaatattactaaacaaatgcgtaatcagcttattgctctgttttatcgttatcaagctaaagtgacattggtatatattgaagtcccttatttgcaatggaaaaaacaaaacagcgcaagaaaggaagcggttcccgataaagtgatggaaagaatgttgagcaaactggaagtcccaacaccagaagaagcgcttaacgtgatttattgggttgatggggaagctcaaaatttgatttaa

SEQ ID NO: 303844 - DNA, 1086 bp, Proteus mirabilis
gtgatttgttgccgcaaccgtggccatctaggtaaagatttaaaatggcctcactacgaggccatttttaaacgcgttggtcttatggaaactattaatcaacttacttcaatatttcttaatcatattgaagtagaaaaaataagtctaagaaacctacctaattacatatttttttgtggtggaggtataaatggtgatgacttatcaaaaataaacacatctgaattgggggaatttaactcattacggtgtgctattctacattaccttagtagtcaagaaaaagaactatatcaggatgttattcttgctgaaaaatttcatgattggttagatgacgctaacattaacaatcttattgacttcgaagttctattagcaggtctagctacagcagttattcttatcgttgaaggacctggagcacatgctgagcttggcgcatttagcgtcatgccacaaatatcatctaaacttattactatttataacgtgaatagtattaaaaatggtcaaaggacttttattgaatgggggcctattaaatttcttgaaaaaaatgaaaaaatagttcttcgacatgaatggggggtaatctatcaactagaagacaatgccatatcccaactaattgattataacgatgatttcaaagcgctagtgaatcttataggtacacaactagcaaaagatatccaggggaaaagtaaaaaaacagctgttttttcaagagaaaccccttctgatatgtgcctgctcgttgctgatttagtgtatgttttttctgcgcttaagctaagagaaattaaaacatatataaacgaataccttaagatagatttagaagaaaaaattttaaaagagtacttatattcattaaaaaacctaggattaataaaagaaaaaaatgctggtgcaaaatatttcttacccacggaaaaaaacaaagggtttattaaatatcaatttaaaagttcccctgatctcccaaataatttttctgcaaattatgtaaaatccactctactctctttttatataaaagatgataatgaaagggcgtatgcattagggctaaggtga

SEQ ID NO: 303845 - DNA, 747 bp, Proteus mirabilis
atgaatatagaaaaaaaagactatctagtttcaataattatgccttgttttaactctgagaaatatatttcagaagctattgaatcagtattaaaacaaacatattcaaatttcgaattaataataattgatgataactcaactgattcgacactaaaaataataaattcatttagagataacagaatcactattatttcctttgatgaaaaccaaggtgctggtgtagcaagaaacaaaggcattgaggtagcaaatggtcgatttattgcttttctagatagtgatgatttatggagcaaaaataaactagaagctcaaataaaatttatgttagataataattatcatttaacatatagttattatcagtgctttgataaaaatggaattagtaatattaaaactccccctttatctatatcttataataaacttttatattgcaatattattggatgtctaactgctatttatgattcctatataataggaaaacaatatatgcctctcataagaaaaagacaagatatggggttatggttaaagattttaaaacaatacggtgatgcatattgtctcccttatgtactagcatcttatagaactgattcaggtatgacaaaaaataaatttaatgcagcattgtaccaatggaagttttataagcatgaattaaaatttaacttaataaaatcattatattattttattggttatacatataatggattatttaaaaaataa

SEQ ID NO: 303846 - DNA, 507 bp, Proteus mirabilis
atgaaattaaatgatatttcattaggctgtggaaaaatatcttgcgatatcggtgaatttaaaaaataccccttaaaagaaggttactttaatatttttaatatggctaaaatctccagcgtagagatgttattgaataaaagttttttagcatccaataagattttttttgatacaaaatttggtttaggaggcatttttgattctggtgaagaatatattttttgctccgatattttaaaattaaaaggtacaataaaatattacccaatagtcctttgtcaacatcctccaatctcatcaggaaaaaatttttatttgactcctgagaaaattgcagcaaaaggcgcaatgttctatagaatatttggaaacatgggattattattttcactagcgtttagcttaaaaaaacatagaatatataaaaaaaagttaggcttttttcagttctatcgatatatggtttcaggtcaaaaacatttaaaaaaactattaacaaaataa

SEQ ID NO: 303847 - DNA, 618 bp, Proteus mirabilis
atgtttaaaaaatatttattagcaatttctttattagcattatccagcggtactactttagcagctaaccctattgctaaattaaaaatcacaggaaggatcaagcctccgacttgtactatcaataatgaagagcaagaagccacaatcatctacaactttgatatcactccaggtcttttccctgaaaagggtgacttaaagttagcaggtcaatcaaaaaacattgttatttcttgtgattcaagtacttatttagcttttgttgcaacagataatagattaggaacacagagccaagaaagtgaagccttctttggtttaggtcactatcaatttaaaaataaagatgatggaaaaaatgcagaaacaaaagtaggctattacaccatcaatatcagcaatgccactgtcaaaaaagaagatggtagtaagtttgaaaaagcttatatcaaatctaacaacgccacgacatcagttcctaatacattaattcataaacaaagtgagtatggttgggctttgcctggtaagacatctgttgcaggaaaatcttttgctgctgactttaagtcacccttttcagggaaaagacctggagtgatatcaaagttgtag

SEQ ID NO: 303848 - DNA, 276 bp, Proteus mirabilis
atgtttaaaaaatatttattagcaatttctttattagcattatccagcggtactactttagcagctaaccctattgctaaattaaaaatcacaggaaggatcaagcctccgacttgtactatcaataatgaagagcaagaagccacaatcatctacaactttgatatcactccaggtcttttccctgaaaagggtgacttaaagtcagcagcaaaagattttcctgcaacagatgtcttaccaggcaaagcccaaccatactcactttgtttatga

SEQ ID NO: 303849 - DNA, 645 bp, Proteus mirabilis
atgaaaattagttatttaagtaggatagccaaactaaatataaactctcgatttaataaagatagttattctttaggctatggactcaatggcggcattgtgtttcataatggaggaataactttagcccaagatctaaatgatagttttgctatcctaaattttgcaggtgctaagaaagtaaaaataataggaaagccaacaatagaatcagaccgaagaggttatttaatcattcctaatttaactagttaccataacaataagttccacattgatgcgaaatcattagattataattataatattgataattatagctatcatttaattcctactaagggagctattattacaaaaaatattaaggtaactaaaggagaaagtgctttatttacatttaaccaaaacattccttttggtgcaacagcctatgtgaaaaattctgatggtaccctatccgatatatcctatgtaaatgaagataataaattatatatttctaatttacccatcttaggaaagatttttgtaaaatggggaagttccaacaaacaacagtgctcatttaactatcaattaaatgataatgaaaaacaaaatagaatttattttaaaactgtaaattgcattaaagaggaataa

SEQ ID NO: 303850 - DNA, 753 bp, Proteus mirabilis
atgtgtataagagacagatatataggagttaggcaagcatctaatcataaatataacaatatcaaactttctgttatatacattaattaccaaacattaagattatttctaggtagtgtttattttttattatctcttagctattctatatgctttttaaacgtccatttcacgtactggatattatatggaggaagtttgtatctaataggctatgtgttgactagcgcatggttttatttatcaattggaaacacaaaaatacttattatctcttctctatttactaaattaataaatttattaataataatatttttcataaaaaaaagtgacgatatagatttattaattttatctactactttacctctttttatttctggtttcttattatatttaaatatcaaactaaaattcaaattaaaatttatttttagagctaaaaatatttatcgatatattattaaaggaaaaaatgtattcttaggtattctatctcccaatttgtataattcattgcctataataatactcggttcaatatcgactcctagtgaattttcaaaatttgcaattgcaaccagaatcattggattaatcacatcatttcaagatatctttgcacgatcagtattccctatcctttcacgtgaaaagaaaaatcatataattactctactaaaaataaattcactcttctcagctgtctcttatacacatctgacgctgccgacgatactccttgtgtag

SEQ ID NO: 303851 - DNA, 483 bp, Proteus mirabilis
atgaaagaagattattggaagaattctgtagaactatgttacaaagatattcctaaaaaaattatttgtgaaaaatttatagaaacagaaagtaaagaattaccactagattataaagtattttgttttcacggtaaggcagaattcgttatgatttgtactgatagagaaagccaaaaaccaaaattttttttcgtagataaagattggaatttgttaccatacggcctagattataaatatataacagatgcctctatcctaacaaaacctattggttatgagaaattatttttctatgcagagaagctatcaaaaccatttccttttgtaagagcagatttctatttaaatgataataatattctttttggtgaattaacctttacacccgccgccggtttagatatagaattaaacaacaaagaaataagaaatgttgatataattataggaaatctacttaatctgaatagaatttaa

SEQ ID NO: 303852 - DNA, 399 bp, Proteus mirabilis
atgaaaaatgaaactaatattcgccgtggcagacattgtgtattcctgatgcacgtccatttggtctttatcacaaaatacaggcgaaaaatatttgatcaggatgcaattgaaaaattgcgaggctactttgccagtgtttgtgctgattttgatgttgaactggttgaaatggatggggaacgggatcacgttcatttactgattaattacccgccaaaactggcgatatctaatctggttaacagccttaaaggggtatcgagtcgattacttcgacgtgatcgtcctgatattgcccaacgtgattactacaagggggttctttggtcgccgagttatttcgcggggagttgtggtggcgcagcaatatccattatccgccagtacattgagtaa

SEQ ID NO: 303853 - DNA, 258 bp, Proteus mirabilis
atgaagaaaaatttctctatttttccttgccgacccattatatcatcaagttttaccagataccttcagctaagttacaaattaatcgagatatcaagccatcaacatacactatcaattattcctgaaaatgctaagtatgcattaggctctcaacgtagcgatattaaaacatcctgtaatgtagatacttttttaacatttacagtttcagatttgtttgtagaaaataaagctaacacatggaaaaaactttag

SEQ ID NO: 303854 - DNA, 351 bp, Proteus mirabilis
atgacaggccatgtagtagagattttcgatttcgtttcttctagtccatccataaccgaagacgacataaaaaaatctaacagaaaaatcacaccagttgtaatcgatacttacgggttatttgatagaaaaggatatcccaatagtgactggaggatcattggacatcagaataactatacgcctatgaatatggacgacatatacttttcttacggagttgaaaactcatgctataaagttgacatattcaacaatgattttcctataacagaaaaagaggcgactaaatatccccgcctaatccctcattctgattatcatattaaagaattattaggagctatctaa

SEQ ID NO: 303855 - DNA, 423 bp, Proteus mirabilis
atgtcaaaagagataagcgaattacagtttagtcttcactatgcctcagaaacagacagtgaaaagaatacctccgccattttaacggcgaatatccatacgactgatggtgaaactcaacaactgacacaattaatttgcacgacatcttccgcaggtaaaaagcaatatcgaatcggcttgcaaaaaattagtgatgctggtgctccattgctggtggcgattgaatcttattggcgcaaaaacacacaagagagttgtgtttatttgttagagaaagcgaagcaatttattcaaggacacttacaacaaacgaatacatggatatctatgtatggtcttgtgattgtttctaatgcgtcactggaagaacagttgcctgaagatttattaaaagcacttaaagtatcaatacccgcctaa

SEQ ID NO: 303856 - DNA, 213 bp, Proteus mirabilis; identical to SEQ ID NO: 298619

SEQ ID NO: 303857 - DNA, 297 bp, Proteus mirabilis
atgataaaagattataagcgttggatagtcttacttttagtatcaagtatgctgtttctaattgttgttgatgttaccgtactttataccgcactaccgcgtttaactcatgatctcaatgcgagcgcctcagaaaaactatggatcatgaatgcctatccgctgattgtcgcagggctgttgccagcagcaggtatgcttactgatagaataggtcataagacgttatttattagcggattaccccttccatcgcctcattatgtgcggcttattcccctagtgccaccagcttaa

SEQ ID NO: 303858 - DNA, 513 bp, Proteus mirabilis; identical to SEQ ID NO: 298898

SEQ ID NO: 303859 - DNA, 702 bp, Proteus mirabilis; identical to SEQ ID NO: 303536

SEQ ID NO: 303860 - DNA, 1080 bp, Proteus mirabilis
atgttgaatacgcagtaccgaagaggaaaagttaagttagcttattctaaaaagcaaattcagaaagctggtgattgtattaggaaaaatgagggagatatagagcaagcaattgaagtggtcaggaattttagagctgcccacttatacccattaacaataataaaaaatttagtgtggttacatactaaaaaagttgctcctacgtcaataattgcaagaagattaaaaaggctaccaacaataattgacaagttaaggcgatctacgttagatggaaataaagcaaatgctttaaatttaaaaagaatgcaggacattggtggctgcagagttattttattgggtaaggaacagttgatacagttgaatgaatctttagataatagtaaaacaattcatacaactattagagttaaggattatacagtagagaaaaaatctacaggatacagaggaattcatcggatctataaatgttatgatcaaaaagaagatcatccatggaaaaatttccatattgaagtgcagctcagaacaaaattacaacatatatgggctacaactgttgagatagtggatctatgtgaaaataaaacattgaagactaatccttttgatgcagataaagattggattgaatattttactattatgagtgattttttggcagaagaagacggttttatacatctaaacaatgagacaaaaaataaaatgactcgcagaataaaatctttaaatgtgaaacttaatgcctataataaactagcatcatttagagccgttttttctagaagtgatgtacttaaaaaatccgaagggaaaagtttagctgttttagctattgataatgaaaatagaaaggtcgcttattatttttatgataaaggtaagaagaatgaagcattgaaaatgtataataaagtagaggatgaggatcaaaaaaatgctttatttgttgaaatggatgatataaaaaacttgaaaagtgcatatccgaattatttacttgatacttctgcgtttcttaataaatatcaagcctatattacaaatacatattggcaaaaaccatag

SEQ ID NO: 303861 - DNA, 1185 bp, Proteus mirabilis
atgaagctaacggacatggcgattaaaaaagccaaaccacgtgaaaaggtttactcactaggtgatggcaatggattgtctttaatagttgaacctaacggatcaaaaggctggagattcaggtatcaattcaatggtaaatccaagatgatatcacttggtatctatccggttgttacattaaatgaagctagagaaaaaagggataatgctagaaagctagttgcaaatggagttgacccatcagaggctagaaaagaagaaagaaataaggttagtgggcaatctgagaatacattcaaaaagataactttagagtggtttaatggaagaaaagaccgatggtctgaaggttatcgcgacgacatgatggaagcatttgaaaatgatgttttcccatatattggagatcgcccaatagcagagattaaacctctcgaattacttgaagtgctttcaataatggagaaacgtggtgttacagagaaattaaaaaaagttcgtcagcgctgtggagaggtttggaaatacgccatcatcactggacgagctgagtataatcctgctccagatttagctagtgcttttattccacatcaacgagaaaattatccatatttattggctgatgaattgcctgagtttttatcttcagtagacaagtatcaaggaagtcagatcgtaagaactgctttaaatatcttaatgcttaccggtttaagaccaggagagttacgaaaatcagaatggtcatttatcgactttgaaagtagaacatggaaactaccagaaaaaataatgaagatggggagggttcatgttgtaccaatgtcagatcaggtgatttctttactgcgtcaaatacagccaataagtggcgattaccagtatatttttcctagccgaactaaccataaaaaacatctgtccgaaatggcgataaatacaatgattggaagaatgggttatagaggaagggctactggtcacggctttagacacaccatgagcacaatattgcatgagaaaggatttaatacagcgtggatagagttacaacttgctcatgttgataaaaactctatccgtggtacttataaccatgcgctgtatttggaggggagaagggagatgatgcagtggtatgctgattatatagatgagctgagaagtaaaaagaaataa

SEQ ID NO: 303862 - DNA, 195 bp, Proteus mirabilis
atggacattatcgactcagcaaatgaaacaaacgaactatatattcaagtatcattatcaaatcgcaaggcagcaattaaatcatatagcggaatgtgtatctggtgtcaccaagaaccagtcgcacctaatagcgcgtattgtagtaaagattgcggtgatgaccatgagcagtataaaaggaagaatggatag

SEQ ID NO: 303863 - DNA, 603 bp, Proteus mirabilis
atgaaaaagtatgacttaattcttgctgaccctccttggtcttacaataacaaagtttcaaatggcgcagcagataatcattacaacaccacagatttatattccctctcccgattaccaatagaaaaacactcctctaaaaatgccgtactgtttatgtggtacacaggcaactttgcactcgaagctattaaattagccgaagcgtgggattttaaagttaaaaacatgttcgggttcgcatgggttaaattaaataaaaatgcaggagatagaataaataaaaaaccgccagaagatttctttgacttcatggaaatattaaacaatgagacaaagattaattgcggtaattacactcgtcaaaatatcgaaatgtgtttaattgccacaagaggtaatggcttgcctcgtcaatctgcaagtgttcgacaagttatttattcgtgcttaggtgagcacagcgaaaagccaaaagaggcacatcatcgtttagaggaattatatggagatgtttcgcgactagaattattcgctcgtgagaaatacggcgattgggatgtatatggcgaccaagcggaagaaagtattcaattaatatag

SEQ ID NO: 303864 - DNA, 228 bp, Proteus mirabilis
atgaaacaagttcaagcaatgacgacactagtgttaattgatggagttacatataaaatagtgctccctaaacatattatcgcattacaagcaaagcaagcattaacgatggttgatgaatttgatggaatgctatttccatgtaaatttaccaatataaagccaatggaagctgatggactgccgttttatataagtgatagtggagcggagaatgaaaaagtatga

SEQ ID NO: 303865 - DNA, 204 bp, Proteus mirabilis
atgaaatttaaagtcagtgatagagttagaagcatagactatggttatgaaggaaaaataaagaatatcgactctaacaagaaaaacccttaccaagttgaaataatagaatcggattggatatttacattttggtttgcagaggaagatttggagttaatcaatgaaacaagttcaagcaatgacgacactagtgttaattga

SEQ ID NO: 303866 - DNA, 204 bp, Proteus mirabilis
atgttgtttgtggagatgtatggaatgaaagataaatattatgctggactagaaaattacaaagattgcattgaaattgaacccacaacaaaggattgttttattttaaatactccatcttggaatatggatgtgacaaaacaagacttaattgatataagaaatactattaacgaaatactagaggctgaaaatgaaatttaa

SEQ ID NO: 303867 - DNA, 135 bp, Proteus mirabilis
atgctaatacagggctctgctgtgcctgtaacggaagatatatatacgcaatcggaatgcaatcaacgtgctgaatatttaatgtcagtgaggaatgttgatgttgtttgtggagatgtatggaatgaaagataa

SEQ ID NO: 303868 - DNA, 183 bp, Proteus mirabilis
atgaaattaacagagcgtcaaattagtacattaaaaaatataaataatggatataggcagttaagtaatagtatgtcagttttctcgttggagaatgaagggcttattaagcttcacccaaaggacggatggcaattaacagagttaggcattgaagaactaaaaaggtggagtgatggataa

SEQ ID NO: 303869 - DNA, 162 bp, Proteus mirabilis; identical to SEQ ID NO: 303541

SEQ ID NO: 303870 - DNA, 5334 bp, Proteus mirabilis
atgaaaatattaagtgatattaataacataaaagaattatgttccaagcaaataaacattgacaaaaataaattttcagataaggacaatctgataaaattaggtcttgattcaattggatttatgcaatgtttatatattttccaaaaaaatggttatgctataacattaaaagatttgtatttaaatccaacaataaaaggatggtataaaatattaaaaaaatcagatataaataaaaaagaaagaaaagataatatatatacacataaaacaataaaaaatgctggtgagttttcacttacacctatacaacatgcctattttgtcggccgtttgaataaacaaactcttggtggtgttgcttgccaaatttatcaagaatttgatggcacccctaaatttactccggaaagtctagagaaagcattagtattattatcaaaacgtcatcccatgttgaatatagtatttcaccaacagggtacacaattttggtctcctaacccaaatagaaaatatgttacatatcatgattttagtaaattaccaaaagatgagtatgagaaaaaacttttacaattacgggaaaaattaagccatcaggtactaaatgttgaaagcggtcagttaattgattttcacatgatatcgctacctaacaacagatatcgtttatgtactaatattgatatgttgattgcagatggtacaagttattcattactctttactgaactttgtttattattgagcggagaaatactgcctcagttagatgagcactatgacttttaccattatttacaagataaaaaacagtatgaaaacaaagaatcagcatatcaatattggaaaaataaaatcccaaacctaccagactctcctcttctgccattatatatggatccagaaaaaataaataaaataaaaattaaacgccttagctggacatttagctcaaaagaatggaaaaactttagtaatttggctaaagaaaataatattacaccttccattgcattagcaacctgtttctcatctgtacttgcaagatggactggccaaaatagcttattactcaactttacattatttgatagaaagccattagcccctgcagttaataatattatagctgattttactaatgtcattcttttagaaatgaaaacagacaatcgaccattaatttcattatctaaagacaatcaaaatacatttattgaagcttggcaacattctgattattctggtattgatatcattagagaccttcgtaaaaatggcacccatccttatgggtgtcctgttgtctttactagccatattaatcaaccacttattgataaaaatatagaatctgtattaggttctataggatggggaatatcacaaaccccacaagtttggcttgatcacatggcaattaacaaaagtggaaatattgttttacagtgggattataacaatgacttgttccggaatgatgttataacaacaatatttgatgtttatatttctcgtatacgccaacttgccaacgatcctaatgcctggattgaaacccaacctgatttaattcctaaaaaacaattaaaaaatagaatatcagttatcaaaaaagataattcactattaccacatacactgcataagtctattttccataattattcaaattcatcaaaaattgctgtcattgatatcgactctcaggaatggagctacaaaaaattattatctaaagcaacaatactcagtgatcaaataatacaacaaggttataaaccagaagacagaattggtgtatgtatgccaaaaggagtagggcaaatcattagcgttctggctattttattaatggggggaacttatgttccgattgatgtactacaaccagaagaacgtataaaccgcattgctaaaaatgctcagctttcattactcatcgtatctgatagcgatccatcctattcaatctatgctacattttgtaacaggattgtttggcaaaaagttcaaccctccgagaataaaccactacacaatatagatatatctcctcatcaagcagcttatgttatttatacttcaggttctactggagagcctaaaggtgttgttgtatcccatgccagcgcaatgaatacctgccttgatctcaatcggcgatataacatttcagacaaagatcgggtacttgccatatcagcactacattttgatctgtctgtttatgatattttcggtgttttaaatgccggagggactcttgtattagttaaagaagatgagcgccgtaatcctgatgcatggttacgacttattaaccaacataaaataacactttggaacagcgtacctgcactgtttgatatgttactaacctatgcagaaggaatagggtcatccattccacaatcgctgctattaatctatctctctggagattggattgggcttgatctcccgacacgttactataatttctgccctgatggacaaatagtcgccatgggaggtgccacagaagccgctatttggtctaactattttaatgtcacaacattagacccatcctggagctcgataccttatggatatcctttatccaaccaacgttatcgtattgttaatgctagaggagaagattgccctgattgggtatcaggagaactttggattggtggtgcaggcgttgcgttaggctacctaaacgatcccgaaaaaacagcacaacagtttgtaaaacaaaatggtgaaaattggtataaaacaggtgatatgggaagatatctccctggcggtatacttgaatttttaggaagacgtgaccgccaagttaagattggcggataccgtatagaaccaggggaaattgatgctgcattcaataagcttcagggtgtgcaaaatgcgattacactatgccttggtaatggtaataaagaaaaagcattacactcttttgtgatactaaattcgggtaattaccaggatattatcagttcaaatagcaccttttctcccctctactatctgcgctcaaccccaataaatgtacaacaacaatcccaagaaacggcaatcatagctggatttttatatgattatcttactgaacaaaatattgatttcgacaacctcttgtcagaaaaaaaatcagcagatgaccatagcattatcgctagctatcagtcattaatggctaattggctaaatttaatagcacaatatccacaaactacactcaattcccccccaactaatagtacccagcgaacgctaatagaaaatttgcagcgccacaaaaacaatttaacagacatactcaaaggtaaaaaatcagctctaacactatttgatgatccctattggtcaccagaacaagtcactatgcgtattgatggaatgcactactccttagaaaatttactacaacaaataagagaacttcatcattcactaaaaaggccaataaaaatcattcaattaggtgctagaagcggtatttcagcaaattatattctgcaacgattacccactaatatggttaccctactgctaactgatgagtctctttcaatggtaacgcaagctaaccaaaatttatcagattatcaaaatagttatgctgagcctcttacagaagtatttcttcataaaaatcgatatagtgcagatatcatttggatgaacaattatcttcatcgattagacagcccacaaaaagagatacaaaaattcgtttcactctgtgctccgagtggaatgatttttatacaagaagtgttacatgcccctgcacaatcactgataagcatctctttattacaacaaaatggtagtgatcctgctgatgaattattaacagcaaaaaaatgcaaagatatctttagcgcttctactgcgacttataaaagtgaaggagttaacggcgaaatattgacacagttataccaagcaccagaaaaaatttatttaccagataaaaataagctagagcatgatttgcgccaatttttaccagactatatgatcccaaaacatatttattttctaactgagttccccttaaccgcaaatggcaaaatagataaccaatcattaaaattgtattgtcaggaataccaagaagaatacctaaatcaacaacctatcaatggtaaagaacagatcatcataacaatatggcaaaagctccttggcaccaacaagatacaccgtcacagtcatttctttcgtgaagggggagatagcctagttgctattcgattgatctctgatttaaaccatattggctaccaagttgaactggagcatatctttgcttatccgatcctttctgattttgcacaaaatataaagcagagcgaagttttcgaaaaacagccagcaatttcacataacgaggcgtatagatacaatccatttccactcactgatattcagcaagcttacttagttggacggcaaaataattttacacttgggggtgttggtacacatttttttgtccattttatagcggaaaatttagatgtacctaaattagaacgtacaattaatcagttgatttctcgtcatgatatgttacgtggtgtcattattaatggacaacaacaagtacttaaaaaagttccttattattccgttaaaacgcattatatccctacagaaaaaagtgacgcttttctagtattacgagctcaacttgctaacattgtttatgatccagaaatttggcctttatttactattcaagttatcaagaccaaagaacaaccagatcatatttttattagccttgataacttattccttgatggaatgagtatgcagatatttttcagtgagctaaaaacactgtatatggagccaaatcaccaatttatccctctagatattacttttcgagattatattgattgtgatgcctatccgattaacacacaaaatgattgggaatattggttaacgcgtttaccacaattaccaccagccccacaattgccactaataaaagatccagcacagattgtgcaacctcgcttctcgcgtttacaaacatcattatctacttctgtttggcaagcactacaacaagttgctcagcaaaataatgttacgccagcagcacttttgattgctgcttattgcgccacattatccgcatggagtaaaagccctgagttaacaattaatttgacattatttaatcggcatcctgtacatcctcaaataaatgaagtacttggtgattttacctcattacaattactcgattggtatacctgtgatctttggtcaaacagtatctcaatgatgtaa

SEQ ID NO: 303871 - DNA, 1386 bp, Proteus mirabilis; identical to SEQ ID NO: 302640

SEQ ID NO: 303872 - DNA, 921 bp, Proteus mirabilis
atgaaaagtgtaatcttcccgctgttagcggtacttatttggtcaattaatgcggttgtcaataaagcggcaacatctgtgatagatccagccgctatctcattttatcgctggttcttagcatttttactgatgacgccgtttctgttagtccctgtttggcatcatcgtaaaaccgtaaaacaatattggtggaaattatttattctcggcgcattaggtatggggttatatcaaagtttagcttactatgcggcttattatgtgacagcaacctttatgggaatattgaattcacttattccattattaaccgttattattagtatttttgtactgcgtgtcgtgcctactgtagggattgcactcggaactattttatctattagtgggcttgtctggttagtcagccacggtgatccttcacaactcctttctcaaggtttaggacgtggtgaattaatgatgtttatcgcatcaactgcctatgcattttacggagtacttaccaaacgttggtcaattcctttacctaattggcagtctctatatgtacaaataggttttggtgttttattactaatacctaattttcttaccgcagaaagtattgcattaacaaaagataatgttggattagttatttttgcaggggttggcgcctctattttagcgccttatctgtggatcttaggtgtaatgaaattaggtgcaaatacaacctctatctttatgaatttaattcctctatttaccgcaatgatcgctgtagcagtgttaggtgaagagatgcacagttatcattttattggcggaggcgttatattgttagggatattcttagtacaaaaactaagagcaccactgaatttccgtcgtcaatctgtcacaaaaaaagcagattgtcagcaggagatgtga

SEQ ID NO: 303873 - DNA, 402 bp, Proteus mirabilis
atgcttagttttaattttaaaacagccagtatgattgagttagtggaaatatatttatcaatattcttcttttccatgtctctttcattaaactcattttttattttttcattatttatatcttctggtgatgaacttgacaaaataaaaataataatttttaagtatagagtttttggattgtttaagttgttatcatttatattcccttttcttgggatgttttttctaatatcatatttcagttttttaattgcaattttctcattacttagtttttttgttatgaattattgttatgaaaggttaataatgaaagcaaaaaaaaagagcaaaaaaaatttgaaacgatgccctgcactagcagggttttttatacctaaatttcagaggatacaatga

SEQ ID NO: 303874 - DNA, 1173 bp, Proteus mirabilis
atggcacaagattatcatcacggtgtgcgcgttattgaaattaacgaaggcacccgccccattcgcactatcagcaccgctattgtcggcgtggtttgcaccgctgatgatgcggacgaaaaaacctttcctttaaacaagcccgtcttattgaccgatgtatcacaggctatcggtaaagcagggaaaaccggcaccttagccagtaccttaaaagccattgcagatcaggctaaacccatcactattgtagtacgtgttgcacaaggtgaagaagaggcagaaaccaccactaatattatcggtggtactaccgaagaagggctaaaaacagggttacaagcactgttagcatcacaagcccaacacggcattaaacctcgtattattggcgcgcccggtcatgacacgttagcggttgccaatgagattgcggtgatttgtcaaaagctccgcgcctttggttatgtgtctgcttacgactgtaaaaatatcagcgaagcaatcaagtaccgtgacaactttggtcagcgtgaattaatggtcatttttcctgattttacctcatgggatagcaccaccaacagcgaatcaaccgcttacgccacggcgcgtgcgttaggtctgcgtgccaagttagacaatgatatcggttggcataaaaccctatcaaatatcaccgttaacggtgtcacgggcatttctaaagatatctattgggatttacaagatcccgcgactgatgccggtttactgaatgaaaaaggggtgacgacacttatccgccgtgatggttttcgtttttggggttcgcgtacctgttcggatgatccactgtttgcctttgaatcttatacccgaacggcgcaagtcctcgctgacaccatggcggaagggcagatgtgggcaattgataaatcgttaacgccatctttagcgcgggatatcgtcgaaaccatcaatgcaaaattacgttcactggtcagtcagggctatttgttaggcggtgaatgttggtatgacccaacatcaaatagcaaagaagcactcaaaggcggcaaactcacactggattatgactatacacccgtaccaccaatggaaaatctgatgttacgtcagcgtattaccgataaatacctgatggatttcggcaacaaaatcaaggggtaa

SEQ ID NO: 303875 - DNA, 2163 bp, Proteus mirabilis; identical to SEQ ID NO: 297952

SEQ ID NO: 303876 - DNA, 312 bp, Proteus mirabilis; identical to SEQ ID NO: 302598

SEQ ID NO: 303877 - DNA, 342 bp, Proteus mirabilis; identical to SEQ ID NO: 281111

SEQ ID NO: 303878 - DNA, 1209 bp, Proteus mirabilis; identical to SEQ ID NO: 281112

SEQ ID NO: 303879 - DNA, 249 bp, Proteus mirabilis
atgaatctttccaaagttaaaaattacgtttctaataagtatcttgctgcatctttatttttcgtttctgggctggcagcggcagaaggcgggatatcaggtgtgccggattatgcaggtcaggcaatggattcactgttaacacaggcaaatacccttattggcaaagtctggccggttgttgtggcggttgtcggtgcaggtctggcaattcgtctgttcaaaaaattctcgtccaaagcggtctga

SEQ ID NO: 303880 - DNA, 267 bp, Proteus mirabilis; identical to SEQ ID NO: 281114

SEQ ID NO: 303881 - DNA, 1128 bp, Proteus mirabilis
atggctgatagcaaagatcgtgctgttttcgttgactatctggctttttctgcatctttgtcggtgatgaaagatgttgattcattttcggaaaaagggtttgaatggcgtaaatttcagtatttaccgtcatataagcattatcaaaattcttcaatctatacctgtgccgaaatttatcagggtatccccgaggttaaccattcacaacttactgaagaacaaaaaaatcaatatataacagatgtctacgcttgctatttttcccgacttaaaacgtggatggcttcggtatttggtttagttgttggtgtaccacgagggaaagggggatttgcttatcaggattctgccgttttatacagcgatgagggcggttatgagcgtatgggtatgctgtattggggcggaaataaagacacgttttatgttcagatctccggctcaggttgtactcatgtttttagtggcacaacacctcagaaaatacacaagtggtttaagcatcttgatatcacacgattaaaacgtcttgatttagcaacagatgattatgacggtatctatacatgtagtgctgctttatcggcgtatcgtgatgatgcgttctatggtgggttgggaccgaaacctaaacttgaaaaatccgaagcgattgatgctgatggttgcccgactaaagaaattgttaatgtgggttcaaggcaatcaagggtttactggcgtatttataataaagcgttagaacaaaaagtgtccggtgtttggtatcgttcggaagttgaattaaaagagatttctgttgatgtgttgcttaatacagcgggtatttatacaggtttatgtgattatgcggctcaaataaacccgtcagtgcctacctcaattcctaaattattcggtagaaaagccattgattccattgaggcaaaagttaaatggctgcgtaatcaggcatccgcaagtatagcaaaagtattccatttttttaacggggatattgaaactgttctatcgatgattgttcgtgaagatcatattactgatatgaatttaaggttagatatcccgccaatatatcagacgttattaaatgagaaattaaatacgtcacaatgtcctttttaa

SEQ ID NO: 303882 - DNA, 195 bp, Proteus mirabilis; identical to SEQ ID NO: 281115

SEQ ID NO: 303883 - DNA, 252 bp, Proteus mirabilis; identical to SEQ ID NO: 281116

SEQ ID NO: 303884 - DNA, 297 bp, Proteus mirabilis; identical to SEQ ID NO: 281117

SEQ ID NO: 303885 - DNA, 912 bp, Proteus mirabilis; identical to SEQ ID NO: 302630

SEQ ID NO: 303886 - DNA, 933 bp, Proteus mirabilis
atgccaacagctagagtattatcaactataccagcttacaatcgtgaatttgatgattattgtcgtaaattgaaaactctttctgagcgtgcgacagtttatcttttgcatgatcccgaaataaaaacaatttatagggagaatattagtaggacgatagcatatttacgtgaagaattttatcgaaaaatgaatagtggtgaagattattttacttatagaaatagccgccaaaatatatttaatggtcttatttatttatatcaaaatgaagagacggattatcagaaggggagaaaagactggtctatttatgaaagtacaaaaaaatttgaagagcagggatggattttctatacaagagaagggtttcaagtccttggtggtggtgttcaaatagcgggtggatatttgacatttaaaacaggaaaaatagtgagatcaaataaattaaaaggaataggtactttggctattgcaacaggatttagtgatatcgctgaacatagtgctatcatccaatatgagataactaaaggtgagtctggagggtataataataattatatacaaaatattatggctgatatttctgaatatgcgggatatagtaggaatagcggggcgttgacttacaagacagtagattttggtgttagtttgtttctttcatttggtgcattagttaaattaaaagatcctaaaaggttactaaatactccttttattcctataaaaaatagaaataaagctatgtatcctagcttaattgatcgttggttgaatgaaaagggggggctttttttatggcatgcaatgcgtgctgattttacatttaaagtaaaacaaatgtcacatccttatttcttatatacttctgctatggcagcaaataagtttaggttattactttcggaatatactgataactaa

SEQ ID NO: 303887 - DNA, 231 bp, Proteus mirabilis
atgaacctcgcaaacctaactcaagaagaaaaagacaaaattaatgtcgatttggccgcaagtggtgtcgcatataaagaacgcctcaatatgccagttgttgcctcagaagttaaacgacaacaaccagcacatttgcgcgagtattttaatgaacgactagcgttttatcgtgagagaagcaagaagttgccagatggaaaatcggtgcagtatttgaagacagaataa

SEQ ID NO: 303888 - DNA, 261 bp, Proteus mirabilis; identical to SEQ ID NO: 297696

SEQ ID NO: 303889 - DNA, 489 bp, Proteus mirabilis
atgattattcaagcattaaataatagagaattcttaatgaaaccaataactcaggataaatttaacgagttactggatgaattcggagaagaccaactagcaagagagttggactatttgcaaaaaagagggttagtacaagacggtgctgtgagaatcggcgttgtcgatgatgagccctattcttttaatattcacaaaatggggttaaccgctgatggtgttgattgcgctaatgccgacactcttggtaacaaattaaacgttgtgaacataaaaattcacgaaagcaccattaacaatttagaagcaatgatcagagccgttaacctacctgatgaagataaaaaaactcttctcgatatggtaaaagaaaagggcgctgaagctgttgttagcagaatggttgattatgcatttgctaatgcaagtattgctaccaagctattccttgaagccgccaaaacaaaacttggctttcatgactaa

SEQ ID NO: 303890 - DNA, 3897 bp, Proteus mirabilis
gtggcactatcatctgcgatgctctacaaagagatagagcaactctcgttgcgggatcagcaacgattgagaaaacgcttacgtggcgttgataaaataagtaaagaaacgtcgaaacacgcggtattaagcgagattgagcaggatattattgttgcaaaacagcgtatattaaatcgacaagctcactgtcctaaaattgtttatccagaaaacttgcctgttagccagaaaaaagaggctatctacaatgcaatcaaagataaccaagtggttattattgcaggggaaacgggatcgggtaaaacaactcagatcccgaaaatttgtctcgaattagggcgaggcgtaaaaggttatattgggcatacgcagcctcgacgtttagctgcacgctctgtcgcagagcgaattgctcatgaattaaacacaacattaggtgagtctgtcggttataaagttcgttttagtgatcatgttggtgataacacgctagttaagttaatgactgacgggattttattagctgaactacaacaagataagctgttattacaatatgatactattattatcgatgaagcccatgaacgtagcttaaatattgactttattcttggttatttaaagcagcttttacccaaacgcccagatttaaaagtgattattacttctgccactatcgatcctgagcgtttctctaagcattttaatcaagctcctattattgaggtatctggccgaacttatccggtcgaagtgcgctatcgtcctattggtggtgatgctttggatagtgataaggatatgactgagggcattattgatgcaattgacgagttaagtcgagaaagtgcgggtgatattcttatttttatgagcggtgagcgcgagataagggataccgcagaggcattaaataaattacaactacgtcataccgaagttttaccactatttgctcgtctttctaatagtgaacaaaaccggatatttcagcctcataccggaagacgcatcatattggcaaccaatgttgccgaaacttctcttacggtacctggcattaaatatgtgattgatacgggttatgcacgtattagtcgatacagttatcgaaccaaagttcagcgcttacccatagagcctatctctcaagcttctgcggatcagagaaaagggcgttgcggtcgtgtttctgatggtatttgtattcgtctttattctgaagatgattttatttcccgtgcgcaatttaccgatcctgaaatactaagaaccaatcttgcttcggttattttacaaatgacctcgataggattaggggatattagcggatttccttttgtacaagcgcccgataaacgcaatatacaagatggtgtacgcttattagaagagctgggtgccttacaagagggtactgataataaaggtgcttatcgtttgacgccgatggggaaacaattagctcagcttcctatcgatccaagattagcgagaatggttcttgaagcacgcaaatatggtgcagttagagaattaatggtgatcacatcggcgctttctattcaagatcctcgtgaaagaccgatggacaagcaacaagcatcagatgaaaaacatcgtcgtttccaagataaagattcagattttctttcattactcaatttatgggactatttaaaaactcagcagaaagagttgagtcactctcagtttcggaaacactgtcgccaagagtttttaaactttatgcgagttagggaatggcaagatgtctatacgcaactacgccaagttgtgaaggaattaggttttccaattaatagccaaccggccgattttaaaagtattcatgtggctttattaagtgggctattatcacatatcggacaaaaagatagcgataagcaagagtttactggcgcgagaaatgcgcgttttgctatttatcccggctctgggttatttaaaaaaccgccaaaatggaccatggtggcagaattagtcgaaacatcacggttatgggggcgcattgctgcacgcattgaagcggaatggattgaacctatcgcgacccacttagttaaatatcactatagtgagcctcattggtcaaaagcacagggtgcggtaatggctaatgaaaaagtcaccttatatggtttacctattgtggcctcacgattagtaaattatggcaaaattgatccactattatgtcgagagttatttattcgccatgcgttggtagagggcgattggcaaactcggcatgcttttttccgtgaaaatttaaaattacgtaccgaggttgaagagctagagcataaatcacgtcgtcgcgatattttagtagatgatgaaacgctgtttacattctacgatcaacgaataccacaagatgttatctctacccgccattttgataaatggtggaaaatagcgcaaaagaattcacctgatttgctgagctttgaaaaaagcatgcttatcaaagaagatgctaaacgtgttagtgcattagattatccaaattattggcatcaagataatttaaaattacgcttaacttatcagtttgagccaggtacagcagcagatggcgttactgtccatattccattaccgattttaaatcaggttaaagatgaaggttttgattggcaaattccgggtattcgtcatgaattagtcgttgccttaataaaatcattacctaaacctatacgtcgtaattttgttcctgcgcctaactacgcttcagcttttttagaacgagtggttacccctgaaggtgaattactcgataaattagaaaaagagctacgtagaatgaccggcgttacggtcgaacgtgatagttggcaacttgagcaagtggccgatcacttaaaaatgacttttcgagttgttggtgacaacaataaaacccttgcggaaggaaaagatcttaatcagttaaaagcacgtttaaaggacaaagttcaagaaacattatcagcggtagcagatgatggtattgagcagcaagatttacatatttggagttttggtgacttgccacaacgctacgaacaaaagcgtggtagctattcagttaaagcctatccggcattagtggatgaaaagaatagtgttggtatcaagctatttgaaacagaaacagagcaacaagcggcaatgtggcaggggataagacggttattactacttaatattccttcacccattaaatacttgcatgaaaaattgcctaataaagcaaaattaggtctttattttaatccttatggcaaggtgctagatctgattgatgactgtatcgcttgtggggttgataaactcattgcttcttatgggggattaatatggcaagaagagcaataccaaaaactccaagattatgtccgtgctgaattaaacgatgttgttgtcgaaattgctaaacaagttgagtctattttaactcaagtatttgcgattaataaacgcttaaaagggcgggttgatattagtgtcgcttttgcattatctgatattaaagcacaacttaatcaattagttttccccggatttgtcacatcccatggctggaaacgtcttgcggatattcctcgctatctcagtgccattgaaaaacgtatggagaaattagcgattgatcctaaccgtgatagagcacaaatgagccgagttgaaaatgtcattttgcagtggcaacagtggttagctaagttaaccgagaagcaaaaacaacaagaagaggtacaaaatattcgttggatgatagaggaattaagagtgagtttatttgctcaacagataggaacgccttatcccatctctgataaacgcatcttacaagctattgagtctatctcattaagttaa

SEQ ID NO: 303891 - DNA, 612 bp, Proteus mirabilis
atgtattttcagtatggtgaaaaagagatctcttttttaaaacaaaaagataagcgtctagccgcggtgatggaaagaataggggaaattaaacgtccacttacccctgatttatttaccgcattaattaaaaatattattgaacagcaaatttctgttgcggctgccaccacggttcagcaacgtttacttaccctatgtgatggtatttatactcctgtacatattgctagtttatcagtgcaagatattcagcaatgtggaatgacaatgcgtaaagccggttatattaaaggtatcgcagactcagttataaatcatacgttagatttagaccaaatccccgctatgtctgataaagcggtgatcaataccctaataaaattaaaaggtattggcatttggaccgctgaaatgttattaatttcatcacttaatcgtcctgatattttaagttggggggatttagctattcagcgtggtatcatgcgtttatatcgccatcaaagcttagatagaacacgctttgaacgctatcgtaaacgttattctccttatggttcaacggcttcactctatttatgggcattatctaaagaaagcgcagactaa

SEQ ID NO: 303892 - DNA, 864 bp, Proteus mirabilis
atggaaaagagacattatcaacttattgaacaagcctgccgttttattgaagaaaatcagggtgatgtttctcttgccgacatcgccgcacatattcaatccagcccatattatttccatcgacgatttaaatctataatgggaattacacctaaagagtatgcgaatgcttatcggcacaaactaattaagaaagcattagctggcgataaaacaattacagatgcgatatatcaatcaggctttaatgcgaatagcagattttatgaaaatgcgacggccatattaggtatgacgccaacccattggcgcaatggtggacaaaatatcgtgattttttttgctgtagggatctgctcattaggccatatccttgtagctcaaagtgaaaagggcatttgtgcgataacacttggcgatgatcctgcgtgtttattagaagaattacaaaaacaatttcctcaagctgaacttgttggtgcaaaccaagagtttgaaaaattggttgcccaagtcattggttttgttgaactgccaacacaacctttggcattaccacttgatattcaaggaacagtatttcaacaaaaagtttggcgggcattattagatattccttttggttgtaccatgacatatcaagaaattgctcaaaaaattggttcgccaaaatcttatcgagcagtggcgaatgcctgtgcatcaaataaactagcagtggcgatcccttgccatcgagttatcagacaaaatggtgaaatatctggatatcgttgggggattgagcgcaaagaaaaattattacaaagagaaaaatcccttcatcatcagcatgatagattggctattagcaagagcgattaa

SEQ ID NO: 303893 - DNA, 849 bp, Proteus mirabilis
atgacgaacgcattaattaataaaggtgaagccccgtcggtcgcacccttcggagcttctgataacgtcacaccacacataggaaataacgtcatgaatactttaacaactactaaccaagttgtcaccatgtctagccgtgagattgctgagctcacaaacaagcaagtcaaacatattcacgttgatatctggaatatgacagagcaactttacggtatcaaaaaagatggtcgtgatttcgaccattataaaaatcagaaagttacattatctagcggcatctctataaccattgattctcgtggttacgtttcagaatttaaccttgaccgttaccatactgaagttcttatcactggttacaacttaaagcgccgtgctgcagtaattaagcgctggtacgaccttgaaactggcaaagctaaaccatctattgatccaatggtcgcgcttaatgaccctgctttcttacgtgatgctttaatttcttacaccgaaaaagttatgcatcttgagcaccaagtcgaagaaatgaagcctgatgttgacgctttaactcgtatcgctaaagcagaaggttctctatgtattactgatgcagccaaacaattgcaagttaaacctaaatcattgtttgacttaatgagtcatagcaaatggatctatcgccgtattggaacagcttggattgcgtatcaagataaaatccaacaaggattgcttgagcacaaagtcactgttgttaaaagttctactggtgaagataagcaagtatcacaagttcgtgtcacagcaaaaggtttatctaaactagctaaattattaaacacggaggtagcggcatga

SEQ ID NO: 303894 - DNA, 168 bp, Proteus mirabilis
atggatgaactttacacccaaagagcaacagagagatataacttaagaatgcctaaaagaatcaaagatagtttagagaaaaaagccagagaagaaggattatccttgaactctgcaattcttcagcgattagtttggagtttaaaaaatgacgaacgcattaattaa

SEQ ID NO: 303895 - DNA, 333 bp, Proteus mirabilis
atggctaaatatccaagtcaattacaagacaagttcaatttacggctacctgatggcatgaaggatattattgctgaaagagcaaaagccaatggccgctctatgaactctgaaataattcaaatgctacaggatgttttagatagcgatagtaaaggtgacgttactatagatgtggctgataaaaactatattgaagatgattgggtggcagggataagggcatatatggagtttaagaaaggggaaaaagggcaggttttactaacaatagatcttgataagataaaaaaactgagtgatacgagacagaaaaaagacaatgaaaaatag

SEQ ID NO: 303896 - DNA, 408 bp, Proteus mirabilis
gtgaggaaggttatttttttatcgttattgttaatgatgctttctgggtgcggtgatataggtaaatacgatggtgtttacgcctgtgatatatctcaagctcttaacgataagacaatagaatacggtggagattatgttttccctaaagatactaaaaaggcaaaaataaaattagagaatgctgttctaactatctatgggatgaattctggtgattacatcgggcataagatgtctaaacctagcaaagatgacattaatgatgatgtatatgatggtgattttttctataaaaaagatggcataatggaagcattttcatttgatagaaaattagcaaccctaactattaatagggaaggcatgaagtctatacagcagttttcaggatgtaaaaagcaataa

SEQ ID NO: 303897 - DNA, 408 bp, Proteus mirabilis
atgcccattttggcggccatgacgcttgcacgatactctatcgccgcatctttgccatccttcatctctatttttaatgcagtaacattattttcaaggtcttgtagcatcacttcaaagttatttgataacctcgcttctaatgctgttctgaggttcgaaatagcatctttcgcctctttaggtggaattttagcatcctctaacgccttggaaagcttagctacttgggtttctatatctgcaatagctggcgaacctgactctaatgttctcaacaataattcgttagcttcacgaactccgccaacggattttagatataaagcattagcttctatttgttcgtcggttttacctgtcctttctttttctgtcttgtttaataattccagtgttcgggaatag

SEQ ID NO: 303898 - DNA, 336 bp, Proteus mirabilis; identical to SEQ ID NO: 302672

SEQ ID NO: 303899 - DNA, 279 bp, Proteus mirabilis
ttggcaggggggataaatttatatgcttatgcgccaaatccattgacatgggtggatccttggggttgggctgaatttgatgttgatagttatgaaaatttgagagcagcagtaaaaggtggaaatactggtttagatgcccatcacgctggtcaaaaagcaataatggcagatcttgtttcaggatatgaccctaaaacagctccagctattctagtttctaaatcagggcatacagtatcaaaagagggagtaggtattgtttacgcagtaaaataa

SEQ ID NO: 303900 - DNA, 456 bp, Proteus mirabilis
atgaattttgatatcaacattatcagagctgaaattgaggactgggctgtagaacaagggcaagaacatgttgctattgagattagccgagcttacttacgattagtgattaatcaagaacatggtcgattacatgccattgaggatcaagcgggtaaggcagactggaaagcaatcaataataaccgacaacagatatttcgctggttaagaggtgattcccgtgcatctcaaagaaagattgctgagttaatgccagcgatagaaatggcactaccggcttcgaggttagctcgagtacgtggagatacaaaaaactatttagcaaccgtggccattcagcgttttgctgatgctatgactgaaatcttattagaaggtcgtgacatgtcacaccaaataaacaatgtagtacgtgcattaaatgagatatcacgcccgaccagcgtgcattaa

SEQ ID NO: 303901 - DNA, 1233 bp, Proteus mirabilis; identical to SEQ ID NO: 303561

SEQ ID NO: 303902 - DNA, 1164 bp, Proteus mirabilis; identical to SEQ ID NO: 303562

SEQ ID NO: 303903 - DNA, 333 bp, Proteus mirabilis; identical to SEQ ID NO: 303761

SEQ ID NO: 303904 - DNA, 456 bp, Proteus mirabilis; identical to SEQ ID NO: 281107

SEQ ID NO: 303905 - DNA, 222 bp, Proteus mirabilis; identical to SEQ ID NO: 281108

SEQ ID NO: 303906 - DNA, 174 bp, Proteus mirabilis; identical to SEQ ID NO: 281109

SEQ ID NO: 303907 - DNA, 1302 bp, Proteus mirabilis
atgcgatggttacttgttagtgtcatgatgttattttcattaaattcatttgctgaacgtattgaaatgaataatgtgcctgtctctgaatttacagactggtattcaaagaaaacaggtaagggcgttattgtgccggataatttcagtgaaaaaatcactgtttttaattctgatattcagcccgatgaaatacacggtttttttgtctctgtcatggcatcgcgcggttatgatgtgaatccgggcaacccgatagtaatcagccgcagtaagaagggcgttcatgtggtgacaaatgacacagataacgctgatgaggttaatcagtactgggatgaacagggttccagcctgcaatatctgccggattatccgtcaccggaacggggaaaattttttgaccagaaaaccgaaacgtaccgtctgaataatgtcttggcgaaagatgtgtttccggtcgttgatatcttccttaagtcgtcaccgtattccggcggtcaggcaacggttgacgagggcagcaacagcatcatcgttacaacgtcacaggaaaatcagcagcagttagaatcctttattccgtccgttgatgtgcagcgcacacaggtgctgattgagagtatcatgtttgaaaccacggacggcagcagctttgatttttcgttcggtgtgggtaaaaaagacggttcacgggttgtcggcgggattaataccgcatcactcggtgaggtgttatccagctcgggcggttctttcggtattttttccggtaatgtgctgggtctggcactgaccgccgttgagggtgataaacacagtaaattgttgtcagttccccgtgtgttaaccatgtccggcaagcggggttatatttcctccggtcagaacgtgccgatagtgaccggcaaaatcacgggtcagggcgtggatatcaaaaatccgtttcagactattgaacgccgtgatgtgggcatttccttagatgtgactccggtggtgctgaacaacaataccgttatgctgacggtcaaatcgaaagcggacagcatttccaatattgccaacgccacggatatcgtgtttaaccagcgttcgattgatactacggtgcagcttaaagacggtgatacgttactgattggcggactgattcagcataatgtggtgaatgccaatacttcaacaccttatgcgtctgatatcccgctgataggctggctgttcgactcaaaatcagacagtgacgataaagcggtgatgtacattcttattcgtgcgcgtatcctgcgggcagtttag

SEQ ID NO: 303908 - DNA, 852 bp, Proteus mirabilis
ttggaactcatcgggcgtggtaatcagtcttatgatgaatcacgtaatggtttactggtactggatgaatgcggtacatggctgaatacccgtacatggaatgataaaagccgtcagcctgttctcgactggtttttacatgcccgtaaattaggctgggatatcatttttctggttcagaatattactctggttgataaacaggcaagggaggcactggctgaacatgtggtttactgccgtcgccttgaccgcctttctgttccgtttgtcggtgcggttttcagcctgatatttggttttaaattacccgcgccaaaaattcatctgggtattgtcaaatacggtgatgcacagcattcacctgttgttgaacgctggttttaccgtggcacagacctttactatgcctatgatacaaaacaacaattttcttctttctatgacaggggcgtttacagtgtcctcccgccgtatctgacacatggtcgttatcatcattctttaacggtaaggcaatttatgcgtttaacccgaatttatctgaaacggatctcacgtttccggctgttactgatgggagcggtgctgggtgcggcgggagcttattttctttccggtaataccgctgagccggcacagttacagacggcatcttacagttcagtaccggatttaaaaatacagtcttttaagcggtttggttctgattcttatattcagtttattgataaaagcggactggtcattgattccaacaggctgacagcacagggctataacattgaagtcattaattcatgcaaaatgcggatatacaggggtgcagaaaatgcgatggttacttgttag

SEQ ID NO: 303909 - DNA, 873 bp, Proteus mirabilis; identical to SEQ ID NO: 277180

SEQ ID NO: 303910 - DNA, 933 bp, Proteus mirabilis
gtgcatttaaatacactacttgaaggatatgtagatgttttagaacgcagaaacaaaggggaagatgctgttgggatgataaaaagtggtattgaagctttagatgacaaaattggaggctttaatccaacagacttagtttttattggcggtcgtcctgggatgggaaaaacagagcttgcactaacgatgactgagggaatgaccagagatggaggcggtgcattattcttctcgatggaaatgtccaatcagcaaattactgagcgtctagttgcaggttctgctcaactaccaatatcaacattgagacatcgtgggcgattggatgatgaaggatgggggcgtttaagttcagcactaggccatttaatggatagagatattcatatcatcgatgcgagtaatctaactattgaacaaatatgtgcaatcagtgaaaaccacaaacgtaaatatccaaatttgaaaggaatttttgttgattatttagggttaattaaaaaacctaaagcagaacgtaatgatttagcaattgcgaaaatatctgcatctttaaaaggattagcaaagaggttacacacgccaactattgcgttaagccagctatctcgtgatgttgataaaagacctattaatcaacgtcgtcctgtttctgctgatttacgcgattctggtagcttagagcaagacgctgacttaattttatttacctatagggaggccgtatataaccccaatagccctgcgaaaaattatgccgagatcattattgataaatttagacacggagaaaccggcacagtctatcaagaatttaagaatggccactatctgcctaccgaccaaattacagcgtcagaagtgtccaaaatgcaacaacaatcacagcaaaacgataaaagacgtcgttacgcagaaaaagcattttag

SEQ ID NO: 303911 - DNA, 567 bp, Proteus mirabilis
atggtcaaattacagtttgcaggctatttacgcagatttggacgcaggttcgagcttgaggtaagtaatgcaggtgaggccttacgctgtctttgctatcaaatagatgggttgaaaaaagagattaaccaaggtcagtttcgcgttcgtatcgcaggtaatgatatgaccgaggatagtatttccacgggattaagtacgccattaaatgaaggtgatgttattacgatcgtccccatagttggtggtgctaaatctggcgggtggctaggcattattggtggagctgctttaattggcgcatcgtttttaataccgggcggatttttggcaacgatgacatcgaccgcattatttgccgctggtgtaggtgtggccgccgcgggattggcaaccatgttaactaaaacaccgccagcgccaagcatagaggggcgaaactcagaaagtaaccagtatttcagctcgttatcaaatagagtcggtcaaggttatccggttcctatctgttatggcgagatggttgtgggttcaaatgtaatatcacaaggtttggagactgtttaa

SEQ ID NO: 303912 - DNA, 1887 bp, Proteus mirabilis
atgacaatcacggaactgtcagatcgcctttgggaagacgttgaccgagtggcgaagtatttattacctaatggcaaaaaagagcacaacgaatgggtagctggatcggtaaacggtgaagctggaaaaagtttaaagataaacctttctggcaaaagggtttggtctgattttgctgaggggattggtggtgatttactggacttatgggttgaggttagagattgcagtttgcatcaagctatgaccgaagctaagaaatatctaggcattcatgatgacgatcaccatttctcagcgaagagacagaaaaaatttagtcgcccaaaaaacgaatcactcaagaaaaatatccgtaaaactgaaaactgctacacatacctagaaagtcgaggcattagtcgcaagatagccgaagaattcaaagtttgtgacgctgttgtctggtctcatgatgttaatcgtgagttgcccgctatcgcattcccatacaagcgagatggtgaattattgcaggtgaagagaattagcactgagcgaccaaatggcaaaaaagcaatttcggttgaggttgattgcgaaccctgtttgtacggttgggatcagataccaaaagacgcaagagcgataattatttgtgaaggtgaaattgattgtatgagctatcacgaatatgggctttctgcgctatctgtaccattcgggggaggtaagggggcaaagcaacaatggattgaatttgaatatcacaacttagaccggtttacagaaatctggttatcactagatggtgacgaagttgggaaagaggccgctaaggaaatcgccaagcggttaggagaatatcgttgcagactggtgtcattgccaaaaaaagatatcaacgaatgtttacaagctggaatacctcaagaagaaatcattaagtatcttgaaactgcaacttactttgatcctgatgaattgtgtagtgcccgtgagtttatgcaggacacaatccaagcattttacggcaaagagcaatatcttttcagaagcccttgggaaaccttaaaccatcaattcagttttagagagtctgaattaaccattctaaatggggtgaacggtcacggtaaaagcgagattttagggcatattctttgtgaggcaatgagacaaggtgctaaggcttgcgtggcttcctttgagcttaagcctgcagtatttcttaaacgactaacacgacaagctacttgcaataaattacctaccagcatggagattgagtcagcatttagtttttatgacgatcgcctttggttgtttgcgctaacaggaacagctaaagccaaaaagctattggaaatattccagtatgcaaaccgacgttacggaataaacctgtttgttatcgatagcctgatgaaatgcggaattgatgacgatgactacaacgggcaaaaagagtttttagacgcaatatgcgacttcaaaaacaaaactaacagccatgtcattttagtcactcacagccgtaaatctgatagtgaggataaacccacgggtaaaatggacgtgaaaggctcaggctcaattactgacctaacagacaacctgtttatcatctggcgcaacaagcgccgtgagagagcattacagaagctacaagcagggcaacaactaacaccagaagaacagaatcacaccgctgaacccgcatcagttttatgtttggagaaacaacgtaacggagaggggtgggaaggtaagatcccattataccttgaagagcgttctcaccagttcttaatcatggaaggcggttctccctataactacatcgccaatatgcctaattctgaatatgacgaagtatggcaagacgaaaacgttaccaagtattaa

SEQ ID NO: 303913 - DNA, 606 bp, Proteus mirabilis
atgatcggaccaattaatactgcaacttcgacaaatggtgccagcaacagtattagtaaagaaagtcagcaagacatagaatataagcaaccacaaataaacgaaagtgaaaattatcaaaatcaattaatagaaatatctgatgatatgtctatggtggcaactcttttttctcagcgattaggaaaattattagacaaaaaagccaataaagggcaagaagctttatatattgcagaagatggtgctgatgagaaacttgataaggtgatgcttcaatttagaaaatcggggagaagtttacaggaattattgcaatatttacgtaaaatgttccctgatcctagtgatctcgttatggttttacgagaattacttaggaaaaaaaaattaggtgcacaattagatgcaggtattgaaaatgagatcaataggttacttgcaggtgaggagggtaagcaaattaaggcgggcattaatattgctctccaagctaaagcctttgctaaattactttgtttagatgcatcagtattaagagacctttaccgtagttacattattcctgtctcttatacacatctgacgctgccgacgaaggcttag

SEQ ID NO: 303914 - DNA, 846 bp, Proteus mirabilis
gtgagtaatcaagacagcacgcaacaaaagaatatttatcgtcctgcaccacctcgtttggtgcaagtaaaacgtatagtagatatcacgccgggcatgcgctctattacctttactagcgatgacttggacaattatccaagtcacacagggggtgcccatttaaaaatatttttacctgtagaaggccaaactaaaccaacaattccaacactcactgacaaaggccctagttggcccgaaaaccaaccaagagcgatagtacgaacttacagtgtgcgagctattcgtcctgaattaaaagagcttgatattgaatttgcggttcatgaagatgcagggccggccattaattttgctttaaatgccaaggtaggtgattatattggcattactaatcctggagggcctgatcccctattggctcccgcctctcattactatatggcagccgatcccagctcattacccgctttaatggcattaattgaaacaatgtcacccgatgtacagggtaaagcggtgatccgcatagaaaatgaatccgatcgccaaatcattgatgctcctcagggactagaaattgtttggttagtcggctctgttgaaacacaaactcagcctctgattgatgaatttatctcttggtcgttaccaaaggaagatgtggcattttggatcgccggagaagataaaattatccgtgcactaagacgttatattcgtcgtgataaaggctatgagcgcggacagatttatgctatcccttattggcgttttggctttaatgaagaaggttatcatgctgagcgtcatcatgttatggataatgaagatgtaagctaa

SEQ ID NO: 303915 - DNA, 456 bp, Proteus mirabilis
atgaattttgatatcaacattatcagagctgaaattgaggactgggctgtagaacaagggcaagaacatgttgctattgagattagccgagcttacttacgattagtgattaatcaagaacatggtcgattacatgccattgaggatcaaacgggtaaggcagactggaaagcaataaacaacaaccggcaacagatattccgttggttacgtggtgattctcgcgcatctcaaagaaaaattgctgagttaatgccagcgattgaaatggctctaccggcttcgaggttagctcgagtacgtggagacaccaaaaactatttagcaactgtagccattcagcgtttcgctgatgctatgactgaaattttattagagggtcgtgacatgtcacaccaaataaacaatgtagtacgtgcactaaatgagatatcacgcccgaccagcgtgcattaa

SEQ ID NO: 303916 - DNA, 204 bp, Proteus mirabilis
atgtttactgatatccgcgcagccattgaagaggctaggtggcttaggcaacaaacaaagcatcatcatgtcgtcactcaaaaaagaaacggcttcttatcggttaggcaggaggtcggcatgtcgagagaggcattactcagaaagtcatttagcatacgctacgactgccataatcacacagtattaccggaggcgagatga

SEQ ID NO: 303917 - DNA, 354 bp, Proteus mirabilis; identical to SEQ ID NO: 302995

SEQ ID NO: 303918 - DNA, 144 bp, Proteus mirabilis
atggcctattttttagctacaggtgggctcgttgttttaatgagtaccataaaagagagttacgatgtttttcctattgggtatgttaataaaaatatcggttacgattttatcggtcattggctaaaagaaaagatattgtaa

SEQ ID NO: 303919 - DNA, 789 bp, Proteus mirabilis
atgtgtataagagacaggagtattaacgtagaggtagataataaccataaagaaacaaataaaattaatgacatggtaatattatcttctatctttggtacaaaaaaaataacagaaaaacagctatattttgtattgagatgtgagaataaattaggaaccttaacggcattaatttcagttagtcaagtcatggataacttatatcctgaaaaaaaaattgattgggaattagtacctgaaaactatttaattgctcttttttcacaatctttatcaacattattatttcctttttctaaagagccaatgtcatcatgtgttgataatatctgtttaggcactgaaaaaggatcttgctatccttgtgttgataccacattaggtcatgtttttatttgcgatattaaatggaaatatgaattgacagtatttccaaaaaataaaataggttttataacaagttttattttagggtacagtaaaatatcactttcattattaaaaacaatattaccaggggatgttttattaatagatgatattcatttttcttttaatgttggtgataaaaaatatttttatttttcatgggatgagggtaattgtgtgacattagatgttattgttgaaaatagtgaagaaaatgaagaggatgagcaaaacgatgccataatagaagatagcattgatttagctcaatcacttgatttagctcaatcacttgatttaaattcaattggcgctattccgattacaatatcttttcttttagccaatgaccgataa

SEQ ID NO: 303920 - DNA, 927 bp, Proteus mirabilis
atggatacgttgagccaactcttatacctttctcaagggcaattgcaattagatgtgttttgtcaaatgaaaggacatttttccttaccgcatgtttcatctgttgaacatgaaactatttttcacttagttctatcagggcagtgttatgttcagattgaaaaatcagcccctatagttttatccgaaggcacttttttaatgttaaacagaaggcaatcacataccctttggagtggagaacgagatatagaacctccctcttttttgcataaaaataatggcttcttacctgttaagtacacaaaatctgaagatcagactcaacatgttgatttgctttgcgggcgaatgacttatgctaaaggaagcgggttactattattaaatgggtttcctgatatggtagtggcaaatctggtggaaatgccagggctaacagtattgaatttatttagccagttgcttcgagaggaagccattaatgcaaatcaaggggcggctgcgatattaaatgggcttgctcagactttattcgcttttgcattacgtgtttatgggcaaaaaccagatataaactcaagttggttagcattattagctgaacctcggttaagtcgtgtatttaattctatgttaaatgaaccacaaaaagggtggacacttgattctttagctaatgtcgcttcaatgtcacgagcgacttttgtgcgtcaatttaaagcaacggcgaatacgacacctggcgaagttctacaatccattcgtatgctaaaagcactttcattattacaacaaaataaatatacattatcagatatcgcagaaagagtcggataccaatctgaagctgcatttagtaaagcatttaaaagtgtatttaattgcagaccagggcagtggaagaagcaacagagtaaagtgtaa

SEQ ID NO: 303921 - DNA, 336 bp, Proteus mirabilis; identical to SEQ ID NO: 294439

SEQ ID NO: 303922 - DNA, 249 bp, Proteus mirabilis
gtgctgctgtccgcagccaaactctccggctgttacacggaaggggtggtgctggcgcggaaagtggaggcgctgttccgggtggtacagccgagcttatatctggcgctggggatgacggaaaaagaggagaagcagcaacggcgggtgctgatggagcaatacggatgcagtgagctggaagcggcgttcagggtggcagatgaacttgaccggaaacgggggttaccgccccgggtgccgggatga

SEQ ID NO: 303923 - DNA, 840 bp, Proteus mirabilis
atgccccatcgccatcccgaacgaaaaacgctcactgttcacatacggaatggaagatattgcggtcaccccggcaatccccgcattggcccgtttctccacctgactgattttattgtccagctgactgaaacgctggtcggtatactgccgggcattgtccagcaccgtgtgggtcacctgcccgaacgtctcatcggtatagcggtttgcggccgccagggtctgttcctccccctcaatacgggcctgctgctcttccgtaatccgcttgtttatcttcgcctcactgtactgaatgctcacatcggtgtagtccatggcctgtttcagcgtctgcttatcgccggcaatacgcgcatcccgctcctcatccagttgccctttgttgaccgcatccgtttttgcaatgccggccgccacatgcgtcagaaaacgttcctgaccttcacggccgacggacacgctgttatcccggtcagccaggctgccgtcccccagtgccacactgtttttcgccagcgcccgggcatccacactcagtgccacggatttttcgcccagcgccagactcttatccccgaccgcaacagcctgtttaccctgactcagcgtactctgcgcctcattcagggctttatccgccgcctgatattccgcctgtttctgcgccagttcggctttcaccttctccagatcccggatgttttccagctcggattgcgtcggacgcaaatcagacaactttgtatccagcgcggagagatccttttccagccgggagagttgcgtttctgcctgcttcagtgcctgatcggtgacggctttttccgccgataa

SEQ ID NO: 303924 - DNA, 1836 bp, Proteus mirabilis
atggtggttaaaaaagatgcggtttcgttgtttcggactataaagcagttgctcagtcaggcgacggaagtggtgattgccacggatgcggacagagaaggggaggtgattgcccgtgaattactggaggcctgtcattacagaaaaaaggtgcaacgtttatggttgtctgcactggatgaggcgagtatcaggaaggccttaaataacctgttacccggcgagaaaacggcctccttatattcagcgggattgggacgtgccagagcggactggcttatcggcatgaacatgacgcgtctgtttaccctcaaagcccgggaactgggttttggcgggatattgtcggtcggacgtgtccagactcccacactggccctgattgttcagcgggaaagagaaattacgcactttgtttccaaaccgttctggcgggtaaccgcgtctttacagcatcaggggattgtttttcaggcgcactggcgacctgctatgcaatattgtgatgatgagcatcgttgtattcatgttcaggcggctcaggcggtggcgcagctgtgccggcaggcaggcaaggcgacggtgtgtacggtaaatgaaacgaaaggaaaagcattgccgccgttgccgtttgatctcgggacacttcagcaggctgcctcaaaacgttgggggtattccgctgataaagtgcttgaaatcgctcagagtctgtatgaaaaacataaagccaccacgtatccccggacggactgcgggtatctgccggtgtcgatgcgtgccgatataccggttgttttaaacgcattatcacaaagtgatccggccttacagaatgtgctggcacaattgcagccggcgcgtatttcccgggtctggaatgatgcaaaaattacggctcaccatgcgattattccgacccggcatacaccggatttaaatgccatgaatgaggctgaactgactgtctacaaacttatccgtacgcattatcttgcgcagtttttgccggatcaggaatgggacgcgacagaggtgtttttagatatcggcggacaacaatttgttgccaaaggaaaagtggaaagggtgaagggctggtctgtattatttgtgaaacatgaagacgatccgtcagtaaaagaagaggcagaaaccggacaggaagccggaacggaaacattgccgtctcttcatgaaggcgaattcttcgtggtacaggaggcaaaggttctgcaactggcgaccacaccgccgaaaccctatacggatggtacattgattgcggccatgaaaaatgcgtcatcttttattgccgatccgacattaaaaaaagtgctgaaagaaaatgcggggctgggaacagaagcgacccgggcggggatcatcaccacgctggaaaacagaaagttgatagtcaggcagaaaaaaacgctccgggcgacagacactggctgtcagctgattgatgccctgccggcagtctgtacggatccgggaatgacagcgttatgggaacaatcactcgaacaggtggcacagggaaacttgtctctggatgtgtttatgcaaaagcaaatcagctggctggtccatctcattaagaaagggtcggaaatgccgctggcactggatctgccgccgatgccatcctgcccagtgtgtcagaataagatggtattacgggaaagcagtaaaggacgtttctggagttgtcagcattatccggattgtaaagggagtgtaccattaccagaaaaaatgcagggcgtcacacgggtggttaaaaaaagaaagaaggcagtgaagaagagcataacaggactctttacctga

SEQ ID NO: 303925 - DNA, 1833 bp, Proteus mirabilis
gtggttaaaaaagacgcggtttcgttgtttcagaccataaaacagttgctcagtcaggcgacggaagtggtgattgccacggatgcggacagggaaggggaagtgattgcccgtgaattactggaggcctgtcattaccggaaaaaggtacaacgtttatggttgtctgcactggatgaggcgagtatcaggcaggcattaaataacctgttacccggcgagaaaacggcctctttatattcagcgggattagggcgggccagagcagactggcttatcggtatgaacatgacgcgtctgtttaccctcaaagcccgggaactggggtttggtgggatattgtcggtcggacgtgtccagacgccgacactggccctgattgtccggcgggaaagagaaattacgcactttgtttccaaacccttctggcgggtgaccgcctcgttgcagcatcaggggatcatttttcaggctcactggcgacctgcctcgcagtattgtgatgatgaacatcgttgtattcacgttcaggccgctcaggccgtagagcaactgtgccggcaggcagggaaagcgacggtgtgtacagtgaatgaaacgaaaggaaaagccttgccgccgttgccgtttgatctcgggacacttcagcaggcggcctcaaggcgttgggggtattctgcggataaagtgcttgaaatcgcgcaaagtctgtatgaaaaacataaggccaccacgtatccccggacggactgcgggtatctgccggtgtccatgcgtgccgacataccggttgttttagatgcattatcacaaagcgatccggccttacagaatgtgctggcacaattgcagccggcgcgaatttcccgggtctggaatgatgcaaaaattacggctcaccatgcgattataccgacccggcagacacctgatttgaacgccatgaatgaggctgaactgaatgtctataaacttatccgtgcccattatctggcgcagtttttgccggatcaggaatgggatgcaacagaggtgtttttagatataggcggacaacaatttgttgccaaagggaaagtcgaaagagtgaagggctggtctgtattatttgtgaaacatgaagacgatccgccagtaaaagaagaggcagaaaccgggctggaagccggaacagaaacattgccgtcccttcacgaaggtgaattctgtgtggtacaggaggcaaaggttgtacaactggcgacctcaccaccgaaaccgtatacggatggtacattgattgcggccatgaagaatgcgtcctcctttattaccgatccgacattaaaaaaagtcctgaaagagaatgcggggctggggacagaggcaacccgggcagggatcatcaccacgctggaaaacaggaaattgattgtcaggcagaaaaaaacactccgggcgacagacaccggttgtcagctgattgatgccctgccggcagcctgtacagatccgggaatgacggcgttatgggaacaatcactcgagcaggttgcacagggaaatctgtctctggatgtgtttatgcaaaagcaaatcagctggttggcacatctcattaaaaaaggcggggaaatgccgctggcgctggatctgccaccgatgccatcctgcccgtcgtgtcatggaaagatggtcttacgggagagcagtaaaggccgtttctggagttgtcagcgttatccggattgtaaagggagtgtaccattaccggaaaaaatgcagggggttacccgggggatgaataaaagaaagaaggccgtgaagaagagcataacaggactctttacctga

SEQ ID NO: 303926 - DNA, 249 bp, Proteus mirabilis
ttgcaaaaaattagtgatgctggtgctccattgctggtggcgattgaatcctattggcgtaaaaacacacaagagagttgtgtttatttgttagagaaagcgaagcaatttattcaaggacacttacaacaaacgaatacatggatatctatgtatggtcttgtgattgtttctaatgcgtcacttgaagagcagttgcctgaggctttattaacattaattcattcaaaatatgctagtctttcttga

SEQ ID NO: 303927 - DNA, 246 bp, Proteus mirabilis
atgattaagcttgaaatcaataatgcggaatatattgctcagttagaagaggctcgtttatctgtagataaccctcgtggctatctgtttatggacattgtcttttctgatccaaagcttgatgagaatacgtttgaaatgaagaatgttcgtagggaaccgatgaagacgtatatgacggaagctgtggcaagggatttgtttgataagttgggattttttttctctaacaagctgatatcctaa

SEQ ID NO: 303928 - DNA, 261 bp, Proteus mirabilis; identical to SEQ ID NO: 27108

SEQ ID NO: 303929 - DNA, 411 bp, Proteus mirabilis; identical to SEQ ID NO: 277239

SEQ ID NO: 303930 - DNA, 933 bp, Proteus mirabilis
atgggtggccaacgcattaatgccactcactcttatctttccagcgttgaatttagtggcgtacccggcacgattattcccaaaggctcattagcgtctagtgttgccggtgccatgttcgaaacagttttatccttgattattgataataccggcaaagcaacaggggatatgagggcggttgaatatggtcctgttgaatgcggggccggccaacttaattctgtggctagctcagtattaggttgggagaaagtcaataatcccactcatgcggttgttggccgttatgctgaatctgatatcaaagcaaggcgacgacgtaagcaaactctggctaaaaataccgtcagtgtcgcggaagcgatcacctcttcactgtatgaattagagggcgttaattcactttcttttcgagaaaactacaccgatgcggtgttgactattgatggagtttctctattgcctcacagcatttacgtttgtgttgaagggggcgatagtaacgaaattgctaaatcattgctgagaaccaaaaccattggctccgcttttaatggcgagattgaaatcggtgttgtagagccagtgagtggacaagaatataaagtgaaattttcacgccctaaagagatcaccgttttttgtcgagtgacagttaaaaaatcagccgttgatgcgcaaactattatccctagtgccatagaacaatggacgcgtggagagttggacggcgataacggtttgattgttgggcgtgaagtatcgccttttgagatagcgtatgcagtgaatactgttgaacctcgtctgttcgtgactaaggttgaattgtcactggacgggaaagtatggaatgttgcattaattccgattgccattaatcaaatcgcacgcttgcaacggggtgctgtgcaagtggtgattgtatga

SEQ ID NO: 303931 - DNA, 657 bp, Proteus mirabilis
atgaacgttcaacaatttgagttccattcagacctattaaaagcgatcctctggcagtatgaaaatgcagagaatttaaagaaactcgccagttttaaagcctctcattttgaaaagtcgatggtgtcattttggcaaaactggtaccgagatgtgtttaatatcgatacggcgaatgactttgggttgtcgatttggtcacgcattctggatgtacccttaggtattgatattccaccgagcgataaaaataaagtcgggtttggttttggcaaaaagaaagccaattttaaatctaacttccgacgtaatgcggattacaccttgtcactgaccgttgatcaaaaacgcatgttagtacgaatgcgctattttaatctgacacagagtcctacggtcaccaatattaatgagtttttaaaacgtttcttttggcgtgatgacagcaaagtctttgtccttgatccattggatatgacttacatgtattacgtctttaacttcaaccctgacgaacgtctacgggttcttctcgaaaacttcgacttaatgccacgcccttcgggtgttggcgtcaaatatcgcattgtgaccaaaaaagcctttggtgttggtcagtatcgtaaaaacttcttaggcagtaacttcggagcataa

SEQ ID NO: 303932 - DNA, 645 bp, Proteus mirabilis
atgaaaattaattatttaagtaggatagccaaactaaatataaactctcgatttaataaagatagttattctttaggctatggactcaatggcggcattgtgtttcataatggaggaataacgttagcccaagatctaaatgatagttttgctatcctaaattttgcaggtgctaagaaagtaaaaataataggaaagccaacaatagaatcagaccgaagaggttatttaatcattcctaatttaactagttatcataacaataagttccacattgatgcaaaatcattagattataattataatattgataattatagctatcatttaattcctactaaaggagctattattgcaaaaaatattaaggtaactaaaggagaaagtgctttatttacatttcaccaaaacattccttttggtgcaacagcctatgtgaaaaattctgatggcaccctatccgatatatcctatgtaaatgaagataataaattatatatttctaatttacctatttcaggaaagatttttgtaaaatggggaagttccaacaaacaacagtgctcatttaactatcaattaaatgataatgaaaaacaaaatagaatttattttaaaactgtaaattgcattaaagaggaataa

SEQ ID NO: 303933 - DNA, 399 bp, Proteus mirabilis
atgctagatgcctttaatgaagctattgcggatggtgtgataaaggaaaatcccgtttccgtgacaaagccaccaaaaacaagtgttcagcgatcaaggttatcactagaagagtttaaatacgccttggagcacacaaatgacaaatataggcatatgttcctattggcgatacttacaactcaacgtattagcgatattatcaatatgaagtgggatgatataaaaaatgataggctgtatgtcactcaaataaaaacaggttctaaagtagcaataccactctcattaatgcccgtcctatcttttgcagataacttaaaatattcacacactcccccttggataacccctatttgggatcttatttatactcatttatatttattgatgagttaa

SEQ ID NO: 303934 - DNA, 240 bp, Proteus mirabilis; identical to SEQ ID NO: 272469

SEQ ID NO: 303935 - DNA, 369 bp, Proteus mirabilis
atgaagatgaacacgttttgggtacgtggtgcccgccgtatgggggcgtcagtgatgacgttatggacgttattcagtctgatgccggcgtatgccgcgctgccgcaggtggagcccccctcttccggcggtggtggcgggctgatggatacgattaaagggtatctcaatgacggcattgtgattggcgggctggttgtggcggcggtggcttttatagtggtggccattgcggcagtttccaccttcaatgaagtccgggacgaaaaagccggctggggtaaattcggcgcgattgttgtggtcggtgtggtcctgattgtggcggtcgtctggctggccggaaaatctgccaccattattttttaa

SEQ ID NO: 303936 - DNA, 417 bp, Proteus mirabilis; identical to SEQ ID NO: 277206

SEQ ID NO: 303937 - DNA, 555 bp, Proteus mirabilis; identical to SEQ ID NO: 279311

SEQ ID NO: 303938 - DNA, 1089 bp, Proteus mirabilis; identical to SEQ ID NO: 302681

SEQ ID NO: 303939 - DNA, 123 bp, Proteus mirabilis
atgcaagtcgtcagttcgcagttcgggagcaatcctgttactgaccccggtgggaaacacgttcctgccgggacgatgtttctcatttttttaccttttttatccgatggagagacatcatga

SEQ ID NO: 303940 - DNA, 126 bp, Proteus mirabilis
atgatttatatccatcagaataaaaagagtcctgtacgtggtaacgatattcgtacatggagcggtcaaatcgttgaatgtcagcagagctttttacatcaacaatccagtggtgctcttgaatga

SEQ ID NO: 303941 - DNA, 375 bp, Proteus mirabilis
atggtcactgaattaaaaaaagggaaggccatttggtttgcaccagatcaagattttggtttaaaaggaaccaccttttcaccatttttttcggttaaggaaacgtctacttcaaaaggtgctgttatattagcaaagttatcaggagctccttctttaacggtaacattggtacgtaaccatggtcatgatgataaaaaatatagcttaattataggtaaagagcttcataattatccaacagaaaatattcaaaatgatacagatagaatgaatcatctgattgaaattgagattatgcgagcgccagagcaatacttatgggctcatagacgttttaagaccagacccaaaggtgaagccagtttttattaa

SEQ ID NO: 303942 - DNA, 297 bp, Proteus mirabilis
gtgtacgctaaaaattctttttcactacatctgttacaccctaaatattttcttacttggctaggcgtatttattctttttttattagtacaattaccttacacgtggcttttattcttaggaaaacatttaggattactatcgcgtttttttattaaaagaagagtttcgataataaaaaaaaatttagagttatgttttccgaataaaagtaaaaaagatatcgataagctagttatggaaaatttatcagcattaggtattgctccaaaaccatgccatgccagtttcgaatag

SEQ ID NO: 303943 - DNA, 306 bp, Proteus mirabilis
gtggtgtatctggatgcgcctgagcgcttgctggatgaggtcctgcttcagccggggacggaactgagtgaagcggatgctccgcacatcaccgccctgttacaaagtccggcctggcaggccagagaggcggcattacggcaggcttatcagggggttattcaggcctgggagctgggggtgacccgtctgccggcggtggtggtggatgcgcagtgggtggtttacggcaccaccgatattgcacaggcggtgacgcagatacagcagtaccgggaacaacaggaaggaggaggtcaaccatga

SEQ ID NO: 303944 - DNA, 444 bp, Proteus mirabilis
gtgaataattttgatttgcgtgaatttgataatgtgattattagtctcggaacaaatgattttgttcaatatggttcggatgaacggcagaaatattacagtctggtatttcaattaattgctgaaattcaaaatgaaaatcccttagcgacaattatctggatatctccgccacatttaaaaaatccggaacatgaacattatttaatacatacccggcatataattaaacacagtgcgatgttattaaatattcattatctggatattaatcagcctcatatattgggtacacaatggcaacctgttattcatcatgaaactgtccggactgatgatggaattcatattacccgtaaagggggggagcgggtaatcagggaagtggtaaaaaatcctgaatggacaggattgacaaaggtagaaaaaatgactaaaaattaa

SEQ ID NO: 303945 - DNA, 528 bp, Proteus mirabilis
atgattggggctgtagctccacaacctgattttactactgcggaatctgccgctttgatcgccaataagttttcaggttgcagtattaatttgcatgtaccggctgtagtgtcaaatgcacgtttggcaatggagctacaagcagaacccataatacggcgtaatttctctgctttaaatcaatgtaataaagctttgtttgtagtgggtaatactcaagatgacaatcctttgattacaacaggcgtactcaccacaaatgagatggcacaatatcgcgatttaggtgctgttggtgtcatttgtggtcgattctatgatgcacaaggtaatcctctgctttctgatatcgaccttagaattatgggaattagtcttgcacagttaagacagatcccacagcgtatttttattgctggaggcgttgaaaatgttgctgcaaccataggcgcaataaaagggggatatgctacagatattgtcatcgatgaagtgacggcattagcattattggagttgagtatttaa

SEQ ID NO: 303946 - DNA, 309 bp, Proteus mirabilis; identical to SEQ ID NO: 298042

SEQ ID NO: 303947 - DNA, 171 bp, Proteus mirabilis
atgaaacaacgatttaatcatagtgctgtgcataaaaacaacgctagaaatcgctttaacagattggttactcaggacggtgttcagtgcctaagagcaatgcttgaagacgcgaaaattcgcactgaacatcgtcaacaggtactaggaggtaagagcgatgagagataa

SEQ ID NO: 303948 - DNA, 405 bp, Proteus mirabilis
atggcaatcggaattaatgcaacattccatactttcccgtccagtgacaattcaactttagtcacgaacagacgaggctcaacagtatttaccgctgaagctatctcaaaaggcgatacttcacgtccaacaatcaaaccgttatcgccgtccagatctccacgcgtccattgttctatggcgctggggataatagtttgcgcatcaacggctgattttttaacggtcactcgacaaaaaacggtgatctccttagggcgtgaaaatttcactttatattcttgtccacttaccggctctacaacaccgatttcaatctctccattaaaagccgatccaatagtttttgttctcagcaatgatttagcaatttcgttactgtcgcccccttcaacacaaatgtaa

SEQ ID NO: 303949 - DNA, 645 bp, Proteus mirabilis
gtgggaaaagacaacctcacggcgaacggcattgagttaccggatgtggaaggggcggtgatcagcggctcggccaccggtgactggacattgtcctgtgtgcgcggggatatcacctcgatcacctttgtttttacggacggcacgatctgcacggtgccgaagccggctgaccggacggacggcggcagtcaggccaacagcggacagaatgcccgtaataacggcgggtcgctcggctggatttcagatgagagcgggatcccgtgtatcagcggtgaacgtaaaaccaatgccggcacctatctgccgaccctgtttgccctgacggcagcggcctcggccggggatgcgatgtcgcagagtcagtataccgcgcagaacaacgggtacggtatcacctcctcgctctccggggatgcggggaaagcggcgctgggcagtgccatcggcggcgggtttaaggatgtggcggactgggtgaaatcccgctacgggcagacctttgatgcggtgtatgtgccgccggggcagaaagtcgcggtgcatatcagccgtcagatcccggtggattatgaatcgcagggacgccgggtgaattacggtttttcactgacagagggtgaggaaggaggtctggagtga

SEQ ID NO: 303950 - DNA, 645 bp, Proteus mirabilis
gtgggaaaagacaacctcacggcgaacggcattgagttaccggatgtggaaggggcggtgatcagtggcactgccaccggtgactggacgttgtcttgtgtgcggggggatatcacttcgatcacctttgtctttacggacggcacggtccgcacggtgccgaagccggctgaccggacggacggcggcagtcaggccggcagtggacagaatgcccgcaataacggcggatcgctcggctggatctcggatgagagcgggattccgtgtatcagcggtgagcgtaaaaccaatgccggcacctatctgccgaccctgtttgccctgacggcagccgcctcggccggggatgcgatgtcacagagtcagtataccgcgcagaacaccggttacggtatcacgtccacgctctccggggatgcggggaaagcggcactgggtagtgccatcggcggcgggtttaaggatgtggcggactgggtgaaatcccgctacgggcagacctttgatgcggtgtatgtgccaccggggcagaaagttgcggtgcatatcagccgtcagatcccgattgattatgaatcacagggacgccgggtgaactatggcttttcactgacagagggtgaggaaggaggtctggagtga

SEQ ID NO: 303951 - DNA, 246 bp, Proteus mirabilis
atgaaatggcatcagaaggcactcgtcagggtatttagtagcaacattcttacatttctatttcaactcattgcttggtgttcggtatcggttttaatcgcgatagataaattaggcgagtttaatcttcatgtttatctaggggcattgccaatagtgattattcaggcgttagtgatgacctatctaatcaggtgggtgtttaagttttgtatgaaaaatattgatatcaaaggaggtatctaa

SEQ ID NO: 303952 - DNA, 225 bp, Proteus mirabilis
atgcagggagctaattgggttaagtgctcagataaaatgccaccatataaaacaccggttttgtgttgtgatattaactcactatatggcgaggtattcattgctgattacattagggaatttaggttcggtgatagggctaaattaactggcatctaccgtgggagtatgcaaggaaacgtaactcactggatgccacccccaccaatgccagagggtgaatga

SEQ ID NO: 303953 - DNA, 594 bp, Proteus mirabilis
atggcacagcatagctttatcaaaatgtctaacgatactcttgtaccggctaaccctgttacgagagattttctgcattcaaaaatcaagtgtggtgatgtgctttcagcgaattttaagaaagctcgtaaccctagatttcatcgtaaatacttcgcattactcaacttaggttatgaatattgggagccggttggcggtacaatttcacctgaagaaaaagagcttgtgcgtggttacgtcacattcctttcatattacacggataatgctgacgcactattatccgcgtccgatatctatctagaagaagttgcacaaaatcgtgcgcaaaatatctcagcaacaaaatcttttgatgcttttcgttattgggttgtagagcaagccggttattacgatacgtatgaaatgccagacggtagtttacgccgtgtcgctaaatcaatcagttttgcaaatatggacgacttagcatttagcgaactctacaaagccacactcgatgtgctttggaattttatccttcgtaaacagttccccactcaaaaagctgtagaaaatgcagtatctcaattattaagtttcacgtag

SEQ ID NO: 303954 - DNA, 432 bp, Proteus mirabilis; identical to SEQ ID NO: 14471

SEQ ID NO: 303955 - DNA, 153 bp, Proteus mirabilis; identical to SEQ ID NO: 299306

SEQ ID NO: 303956 - DNA, 348 bp, Proteus mirabilis
atgaaagagccaatcgaagaacaaacaaaacagcaagttgaatgggttgttgttaacggcgaccaagccacggtgacattagaacagccgattgttcgcggtgaaacaaaaatcgataaagtgacggtgcttaaacccaattcaggggcgttacgtggtgtgcgtttacagccgttaatggatatggatgttgatagcatgatgcaggtgctaccgcgcattactatgccaacactaacaaagcaagatgtgctgtctttagccgcgggcgacttggtaaacctgagcgtgcaggtggttaattttttattaccgaagtcggttatgcccgattccctagcgaattaa

SEQ ID NO: 303957 - DNA, 357 bp, Proteus mirabilis
ttgcaagaaacggtattcattaccacagcctcacgtatcattcgcgcttttcgaagaacatgggctggaaattcagaattcagtgaatttgatgtacttgaaaaatattgcacacctgatttgttaattattgatgaaattggtgttcagtatggcactgattctgaacgtaatatcttatttgaggtgattaatgatcgctacgaagatttgctacctacaattttgataagcaacctgcccgttgttgatctgcaagaaatgcttggtgaacgagctgtggacagattattacagggcggaacagtattaacgtttaactggccaacatatcgcagaggtaatcatcatgcatga

SEQ ID NO: 303958 - DNA, 462 bp, Proteus mirabilis
atgcccgaagccttgaaagataaaatcattgcttctacggctgaaaacgtagcactcattaaatccattccactgcaatttcatcaacgtattgaaagtgttgccttacgctctatcagccaaggtggtgaaggtgcaaagacgttattagaggaaattaggcatacaggcagtgtgactgaaaaaagagcgaattttatcgctgttgatcaaacacgaaaaatcacgactgcagtgaattatgagcgcatgaaatctgccggtattcgtaaggcagtttggcatcactcggcaggtagtgccgaaccgcgtgaattacatctgcgtctggatggtgaagtgtttgatttagacaacccgcctgtgattgatgaacggacaggtgagcgtggcttgcccggacaattaccaaactgtaagtgcttctggacacccgtaatagatttcggtgaggagacatga

SEQ ID NO: 303959 - DNA, 462 bp, Proteus mirabilis
atgcctgaagctctgaaagataaaatcattgcctctacagctgaaaacgtatcgttaattaaatccattccactgcaatttcatcaacgcattgaaggtgttgcattacgttctattagcctgggtggtgaaggtgcaaagacgctattagaggaaattaggcagacaggcagtgtgacagagaaaagggcgaattttatcgctgttgaccaaacacgaaaaatcacgacagcggtgaactatgagcgcatgaaatctgccggtattcgtaaggcagtttggcatcattctggtgggagtgctgagcctcgtgaatggcatattaaattggacggtgaagtattcgatttagataacccaccaattattgatcctaaaacaggagaacggggtttacccggacagttgcctaattgcaagtgcttctggacaccagtaatagatttcggtgaggagacatga

SEQ ID NO: 303960 - DNA, 462 bp, Proteus mirabilis
atgcctgaagctctgaaagataaaatcattgcctctacagctgaaaacgtatcgttaattaaatccattccactgcaatttcatcaacgcattgaaggtgttgcattacgttctatcagccaaggtggtgaaggtgcaaagacgttattagaggaaattaggcatacaggcagtgtgactgaaaaaagagcgaattttatcgctgttgatcaaacacgaaaaatcacgactgcagtgaattatgagcgcatgaaatctgccggtattcgtaaggcagtttggcatcattctggtgggagtgctgagcctcgtgaatggcatattaaattggacggtgaagtattcgatttagataacccaccaattattgatcctaaaacaggagaacggggtttacccggacagttgcctaattgcaagtgcttctggacaccagtaatagatttcggtgaggagacatga

SEQ ID NO: 303961 - DNA, 534 bp, Proteus mirabilis
atgatggtaacaactgaagggggaacagtcgggcgagcaccattggccaacattcccgtttttagatttgggggaggtggtttctttattcgcgcaccgattaagccgggtgatttcggttggataaaagccaatgaccgtgatattagcctgatatttcaacgtggagggcttgaagaccaacctaataccgcacgcctccattcatttagtgatgcaatgtttttccccgacaccatcaaaggatgggtgattgatggaaagaatattgatgccttagtcattcaatcaatggacggttcggtttgtttttcattacataaagataaagcggttttagatgcgcctaaattcatttctaacgcaccagaaaatgagtttaacggtaacgtgacggtaaatggtaatcatggcgtaaacggtaacagtgaatcaaacggtggcacgatgaaacataacggaaaagatatcggttctacgcatcaacacagtggtgttgagaccggtcatggaaattcaggagcgcctctatga

SEQ ID NO: 303962 - DNA, 297 bp, Proteus mirabilis
ttgaaactggctgaaaggtatgccggtgagcaaaaccgccctcattccatttcgctgatgaagtgtacgctttatgatgccggatttgcttacggcagattattactgtggcgtgcggatggtctgatgagaccctggccggcatgtctgcttcgccgtttaccggatatcggtcagcggattgatgcagtgatctggcagaaaggctgtgaagccggcttggatgagaccgtcagtgaatggatggcaatggagatggctgatgaataccttgtcggtatcgaactgagcgactga

SEQ ID NO: 303963 - DNA, 297 bp, Proteus mirabilis; identical to SEQ ID NO: 299384

SEQ ID NO: 303964 - DNA, 147 bp, Proteus mirabilis; identical to SEQ ID NO: 27109

SEQ ID NO: 303965 - DNA, 231 bp, Proteus mirabilis
atgagtgctacgttttcagccgtagaagcaatgattttatctttcaaggcttcgggcatgtctggggttttgatggtgatccctcctgacaactgtttgagagaatcatctaaattacgctttgcacctatatcgacttgggaaacaaatttatccgcaatctctgtggatttttgtttaaaaatcttatcccatttgcgttttagccgattaagccagatgcgtgtttga

SEQ ID NO: 303966 - DNA, 351 bp, Proteus mirabilis; identical to SEQ ID NO: 281138

SEQ ID NO: 303967 - DNA, 177 bp, Proteus mirabilis
atgagtaataaatcaggtaattttaaaggtgaaattaacgttagcgaaatgaatgataataaaatgggcgagttagaaaaaagaattgaagctatggaaaatcaaactactgttattagaggtaagaactttcacattaattctaatggtgattcttgttttacggtggtgaaatag

SEQ ID NO: 303968 - DNA, 219 bp, Proteus mirabilis
atgtcagaaggaaaaaccagcgttaattataattttcatactgatgtgaaaacagaaatggatctattgaaagagctttcttttatgaaattaatcatagcactaattgtggataaactttcaccagaagatagagctttgattattgaatcaataagagaacttggtaacgacactcttgatgattacattaagaattttgagaaaagcgaccaatag

SEQ ID NO: 303969 - DNA, 330 bp, Proteus mirabilis
atggaagagtttaaatggcgacctgaaacagcttatcaggtgggtaatgagcctaaagtaaaagtagccaagtttggtaacggttacgaacaaagagtcaaagacgggatcaacaaccaactaaagacttatcaactctcatttgttaagcgtactgatattgggaaacagattgatgagttccttaaggctcgaggtgcggttgaatcattcttatggctaaccagtgatgataactctaaacgtaaatttgtttgccgtggctggcaggtgacaccaagagcggcggcatggcagatagattgcacatttgaggaggttgttgcatga

SEQ ID NO: 303970 - DNA, 363 bp, Proteus mirabilis
atgtggggaaatctctatccgcgcagcggttttgtcaaccagcaggacggggataaagcggcggctgtggtggcgcagcgcgtggcagatattatgacccgcaccgggcaggcgcatacctatgtgcccctgaaaggcaaccgccgggatggctattggccgccggacgcggtgacggagaataccgggacaaaaaaccataaatggcagcgcctgtcgccggggctgaaaaacagctgtgcggtgtttccggatgagggcggagcacaggcacaggacggtaattatgcctgggcattgtggcagccgtacagctgctgcaagcgcatggggcaaaaatttctgtacagcacaacgttttaa

SEQ ID NO: 303971 - DNA, 204 bp, Proteus mirabilis
atgtgcaagcaacaagcaaaaaaattatcactttgcaccgatgccaatgctgtgatttgcaattcaattgctaacggttggcaagggctatttcctgaaagagcagtagtacaaactcaaaaagtaaattctcacactgggtttagcgaaaaagattaccagtctcaagatccgcattggtttgtgggaggtggaaatgtctga

SEQ ID NO: 303972 - DNA, 141 bp, Proteus mirabilis; identical to SEQ ID NO: 299388

SEQ ID NO: 303973 - DNA, 276 bp, Proteus mirabilis
gtgcaagttattccattaagtgagattgcagcaaaagatgaatttctcaatatcaacaatgtcagccgtgacaatatgttagctgcgcaccgcgtaccgcctcaaatgatggggatcattccacagaataccggaggctttggtgacgtagaaaaagcggcaaaggttttctttcgtaatgagctggcaccactgcaaagcaagatattacaaatcaatgattggttgggtgaggaagtgattaagtttgataagtacacactagatgataagtaa

SEQ ID NO: 303974 - DNA, 276 bp, Proteus mirabilis
gtgcaagttattccattaagcgaaattgcggcaaaagatgaatttctcaatatcaagaatgtcagccgtgacgatatgttagcggcgcaccgtgtaccgcctcaaatgatggggatcattccacagaataccggtggctttggtgatgttgaaaaagcagcaaaggttttctttcgtaatgagttggcgccactacaaagcaagatattacaaattaatgattggttaggtgaagaagtgattaagtttgataagtacacgctagatgatgagtaa

SEQ ID NO: 303975 - DNA, 270 bp, Proteus mirabilis
ttgtttgtcaaagatgataaccaagccttaaaagggcgcttgcgcattcttagcatgaaatcaggcatggtaggtatacccaaagccactgaaaaagggttgtccgttacctacttaattgatggcgcctcagaactaggagggatgctacgacttgagagtaaatttaattccgcacttaatggtgactatattattgaacaactgaaatttgatgttgcgtcacatgatgatcctttcttttatcaggctacctgtaaacgagcataa

SEQ ID NO: 303976 - DNA, 270 bp, Proteus mirabilis
ttgtttgtcaaagatgataaccaagccttaaaaggtcgtctgcgcattcttagcatgaaatcaggcatggtaggtataccgaaagccaccgaaaaagggttgtctgtgacttatttgattgacggtgcctcagaactagggggaatgctacgacttgagagtaaattcaattccgcacttaatggtgactacatcattgaacaactgaaattcgatgttgcttcacatgatgatcctttcttttatcaggctacctgtaaacgagcataa

SEQ ID NO: 303977 - DNA, 195 bp, Proteus mirabilis
atggatgcgcagcagaaacgcctacagagcgttacagagccttttaaggggctttccagagagcagatgaccgaaatcctgatgatggctcagcggtttaagcagcaaaaccaggaaaaggaaaaacagcagcgtattgaacgtgaaaaacagcgacagacgcgatcgcgtggcatgggtggtatggagcgttag

SEQ ID NO: 303978 - DNA, 213 bp, Proteus mirabilis
atgaaatctgccggtattcgtaaggcagtttggcatcattctggtgggagtgctgagcctcgtgaatggcatattaaattggacggtgaagtattcgatttagataacccaccaattattgatcctaaaacaggagaacggggtttacccggacagttgcctaattgcaagtgcttctggacaccagtaatagatttcggtgaggagacatga

SEQ ID NO: 303979 - DNA, 876 bp, Proteus mirabilis
atgaataaattatttaaactattaataacagcttttttattaataacaatgttttcgcttattgttatgccaatgagtgctaaacaacaatatatatttggaataattaatattctgctgttatttattattggctctaaaaaatcaaaaaaacgattattaacaatgatttttttatcattgttaatgtctacacgttatctgtattggcgagcaacccacacacttaattttaatacctctattgaagggatattgggtacaggattatttttggctgagatctactcttggattattttagttttaggttatttccaaacagcttggccattaaatagaaaaatagcgccattaccaaaagatatctcgttatggccaacagtggatatttatgtacccacatataacgaaagtttagatgtggtacgtgatacggttttagctgcacaaggtattgattatccaaaagataaaatgaaagtttatcttttggatgatggtagccgtgaagagtttaagcaattcgccaatgatgttggtgtgacttatattgagcgtgaagagcacgatcacgctaaggcaggtaatctaaatcacgcaatggcattaactgatggtgagcttatttgcgtctttgattgtgaccatatctctacccgtatatttttacaggcaacggtgggttatttccttgaagatccaaaattagctttggtgcaaacaccacactatttctattcacccgatccttttgaacgtaatttaagtgccgccaaaaacggccctcacgaaggtgcacttttttttatggccctgttcaacgaggtaatgataattggaatgcaaccttcttctgtggttcatgtgcggtaa

SEQ ID NO: 303980 - DNA, 168 bp, Proteus mirabilis
atgaaccgtgaaaaacagttacctgaagaagcagggcgtcaatggtttgaagcagatgtcaattatcaatgtggacatcgtggtagcgatcgcctgctatattctaatgatggattaatttatttaaccaccgatcattaccgtaccatgcaaagagttgcaccttaa

SEQ ID NO: 303981 - DNA, 3804 bp, Proteus mirabilis
atgaagcggctgtctaaatctttattattgataacccttttttgcctgattattttcgccgtagtattaagtggatttcgttattttctgcctcgtttagataattatcgccctgaaattgaaacctatttatctaaacagttcaatagcccagtcaccatgacacaggtgaaaggagaatggcaaaactttggccctgatatccaaattactgggctgtatattgataataacagtgttgaagtgagtgctgaacagatcactttctcttttgatgtttggcgttcactacttcattttcaactctattttcgtgaattaacctttgaacaattagcagtaaattacaaaaagcctatttttactgggcaaaatggtgatattactttcactgaacctgatgatatctcttccattttcttaaaacagtttgatcgatttaaattggttgatagccgtttcgtgtttttatcaccttctggagatactagcacgctccatattcccgaattaatgtggctcaatcagaaaaaccgccatcgtgcgcaaggggaagttactttagataccccaataaatcactatggtggactaaaagtacgtcttgatctctatacgaaaaagcagggggcactggataaaggacaggtgtttgtcaccgctgatgaggttgatatttccccttggttaagccaatgggttaaaagtaacagtggtcttggtgaagcgaaagccagcctatctaattggatagagatcagcaatgggcggatcacgggtagccagttacaaatccatcaaggtgaaatggattggcgtaatgaagggcgcacacatgtattaaaggtagaagatttaattctacgtatgagacgccaagaaaatggctggcttgctgatatcccttatacccgaaaaataacgatggatggcgatgaatggccagatggttatttagcggtactttatcaacctaaagaaaaacaacaagatgaagcttggcgtatccgtgctaaaaatattgaattagaacggttatctgcgttattgcctttgttctcttttttaacgcctgatgtcgtgcgccaatggcagtatcgtcaattttctggcatggtcgactcatttgctcttgatttagcccccgatgattttaaacgtagtgccattgatatcagttggcaaaatgttgcttggaaacgctggcaagaaatcccttctgtggcacattttaatggtcatttaaagggcacattacagcaaggagcgcttaattttgcgcttaataacagtgaaattgatactgctgggctttttaaagcgccacttaatatagaaaaaggcactggtacggtttactggcagcatcagggaaattctctgtcgttatggagtcaagggattgatataaaagccacctccgcttgggttgccggtgattttcgttatcaaaaacaaggagagcatcaacaactgtctattctttcgggagtgaatgtgaccgatgctggtgagacatggcgttatttacctgaaaaatatgtcggtaaagatttaacacaatatctctctgacgcgattattgccggaaacgttaaaaacggtacgtttatttttcatggtgatccgcgggatttcccttttgaacaacataatggttggtttcaagtctatgccccagtaaaacaggcaaccttcaaatatgatagtgaatggccggcactgtttgatctcaatgttaatcttaattttatgaataacggcttatggatgtcctctgataatgttcaggttggtaaagccaccgctaaaaacttgacggcgattattgaggactataacaaagaaaaaattgttattgatgcagatattgaagccacgggggatgatttaaaagagtattttctagcttcgcaaatggcaacgattggtcatacacttgaaatactaaaagtggctggaaaaattaacgggagtttgcatctcgacattccttttgatggcgagcaggtggtcgcttctggtcaggtaaacttaaacaataacgatgtcacattagcctttatggataccaccctagaaggtgttacgggacaatttcgttaccataatgataaattagagagtgatactttaaccgcgaattggtttggtcaacctctgacattttcttttgctggtggtgatcaacgggatgcttatcaagttggtgttgatctaaaaggacaatgggatatcgggaaaattaagggattacctaatgatatacaacataaattaagcggttttttaccttggcatggcgcggtaagtgttaatattccagaaacagcggatgttaattatcaagtggatctgaccggacaagtgaatgcgctacaaagtcagttagctgcgccaagtaccgatgattttaaaaacgcttcccccattgtgatttcagcaaaagggaatagtgaaaaacttaacgttagtgccgatgcacaagatcagtggtcattaaatagtgaatgggcgttaggtgaaccattacgtctattacaaggtaatttagtctcttcctcgctcacactacctcaattaaatgatcaatcacgattgactattgctttgcagggattgcaaggcgataaatggctacctactttaatggctttttcatcattagccccttctgaaaacgcgatacgtttccctaccaatattcatattagtctgcctgaacttaattttgctggtcagcaatggattgcgccacaaacagaaattatgcgtgctgatgatggtgtaaaattatccttctcagggagtgagttacgaggtgacttatttgtacccaatacggcacaaccttggcaggtgaatattacctatctctattttaatggcgctagcccaacagaagaaaataaatccttaaaaatggcaaatgtgcctgatgccaaaaaagcagttcaattttcacttaaagatattcctgctatcaatttcgcctgccaagagtgttgggtgaatggattattactagggaatattgaaggtgcaatacagcctcgtgacggagcattattgttaactgcaggtaagcttaaaaatagcagtggcgagctatctgtgagtggtgtgtggtcagaagatagtttaggcaacagtatcactaagttggcaggtaaactaacggcaccggaagtcgatgaaatggcggcttactttggttatatcattccgattgttcagtcaccacttacggcagatttctcactgcagtggcacaataccccttggaattttgatctaaaaacactcaatggtgaagtgaatgcttctcttggaaaaggtcgtattgaaaaggtggatgttgggcaagcgggaaaattattacgtctagtcagttttgatgccctgttacgtaagttgcaattcgactttagagatacttttagtgataattttgagtatgattccattaaaggtgatttgacggttaaacaaggtgttttaaacgcgaaaagtgttgctgtagatggtgttattgccgatattgctataaaaggtcaagtggatctgttggcgcgtaaaatggacttacaagtagtggtaactcctgaaatatcagctacagtaggcgttgctaccgcatttgctattaaccccatcgctggtgctgctgtatttgcagcttcaaaagtactggggccactttggagtaagatttcagttatacgttatcatgttaccggaacggtagaacaacccaagattgacgaagtactgcgtcaacttaaggaggatcaggcgttatga

SEQ ID NO: 303982 - DNA, 564 bp, Proteus mirabilis
atgtctataaaattaagctatgatatttgtaaaactgtccaatatatgcatgtgaacgttataaataagagtaaaaaattaaaagaactacgaaatgaaataaaatcactatataatctatcacaaccttttcaaaattcatgtattaatactcatactttttataaaccacaaaatagcatcacagcctcaatagcaaatatcaataatagaattaataaaaatcaacacgcacttacaggaatagaatcaaaattaaaagaaaaatacaatgatataaaatcaattaatgatttaattaaaaatagatataatgaaaatgaaaatacacttgcatattttaacaataaatcagattttatttcatatcctaatcaagaaactctcaattttttgttctatactgaagttttccccaacagaatcgaaagagaatcaataccaaaagaaaaaatcaatattgattgtatcaacaatatgataaacatccataaaaagagtttttttatcagttcagagaacaaagaaaaaataaacacatataaagaatttttaaaaaaataa

SEQ ID NO: 303983 - DNA, 837 bp, Proteus mirabilis
atgacagtattaaccgtttatttatgtggtaccggcgcttcatcttttgataataataatcataataatcctgtttattggcaaggtgagcttgtttccaccttggcgcataataatctagatcgcgaatttgctcagtggtttattgtagatggcccaggtagcggtaatttgcaagaagatgatttatgggttgaaagccctaattattcagatttaaaaggctctttatttggcagtggatgggaagaaaatgttgaacatgcactgtgcttaatgaaaggcaactttgactggcaacgtgaaaagttaacagaacaacaatataatcaactgaaaaaagcgggcattcccattgaagatgttgaagtgaccggctcttttttatggcgtaaatataattatggtgaccgctatgtcactcaacaacaacttcagcaacaaattattcgtacctttcgcaaagatggcatcattcccacccaagtgaatttaattggttggagccgtggtggcatcacctgtcatatgcttgccaatgccatgttaaaagatcccctattaaaagatattccggtcaatatttttgctattgatcccgtcccagggccacttaatttccaaccagaaaaggtgacactaggtagcaatgttaaggaatatgtcggattttatgccattgatgaacgctcaaaaggatttgcttgcgttattccaaccgtgactgctgagactaaaatgcatattttcccgctttcaggacgccatgcgactttagtaggcaatgctgctattgatggtagtgaaggtaaaatgcactattttcaccggggttaa

SEQ ID NO: 303984 - DNA, 168 bp, Proteus mirabilis
atgcttactattacggcactactagaaaataagacaagcgatcccgctcttagccattatcctggcctttcactgctattagaagacactgaaagcgaaagtaaaattttatttgatactggtaaagatctcacttttatcaataatgctaaaaaaaatggcgattga

SEQ ID NO: 303985 - DNA, 675 bp, Proteus mirabilis
atgctaaaaaaaatggcgattgatttgacatcattaacgacaattgttatttcccatgggcactatgatcattttggtggattaactcatttaaatgaggatttctttattactaagccacatattattgcccatcctgatttattttcagtacgttattcagcactttttatggggcgccagtctattaaatttaagcgccttactccattttttaaccgacagcagctagaacagcagttttcatttcagttaacagcgacacctaaagctatcgataaaagatttatctattctggtcaagtgacagagcgtcaaatacataaacgttatggcgttattgtcagtgaaagtagcgaaacggatgattatgtacttgatgatagttttctaatttggcaaggtcagcaaggactggtgattatcacgggatgtagccattctggtattgatgcaattattcgccatgcgaaaaaaataacgggaaatgacaagatccaagctattgtcggagggctacatcttcgctgtgcctcactggcggcgttaaaaagagcgaaaaaagcaataggtcaccatgttgaggtttatggttgccattgtaccggtgcgcttggtcgtagctatcttaatgccaaagattttaatacagggcaaagattattttttaaatga

SEQ ID NO: 303986 - DNA, 1194 bp, Proteus mirabilis
atgccagcttttgatttcagttcaaatttaaaaaagaccgtaaaagtggctttaatggtgctcttcagcacactatttcttatttggctaaaccaaacatcattagagcgcttttggcaacaacaataccatcgcccagccccttggtcgggcttatcacaatattatgcttggcaagtaggaggtcagttgcgagatggcgtatttgtcgcagtaacaagctatagtgattatttgcgagttaatcacccggataatcaggccaaaccaataacgcctcgtcaagaacaaaccgcctttcctgaaggatttgcagtagggctacattttatcaatggctatactcgccccgcttcgcaattaacacaacagtttccacaactcctacaacgtcaatatgcacaaggtacattagcaaatacatcaactattgatctgacaaaagccgctgctgaagcccaaaaacccattgtgcaaaaaacagatgtcatattatctcccaaagacaaagtgctgtttgctggagattcaatgatgcaaggcgttgcccccttattaaaacgtcaattgcaaacagattataatataagcagtattgatttgagcaaacagagcacaggattagcctatcctaagttttttaattggcctcaaactattgctaatcggttagctagcgatgattccattaagttactggttgtttttttagggcctaatgatccttgggacatgcccccagatggtggcggacgttatttaaaatttgccagtgaagcgtggggcgccttatatcgcgcacgtatcgccagcattattgataatgcgcgccaacataatgtgagtgtgatttggattggtcctccgaatatgcgtaagcaaaaattatctcaaggtatggcttatctaaatcaactttaccgggaagaagcagaaaaaacgggagaaatttacctttctgtcaatgatatgtttaaatatgaaaaagatatttattctgattatatcggtgatggtagcagccgcgtgaagctaagagcaggcgacggtattcactttagtttaaaagggcaacaaatcattgctcagcaggtattctcgcgtatccatctgcaaaaagttgatgatgtgccagatgatgtaacagacaaaaatatggtcacgccaaatgaaacaattaacgcacatccttaa

SEQ ID NO: 303987 - DNA, 996 bp, Proteus mirabilis
atgaaaaaaaaacgcccctcattacaggatgttgccgaccgtgttggtgtcacaaaaatgacagttagtcgttttttgcgtaatccagaacaagtttccgaagcattacgagtcaaaatcgctcgtgaattagacagcctgaattatattcctaatcgtgcacctgatattttgtcgaatgcgaccagccatgcgattggcgtattattgccttctcttactaaccaagtgtttgcacaagttattcgtggtattgaatctgtgacggataaatatggttatcaaactatgttggcgcactatggctatcaagcagaaaaagaagaagagcgtcttatttctctgctttcttataatattgatggcttgatcttagcggaaagaacacacacacccaaaacggtcaaaatgctggaaacggcgggtattccggtggtggaaattatggatagtgtttcaccttgttttgattcggcggtagggttagacaatattgaagcctcgcgaaaaatggtcagcgaaatgatccatcgtggttgtaaacgaattatctatcttggggcaagacaagatgagcgaacattaatgcgtttacaaggatatgaacaagcgatgcaagaagcaggcttacccataggtcatgtgatgacacctaaaagctcttcttattcgttaggtacagaacttttacatgaggcacgcaagcaatatcctgacttagatgggctctattgcaccaatgatgatattgcgataggggctattttcgaatgtcagcgtatggggattgcggtacctgagcaaattgctatttccggtttccacggtcatgatgtgggacaagtcatgactccacggttagccagtatttttacgccgcgtgatgaaatgggacaacaagcggcggatttattactaaaaagaatgaagggtaaaattgctcgtgggcaagtgattgatgtgggattccgtatcatcaccggtgaaagtatttag

SEQ ID NO: 303988 - DNA, 177 bp, Proteus mirabilis
atggttttttcgatcgatggcgttgattttgatagttacgacctattaatggttggtgaaatgatcgttaaaatcgatcttgttattgttgttcaatgtgttatatcaatgattgatgatatatatgagaaggttattagtcaaaacttgagttttaatataaatcaaattgcttag

SEQ ID NO: 303989 - DNA, 417 bp, Proteus mirabilis
gtgttaagtgatatgaaagcgatcatctggaaaggtttctcttgggtgatggaaaatatgactgttgttgggatgactatttttgttgtcatgtttcttactgaaagtataaaaaacaccgctctggaacacgataacaaatcactcactgagcagctctcacgccaaaactcaatcgcagaaaacgccaaccgcacattcaggattatcaacaatgtctcatcacttaatagcgaagagcggaatagatcagccgtggattctgaaaaagttaaaacggttatcaaaactgttcttgtcaataatgattgcgccaatactgctattcctagtgatgctcttatcaggatgcacgactattcagaaagaatacgtgccagtggagcatatagcgataccagcacacctaaccgctga

SEQ ID NO: 303990 - DNA, 840 bp, Proteus mirabilis
atgagacttgcagatttaccaaaatatttttcaccgaaaagcattatgtttagtgactctccatctgcaacagcgactgataatctaacaatcactgatgtaatggcctcgcttggtttggcgacctctaaagcgagaatggggattgagttgtttttggcgaaacaagggatcaatcaaccaactgaagcagtggagagcattcatcaatatgcaataactcaggctcacaaatatagtgctattggaaaacttagtgagaatgatagaggaacacttctgcaaatactcgcaaattatgcatttcaggattatgcaagaagcgcagccagtaaaaaggcatgccctgattgtgacggtgggtttattgaggtagaggtgtttaccactaaacagcacactcactttgctgctaaagagattattaaattcagcaagaagatgggggtgaaaataactccatctgactattcaaaatacagggaggttagagaaaaaattaaggtgatctgcaaaacctgtaatgggaaaggtgaagtgagtcattcttgccgatgtaatggcagaggtaaaactttggataaggtggaaacgaaaaaacaaggaattccagtttttaaaacttgccctaagtgttcaggtcgtggctattcaagattgccggcagaagatgttaggcgagagatatgctcaaaattatttgaactgccagaaacgacttggcgtagaaactttaaaccattctacgagatgttgattcaggagtgttttaaagaagaggctaatgcagaaaaggttctacaaaatgtaacaaaaagagaaattgaatacataaattag

SEQ ID NO: 303991 - DNA, 201 bp, Proteus mirabilis
atgcaaactgaaatatcatcaatacctgaattactcattcagcatcgaggaaatatgaatagcgttgctcgtttgctgggttgttatcgtcatactgtaaaaaaatacgcatatgatgaatcatgcaagtatcacgtagtcctcaatggttccctaatgactaagacaaagatgaaagggaatcaggagggaattcgatga

SEQ ID NO: 303992 - DNA, 492 bp, Proteus mirabilis
atgagcaagcgacttcaaatattaaaggcgtcgttagcaaagaaagaagcgctatttaacgagcgcttacagaatcacttcgacacagtaaagcaagctaatgggcaaccactgaacgataagcgcaacggacgcgcaacacttaacaagtgggaaaagcaaagtgaagcactaagaaacattgagttaagcattcagataacaaaagacgctatagagcgagaagaaaataaaatttccatggctgaatcggtcgatttacccccatacatttataacgcaattaaagatggcctgataactcagtggagagaattccctaggttcttttttgttaatggagtgagcggtgggcggattgtacttgatgagaaaacaggcgctatagctcatcggtatttaaataaagtatcaaaagaagaatatccgatattccgcgatgtatttaacgagttaaatcaaaaggcacgcgaacatttatccgccagttaa

SEQ ID NO: 303993 - DNA, 189 bp, Proteus mirabilis
atgaaatgtagcaacaaatattgccaagatggcattgaatttattacctgttgctccggtcgtgaatgtggctgcatgggtcaaccagtagcagcaaccaattgcaaggaatgtaataaagagaacagagagccaacagacgagcaagttatccaagaattgcaacatcttgaatggcttggtgattaa

SEQ ID NO: 303994 - DNA, 276 bp, Proteus mirabilis
atggaaatatggtttaaggaatttgagtcacatgggcgtcagattttagttaagaaagtccatgaaatagatgagcaaaaagtcggagtgcagtattgctggcctgagaaaattttcgatgtcgactttggattatggatagattacgacgacgatgacgaggaaagttgcgaacaagcaaataaagctcgcgacgaaatatttgaagctaccaatcaagaagttgtagacaacgcagttagtgaaatcattcaaatgcttaagctgggtgattag

SEQ ID NO: 303995 - DNA, 300 bp, Proteus mirabilis
atgatatgccctgaatgctgtggggatggtaaggaaacatgtaccaatccagatcatggatttatacaagcgttaacatttcatgatgttggtcgaattggttgcccatgttgctgtcacgacgaatttcataaagtgaaggatgggaatgaatgtgatatttgcaatggcaacggtcaagttacaaatcatgaatttgcgcaatactgcaatgaacataattttgatgtaagcaagcactttcagttagttacagaggtaaataacaaactaatatctttaggcgttatctcaaactaa

SEQ ID NO: 303996 - DNA, 255 bp, Proteus mirabilis
gtgattaccaacacctacggactcagaaacgactggtacgaacgccaaatggaacgagaagcgtttgttaattctcaggaagagaaaatatcagttgatgaggttatggatagcctgccagaagaactgttatgtatggatttagcaaggaagttaaatcctgtatttgaaattagtccccaagcactggatgcggttttagatggaattagaacagctattcagatagggatagataaagaggttttaggatga

SEQ ID NO: 303997 - DNA, 561 bp, Proteus mirabilis
atggacttatcacgcacaatcattccaaagtcagatcagcttaactttgaagatgttcaatctaccccgataacagcaactattaaatcagtaagagaaggctctaaagatcaaccagtatttatcgacctcgttggttatgacggtcgcccatataagccatcaaaatcaatgcgaagagtgttaattggagcttggggtagcaacggtcattcgtgggttggaagatcaataacattaattggagacccaaccgttaaattcggcggcgttgcagttggtggcatcaaaattcacgcaatgagccatatagaaagcgacctttcattcatgctctcagtctcacgtggcaaacgagccgagcacagagttaaaaagttaatgaccaattttgatttgctatctgactttactggtaaggcaggtgaaatgacgccagagcaattagacagatcatataactggcttaaaaacaaattctctggtgatgccgaaaacttagaaaaactagaaatagtttatcaaagtacaaaatctgacatggagaaaaccaatggctga

SEQ ID NO: 303998 - DNA, 231 bp, Proteus mirabilis
atggctgagagaggagtaaataaagcaatcatcgttggcaatttaggcgatgaccctaacgttagatattcaccaaacggaaccgcatttgctaatttttcggttgctacaagcgaaacgtggaaagataaaaacactggtgagaaacgagagcgcactgattggcacaacattgtcatacaaggaaagctggcagaggtggcaggccaatacctgaaaaaaggaagttag

SEQ ID NO: 303999 - DNA, 288 bp, Proteus mirabilis
atgcgcacccgaaaataccaaggtaatgacggccaggataagtacattaccgaggtcatcgttggtatgaatggaacaatgcaaatgctaggcggtaacagtggtaatcaggaaggaagccagaagactcagcctcaaggatggggtcaacctcagcaaccgcaagcaccaaaacaagcatcgagtaatcaaacaccacaaagtgagccacctcaagattgggatgattctatacctttcgctcctatcggactcccctacccacgccacgctatttatgtgatttaa

SEQ ID NO: 304000 - DNA, 456 bp, Proteus mirabilis
atggcaattaacacaataacggcaagtggaaacttaggtaaagattgcgaacagcgatggacgccaaatggtaaagcggttgcatcttttagtttgccagtgaaacaaggttacggagaacacgaaaaagtatcttgggttatctgtaagatgtttggctctaaagctgaaaagctacctgaatacttaaccaaaggaacaaaggttacggttactggtgagttcgtcatggaagaatggacaagccagagtggcgagaagaaatcagctccagtaattatcgttaaccaattggattttggcggtaacggtggtaatcaggcaggaagccagaagtcgcagcagaatcaagggtggggacagccacagcaaccgcaagcaccaaaacaagcatcgagtaatcaaaaaccacaaagtgagccgcctcaagattgggatgatcctatacccttctaa

SEQ ID NO: 304001 - DNA, 162 bp, Proteus mirabilis
atgaacacacctgagaaattgcaggattttatttattatttaactaaagacgccgcccgaaattcatttgaagaatggcgggaagatattggaattagttatgaacaatacgccgaaataaaagaatggttcaagcaatttgatattaagccatacgtttaa

SEQ ID NO: 304002 - DNA, 174 bp, Proteus mirabilis
atgagcaagaaaatgtatttacacgcatcaactaacgctgtcggttctgaatgttcaactgagttagatataacagaagatgaatggaataacttaagcgaagaagaacaaaagcagattattggcgagttcatgagtgatgtttgtgagtggtgggtgcaaccagaggaatga

SEQ ID NO: 304003 - DNA, 297 bp, Proteus mirabilis
atgaaagacagaataaagtttaacgatgcaatgttagcggctgtcatggatggcagaaaaacgcagacacgtagaccgattgagccacagcctaaagtaaccgaggatgaattacgcaagttaggtgcatggcaagatggttacacactatcagagcaagtatgcgcagcatggcggcatgatttgttgatgttgattgcccgtatggcgagattggcgacattatcaacattgcaaacaaggacggtaatatcaaagggaaaattgaaattactgacgtctggattcagcaagtaa

SEQ ID NO: 304004 - DNA, 267 bp, Proteus mirabilis
atgaataaaaatgaacttcaagtattaatcgattataccaaaggaatgattgcagataataaggagccagaaaagaaagttattattgcattgtgtaatgagttggagagaataactaaattagaggctgtcgcttggatgtaccctgtatttcatgatgagaaaatgcaattcactactgacgcagttgcatctgaaaatatagatattcattttcaatcccatggctcaccatttaaagtaacaccactctataaattagattaa

SEQ ID NO: 304005 - DNA, 234 bp, Proteus mirabilis
atggagaataaacgaaagaaattacttaatcgtattaactgggatgctcaagatgttggaatgataaggcttagaaatgaagatatagggaataaccttcaaattcgatgcactgcattatggaaagagctattaaatactgacaatccaaatactgacttaattaatcgattaaatacattctacaacgaagttgaattatcagccaagcaaacgggattatataatgaataa

SEQ ID NO: 304006 - DNA, 216 bp, Proteus mirabilis
atgatattagaaaaaacatcccaagaaaagggaccagaagatataaataatgaaaaaataaaaaatgagtttaatgaaagagacatggaaaagaagaatattgataaatatatttccactaactcaatcatactggctgttttaaaattaaaactaagcattcctataaaaaaagttgctgaaattattgataaggatgctgatgatataaaataa

SEQ ID NO: 304007 - DNA, 1386 bp, Proteus mirabilis; identical to SEQ ID NO: 302640

SEQ ID NO: 304008 - DNA, 1026 bp, Proteus mirabilis
atgaaattattattaaccccctatattcagcccgatcttggcgttgttttattgaagcctgaagcggagttgcttgagcaacttaaacaacattctcgcgtaattattagtgatgtaccaaagagtttgaataaatggccttctggtgcattaacagggaacgaacagccattattgaataacaatgacattattggctttttgaataatgaaaaggtgctccaagctatgggtgggcaggcatcgatgaatatgtggataggcagaaatatccattgctgccagatcaacgatgaacatgacagttatcatcatcatgaattaacaaccacatggcataaagacggtgtgatacggacttgttggtatcatgataatcatattcgtaattcatcggcgggctgggttgctgagttggctcataaaaatcgtattgcttggatggtagacactattcgtagtcatttgagattagattatagccattcgctgacgatacctgatttttttgcttttgccgtgatgcataaactggttgatgaattacctgatgccatattgcgtcgtattctaaattggcctgataaacctaaagagcgcagggtgcatggtggttttcctgaagctgatattgttccaaatgaagtgacagcactatcagcaatgaatgcgcgtttagatgttataaaacccgttattaatgtagctgtcgatcctgaacctccagcctcatttcttcttaaacctaaaatgcgccgttgggagaatccccaatggcttcaatgggtaaaaacacagccttgttgtgtttgcggacaacaagctgatgctccacatcatatcatcggccatggtatgggaggcatgggaacgaaagctcatgacttattcactattccattatgtcggcaacatcatgatgagttacatcgtgatcccaagtcgtgggaagccacttatggcaatcaaatcgaattgttattttcttttttaaaccgttcattaggaatgggagcattggtttaa

SEQ ID NO: 304009 - DNA, 525 bp, Proteus mirabilis
atgtcttatattgcaactgcaacgaataagcacttctattacctcgatgtacggatcgaggatatagatattcaagacattgcgacgggtttagctaatgaatgtcgctttaatggacagattgataatttctactctgttgctcagcactcggtatatgtcagctatttagttgctcctgaatatgctttagaagccttacttcatgatgccagtgaggcctatgtaaaagatctgccatcaccgcttaaaaagctattacctgaatataaggaaatagaaaaaagcattgatgctgttattcgtcaaaaatataacttgccacccgttatatcggacgctgttcatttagccgacttaatgatgttagcaactgaaaaacgagatttagaaattgatgtgggtagtaattggctaatgcttgaaggtattcctacaagtgattttattgttaatccattaaccccactacaagccaaagttttatttttacgtagattcaatgaattaagtaaaaggagctaa

SEQ ID NO: 304010 - DNA, 3897 bp, Proteus mirabilis; identical to SEQ ID NO: 303890

SEQ ID NO: 304011 - DNA, 693 bp, Proteus mirabilis
atgacacctattttagaaatcggggagatggttatctctactgataaaaaggattacttatttagaccatcgttcatcaatatgacaagaatcggtgagcctaaacagattgtgaaagcctacggtcaattaaatggcgctgaggtgcaagagttaattgcacgcgccgtaatgagctacagggttattcctgagtggttaataaaagccattagcaagccaacatatgggcgtaatatcctacaaactgcaatgatggttatgcaggcgtgctgtgatgatgattgttcagaaattattggtgaatggagatcgggtaagcgaggtattgtctataaaaacggcaagatgccaatcgctgacattatcgtcattgctcgagaattattcactcacggaattatcggtaaagcgaagatccgcaaacttcaacgcaatgagggcaaaaacgaattctcagatgagtttatggcaattgactacattagctcagctcgtgctcactttggtatgaatcgagaggaagccgaacagttaaccatgactgaatttcagatgatgctcaaagctaaataccctgatgagaaaggcttcactaaagaagaatatgacaacatcatgaagcaagatgataggcgtaataatgagttaatcagtggtaagcgcagattggtgagcagaaagagaaagtag

SEQ ID NO: 304012 - DNA, 1371 bp, Proteus mirabilis
atgattagaatcaaaaggcctccgactcttgaattatcaaaagtatggccagaaatcatagataaacattctgaacattttcaggattactttaagttatctcacattactgatgactcaggaaaatatgttcattatgataaattgcgttacaagcttttaagccaaaaacatattgacccagaattagcttggggcgtaataaaaatagttagaacgtcacaaaaaataaaagcttttcctatgggggatgaatctgaactaagtggatttgttttaacaccaaatattcaaaaagctttatcagagactgacagaaatgcaaccactgctgctcttgagtggatgacgaataatattggtgaagaacattatttgaaatttttacttaatgatttaattgaagatgaatctattagtagtagccaattagaaggcgcagcaacgacaactttggcagcaaaaaatattataaaaaagaaaaaaaaagcgagaaccatggatgaaaaaatgattcttggtaattttaaaatgatgcaatttgcttgggataataaagataagcctttaagcgtgtctatgattaaaaagctgcatcatattggtgttgatggaattaatgatgataaatacacccccggtgtatttagaaaatcagaagatgatgttgtagttgttgatgctgaggataatattgttcatagaccaccgtcagctgataatttagaaaagcatttttcaatactgataaaatgggtaaatacttgtcatgatgatgctggtgggcgtgattatattcatcctctaataaaggctatcattattcattttttcattggttatgagcatccatttaaagatggaaatggtcgtgttgcaaggtcccttttttattggtttatgtttaagaataactatgctgcctttagatatatagccataagcaccatcttgaagcagggtgcaaaaaaatatggaatgtcttatgttcactctgaaatggataatttagatctaacatattttatagagcatcagtgcaaggttgtattaactagcatcaataagtttaaaacaacctatatagaggcaaagaaaaccatggaggagtttgataggtggatatgggaatcaggattatacaaaaagcttaatgaaaatcaaaaagttctctttagtgctgcaagaaataaattagagggtactttcacagccaagtctgttgcggatagattagagtgctcatacaatacagcagctgcagcacttaatggcttgcatgaattaggtatatttaggaaaagaaaagatggtagggagtatatttattctatgaaaagtttaaaatcgatcagagaagccacattctaa

SEQ ID NO: 304013 - DNA, 684 bp, Proteus mirabilis
atgaacacctatactgcaccagctctaaatacggatgcttttacatgccctcattgcaacgcatttgcacatatgaacttttccactttgattgatggaaatcgatatacaggcagaaaatatttcgatgatgctctaatatctgtatgcgtaagatgcaagcagatagcaatgtggagtatcaccaattccagaacagaccaagaagggaatatttattatcaaggaagcatggtttatccattcgcgattcgagcgccccagccatctgacgatatgcctgatgagattaaaaaagattaccttgaagctgctagcatctaccagaagtctccacgtggcgccgtagcccttctccgcttaggattacagaaactttgtatgcatcttggcggtgaaggtaaaaacatcaatgccgatttagctaaattagccgaagatgaactggtatcgaaaaagctaatcagatccgccgatatcattcgcatcgttggcaacaatgccgttcaccctggtactatcagcgatgatgattttgatgatgtctcatttaagcttttcgcactcatcaatatgattgttcagcaaggcatcaccgaaccaaaagaagttgataatatgttcgggtcgctaccagaaggcccacgccaagcagcagaaaatagagacaaacctaaaaactaa

SEQ ID NO: 304014 - DNA, 456 bp, Proteus mirabilis
atgagcagagaagatccgcaattacgtattaggctacctattgaattaaaagaaaaaatagagttatctgctaaagaaaacactcgttctatgaatgcagaaatagttcaaaggctggaaataagttttcttaatgaagtcaacactgatgaattaatttcagctaaagatgttgttcagatagctaaaaaagcaagagaagagctatctggtgtgattcttaaaagaacatttgcagagataaacaaaaaggcgcgcattggacacactgagttttgtgtttctcttagcgacttagagctagagatccttgatgaagaggattttttcgccattctaagccctacatttgaacagctaaaaaaattaggctacgaggtttcagaaagaaccattgataataatggctttttgattggtatatcagataaaaacaacacaccaactgataaataa

SEQ ID NO: 304015 - DNA, 177 bp, Proteus mirabilis
atgcaaaaagcaaaagatatgtatcagaagaaaattagattcccagaggatgtgtgcaaggcaattcaagctaacggggatttagagtgtagaaaatttaatacggagattatttatcaactaaggaaagcttacggattgatagaaagtaaaaaccccagttgcacgaacaactga

SEQ ID NO: 304016 - DNA, 873 bp, Proteus mirabilis
atggcattagcagtaatatatacgcgagcctcattagggttctctgcaccacttattactattgaggctcatattagccagggattaccaggactcactttagttggtttacctgaaactgtcgtaaaagaagcgaaagatagggtaagaagcgcattaataaatagtggatatagttatccagcaaaaagaattacaattaacctttcacccgctgatttacctaaagaaggagcccgctatgatttacccattgcattagctatcttaattgcctcagagcaattaatctctgataaattaaatagttatgaatttatcggtgagcttgcactttccggtaaattacaaaaagtgaatgcggttattccctcaattttaagcgccaacaaagataatagaatatctatcatttctattgaacatcaatcagaagtttcgctcttacctaataaatccgcgttattagctagccatcttttggatatttgtcatcatttagaaaataacaccccattaattgaagctaaaaacaatattaatcacaaaacaattgaaaaccaaaataataaagatattagtgatattattggacaaaataacgcaaaaagagctgcagaaatcacagcagcaggaaatcacaacattttatttcttggccctcccggcacaggaaaaacaatgttggcgcaacgcattaatactctcttacctccacttacagctaaagaagcccttgatgtattaattatcagtagcctatcaaatacgatacatcatgatggtaaatggcctttacgtccttttagagcacctcatcatacggcatctgccgttgctttaaccggaggtggatgtcagttccacaaataa

SEQ ID NO: 304017 - DNA, 1797 bp, Proteus mirabilis
atgcctgttaataatgacaaaataacgactattgattgcttcccaaacgataatattagtcgagtggtttatagatatggcggacttgttagaaacgaagataacgattcaactaatccttttgttgaagtgttattaattgagattagaaaaagtgatcaatggttgtttttagataagtgctcaacattccttgttccagttcttgatcttgatgctgttcaacatggcagtatttgggatggaaatattttaaccgatcaatcctatagattttcaggaaaacttatcacaaaacgattttcttttgacttctccaataataaacctaagaacataaaacttacggacagaatccccaatacgtcagagtactacattccattaaaaaactattttctccccaataaaattgattatgttctacaaggctatccattcactaaatacaccaatgattcatatcgtaaagtgaatcactgcttaatgcattccaatgatggaactcaagtcatcacatcatcaattcatattttgcatagcttattcgtcaatcggaaggatattaggggacttttattaggaacttcgagccaatccatcattaatcgttttttagaatcttatacaacagaaattgtggacgataatgttgaatataaaattaaaatcagaaaaccatatgaagatataggcgagactgcaattatttttcttgctaatcttgccttaaacccatatgtgcagacgatagttgataaaattcaacgaagtatggaaattaccgagtttaatcatcttcagcagggtgcaggcaaaaggtatcccattgtgtttccgccacatcccacaaagcttttccttgaagcagaaggaatttggctagatgacaataagactcgtttttttatcactagagtgaaaaaatttgatcctattaacgatcacatgattgatgtcaacaaagacctaaccaatactatttcaaagcctgatgagaaaaaccctcgacctcgtgaaaaaagtcaaaataagaatgagcacatcaatacgcaaaaaccaccatcaagaacaagcggtgaatatcgtaagcgttctgaggtggaaactggaaatacacaaggtattctgaagtattcttttaatgaaccaatcaatgatccaattgaagtcggagcacctaatcaaccttattcagataaatcagaagaggttgaaacatcatctgatgaaccttatggtaatcaaaatactaagatcaaaaaatctgaaacgacagatacaccacctagcagagatgagcgctttgatattcaatatattattcaatctctccaagaacttgcctcagaaatggactctcctctagaacatctgtctgcaattaatgaacatggtgaaatgatagcgagtattaatttgcttcaaatcaaaaaacttgtgcctgaacccaagcatccctcatggattgattatgataaagggcgaaaattattgttcttaaaattagacttaaaagatcaaaatagattttcctatctcatcgatatacataaaaataaaaatcatgaagcattttgtgcctttcttatttttactcagaataagttgacaagcgaacaaattaaaaaaatctgtattgaactagaaaatgccaagggaataaaaaaatgggcactctactgtgataatttcattcataaaatgatcgcaataaaacatttatacgcaacacctgatgaatggaaaaatcgctttaaaaatttattcataagcttacagaaggacaaatcctaa

SEQ ID NO: 304018 - DNA, 1488 bp, Proteus mirabilis; identical to SEQ ID NO: 56954

SEQ ID NO: 304019 - DNA, 852 bp, Proteus mirabilis
atgtcaaaaataattgcatgtatagatggctcactcggtacaaataccgtatgtgattatgcagcttggttgagtcaaaaacttaacgcacctcttgaactgttacacgtaatcgatacacccaaagctcaagcacctcaagatttgagtggcgcaattggcttaggtagccgtgaaacactattgcaagagttggttgagcttgaagaacgtaaaggcaagattgaacttgagcatggaaaagttttgctaagagaagcaaaaaaatatgtactcgaaaaattcagtctggatgctcatagtttccaaagacatggcagtttattggaaaccgttgttggattagaagaagatattcgtgtgttgattatggggaaacacggcactcagacagaataccgttctgataaaattgggtcgcagatcgaaagtatagtacgtgctattcataaacccgtattgattgcatcctttccattccaaaagccactttcatttttagtggcttttgatggtagtccaactgcaagaaaatgtgttgaacgcattgcgtcaagtccattacttaaaggtcttgcagtacatttggtttatgtcggaaatccgaatattgaaatgcaaaatcagctctcttgggcaaaagagcaacttgaatcacaaggttttaatatcacctcgaatacgttggatggtgaagttgataaggcaattatcaattacgctgaacagcatcaaatcgatttgattgtggttggggcttatggtcattccaagatacgccaattttttattggcagtaccacaacaaaagtgatcacaagcactaataaaccagtcctgttactacgataa

SEQ ID NO: 304020 - DNA, 435 bp, Proteus mirabilis; identical to SEQ ID NO: 52959

SEQ ID NO: 304021 - DNA, 321 bp, Proteus mirabilis
atggatcaaatcaatttctttaaatgtttggctgatgaaacgcgattcaacatcgtcatgttggttcttgggaataatgagcagtgtgtctgtgatttgactgaaaaactagagttgagccaacccaagatttcacggcatttagccttactgcgttcttctggtcttttacaagatcgacgccaaggacaatgggtctattacagtctcaatcctaatttacccacttggtgtatagaagtcttaaataccgtcaaaaattccgatttacagccaaaagttgctccttcatttcaacaaatcaatagttattgtgagtag

SEQ ID NO: 304022 - DNA, 474 bp, Proteus mirabilis
atgaaattcctttttttgtgtactggaaatagttgccgtagcatcctgtcagaagtgctgtttaatagtcgtgccccagagggttggaaagcatacagtgcaggtagtaagccatcagggcaagtacatccattgaccatagaaactttagaaaatcttggtctctcaacagatggtttgtggagcaaaaccattgatgactgtgaacaatatcaacctgacgtggtgattactgtttgcgattcagcagctcaggaagcgtgtccactttatttggggggagcgatcaaggcccattggggcttggctgatccttcacatttagatttgccgaaagaagaaaaattaaaagcatttcaagttactgttgatcatatcaaccgccgcttagatgctttattggcactagatactactcatatgtctcgcccagatttgattgcagcaatcaatcaaatttcgcatattgaatga

SEQ ID NO: 304023 - DNA, 1044 bp, Proteus mirabilis; identical to SEQ ID NO: 52962

SEQ ID NO: 304024 - DNA, 705 bp, Proteus mirabilis; identical to SEQ ID NO: 52963

SEQ ID NO: 304025 - DNA, 954 bp, Proteus mirabilis; identical to SEQ ID NO: 52964

SEQ ID NO: 304026 - DNA, 1068 bp, Proteus mirabilis
ttgactcaattacaagctgaagtcgatgtagtcattattggtggtggtcaggcagcccttgccacagcttattttctcaaacgtaagaaaattccatttgttattttggatgaccaagctcaggcaggcggtgcgtggtcacatgcttgggaatcgcttcgtcttttttctcctaatacgtggagttcattgtcaggttggatgatgccaacaactgaacaaacctacccaacacgaaatgaagtgattgactacttgtctgcatacgagcaacgctatcaatttccaattattcgaccagttcatgtcgatcatatcgaacaaaaagatgactatttagatgtgtatgttggcgatcaatattggcgagctaaagcggtggtcagtgctacagggacatggagtcagccttatattccgcattataaaggacatgaacgatttgaaggattacaaacgcattcagcccattatctaaatccagagccttttatcaataaaaaagtgattatagttggtggtggtaactcaggggcacaaattcttgccgaagtctcaaaagttgcagataccacttgggtcacagtaacaccacctcaatttttatcggatgatgttgatgggcgtattttatttcttcgggcaactgaacgtttaaaagctcaacagaaaggtcgtgtgattgatcaacccgttggtggtctgggtgatattgtcatgattgacagtgtcaaagaggcccgtgaacgtggcgtactacatagtcgagaaccctttacctcatttgaggagcattccgttatttgggctgatggtacaagacaagcagtagatgctgtgatttggtgtacaggattcaaggcctcactggatcacttaagaagtatgaatgttgtggaacctgatcagacggttgctgtgaatgatggacgctcaataaaagtaaatagcctttggttggttggctatggggaatggacaggcatggcatccgcaacactcattggggtttctagaacagcaagagcaacggtagatcaaatagctgcttatttggttaatttataa

SEQ ID NO: 304027 - DNA, 1449 bp, Proteus mirabilis
ttgactgaaaatgttattgaacatgactgtcatggatgcaaccagtctgtttctttcataaaaaaacgatataaaggcaagaaatattgttcgacttgttatgctcgtatctttaaaaaacgattatgcccaagttgtggtgaatttgcccgactccctagagatgatgaacaagctatctgtaatgaatgtattaagaaacaaccctgtattcgatgtaatcagacaaataaaccaataggtaagctgaccgaatatggtgtggtgtgtaatagttgttccgtgtatttcagacccattgagccttgtgaacgatgtggtacgccatcacaaaaattgacccgaatttcacgatttaatgatgatctacgggtatgcccaaaatgtgcgacacgagattatgagacatgtccatcgtgccagaagcatcgtttattggagtctgatatatcaggacaaagaacgtgtaaaaaatgtagagataagcctcagaaatcctgtaaagcatgtcattgtatgattgcagcaggttgtgctgatttatgcgatgattgttattggcatcaaaatctatggaataaatttgatcaaaatcagaaagtatttgagtctagttacttaaaacagcagtatgaaaactatacaggctggttagaaaagaaagttggatcacataaagctgcattatatataaataaacatacccatttctttatgaaaaccgaaatagattggaatcaatctgtgcctaccccaaagcagttattagtgaggttacgaagtagtgggcttagaaaatttgaattggtgatgcaatggcttgaagaagtgcatgacattcgaatagatatggataacaaaaaaagttgttcagaacgagatcagatggaaaagcttgtgcaacgtattttgcaaccatcttttgcttatgatgttgtactggaatacaaaaataaattagaagaaaaaatcaaacgaggtgatacctcaatacgttcagctcggttggcaataaagcctgctgtggcgttaatgctgtcaattggggaagaaagtgatcagttaccaaatttggagcatgtcaaagcgtatttggctgattattcgggtcaagctgctgcactcactggattcattaactttttaaatgagaattacggtatttctattgattatttaaaattaaaaaagtcttcttttttaaagactaagcaaaagaaaaaactagaaatggaacttgttgcacttacccaaactgatttaagtgacaatgaacttattctaagttgggtgagaaatgggcttaggtattttcatcaacttccttacattgatgctctaaagattaaaacagaaatgattacagaaatagaagatggttatgatgtaagatttaatggacattcatattggttaccaaaacccatagagcttcaaaaaaacagctag

SEQ ID NO: 304028 - DNA, 1116 bp, Proteus mirabilis
atgagtcaacctgaacaatgttggtatatcagaactcccattcagcaaggggaagtattctcatcgtggttgatacgttccgccttagatgtaggttgctcacctatggttctaattgaggctttatgggggaaatggagagcattaacgattgatttagacaaaggggtagatgcagaaaggttcgatgctctgttgtctcatagtatggagtcaaaacaaaatatacagcaatcgatgttgagtagcgttgtttctgagatacacacaaattatgatccaaagcaaaataccccttgggttttatccttgggcacacgaaaccgctcaaatacatcaggtcggcaagtgtgtgttgaatgcttgaaaagtcgtgaaaatccgccttatttgcgtttaatgtggcgtatggggtggcattgtagttgtgttgagcatcaagtaagtttaattgaccattgccctgaatgtggtgtgacgatccaaccatttaaagccgatatggagcatggttgtttagcgatctgtacgacatgtggttttgatttaaggcattgtgaggaaaacaaaatcatcaatttaaatgctttagacttccaaaataaagcagagcaagtcttaaaacaaaaatttggtttttataatcaatccccagtaacttctcaagtatggtttgaaattgctcgtgcatggcttagtgagatcagatttttggtcaatacgcccaataaaaatgtgattcaattatttgaaagttttgacgtaaatttacatcttccaaatccaattactcctttggcatttgaatatctgaatactcaggaacgaatagttttgctttcaatattggatcagattatggatattccatgtgatttattggtacagcgatcaaatgaatatggagtaagtcgtgcaaacttttgggacaagcgcaagaagttgcctgttcagcttcaacagatgaaagatttaatgattaagcctacaagacgttatcctgtctctcgtgtagcaataactgttactaagccaaaatctaaagcgactgtacaacgtcaatggttaaatttattaagaagaagcaataatagtggagcgaggcatattgactga

SEQ ID NO: 304029 - DNA, 921 bp, Proteus mirabilis
atggaaaaatatgaacatcttgcagagcatgtacttgaaatcatgcaattaagcgatagtgaacggattgagacattatttactgatcgatggattggctataagaaagccattaccatcatgaatacattgaccgatattttgaatcgccccagaaaactaagacctgagtgcctactgattgtgggtgactccaatatgggtaaaacaactatcattcatgagtttgctagacagtattatacaaaaaccgtaagtgatgctgacatggatttattgtccgtgaccaagcctgttttaccgatacttgctccagcaaaagcgaatgttaaagaactctatattaatattttaaatcacttctttgtgccatttcgggcaagtgatcctgaagccaaattaagaaatcaagccgtacacttgatgcgtaagtatgaaacaaaaatgttgattatcgatgaaattcataattgtctgacaggttcagccaaattgcttcccgaagtcatgaacacactcaagaacctcagcaatgaattgagtctgaatatcgtaggtgtcggtactcgtgaagcaatcaccatactgcatactgatccgcaatatgccagtcgctttgatgtggtgaatttacccaaatgggaactcaatcaagactttttaagattattagtcagctatgttcgattattgccattaaaaaaacagtctaaccttgcatccaaagagattgctacgttgatttttgaagtgtcaggtggaaatctgggggatttaaatcgattactggtggagtgtgccaaagaagccattttacaaggtgatgaagaaatcacctatgacatcgtacataagtttaaatggcttaaaccgactgagggtttaagaaatattagaaatataaatctcagcctaagttaa

SEQ ID NO: 304030 - DNA, 1911 bp, Proteus mirabilis
atgattgaatctaatgctgtcaatatcgatcgtagtcgtatcattctaaaacccaatgtggttgtcggttatgaggggcaaccctataaaattgtgaatgttttaaatgccaatgacattgttatatcaagtcttgattcggtacgtagtctacaggtcaatgctagaagtttgaccgtttttaatggggaaaatacgctaactgagagtttgaataagggtgatcaggatattagtaatgaagcttggcagattgctttacaacgttatgagattattaagcctttgattgagtattcaacgactgaactggtcgaaaatagggcgaatgaatatgatgtgaatcgctcaacattgtggaaatggcttaaagattatcgggaaaataattctctaatggcgttgattcccaaaaaacgaggttggacaactgaaaaatcgaggttgtcacctcaagtgagcaatatcattaaacaagccatcaatgatgaatatttgaatgcgaagaaaccaagtatttccaaaacgattgaaattgtaaaagcagagtgttctcggcttcagcttgaagcaccgcatgaaaactctattcgtagaagaatcgaggctttaaatgattaccaagtaacgaaagcacgtcttggatcaaaagctgcaatagataaatttaaggctgctgcgggttcatttccaaatgctgattaccctttggcgtatgtgcagattgatcatactcctctagatattgaaatcgtggacgatgagtttagagaagcgattggaaaacctcatttaaccttggcaatcgatgttttcagtcggatgatcgtagggtattacctatcactagaagcgccaagtacgacttcagtggcgatgtgtatcgcatcttgtattttgtcaaaaaaacgtaagttgatcgaactagatattgatgctgaatggcaggtcgaagggattatggactcggtgcatacagataatggccccgattttagaaccaatcacatcagtaaagcttgtctaaagtatgggattcattgggaataccgaccaattggtggggcaagatttggtggtcatatcgagcgtatgcttggtatcgtcaatcttgaaatgcatgtcttggatggtacaactttttcaaatgtacagcagcgtgggacttatgattccgctaaacaagcctgtatgacattaaaagagcttgaatactatatcgtgtattggattactaaagtttatcaccagaagaaacattccgctttaggaacatccccaatcgttaaatgggaagaaggagtttgggggacgaagacgacagcaggtacaggtttgaaagaacgtgtatcagatgaagataccttgtttattgattttctacctgaatttgaagcgactattcagcgtacaggggtgcaaaaagataacttattctattttgccgactgtttaagacaatgggttaattctattgatccagaggacaataatcgaaagcgtaaaagaaaatttttgtttaaacgtgatccgagggatatttcacagatttggttttatgagccattttctaatacctattttaaagtacccactgcaaagcgagagataccaccgattagcttatttgaatataagcaggttcagaactatctcaaaagtgaacgtcaggatgttcagaatcaggatgagatttacatggcgattttgcacctacgtgagcagcttaatcaggctcgaagcttgactcgaaaacaacgtcgctcaaaccaaagaaaaaaggaaaatgaaaaagccattactcagctatccgaacagaatcagtctaaaaaggctgtagtttctgaaagccttcagacaagtgatgatttgtggaatacccctttaactgcatttgatgatttaaggtga

SEQ ID NO: 304031 - DNA, 711 bp, Proteus mirabilis
atgaaaaaattgagtgacgaatactcacctgttagaaaagctcaaactgtttatgggagtatttcgggaaattatgcctttagaggcgagaaaaccatttggtttgaatcgacccttgagcgtgatttcatacttaagcaagaatttaataacaatgtgattgatgttgtcggtcaacctgtagttatcccctacatcactgaattgggtaatcaatcagcctacactcctgactttttagtgcagttttcaagctcgaattgtgatgattttgaggattttcctgtaccaatgctcatcgaaattaagcctaagaaaaagcttgttgaagactgggataagttaaaaccaaaattcagagcagcccatcgttttgctgctgataaaggatggaagttcaaaattatcagtgaaacaagattatatgatcagtattgggaaaatattaatttcttaaaaaaatttagacgctctcatgtcgatgccgttgatcaacaattattactcgatactctgcaaaaattaggtcaatcaacaattaatcaattacctgcccatatttttaaagataaaaccaatgttttaaaagggattcaccaagtttgggcattagtggcaaagcgaatggttacttgtgatttgtattgtcctttaactgctgaaacagtgatatgggtgaaccaaaatgatgcatttgcgaggaatatctaa

SEQ ID NO: 304032 - DNA, 309 bp, Proteus mirabilis
atggaaaagagacattatcaacttattgaacaagcctgccgttttattgaagaaaatcagggtgatgtttctcttgccgacatcgccgcacatattcaatccagcccatattatttccatcgacgatttaaatctataatgggaattacacctaaagagtatgcgaatgcttatcggcacaaactaattaagaaagcattagctggcgataaaacaattacagatgcgatatatcaatcaggctttaatgcgaatagcagattttatgaaaatgcgacggccatattaggtatgacgccaacccattga

SEQ ID NO: 304033 - DNA, 756 bp, Proteus mirabilis
atgttaataaatgatataaaaataagtggcgataaaaatattttatcagggaatttattattcatgtgcattcctttaaatgatgaatatccaataagaatatacgatgataaaacgactaaaattataaagggaaaggcttttatttataattcaaaaaatgaaaatgttatttttcaatcagaaaatcagtcatggcgtattgaaaagagatcattttttatttgtgccagattattggcatttattgattatgctagagatttttcaaaaatgacagcagttggcactaattttgatattaatcaacaaattttttatataaaagaggggagtggaacattagaacatctgattattaatgaggcactgaaagatgaaagccaattagaacctctttttgtgacaataagacacagtgaaagttactggcttatattacatctgattagttatttggatgagaaaaaaagcaatattgcacaaataggtgaacgatatggtgtatcagggacacattttagacggctgtgtaaacgttatttaggtaattgtggtaaaagtcaattacgttcatggcgtgcggcatcttctattttgacaacgctatcaacagatgaatcattgactcaaattgcagtcgataatggttttagttcagcatctcatttttctaatgaaattaagacattatttggtattacaccaactgaatttcggcgaattggccaatatctttatgaacataaaaaataa

SEQ ID NO: 304034 - DNA, 1992 bp, Proteus mirabilis
ttgatccttgattataatattaacaccaatgttaatatccctcatgaaggaagcaatacgcaaagtatttattacaatggtactgttggttataacttcggtagctggcgtattcgttctgattatcaagggaattataatcgaacctctggtgatgcggaaaacaataaagatttattaaattttactcgagtttatggatatcgcgcgatccgcagtttaaagtctaacctaaccatcggtgaaaactttataaactccaatatatttaattcctggcgttatacggggattagtttagaaagtgatgatcggatgctctctcctcaactaaggggatatgcaccacaagttacagggatcgctgaaactaacgcaagggtagttgttaagcatcaaggacgtattctttacgattcaacagtacccgcaggtccatttgccattcaagatttagacagttcggtgcgtggtaaattggatgttgagattattgagcaaaatggaaagacgaataaatttcaaattgatacagcctatgttccttatttaacaagaccgggacaagttcgttataaggttgttgcaggacgctctagagataaattacataatacagaaggacctatatttggtacgactgaagctgcttttggtttaagtaatgcttggactatgtatggtggtaccattttcgccggtgattataatagtgtagcacttggggttgggcgcgatatgttcgctttcggtgcggtatctgccgatattacacaatcttatgcacgattacctgatcgtggcactatgcaaggtaagtcatggcgagtcagttactctaaacgttttgataatttggatgcggatgtaaccttcgctggataccgatttaatgaacgtaattatatgacgatgcaaaattatttagatgcaagttatcgtgatgattttactggaaaagagaaagaactctatacagtaacctttaataaaggtctttctgaatataacacatcaattggggtgcaatataatcatcagacatattgggatcaaagtaattccgattattattctattaacttaaataaatatatggatgtttttgcagttaaaaatatttcattaaatttatctgcatcgagatctaaatactatggcaaagataatgatgtcttctttgcgagagtcagtattccattagagaataatagaggatttataaattatgatggctcaagaaattcggggaactatacgcataatatagggtactttaataccacggaagataacttagctaattataatttaaatgtttcaacgacatatggcgatgatatggatagtagttcaagcttctctggctattatggacgctatacttcaatcgctaatattaatgcgaatgccactatctcaaataaaaatacctcatcatttggtttttctgctaatgggggcttaacgattaccgctaaaggagcagcgcttcacccagatggatttaatggtggtactcgcttattagttgatactgaaggtgttgcaggagtaccagttgatggtggccgtgtaacaaccaataattggggttatggtgttgttaccgatattaatagttattatcgcaatgaaacaacgatcgatttaactaaattacctaataatatagaagcgacacaggcgattgtagaatcttcattaactgaaggtgctattggttatagaaaatttgaagtgttaaaaggtgagaaggcctttgcaataattaggttagctgataactcttatccaccatttggttcaataattagtaatgctaaaggacgagagctaggaataattagtgatgatggttttgcttggctaacaggtattaacccaaatgaagaaattagagtatcttggggagctgaacaacaatgtgtcgctaaacttccaaataaaatagaaccgagtaataagatattattattgtgtgaaaaataa

SEQ ID NO: 304035 - DNA, 270 bp, Proteus mirabilis
  misc_feature (240)..(249): n is a, c, g, or t
atgtttaaaaaatatttattagcaatttctttattagcattatccagcggtactactttagcagctaaccctattgctaaattaaaaatcacaggaaggatcaagcctccgacttgtactatcaataatgaagagcaagaagccacaatcatctacaactttgatatcactccaggtcttttccctgaaaagggtgacttaaagttagcagcaaaagattttcctgcaacagatgtcttnnnnnnnnnntttctttgtttgagtatttaa

SEQ ID NO: 304036 - DNA, 471 bp, Proteus mirabilis; identical to SEQ ID NO: 297226

SEQ ID NO: 304037 - DNA, 597 bp, Proteus mirabilis
ttggatccagaattatctattcctaatattgtctatttagatgcagaagcgcgtaaatgggtaaatccaacagcaacgagaaaatcattatacccagacgatcttaaccaagcatggctcgcgacttatacggtgactaatgattggaatgggcaaatagaaacttcactgtttaatttaaaagcgacactgcctaatgaataccctaacatgataaagagtttaaattactttttttcagataaaagaattgatagtgaaattcttccaggtacacgtcaacagattattttatcaaatggaaggcaacatacatttgatgagttaagttctggcgaacatcaaatacttattatgttatttacaatccaacgttggctaaaaccaggaggaattgtattaatagatgaacctgatctacatctacatccttctgttatcgcacctctcttagcggctatcgaaaatattgtgactaataagaaagggcagttaattttaacgtcacactcaacagaagtttggcaacgctatgaaaaatttggttcacgtattgatcttactttgctaaaaggatcggtgaatgtcgaaaattga

SEQ ID NO: 304038 - DNA, 390 bp, Proteus mirabilis
atgtctaaatcggcaaaaggtacgacagaacggcatggacggaacgtaaaagctaaatctggtttaaaccgctcaatactggagcagggctggtatgaaatgcgccgtcagcttgagtacaagcagctctggcgaggtggtcaggtactggcaataccaccggcctacaccagtcagaagtgcgcttgctgtggtcatacagcaaaggaaaaccgccagtcacaaagtcaattcgagtgccttgaatgtggatatacagcgaatgctgatatcaacggggcacgtaacattttagcggcaggacatgccgtgcttgcctgtggagggagggtgcagtcagaccgcccgtcgaagcaggaacccgccgaggtgattcagacatcagtctga

SEQ ID NO: 304039 - DNA, 369 bp, Proteus mirabilis
atgcacgtccatttggtctttgttacaaaataccggcgaaaaatatttgatcaggatgcaattgaaaaattgcgaggctactttgccagtgtttgtgctgattttgatgttgaactggttgaaatagatggggaacgggatcacgttcatttactgattaattacccgccaaaactggcgatatctaatctggttaacagccttaaaggggtatcgagtcgattacttcgacgtgatcgtcctgatattgcccaacgtgattactacaagggggttctttggtcgccgagttatttcgcggggagttgtggtggcgcaccaatatccattatccaccagtacattgagcaacaggaaacaccgagttag

SEQ ID NO: 304040 - DNA, 390 bp, Proteus mirabilis
atgtctaaatcggcaaaaggtacgacagaacggcatggacggaacgtaaaagctaaatctggtttaaaccgctcaatactggagcagggctggtatgaaatgcgccgtcagcttgagtacaagcagctctggcgaggaggtcaggtactggcaataccacccgcctacaccagtcagaagtgcgcttgctgtggtcatacagcaaaggaaaaccggcagtcacaaagtcaattcgagtgccttgaatgtggatatacagcgaatgctgatatcaacggggcacgtaacattttagcggcaggacatgccgtgcttgcctgtggagggagggtgcagtcagaccgcccgtcgaagcaggaacccgccgaggtgattcagacatcagtctga

SEQ ID NO: 304041 - DNA, 819 bp, Proteus mirabilis
atggcttcttctgaattagttcgtttatcaaaacgcaaagaaaatagaaaagcagttgaaaaagcctttgaaaattccaatagaacctatttaattcactactcctgcgaatcattctatgataacaaatcaggtacatctcgtcgtgtaacttcaattgcagttagaaatttaagctctgctcaaactcactcatggtcaatacataaatcagcagaattacataataaaattaatacgataaatgaagatatcgataatttagaatgtgacatgttgtctagttactttgattttttgagaaaaaatgcagattttacatatattcactggaatatgcgtgatgaggcttatggtttccaagcattagaacatagatttagggttcttggtggagaaccatttatacttcaggatgataaaaagctagatttagctagagttttggtcgctttatttagccgtgcatattgctctcatgagtctaaaagtgggaaaaatggtcggttaatggtattaactgaaatgaatggaatagctgatttagatgcactatctggtgcagaagaagcagaagcttttgaaaatggagaatatttaaaactccacagatccaccttaagaaaagtagatatttttgcaaatatcattgatagggttcatgacaatacattaaagacagatgctaattggttcgatcgcaatggtattcacccagtagttataattgaattaatcaagacacaccctgtgtattctggcataggcattgcgagcactataattgctttatatacccgtttatttggtctattctaa

SEQ ID NO: 304042 - DNA, 138 bp, Proteus mirabilis
atgaaaaatctagctgaactaacgcaggaagaaaaagacaaggtcaatttagctgcttcgggtgtcacatataaagaacgcctcaatatgccagttgttgtgtccgaagttgaacgacaacaaccagcatgtttgtaa

SEQ ID NO: 304043 - DNA, 339 bp, Proteus mirabilis
atggcaaaaaaaagattgttaaaaatgatagctagatcagttcagctatccaaggccgtttctgaagttccttctgtaaccaaggaagagcttgagattataaattcaaagccaagaaatagaactgaagctaagcgacagttagccttaaaattaaggttacggaaaaaaggtttttttgatgataactcactaaaaaacatggcagaaaaagcaaaattatccattacagtttctaattctcttaggtttgatgaaggtaaggttgattcaatagatactaacaaaatctctgattctaataagcaatggcgtggcaaaactgcaaatacaaagtaa

SEQ ID NO: 304044 - DNA, 693 bp, Proteus mirabilis
atgcgcgaaagaatcaagcaagctagacttgcaaaaaacatgacccaagctgagttagctgagttggtaggagtgtcaccacaatcagtacagcagtgggagaccagtactgagccaagaaaaaacagagttattaaaattgctgaaatacttgaagttgataccaattggttgttattcggaataactgatattgatgaaagaaacaaagtcagtagtattcaaataaatcaagatattgaagtttcagataaaaatacctacaaggtggagatgctggatatccaagctagtgcagggccaggtgtgatggttcttgatgattttattgagacaataacggctattgagtattcagcagatgaagcaaaaagactgtttggtgggagatctgcatccacaatcaagatgatcactgttaaaggtgactctatggctggaacatttgagcccagagatcaaatattcgtagatatcaccactaacttttttgatggtgatggaatttatgtctttgtattagataatcagctatatataaaaaggcttcaaaagcaatataagagactggctgtcatatcggataacgcaagatatgaaacttggtatttagaagaagatagtatcaatagcctctacattcatgccaaagttttagttagccaatctataaaatacaaatttcatggatag

SEQ ID NO: 304045 - DNA, 279 bp, Proteus mirabilis
atggctcaaattacttacttaccgcgcactggtaagacaaattcaaagatgcgtcgttatatcgctagaggtgaattaatggctcgcaaagctttagaagaagcgaatcgtggtcgcactactgaggaaatatgggattcaatcattaagccagtcgatgaaacggatgtattgtcagagttaattatttgtttaaaggatacacctagtgaacatcgtaagaaattacgtctacgcaagcctattatgccaagcggggaagtgacggcgagggcttga

SEQ ID NO: 304046 - DNA, 309 bp, Proteus mirabilis
atgactaaaattatctatcttgagaaaggaagaaactcaaaagcaaggcgatatattagaagaggtgagtatctggcaaggaaagcgctagagtatataaatgaatgtgaacgcaaggggttgtgcggtccacctcctccgcttgttggtccggtagcttacagaacaacttctgaattgaagttacataaaaagctatccctaccaaaacaagaaagggaagagaaaatatacaatccacctaaagacgacattatgaatagagttgtaaatcatgctcatcaaagaaacccaaataaaaaatggtga

SEQ ID NO: 304047 - DNA, 822 bp, Proteus mirabilis
atgatcaagcttggcatttatggatatgacattaaatatgaaaattcatttttttttggacggatgattccatataaaaacatggatattaatgacaaaaaaacaaattgttatctttctgcttttttagaaatagaacatgatgaaaatacaaatagaaatataaaaatattagaagcaatactttgttttattgaacaaaaagaagtgtacataaaaaaaccattaaaagctcatgaagattattctaatttagatgacaattatcctaaatcactaggtggtagaaaatatttctccgctataatattagaagaaaaatataaaaaagattctcgaaagttatttatagaaaaagcttttgacaaattgaattcagaggaagatgcattttcagtaatgttttttaaaaaagaactatctataaaaatgataccatcctatattgatgttacttactttttattattttccggtttggaagcatttactagggattattataaaatgtatcatccctctgcggttaatgtagtatttgataaaattttcaaagaatttaatataaaaataaaaacaaatgaatctgaaataaaaagaaacactttggtttacaccaagctaagaaatgctatttttcacaatggaaaatatacaactaatttaaataattcaaccactggggaagaaataaatctagctgattatttttattattttaaaaatatatttaatattgttatatttaaatatattgattttgatgataaatctatcaatatgaatccattctcaagaagcaggtttattaaaagaaattaa

SEQ ID NO: 304048 - DNA, 2820 bp, Proteus mirabilis
atgaaattgtatgaacatggttcagagtggagaaggtgggatcttcatgttcacactccagattcagtgttagaaacacagtttaaaggtgattgggatggttatataacagcaattgaacagtctaactcaggtatttctgttataggtataactgactattgctctatatccggttatgaaaaagtttgtgagtatcgaaaaaatggaagaatgaaaaatattgatacaattattccaaatattgagttccgtattactccaaatacagataaaaataaaggtataaacattcatttattaataagcccagaggaaaaatttcatattgatgaaatcaaaaatgcattaagtcggctgtttattgatcataaagggcagaattttgcttgtattgaaactcaacttatttcatatggtagaagcttattacagaatactaataaagatagtgatagaacatgtttaaaggaaggtattaataacttcaaaccatcctatgatacttttaagaagtggtataacggggaaaaatggttaaggaataactcaataattgttgtagcaaatggttctaatgatggtgtatcaggtattcgagatggtggttttactggtataaagaaagatattttcgagtttacggacatgatattttctgctaagccatgtgatattaatttttttactggtcaaggaaataaaagtaaagaagatattattaaagatcttggacgtcttattccttgcattcatggttctgatgctcatgcaattaataaattatttgagcccgatggtaaaagatattgctggattaaggctgatccaacatttaatgggttaaggcaagtgatttttgagcctgatagagtatttattggagagatttctccagaaaataaatctgaatatcagacgatcaaaagagtaagatatattgatagttcgggtaaaaatagatttcccaaaaaatggattgctcttaataaagacttaaatgcaattattggtggcaaatcttctggtaaatctatgcttttatatcatatagctaagactataaatccagaggaagtttctactagaattgagctatctaaatcatcatcatatgatgatatctcagatttggattttgaagttgagtggtctaataatgaagtatctaaactttctgatataaaagatccattacaattaaaagcagtaacatacattccacagctatatataaatcaattggcagataaagaaggtaaagatgattttaatgatttaatctctaaaacattacttcaaaatgaatcctatcgaggtattgttaatgagcttgaaaataaaataagaactgttaattctgaaattcataacaaaatagaaaccagatttcttttacttagagaacacagtaaactatcttttgagttaagcgagattggtaatgaggattctgttaaaaatgaaatttcagcacttgaacttaaggctaaagctattagagaaaaatctcaatggactgaggaacaagaaaaaatattttttagcttaactcataagcgacagtgtacgttaaaagctagggataaatatatatatattcaatctagcttgattaaacttaaaaaaaccattaatgaacaacaggattactggttatctttaatacagaaacagcttatacaagattcaggatttactgataaatcaacaatattaattaatattttaaatgttattaaaagtaatttgttggttggatttgaaaaaacgaaaatagaaatttctaataaattagaatcaattcctagtagaatagaattgttagatattaagttaacgttaatagataaagaaattaagccattagatgaaaaagtaaaagataaagcatcactggaaaagttaaatactcaacttaattttgaaaaagataaacttaagaagattaatataaaaattaaagagctagactccattgctgatagagggaaaaaatgtataagcgaattgaacgagcaatattctaaattaatagaattatataaatctcattgtgctgaggtaagtaaacatcaaatagatgatgatataaaaattgaggcaaaagttgttattgatccattaaagtttgatttttttgtaagttgttatcatagatcaggttcaattcgctctattattaaagatgttatggatgataatggtaactataattttgatattaatactcatggagattttgtaaaaaatacagctattaaaataaaaagtagtggtgctccaactctacgaaaaagttatacgttacaagatgcgtttagtaatctttatgctgactattttagtattgatttttcagtgaactataaaaacgatagcattgctcatatgtctccaggtaagagaggcttagttttactcagtttgatgctcgaattaagtaattcaactcaccctatattaattgaccaaccagaagataacttggataatagaacaatatattcagaacttaaggattttgttcggaaatgcaaaaataaacgacaaattatcatggtgacacataatgcaaatctggtagttgctgcagatgctgaatgtgttattgttgctgagcaacgggggccattagattgtataaatacacatcaatttgaatatttgggtggcagcttagaacatagcctagatactgataagaattttgaatataaatcaattaatgaattaggaattaggcagcatgtttgtcatatactggaaggaggtattagtgcctttaaagaacgagaaaagaaatataatttaatttaa

SEQ ID NO: 304049 - DNA, 222 bp, Proteus mirabilis
atgtctaaagaaatggatttagcctgcgaacaatcacagttattgcttgataaacaaataaaagcagtaacagggcgttacataggtgtatcagcgtttgaatgtgaagattgcggtcgtgaaatacccgaaaagcgccgtattgcagtaatgggatgcacccgctgtgcggattgccagacagtgtatgagctgaaatctaagcattatcggagtgtttaa

SEQ ID NO: 304050 - DNA, 1407 bp, Proteus mirabilis; identical to SEQ ID NO: 298192

SEQ ID NO: 304051 - DNA, 174 bp, Proteus mirabilis
atgcttctcaaagatccagcattccgggctgcttatgaagctgagagccagaacccgcaatccggttaccagattatccggcatcatggtgatggcactgaagaagtggtgtttgattctcgtgtatcaggtacagatttaccaactaactggatgaacaggcctgattggtga

SEQ ID NO: 304052 - DNA, 249 bp, Proteus mirabilis; identical to SEQ ID NO: 11349

SEQ ID NO: 304053 - DNA, 1245 bp, Proteus mirabilis; identical to SEQ ID NO: 78699

SEQ ID NO: 304054 - DNA, 1026 bp, Proteus mirabilis; identical to SEQ ID NO: 78698

SEQ ID NO: 304055 - DNA, 288 bp, Proteus mirabilis; identical to SEQ ID NO: 78697

SEQ ID NO: 304056 - DNA, 1713 bp, Proteus mirabilis; identical to SEQ ID NO: 78696

SEQ ID NO: 304057 - DNA, 234 bp, Proteus mirabilis; identical to SEQ ID NO: 10869

SEQ ID NO: 304058 - DNA, 252 bp, Proteus mirabilis; identical to SEQ ID NO: 16616

SEQ ID NO: 304059 - DNA, 318 bp, Proteus mirabilis
atgtctaattatggtctttttgtaaaaggtaaaatgcttggtgctcgccagcgtaataaggtcaatggccagggatactataatgaaattggtgttggcttagagattcctgatggttttggtggcactaagcaagaccagattattattcgtgtatctcaggctcttgttaatgccggtgtaatgaatcaggcaaataattttatcggtaagttagtccagatacctgtatatgttcgcgtctggtcaatggaggggagggaaggagtaacttataacatttcatcagatggcggcattactgaaataaaaggctga

SEQ ID NO: 304060 - DNA, 1053 bp, Proteus mirabilis
atgatcgactggtttaccggaatcctgccttgcacacaccgaccgttaccggctggtagtgtcgtcagcgtcaatgctgacggtgcagtggagtgggaaacagtaaaacggttgacagttcgcggttcgcatgagtccacaatgaaagtaaggtctgttggatctgatggtgaaggtcgggcaacacatctctacattgacggtaatccatcaaagtttttgcaaggtcactctgttatcggttccgacgatttgcaagggttggtgttaacagcttacgccagaatattggcattactgcatattcctcatgatctaccatcctatcggcaggtcatggaagggcaatttaagatctcgcgcatcgatatcaattacatgtattcattgtcaacattagaaaatgtccgcgcatggttatatgccgcagaatttaaagctaaaactcgccacggtcgcgcctgtggtaaaggtggcactgtttacttagggaaaaactcccgtcgttggagcctgaaattttattcaaaatatgatgagcatacatctggcaaaaaagggcaccagatggcagacgaattcgttaaagctggtttactggactggtcaaaagataaattacgcattgaattaacattaagaacaactgaattaattgatttgaatcttacgcttggtaatagctggaatattgagacgcccaataaattattctctgactatgtagggagaatagaaatgaatcaaaataccatattaactgatgaaaaaataattaatctcccaagaaaaatacagtctacatatttattgtggaagcagggcgcgaacatgaaagagatgttaccgaaacctacattctaccgacaccgtaaagaattactttctttcggaatagatattaacttttattgtgagtcaccggattctaataacgttgttccgttggttcgtactcttgaagccaaaccagccaaaattccatcatgggtttatgagaaaggtttaattttcgattataaccgtatttcacatgccagtaactggcattaa

SEQ ID NO: 304061 - DNA, 447 bp, Proteus mirabilis; identical to SEQ ID NO: 16619

SEQ ID NO: 304062 - DNA, 423 bp, Proteus mirabilis; identical to SEQ ID NO: 78703

SEQ ID NO: 304063 - DNA, 276 bp, Proteus mirabilis; identical to SEQ ID NO: 78702

SEQ ID NO: 304064 - DNA, 480 bp, Proteus mirabilis
atgacaacgagtgatgccatcgctttagctgcgcttgtagtatcgatttacactatcatatcatcagaagtgaagtcgagaaaaagtgatagagaacaaaaggttataaaggatgagcaagacaggttacgtaagttgcttctagaaaaagaaacaaagtcagcaattaatgagatgaaggctgagcttggtgcccgcctcgtaaaaatagccaaaaacaactatagactcaagatatttaatagagggaaagttgaggctaaaaatatagaaattcatttccctgataacgatggcaatgaatatctttacatgcatgatgtagaagataaatttccatatgaagtattacacccgcaacatgggattgaaattttagcgggactaagctttggaagtaaaactaaataccgaataaaacttatatgggatgacaattataaaaaaaggaatgaagaggagtttttcatttctatataa

SEQ ID NO: 304065 - DNA, 2973 bp, Proteus mirabilis
atgggtaagactgtcacaagcgttgtctccgcgggcttaatgatagcaggtgttattgctacgggtggtttggggactgcattaattgttgctggcattgctgttcaagctgcaagtgcgtttatctttaaagataaggtgcccggctcaggctatcgggatcagtccgaacgtaaacagatgttgcgttcagcatcagcaccagaaacggtcgttgtaggtaaaacaatgatgtcaggtttgcttttctttgctgaagaggaagagggcgaacaagacgaaaatgaagaactctacatggcgttagccatagcctctcatcccattcataaattaggtcaaatttatttcaatgatgacaaaattgaagatttaggcgacaacgcacaatacgaatttcataacggtagaactgaggcggatccatacctattaaaacatgccccttcatggaaagaggatatgattggtagagggcttgcatggttacgcttaacattacgctttgatcaagaaaagttcccttatggtgtgcctaatgttaaaagtgaactatggggaaaagaaatttatgatccccgtaccgaaaaaacagcgtggtcaaataatggtgctttggtcatattagattattaccgtcactatttgggggttccggactctgatattgattggaatgcatttaaagtcgcagcagatatttgtgatgaaaccgtacaaacgcctgatggaaaaagtgagcctcgatatacattaaatggtgcctatgaacttgaagagagtcccgcttctgtattagagatgatgcataaatgcattgccggcgaaccgacctatattgcaggtaagcacggtattttgatgcaggtttataatgggcctgcattactcacaattgatgagtcacaaattatcgatacggtaacggtgacaccggaactttctttgcgtgatgcgactaatgcgatttacggtactttcgttgatgcagagcaacaatataacaaaactgattttgaacccgtagttattgaggagtggatagaagaagacggcttagaaattaaagaaaatatggactaccgttttgtaaccagtccataccaagccaatcgactagccaatctttatttacgtaaaaaacgtgccggccgtcgtattcaattacgcatgaatttagatggctatgcgtatcgccccggtgatgttatcaagctcgagttaccttcattagggatcagtgatttagaatttcgtattgctgattggaaatttcacccatcagagggggtagagattactctcgaagaagatggtccttatatctatgaagacttagctagtaaaccttttgttagacccccattcactaaattacccactggtggtgtacccgcaccgattaatctggcctttgttcccctctctgttacggatattgttcaggggtatatttcatggcagaacgtggcatcggatattcgctataacacggttaatattctccagaatggaaaggttatacagtctattcaggtaccgggtgagcgtgttgatattaatggtttaactcgaggcacttatcgtgttgaggtgagagcaattaatgtggccggcgccatgtctgcacccgctatcagtgattttgctattcaggcaccgcctgcaccgattagcgttgaaataacaccgggtatgttcagtttaacagcatcaccaaggcagggggatagcgctgtatttggttatacctttgagttttggtttagtgaaaagaaagtcgctgagttgactgaaaatgaggtgatcaccaaaacaaacaaagttggtcaagggaatttctggacgcaagagaatttaaaagctggccacacgtattatttctatatcagaacaatcaatagctacggtaaatctgttttcgtagaagcttctggtgttccagtttcgctacccacagatatttttgatgatttagataacacgattagagaaacggaggctttcaaacaactcagcgaagaactgaaatggaacaccgagtctattgcagtactgacaaacgccacttactcgctctctacggatgtattgcgatattccgctaatgctcaagccggtattactcaactacaacaactccgagtttctgataatgaagcatgggcgcaggatattaagcgtgtatatgcatcaatagaggataacgataaagccttacgtgcagaaattaaagaaactcaaacatcaataaccgagttaaacaaggcgttcggccaaacaactacggagatccgcacagagttaaaaataaccaatgatgcaacaaataaacgcatcgatagcaccaaccaaaatttagctaatacagataaagaggttggtcgcgttcgtgctgatgttttaacgaataaagaggcgatatctgaaacgaataaagccatggctaaatctgaagagcggattcaagtccaactcggcgaacagcagggcatgattgaagagaagatgcaggctacgtttaagcaatcaggcgacggtgttgttacccactcgattaatatcacgattaaacacaatggcgtgagttataacgcagcagggcaagtgattagcgctcaagttaagaacgggaaattagagtcatacattggctataacgcgaataactttgcttggtataaccctgtaaatggcaagatggaattgtttatggctgttaaaaatggacagctttttgttaaagaagcgtttttagataaggcctctatccgtgaaatggttctttcagagtcaataagatcagataattatgtgcctggtaaatctggatttattattgacgttaaaaataacaaactggaaatgtatggtggtaatggcggaacaacattaaccaatcaaaatttatatgtaaaagatgaaactgggtataacgttgttattattggtgatatcacaaatgagcgataa

SEQ ID NO: 304066 - DNA, 228 bp, Proteus mirabilis
atggcaatattcaaacgactcactaaagagcaaataacgcgagattacgatcattacgcattatttatgggaatagtgccaatttatgttggtgatgtttacggagaatgcagggttgcggttcgtaattggtggcctgattggttattagatttagctgaggtgattagctcactaacgccatatgatgagtgggttataaaattaggtaagaaaattaagaattaa

SEQ ID NO: 304067 - DNA, 159 bp, Proteus mirabilis; identical to SEQ ID NO: 302338

SEQ ID NO: 304068 - DNA, 198 bp, Proteus mirabilis
atgtcagaaaaattaccaaaccctgattatcaaccagctgaagctgcatattatcttgtagttgagttaattagagctggtgaatacaaccgagtcggtactgatgcaaaacccgctgctataattaaggcatttgatgcattcaaggctcatttcgatactgataaaaaagagcttaattttgatgatataaattaa

SEQ ID NO: 304069 - DNA, 156 bp, Proteus mirabilis
atgaaatttaaagatttaccatatgatatccaattggttgcggcgaagtgtttgtctcaattaattacagaacggtcatgtatggaaaaagagccaatggagagattggctcgggatattaaagacgcatttattaatttatatcatcaaaattaa

SEQ ID NO: 304070 - DNA, 249 bp, Proteus mirabilis
ttgattgatgccggtgtggatgtcaatcatgttaatcgccttggttggactgcgttaattgaagccattattttaggtgatggaagtcaaaaatatgcagatatcgtgacgttgctgatcgatggtggggcggatgttatatacacacttcttcattcaccaccacaaaaccatcttcgcgtttgtgcatggcgccacttggacagacttttacgcaagccggatcgtcacagtggttacatgaaatag

SEQ ID NO: 304071 - DNA, 708 bp, Proteus mirabilis; identical to SEQ ID NO: 298371

SEQ ID NO: 304072 - DNA, 1995 bp, Proteus mirabilis
atgagtaatgagttattgagtttcagcattcgtgacttaattactgaccagaatcattattgtatccccatgtatcagcgaaactacgcttggggggaaggtgaaattcaccagctgattcaagatattaaagattttggcttgggacagagtaatcgcaggaaaaagccttattacattggtactcttgtagtttttaatcgtacggatggaagctttgaggtaattgatggtcaacagcgttttacaacattgaccctacttgcaatttgtctgaaacgtttagctgtagctggaaaaataacagtcacaatgaattggtttcaaaagcctaatttgagctttgagaatagaagaagttctacttacactttgaatcgtctgatgcaaggtgtagaactgaatgatctacataatgaagactgcaatctcgatctactcattggttatcaattactcgaaaatcacttaatttctcttaatacgcaactcaatgatttttgccaatacctatttgaaaaagtacaaatcacgcgcgttcccgtcccacatgacactaatctaaatcattattttgaggtcatgaatagccgtggtgagcagttagaaaagcatgagatagtcaaggctcgtctgatgtctgtcctacacacaattgaagataaaaaagagcgggacaccagtctaaaaactttagcgaaagtttggaacgcagtggctaatatggagcgttatgttcaatatggttttactccagacgagcgccatcaagtatttggttggaaggattggggacaatttaaaccatccgattttactgagctttgcaaacttctaaaagcgggatccgatagcaataaggatacagaatctacctctcagagcaaaaatctatctaccatattaacaacccttcctatacagttagaaaaacaaaatagtggcgagctgacacctgagcgttttaatagcgtaatcaatttctctaatttcttactgcatgtactgaggatctggactgggcgagatattccactagatgataagcagctaatcaaacaatttgatgacaatgtttgcttatccgcgcaggctgtacaggattttgtttttgcactgattaaaacaaaatatctatttgatcaatttattattaaacgggaattctctgatcgaggtgaaaactggagtttgaagcgcctgcattactacagccctacaagccaaagctatatcaattcctttgaacaggactcagaaggtggctttcgaggaattaatcgccgtattttacagttactttgtgcattccatgtatccaccccaacacaaatttataaacattggctcaatggtgcattgaacattctatataatatgaaacaggtcacagcctctacttatttacaactgctggaacacttggcacgtcagttcgtctatggacgctttttaaacccttttggtagctcagagtattatcagatggtttttcagggatctggctacccagatctcgacattaaaaatccagaactattaaagcatctcaaatatggtggtatcgaaaataatttagtgttcaactacctagactacctgatttggctagaaactattgaagaagatcgtaatacggatgaggtaatccagcgatttgagttcacattccgcagctctgtcgaacacttctcaccacaaaaaccaatggatggttataccccgctaccagataaagtactacatagttttggaaacttgtgcttgatcagccacaacaaaaattcacgcctaagtaattttcaaccaaatcagaagcgcggatattttcagtcagcaattaacgataagcgcattgattctttgaagctttataaaatgatccaacttatggataacatggacggcacttggggaaaaacgcaaatagaggcgcacgaacagcagatgctaaagttgctggaagatgattctaaacaggagactcagttatga

SEQ ID NO: 304073 - DNA, 1425 bp, Proteus mirabilis
atgcatagactggataaacagctcattactgttgcggatttactggtaatccccgagttgcgcattcctgagtaccaacgcccatataagtggacgcagaaaaacctgaatgctctactggctgatcttcgccgttataagggcaagtcagcttatcgtctaggaacagtcgtttttcaccaccattatgatgttcaaaaaggaataccgacagaaacgctggatatcgtagatggccaacagcggacactaactttattgttattggtaaaggccattctggtagagcgcgaactgggtactattaaattattacgcacggatgtcactcaaaaacttaacctgttaacgactcagattgatgcttttattgagcgtcaaacattcaatagcgacataagccaccacaatctttatcagaattttttggccgctcgccgagcagtatcgtgttcttcatttagcgaagaggatgtttattttttgttgaacaaatgtcaattggtcagttttgtgctaaatgatgtctcagaagctttccaattttttgattcacaaaatgcgcgggggcgtgaccttgatccccatgacctgctaaaagctttccatctgcgtgaattctctgaagcagaatctggccttaaagcaaaaacagtcagtcactgggaaagccttgatagcgcaaccctaaaaaacacctttgctaattacctgtaccccatccgtcaatgggttgaaggccattctgcccagtactttaataaaaataaggtgggagtgtttaaaggtgtcaatcttgatcatattggtacctacccttatacagagttactgcgaatagctcattattgtgtcgatgattataacaaccagtaccaacgcagaattgaccatcaaaagatgctttttccatttcacttagaccaaattgtaattaatggacgtcggttctttgaaatggtcagttattaccaaaaattgattaagcaagtaattgataatgaacattacagaaacgataaccaactgttcaaaattaaaggaattgtacttgataaacaggcaagcaggatcatttacacccttaatacctatccttctcgccaccgaatcggtgacaagtacatccgcaatttgtttgactgtgcactgattttttatattgataaatttggtatgcaggatatttcagcagctatagagaaactatttgtctgggcatatcgttgccgattacagatgcaggtcgtgcaattggccactatggacaactatgcccgtaaaaataatatattcaaactgattaaaaatgccattcaccctgtggatgtattaaatctacctttggagactattaagcaaatcaatggtactaaactggatatcatcgttggcttgttcaaggaactaaaatattatgagtaa

SEQ ID NO: 304074 - DNA, 1305 bp, Proteus mirabilis
atgagtaacggaatatcgaaaacagatttaaatctcattccagctggttataagcagacggaagttggggtgatccctgaggattgggaagtaactacttttggaaatgtaatgtcgattcgacatggaaaaaaccaacaacagatagaatcccaaaacggcttatatcctattctggctacaggaggccaaattggctgggggaatagttacttatggaataaaccttcaatccttattggaagaaaagggaccattaataagccacgctattgtgatacccctttttggacagtagatacccttttttattcagaaataagccatcaagtcgacgcaaaatttacttattacaaattttgtatgattgattggatgaagtacaatgaagcatctggcgttcctagtttgaacgccagcactatcgaaagtgttctcgctgcttaccctactaaaaaagaacaaaccgccatagccaatgcactatcagatgttgattccctaattagcgaattagaaaaactgatcgccaaaaaacaagctatcaaaacctccactatgcaacagctcctcacaggccgtactcgtttgccacaattcgcactacgtgaagatggttcaaaaaaaggcactaaacaaagtgaattgggtgagattcctgaggattggaatttggtttcgttacaaaatatggcaacgccaaacgggctagtacgaggtccattcggaggagcaataaagaaagagcatttcacaaaaacaggttataaagtctatgaacaaagaaatgctatatacgaaactattaatattggtaactattacattgatcaaaaaaaatttgatgaattaaagaggttttcgatttctcacaatgactttattgttagctgttcaggaacgattggtcgtatttatcaaataccaaataagtacccaaagggtgtaataaatcaagctttactaaaaattacattaaatcagagtattgattcaaagtacttctatcactacttcaaatgggatgagtttcaaaagcgaattatagatgggacgcaaggaggtgcaatgaagaatttagtaggaatggccgagttcaaacaatctttaatgcctttgccaactataaaagaagaacaaaccgccatcgccactatcctctccaatatggatgaagaaattcaagcgcttgaacaacgccttagtaaaactctccaaattaaacaaggcatgatgcaagagttactaacagggaagacgagattggtacagccttctccaacggatatttgccatgtagattaa

SEQ ID NO: 304075 - DNA, 240 bp, Proteus mirabilis
atgagcagagaatatcctcaatttaaattaagaatgccacctgatatgcatgagaaattaaaagagattgcagaaaggaatggtaggtcaatgaatgctgagataattcaaattattcaagagtccatcaataaagattacggacaatctaaaatagagaatattgcagatattgaatctaaaaaatttagagagttgtttattgaaacagtcaaaaaaatgtataaggaggaagaatga

SEQ ID NO: 304076 - DNA, 561 bp, Proteus mirabilis
atgatttcctcaaaatgcattctcatgtgcttcgtaacgattctacctgttttattcttgaataatgctgaagcgaaaaattgcagaaaaggaattccttgtggtaacacatgcatttctgcaaacaaagtatgcagggtaggaacatcgaatagttatacgtctaatccatctacaacaaataatttacgctcttatacgaatacagggtcttcatcatctttgactcacaactctagtagtgccgcatcattagctagtcgagcactaagcaatagtaaaacctataattgcatatactcaaaagctgtattaattggcgatgcgatggggccaatgcaaggcagattccatacgaaagtaatactgaatggtgataaatttacagcgataagacctgatggatataagttaattagccctgcaatgaaggcaagaaataacgggttttatatggaaaaagacagtaattatatctatgtaatggcagaaatacataatgaatacgctgtttcgaatataaatacaaaagaaactgagcaatgggtagagtgtaaataa

SEQ ID NO: 304077 - DNA, 411 bp, Proteus mirabilis
gtgaaaagattattaattacatctattttatcattatcagctttatcattaacagggtgcgctagtgtttcaccgccaacacaacagcaaattgaaagtgccagttatggggcgttgcctgacgactatcaagctcaaataaaaaatacaatgagcactatgctaaaggatccgtattcagctcaatatacatttcttcaaccatttaaaggatattctcaagatggcgcttgggcaccatctaaggggggagtgacttatggatgggtagcaccagttatggtgaacgcaaaaaatagttatggtggatatactggcgctaaaaggtatgtgtttatgttctctaacaacatactatatgatgtgactgggaatgatgcttttggccgagttgtgccaataaatcaatag

SEQ ID NO: 304078 - DNA, 546 bp, Proteus mirabilis
gtggggaatattaaggttatttctggaattttaggcggtgttgcgattattgcagcggttgcagctttgtcagtaaatcttgttcctgatgataaggctaatgataaacatctagctgattactgcgctgaaatgacaaggtcgctaatgaagtcaccatcatcatataaattagatgaatactatatacgagaattaccactaactagaaatgagcttgcagagatagtgcaaatggctccattcaataatattgatgatgcaatagacaatgataagcgcgagagatcaaaaattgagataatagaaacatatatggctaaaaatgccatgggcgttgaattggttggtaatgcaatatgtactctaaacaaaacaaactatggaagcgctggaagtagctattcaataatgagcttatcaataaatgatgaaaatattggtgatataaatttaataacagctgaattagcggctgataaaaaaactggaagattgaacagtaagtctgattacatgaaaaaattaaattatattttcaattga

SEQ ID NO: 304079 - DNA, 519 bp, Proteus mirabilis
atgactaaatttttaccttttattggtcgtaaatataacaatagtatctatggagtgagagttatgatcttaggattatctcattatggtgattacgaagatcaatatcccgaattcacaagagatgttataaatgaaaatgcctattcagcaggaaatagattttttacgcttttaactaacttattacgtttatctaaaatagcaccaagtgatgatgaaagaaaagctgcatgggagcatgttgttttttataactatatacaagatattgctggagctacaggaaggatatcacccacaacagaaatgtggaatgcagcaaaacgcccatttttaaatgtagttcaagaattgaaaccacaattaatcattgttttaggtacccaattatgggatcaacttcctgaaattaatgggattgagtggtgttatgtaaagcaccctagctcagggagcttttcatatgatgaagcttttcaaagttttcaagaagcgctaaaacgtataaaaaaataa

SEQ ID NO: 304080 - DNA, 3120 bp, Proteus mirabilis
atgcaacaaacaaaaacgattgccgaatccaataattttattgtgctagataaatacatcactgaatgggatgcgaatgatcgctatcaaagtgaggcagagttagagcgtgaattgatccaagatttacgcaatcaaggctatgagtttgtgcctgatttaacatcacaatcggctatgttggcaaatgttcgggttcaactccaaacactgaataatgttgtttttacagagagtgaatggcgacgctttactgagcaatatctcgataatcccagtgatacgattgtcgataaaacacgaaagatccacatcgattatatttgtgattttacttttgatgatggccgactagaaaatatctaccttattgataaaaaaaacctgcttagtaataaggtgcaagttattcagcaatttgagcaaacaggctcacacgccaatcgttatgatgtcactatattagtcaacggtttaccactggtacaaattgagttaaaaaagcgtggcgtagcgattaaagaggcatttaaccagatacaccgttacagcaaagagagttttaactccgataattccttgtttaaatatctgcaagttttcattatctcaaatggtacagatacccgctactttgctaataccacaaaacgcgataaaaacagttttgattttactatgaactgggcgcgctcagataacaccctgattaaagatctcaaagactttacggcgacttttttccaaaaaaacacattattaaacattttgttcaattacagtgtatttgatattagtaataatctgctaattatgcgcccttatcaaatagcggcgactgaacgcattttgtggaaaattaacagtgcctaccaagccaaaagttggagtaataaaaatagtggtggatttatttggcatacaacgggttcaggtaaaactctgaccagttttaaagcagcacgactggcgaccgaactcgacttcattgataaagtattcttcgtggttgatcgtaaagatcttgattatcaaacaatgaaagaatatcaacgtttttcccctgatagtgttaatggttctgatagtactgcggggctgaaacgtaatctggaaaagaatgataataaaatcatcgtgacgacgatccagaaactgaacaacctgatgaaaggtgaaacagatttacccgtctaccaacagcaagttgtttttatttttgatgaatgtcaccgtagtcagttcggtgaagcacaaaagaatctgaaaaagaaattcaaacgattttatcaatttggtttcacgggtacaccgatttttgcgggtaaaaatgccttaggagcagaagatacggcaagtgtcttcggtactgagttacactcttacattatcaccgatgctatccgtgatgaaaaagtgttgaaatttaaggtagattacaatgatgttcgtccacagtttaaattgatagaaaccgaaacggacgagaaaaagctcagtgcggccgaaaacaaacatgctctacttcaccctatgcggatcagtgaaattactcattacatcctgaaaaactttcgtaaaaaaacacatcgtgctttttctggagcaaagggatttaatgctatgtttgccgttagcagtgtagatgcagcaaaagcatattatgagacttttaaacatctccaacaggctgctattgagcaagataatcattataaaccactcaaagtggccaccatcttttctttcgctgccaatgaggagcaagatgctatcggtgatattaatgatgagagttttgatgttactgcgatgaacagcagttcacgggaatttttagaatcagcgattgcggattataacgctcaatttaaaaccaacttcagcaccgatggaaatagctttcaaaactactatcgagatcttgcaaagcgggttaaagcacaagaagttgacttactcatcgttgtaggtatgtttttgaccggctttgatgcgccaacactcaataccttatttgtagacaaaaacctacgctatcatggattaatgcaagcattttctcgtaccaatcgaatttacaatgccacaaagacctttggtaatattgtcacctttcgtgatttagagcaggctaccgtcgatgcaattactctgtttggaaaaagtaataccaaaagcgttgtaatggaaaaaagctacaccgagtatatggaaggttttacggatagcctaacaggtgaagcacgacgtggttttatggatattgtaggtgaactagaaaatcgtttccccaaccctgctaatattgaatccgagaaagagaaaaaggccttcgtcaaactatttggagaatatttacgtgctgaaagtgttctgcaaaactatgatgaatttacctcattaaaagccttacaaactattaatcttgatgatcctgatgcagtaaaagcctttaaaaccgaacattatttggatgatgagaaattcgcagaacttcaaataatacgtttacccgcagatcgcaagatccaagattatcgctcaagttataatgatatccgtgaatggcaacgccgtgaacgtgatgctaatgctaaagacaaaaatactgttgactgggatgatgttgtttttgaggtagacttactgaaatcacaggaaattaacctcgattatattttagggttaatttatgactacaataaaaacaacaccgataaagagacgctcaaagaagaagttaaacgtttaatccgtgctagtttaggcaaccgagcaaaagaaggattagtcgttgattttatcgaacaaacaaactttgatgatataccagataaaacaagtatcattgaaacgttctatacctttgcacaacaagcccaacaacgtgaagcggatgcgttaatcaaagaggaaaatttgaacgaagccgctgcacgacgttatatcagtacctcattgagacgcgagtatgccactgaaaatggcacagaattaaatgagactctccccaaactcagtccgcttaatcctcagtataaaactaaaaaacaaactgtatttcaaaaagttgtagattttattgagaaatttaaaggggtgggtggggacgtataa

SEQ ID NO: 304081 - DNA, 1236 bp, Proteus mirabilis
atgagacagttaagctatctgaaaaaactgcttgatgggattgaagtggaatggaaagtaatcgatgaactagcctcattaaggagaggtagggtaatgtcgaaaggctattttatcgataatatcggagaatatcctgtttatagttctcaaactgcaaataatggtgaaataggctccatagatacctttgattttgatggggaatttgttagttggacgacagatggtgctaatgctgggaccgttttctatcgaactgggcggttttcaattacgaatgtttgcgggcttatcaaaattaatagtgaaatacccttaaactataaatatcttttttattggctaacaattgaagctaaaaaacatgtgtattcaggaatgggaaacccaaaattaatgagtcatcaagttgggaaaataccagtcccaatcccttgcccaaataacccaaaaaaatccctagcaatccaatctgaaatcgtacggattttagataaatttactgctcttaccgctgagcttaccgctgagcttaccgctgagcttaccacacgtaaaaaacaatataactactatcgtgaccggctattgagttttaaagaaggtgaggttgaatggaagacattgggggatgttactaaaaaatggtattctggcggaactccaacagcaggcaaccctgaatattatgtaaatggcaaaattccatggttaagaactcaagaggttaaatttactgatatttcagcaactgacgttaaaataactgaagctgcattgaagaattcatccgcaaaatggatccctaaaaactgtgtcattatagcaatttctggagctacagcaggtagatcagctattaataagataccattaactacaaatcagcactgtggctgtttagaaatagatagtaaaaaagctctataccgctatgtatttcattgggttagttttaactacgaaagtattaaagtacttgggcagggagctagaggggatcttaactccacaatcataaaaaatttcaaactaccgattccttatgccactaatcctgaaaaatcactacaagaacaagcaaaaattgttgctgtccttgataaattcgacgctctaacaaactcaatctccgaaggcttaccccgtgaaattgagctacgacagaagcaatacgaatactatcgggatttattatttaactttcccaaaccaaaacccgtaaccaactaa

SEQ ID NO: 304082 - DNA, 1557 bp, Proteus mirabilis
atgacaagtctacaacaacgtgctgaattacatcgccaaatctggcaaatcgctaataatgtcaggggttctgttgatggatgggattttaaacaatacgttctaggggctcttttttatcgttttatcagtgaaaactttgctaactatattgaagctggtgatgagagtatcaagtatgcagaattagatgacaatattatcacggacgatatcaaagaagatgccgtgaaaacaaagggatattttatttacccaagtcaactgttttgcaatgtagcagcaacagcaaatactaatgacagactaaacgcagatttaaacagtatttttgtggcaattgaaagctctgcatcaggctacccatctgaacccgatattaaaggcttgtttgctgattttgataccaccagcaaccgattaggtagcacagtaaaagataagaacagccgccttgcagctgtcttaaaaggggtagaaggcctgaagttagggaatttcgatgcacatcaaatagacttattcggtgatgcctatgaatttcttatttctaactatgcagcaaacgcaggtaagtcaggtggtgaattcttcacacctcagcacgtttcaaaactgatagcgcaattggctatgcatggtcaaacacgcgtcaataaaatctatgatccggcttgtggttctggttcactcctccttcaagcaaaaaagcattttgataatcacattatcgaagatggcttttttggtcaggaaattaaccatacgacatttaaccttgctcgtatgaacatgtttctgcacaacatcaactatgacaaatttaatataaaactaggtaacactctgctagcgcctgagtttaaggatgataagccatttgatgcaattgtttctaatccaccgtattcggtgaaatggattggtagtgatgacccaacactaattaatgatgatcgctttgcacctgcgggagtattagcaccaaaatcaaaagcagattttgcttttgttcttcatgctctaaattatctgtcatctaaaggacgagcagccatcgtctgcttcccaggaattttctaccgaggcggcgcagagcaaaaaatccgccaatatctagttgataataactatgttgaaacggtaatttcattagcgccaaatctgttttttggaaccaccattgccgtaaatattttagtgctgtcaaaacataaaaccgatacccatgtgcagtttatcgatgcaagtgagttatttaaaaaagaaaccaataacaatatcctaacggatgagcatatcaaaaaaatcattcaggtatttgatagtaaagtagatactgactacttggcaaagtctgtcgagtataaaactatcgcaagtaataattataacctgtctgtcagtagctatgtggaagcccaagatacacgtgaagttatcgatatcactgtacttaatgcggagctaaaaacggccgttagcaaaatcgatcagttacgcaaagatattgatgcgattgtagcggagattgaagatagtgaggaacaggaatga

SEQ ID NO: 304083 - DNA, 393 bp, Proteus mirabilis
atgaacaaaaaactaaaattggtcctaggattaggtttatcactgctatctataaatgcctatgcggtaacatgggatgaattggaagcagtaaagacttcagagggctcgtcaccttttgaggggtgtaatgaatatattatgtgcgagcttttagcagagaaaggacgttatagcgtggtaaaaactcagctacctagagattgtgaatcaggtgggatttgggctgttaacgttaagaagaaacaagcggtctttatgcctaatattactaactgtgattttgatattgaaaaaaatgcagtggttatttatccacagcaaggatatgccaatatttatcaaggtagcacaaatgcaacaccaagtatcagtgaagtcgagttaccttaa

SEQ ID NO: 304084 - DNA, 744 bp, Proteus mirabilis
gtgtctatacctaaagcctttatttcttactctcatgattcccaagaacacaaaaaatgggtgttagatttagctactcgtttacgaaataacggtgttgatgcaatactcgatcagtgggacctacaggcaggagatgatctgcctagttttatggaaaaaggtttaacctcttcagatcgagttctcatgatttgtacagataaatatgttcaaaaagccaactcaggggctggtggtgtgggatatgaaaaaatgatcgtgactgctgacctattaaaaacaatcgattctaataaagttataccaataattcatcaaaatgggagtcatgatgtaccaaactttcttcgtactaagatgtacctagatttttcgcgccaagatcaatatgaattttcatttgatgaattaattaggactttacacaactctcctctctacgagaaaccccctatcgcaaacaacccgttcgtaccagtttcagaaacaccacctaatcgtacaggggatggtgttttaactgttatgagcatcatcacagcattatttgaatctgattataaacgtcgaattagttataagacattagttttacgagcttctatgtcaagagtaatattggacttatatattgatgaagcaatatcattagaactcatccagcaagatcctcttggggatatcattctgacaactaaaggaaaacattatatagttaaacataagcttattaatgattaa

SEQ ID NO: 304085 - DNA, 1248 bp, Proteus mirabilis
ttgtgtgtcggtcatttaggggttgaaaccgatttagtgacacagccaatacaacatgactccgcggctgaaatggcacaaccatttgatgtcaaagattggaaaaaaggtgaatgtgaccttatcccggggaaaactgcaccgcatcttattcctgtggagcgtgattatccaaatacctatgctcgttttacctcacttgggccgttaatggataaattaggtaatggcggtaaagggatcggttggaatacacagacagaagttgatttcctgaaaaaacttaatcgcgttcgtcatgacggtgtggcaaaagggcgcccggcgattgaaaccgcaattgatgcagccgaagttatcctctctttagcacctgaaacgaatggtcaagtggcggtaaaagcgtgggatgcactaagtaaagtaacaggacgcgatcacactcatttagctaaagtaaaagaagatgagaaaattcgtttccgcgatatcgttgctcaacctcgtaagatcatttcaagtcctacatggtctggtctggaagatgagcatgtctcttataacgcttgttataccaatgttcacgagatgatcccttggcgtactttaagtggccgtcagcagttatatcaagatcatgagtggatgcgtgcttatggcgaaagtttagtggtttatcgtccacctattgatactaaggcaatcgaagccgtgaaaggtaaaaaaccgaacggcttcccagaaaaagcgctgaacttcctgacgcctcaccaaaaatggggtattcactcaacgtatagcgataacttactgatgttaaccctcggtcgtggtggccctgtggtttggctgagtgaagatgatgctaaagagatgggtattagtgataacgattgggttgaagcatacaacagtaatggtgcgttaaccgcaagagcgattgttagccaacgtattcctgatggcatgatttatatgtatcacgcacaagagcgtcaaataaacctaccgggctctgaaataactggaatgcgtggcggtattcataattccgtgacgcgtgtttgccctaaaccgacccatatgattggtggatacgctcagttggcttatagctttaactactatggaactgtgggctctaaccgcgatgaatttgttgtggtacgtaagatgaaacagattgattggcttgatggtgaaggcgatgcttatcaacaaaccctgaatggacaggagaaggcataa

SEQ ID NO: 304086 - DNA, 1113 bp, Proteus mirabilis
atggcacaagtcattaataccaactatctatccctggtaactcaaaacaacctgaacaaatctcagggaactttaggaagtgcaatcgagcgtctgtcttctggtctacgtatcaacagtgcaaaagacgatgcagcgggtcaagcaattgctaaccgtttcacttcaaacgtaaatggtttaactcaagcttcacgtaatgcgaacgatggtatctctatcgctcaaacaactgaaggtgcattaaacgaaatcaacaataacttacaacgtatccgtgagttaactgttcaagcgaaaaacggtactaactctaattcagatatcacttctatccaaaacgaagtgaaagaacgtttagacgaaatcaaccgtatttctgaacaaactcagtttaacggcgtgaaagtactgagcggtgagaaatcagaaatggttatccaagttggtactaacgataatgaaaccatcaaatttaacttagataaagttgataacgatacattaggtgttgctagcgataaactgttcactgaagctaccgtttctaaaggtgagaagaaagcaagtgctgatgatgctgttattgctgatttaggtgttgctggtggtactactctaaaagctggtttaacagttaaaaaatacgaagaagatggcaaagttgttgatggtaaattcgttgcaactgaaggtggtaaaagctacttagtttctgcttcagattttgaagctgatggtactactgctacacaaatcaacttaaaagcaggttcagctgttgctggtaacgaatttactgctgctgcaggtaaagacgttaaaactttaaacgttaaagatgacgctttagcaactttagacaaagctatcaacaccattgatgaaagccgttctaaattaggtgcgattcaaaaccgttttgaatctactatcaacaacctgaacaacactgttaacaacttatctgcttcacgtagccgtatcttagatgctgactatgcaacagaagtttctaacatgagccgtggtcaaatcttgcaacaagcgggtacttcagtacttgctcaagcaaaccaagtaccacaaactgttctgtctctgttacgttaa

SEQ ID NO: 304087 - DNA, 663 bp, Proteus mirabilis
atgagttttgataatgcgcaaattgaaattagagatagatttgcagaagctaactcgcttttacattttttacgcgagaatgagcctgagcctctgcaaccaacaactagtaacatgaaatcacttaaaggtctttggttggtttctatttactctgcagtagaacgttcggttaatacaataatagaatctgcacttgaggtaattattagccataataatcgaagtatagattgtattgcttccattcatagtatacttcactttaatgaaattaaatcaataaatgaatgtggaaaaaataaaatattcgataaatcaatatctttatttcaagcaaccttcagtgaaacagccttaaagataactgataatcctttagcggaaagtttgcaaaatgttgatgctaatacaatgtcttgggttctaaaactgtttggcgcgcctaatttttcagtatctcctgcgtcaataggtcgagttaatactttacgagaaaggaggaatgctgtggcacacggacgtgaaagtgcattggaagctggagagagatataccattgatgaattagcaaatatatataatgcagctgatgaagttgttacagcttttcttttaaatctaagtgctcattgtaccaatcaaaattatattaaaaggtaa

SEQ ID NO: 304088 - DNA, 873 bp, Proteus mirabilis
atgatcaaaatatttattgcaatttcattcctcttttactcagtatttgttatggcttctcctaaaattattgcacacagaggtggcacagcggatgcacctgaaaataccgaaattgctatcaaaacagcactaagcaatcaagctgatgcaatttggataaccgttcaactgtctaaagataatgtccctgttctttatcgtccaagtgatctaaaaagcctcactaatgggcaaggggcaatttcaacctttactgccaaagaattggcgcaatgggatgcaggatataaatatggggaagcacaacaatttccatatcgcaataaaggagttactatcccgacattggagtatattctgactcaatttcctaaaacacaattctatattgacttaaaatcacctgatgccgatcccgttatacaaggcaaagcattagcttcggtattaagcaaacataatgcgttagagagaacgcgtgtttattctaccaatagtgcttttttagatgcgttacctgataacgtacaacgctttgaaagtcgtgatgttacccgcgatatcttagccaatattactatggggcatatctgtttactgccagaaaatcttgatatcacacgttggtatggtcttgaactgcacagaaaagttgaggtggttgaaaaatataccttaggtgaagctcgttcagcggctgtattaagttgggacaaagatgcgatgtcttgttttcgtgcggggggtaatgcgcatatcgttttattcggtatcaatactgagaaagattatttgcaagcagtagaattaggtgctgatgcagttatggttgattctccagctaaaataaaagcattcagaaaagagtaa

SEQ ID NO: 304089 - DNA, 1434 bp, Proteus mirabilis
gtgggctgtttccttgaagatccaaaattagctttagtgcaaacaccacactatttctattcacccgatccttttgaacgtaatttaagtgccgccaaaaacggccctcacgaaggtgcacttttttatggccctgttcaacgaggtaatgataattggaatgcaaccttcttctgtggttcatgtgcggtaatgcgtcgtagtgccctagaagaaattggtggtattgcggttgagacagtcacagaagatgcccatacggcattaaaattacaacgtttaggttggaattcggcatttattgatattcctttagctgcaggtctagcaacagagcgtttagcattacatgttaatcaacgtattcgttgggctagaggaatgacacaaatctttcgtgttgataaccctatgttaggccgtggcttaacatttcctcagcggttatgttatctcaatgcgatgatgcattttcagtatggattgcctcggattatctttttaaccgcacctttactgtttatgttattcaacctcaatattatcgcctcttctgccagtatgatttttgcctttgcattaccacatttaattatgtcggtgtatgtaaactcacgaaatattggtaaatatcgctattctttctggggagaaatctatgaaacagtgatggcatttagtttagtactgcctacattgctcagtttagtctcgcctaaattaggtaaatttaatgtcactgataaaggcgatttgcttgataaaagctatatggattatctaacggtacgccctttgattattactgcactgcttctagttatgggtatttcatgggtcatcattcgttatttattaaatgattttcaaggcatcgaccctttagtcattgtattgaatttggtttgggcaacttatagtttatttattgtgttggcatcgatcgcagtaggtaaagaaacacgccaaattcgtaaaaatacccgcattaaggcatcacttcctatcactttacattttgatgatggcgctgaattacaaactaccaccgaagatatttctatggggggagtgcgtattgcgattaataaaatagctgaattacgccagcgtaccgttaatagcattacgttaatggtgcaacgtgatgttgttacgcttcctgtggaaatggtcagtttagaaaatagccagttacgtctcgcttttttaccaatggatttaaatctacgccgtaagttagtacgggtgatctttggtcgagcagatgcttgggttcatcaaacacaatatcaagacaaaccattaaaagagttaggtgctatcactggctgtatttttgagttgttctttggtcgtcgtcaaaaagtaaaagcaccggtaaaaagagcaaaaacctctctctctgtgcaatctattaatggggatgactag

SEQ ID NO: 304090 - DNA, 219 bp, Proteus mirabilis
atgaaattaaaaagtggtgctacatcttgcccccactgcggtaataactacgcattctatgtattgcacacagcatccggtagtgccagttattattatggattcaatggtgatgatgtatataacgcaaatatgtgggatggggtttatttaaaacctaaaaaaactgcgtattgcggtgagtgccagagaagccttggttctgttgtagacgattaa

SEQ ID NO: 304091 - DNA, 708 bp, Proteus mirabilis
atgaaagagcgtggaattatttttaatgcggaaatggtgcgtgccattttagatgggcgtaaaactcaaacacggcggattataaaatccgtaccagcaactcataattttcatggctgggtaacgtcaagcacacacgcaaaagatgaaggaaaggcttgctgggctatcggtgattcaccgctactcaaagaacctattcgccttaactgcccgctaggtaaagttggcgatcgtctttatgttcgtgaaacgtggagtgtagtcagtcatgagtttgatgatgatggattgatgattgattatgttcctgatagaccaactaaagctgtgcatgaaatgccgtatggtcatggttatttcactggacatgtcatttactctgctgatggtgatttcacgtggggtgacgatgatggttgtattgatggtcgttcttgctggaaaccatctatacacatgcctcgctgggcttcacgtattacgttagagatcaccgatgttcgtgttgagcgcctgcaatcaattagtgaagcagatgcaaaggcagaaggctttgataattcacaatctgatgcgactaattccattggatggtttgaaaaaccaataagggcatttcggcgtgtttgggaaaatatttacggtgatgacggatggaataataaccattgggtatgggttattgagttcaaaaaggtggagtga

SEQ ID NO: 304092 - DNA, 258 bp, Proteus mirabilis
atgatgaagctgaaaattggattaaatcaaagttggtatataaaaatgaaaccaatacttgatatgtgttgtggctctcgcatgttttattttgataaacaagacgaccgagttttatttaatgatattagagctgaagaacatattttatgtgatggaagaattttaaatataacaccagatgttatttctgattttaaaaatcttccattaccagataatactttttatcaggtgctatttgaccccctcatttaa

SEQ ID NO: 304093 - DNA, 240 bp, Proteus mirabilis
atgtttaaaaaatatggtgcattaaataaagactcatggagagaagatttaagtaaagggtttagtgaagcatttagagtgcttaggcctggaggaacattgctgttcaaatggaatgaaacccaaatacctgttaaacaaattttagcactaacagaccaaaaaccaacagcggtacagcgtgtaggtaagaacgataaaacgcactggatctcttttcttaaggagctcagtgaataa

SEQ ID NO: 304094 - DNA, 213 bp, Proteus mirabilis
atgtactttgaatgcataccgatttctatgtattgcaagctatttggtgagtcacctgaagcaataaataaacggttacaaagacaattctggcatgagggaattcaagttttaaaagtagaaggctccaaggagcgctggattgatgtaaccgaggtgaataaatgggcacgaaaaaacaaaatgcaacacgcctccctaggggagttgtaa

SEQ ID NO: 304095 - DNA, 1182 bp, Proteus mirabilis
atgggcacgaaaaaacaaaatgcaacacgcctccctaggggagttgtaattagaaaacatagtgcaggagaaacaatcaatatagcttttacatataaaggggtgagatgtagagagcccctttcaaacttagaaatttcagcgaagaatattaaatacgcagaaagactaataggtgaaatatataacaaaatagaaaaaggctcattttcttatgttgaatacttccctaattcatcaaaaataaaattatttggcaatagaaaagccgggcgtaatatagaagattatctcacagaatacttatcaatatgtgaaactagaggtttatccccttcaacaattaatggctacaaaaaatgcaaaacagctttaaaaaaattgcatagtgtttccgtctctgaattaacaccagcaatgcttaaaaattggatacagtctcaatctacatcgttaaaaacaattagaaaccaactgtcttttttaagaagttcgatagatgaagcggttactgatggtttaattacaatgaacccagttaacttagttacagcttcaagatatcaatctgataaaaatgaaagtaacgataatgagtacattgtagatcccttttctcccaaggagattaatgcactacttgaatcatcaaaagagcctcagtggaagaatttatttagatttgcatttaatacaggaatgagaagttctgaattatgtgcgataaaatggagtgatatagatttcctcaataaaattgctcatgtaaattcagcaagtgttgttggggttattaaaggaacaaaaacaagatcagggaatagaaaaattgaattaaatgaccaggctatgcttgcactgcaagagcaaaaagcgctgacctttatgaaaggtgatgtgatttttgaagatcctaagaacaacaaagcatgggctggtgctgatgcaattaggaaaaaagcgtgggtaccgacattaagaagggctggtgttagatatcgtaacccttatcaaacccgacatacatttgcgacaatgcatatcagtcaaggggcaaacctattttggttagcaaatcaaatgggtcataaagggcctgaaatgttatttagacactatggatcatacttatctgagtatgacggcaatacaaatataaaatcaaaagtaagcaataagtga

SEQ ID NO: 304096 - DNA, 267 bp, Proteus mirabilis
atgacgaccataaaactcccccactacctttaccaacgaggctccatctggtggtttagaaaagctataccttcaacaacatcacgcaaagacattcgccttagcctaaaaacaagccacttaagcacagcgaggtcattagccttactactgaacaatcattataatcgtttaataaactctcacactggaacccatacaatgaccgagaaccaacttaatttctttcaattccaactcagaaaactgattaaattatggtggtag

SEQ ID NO: 304097 - DNA, 123 bp, Proteus mirabilis
atggaggatttccatggtgattttgataaaggcatcgaagaacttaatgatttattacatgtagctactgagcaaatagaagctcatcacattcatattatgggtaatatcctaccaagataa

SEQ ID NO: 304098 - DNA, 891 bp, Proteus mirabilis
gtggaaattacagataaaattcccgatgaggaaaataagctaaccgatactgactatcaacaattagcacttatggttgaccaagcatcactacagcactataaacatcttagccagtattttacggatctaaaacctgagtggttgagtgaaacagtttctataactgatgcacaactcaacccatctatagtttctgaacgctttttacttagtgagcttattaagaaatatcaagctgaaaatattgaaaaggaacacagcaaaaaaacacaaaataaatatgcccaatgccttgccttaactatcagttattttgacgatatctttgtcgataccatcccccccgagcaaggtagacattttagagaagcccttaaatccctccccatcgggttaaaaacgaaagatatgcaacagagtccattacatgaattaataaaaaaatcaggtcaaactcaaactatatcggtgcaaacggctaattcccacttacaaaaagtgtcacatttttttgattggggagtctctttaggttacttaactcagaatccgattccacaagaaccgcttccaacacccagaattaatcataaggatgataggcttgttatcacaaatgaagaagcaactaaagtctttaatcaccccatttttaccaaacaccaaggtatcaagactaaaaagatacaacaaccgtatcatttttggctgcctttaatttgtttatttacgggagtgcgtcccggagaggcttgtcagctatacacaaatgatattgaaaatgtcaatggagtcatgtgcatccgtattgataaccgctatgaacaacaacggttgaaaactccaaatgcaaaaacgctacattcctattcatcaacaacttattga

SEQ ID NO: 304099 - DNA, 423 bp, Proteus mirabilis
atgcaaaaacgctacattcctattcatcaacaacttattgaattaggatttttagtttttgttaatgataagactaaattacacccagaaaataaacgcctatttcccgaaattaagctcatacaagattcttttgccacaaaccccggagaatggttcaaccgtaatctacgagaccgtcaatcacttcctgatcacgtcactctatacagttttcgccattattttagagataaattacttgctcagcatccttcagatgagtacttgaacaaaataatgggacaccaaacaagctcctacggtagttccttaccaaatgaccaaaaagctatgaaagagttaatcaatcaacttgattactcatctatcgtagcacaagtgctaacatacccaaacttagctatatttcactcactctaa

SEQ ID NO: 304100 - DNA, 264 bp, Proteus mirabilis
atgcctaattatcaaaaagtatcaggaagattgggagctattgatatatcaaaaccatttgattccgttatttttgtccagcttgatgagaattttgatgcatttgccatttatgaagcaacaagagataatgttatattcgcgttaaaagccctcggatccacatcaagaaacataaaaaatcaattaagtatagccaaatttaaatctattagtacgctgatttgggtcaagcccctctgtttagtggataatgaaacttag

SEQ ID NO: 304101 - DNA, 723 bp, Proteus mirabilis
gtgaccaaacaagataacaacgtggaaatggcatcattagaagcttgtattcgtgatgatttaaacgaaaatgcacctcgtgcaatggctgttatcgatccggtacgtttagtgattgaaaatatgccagaaggtgaagagattttaactgcgccaaatcacccaaataaaccagaaatgggaactcgtgaagtaccatttagccgtgaaatttatattgatcgtgcagactttaaagaagaagccaatcgtcaatataaacgtctggtattaggtaaagaagtccgtttgcgtaatgcttatgtcattaaagcagaacgagttgaaaaagatgaacaaggtgaaataaccaccatttattgtacttacgatccacagacgttaaataaagatccggctgatggtcgtaaagtaaaaggggtgatccactgggtcagcattccacatgctattccagcagaaattcgtctttatgatcgtttatttagtgtacctaatcctggggctgaagaggatttcttatcaaccattaaccctgaatcattagtgatccgtcaaggttttgtggaagcaagcttaaaagatgcggctattgaaaaagcgtatcaatttgagcgtgaaggttacttctgtgctgataagctttcgacagcggataaactggtctttaaccgtactgttggtttacgtgatacttgggcgaagatttcgaaacaaggttaa

SEQ ID NO: 304102 - DNA, 486 bp, Proteus mirabilis
atgatggcatctaaacatttatttatggtaactaccaccttattaactggaatggtgtttacgtcgcaagttggtgcgacaatcgctttagatcgtacacgtattatttttaatggtgctgataaatcagtaagtctgagtataagtaatcaaaacaaagaattaccttatttagctcaaggttggctagagaacgagcaaggagaaaaaatagaaacacctcttattgtattacctcctattcagcgtattgaacctgggaataagagccaagtgaaagtgcaatcattacctgatattgcacaactacctcaagatagagagagtgttttttattttaatttacgtgagatccctccacgtagtgataaacccaacgtattacaaattgcactacaaacgcggataaaattgttctatcgaccaaaatctatttatgccacccaaactgatttaagtaatccatggcaggaaaaattaccttaa

SEQ ID NO: 304103 - DNA, 912 bp, Proteus mirabilis; identical to SEQ ID NO: 298183

SEQ ID NO: 304104 - DNA, 1638 bp, Proteus mirabilis
atgaaaacgaattatatttttgtgaccggcggggtcgtatcctctctgggtaaaggcattgccgcagcctctttagcggctatactagaagcccgtggactcaatgtcaccatgatgaagttagatccgtatattaacgtcgatccaggtacaatgagcccaattcaacacggagaagtcttcgtcactgacgatggagctgaaactgatcttgacttaggccattacgagcgctttattcgcacgaaaatgacgcgtcgtaataactttacgaccggccgtgtatactcagaagtgctacgcaaagagcgtcgtggtgactatcttggtgctactatccaagttattcctcatatcactaatgaaatcaaagaacgcatcatccgtggcggtgaaggtcatgatgtcgtgttagttgaagttggtggtactgtcggtgatatcgaatcacttcctttcttagaagctatccgtcaaatggcggcagaagtagggcgtgagcatactttctatctgcacttaacattagtgccttatttagcggcttcgggtgaagtaaaaaccaaaccaacgcaacactctgtaaaagagttactctcgattggtattcaaccagatgcattaatttgtcgctcagatcgcgttattccagctaatgaacgcgccaaaattgcactgttttgtaatgttcccgagaaagcggttatctcattaaaagatgtcgattccatttataaaatccctgcactcttgaaatcgcaaggattagatgattatatctgtaaacgattcagcttagattgccctgtggcaaatctgtctgaatgggaacaggttatctacgaagaagccaaccctgaaggcgaagttaccattggtatggttggtaaatatgttgaattaccagatgcctataaatcagtgattgaagcattaaaacatggtggtttcaaaagccgtgttgcggtaaatatcaaattaattgattctcaagatgtggaaactcgtggtgtagaaatcctaaaagggttagacgcaatcttagttccaggtggttttggtgaacgtggtgttgagggcaaaattatggctgctcgatatgcacgtgaaaataaaatcccttatttaggcatctgtttaggtatgcaggtggctatgattgaatttgcacgcaatgttgccaatatggaagatgctaactccacagagtttgcacctgattgtaaatacccagttattgcgcttattactgaatggcgtgatgagaatggcaatcttgaagtgcgtacagaaaatagtgacttaggtggaacaatgcgccttggtgcacaaccttgtcatttaagtggcgatagtttagtgcgtactctgtatggtaaaaatacgattacagagcgtcatcgtcatcgttatgaagtgaataatctactgttaaaacgtatcgaagatgcgggtttacgtattgcaggtcgttcagttgataacaagctggtggaaattattgaaaatccaaatcatccttggtttgttgcttgtcaattccaccctgagtttacctcaacgccacgtgacggccatccgttatttgctggctttgtgaaagcagcctttgactaccaaaaaggcttgctaaaatag

SEQ ID NO: 304105 - DNA, 354 bp, Proteus mirabilis; identical to SEQ ID NO: 296310

SEQ ID NO: 304106 - DNA, 2664 bp, Proteus mirabilis
atgtctgtaactaacgttactgaactcaatgatctggttgctcgtgtaaaaaaagctcagcttgaatttgctaacttttctcaagaaaaagttgacgcaatttttcgtgctgctgcattagctgccgctgacgcccgtattcctcttgcaaaattagctgttgaagagtctggcatgggtatcgttgaagataaagtgatcaaaaaccactttgcttcagaatatatctacaatgcgtataaggacgaaaaaacctgcggtattttgtctgaagatttaacctacggtactatcactattgctgaacctatcggtattatctgtggtatcgtgccaaccactaaccctacttctaccgctatttttaaagcattaatcagcttaaaaacacgcaacggtattattttctctcctcatccacgggcgaaattagccacaaaccgtgcggctgaaattgtgttaaacgctgcaatcgccgcgggtgcaccaaaagatattatcggctggatcgatgaaccttcagtggcattatccaatgcattaatgcaccatgatgatattaacctgatcttagcgacaggtggcccaggaatggtaaaagccgcttacagttcaggtaaacctgctatcggtgttggtgcgggtaatactcctgttgttattgatgactcagcagacattaaacgtgcagttgcttctattttgatgtcaaaaacctttgataatggggttatttgtgcttcagagcaatctgttatcgtcgtagacagtatctataaacaagttcgtgaacgtttcgccactcacggcggctacatgttaaccggtaaagagttaaaagctgttcaagatattatcttaaaagatggtaacttgaatgcggccatcgttggtcaaccggcagtgaaaatcgcagaaatggccggtattgaagtgcctgttaacactaagattttaattggtgaagttaaagaaactactgatgcagaaccttttgctcacgaaaaactatcgcctctgttagcaatgtaccatgcacaaaactttgaagatgcggtacataaagcagaaaaattagttgaaatgggcggtattggtcatacttcttgtttatataccgatcaagacaactgtcctgaacatgttgcctactttggcgacaaaatgaaaacgtcccgtattttaatcaatacaccggcatcgcaagggggtattggtgacttatacaactttaaactcgctccttctctcactttaggctgtggctcatggggtggtaactccatttctgagaacgtagggccaaaacaccttatcaacactaaaaccgtggcgaaaagagcagaaaatatgttgtggcacaaacttcctaaatcaatttatttccgccgtggttgcttacctattgcactggaagagattgcaactgatggtaaaaaacgcgcatttatcgttacagacagtttcttattcaacaacggttacgttgatgaagtgaccaatgtactgaaaaaatttggtgttgaaacggaagttttctttgaagttgaagctgatcccacattaagtgtcgtacgcaaaggtgcagagcagatgaacagctttaaacctgatgtgatcatcgcattaggtggcggttcaccaatggatgcggctaagattatgtgggtaatgtatgaacacccagaaacacacttcgaagaattagcattacgctttatggatatccgtaaacgtatttataaattcccgaaaatgggtgtgaaggctcaaatggtagcaattaccacaacatcaggtacaggctctgaagttacaccatttgctgttgtgactgatgatgaaacaggccaaaaatatccattagcagactacgcattaacgccagatatggcgattgtagatgccaatctggtgatgaatatgcctaaatcactctgtgcttttggtggtttagatgcggtgactcacgcattagaagcttatgtttctgtattagccaatgagtattctgatggtcaggcactgcaagctctgaaattgctgaaagaatatctgccagcaagctatcatgaaggtgctaaaaatccggttgctcgtgagcgtgtccacaatgcagccaccatcgcaggtattgcatttgctaacgccttcttaggggtttgtcactcaatggcgcataaattaggctctgaattccatattcctcatggtcttgctaatgcgttattaatttctaacgttattcgttataacgcgaatgataacccaacaaaacagactgcatttagccaatatgaccgtccacaagcacgtcgtcgttatgctgaaattgctgatcacttagaactgtctgctcctggtgatcgcacagccgctaagattgaaaaactgttagcttggttagaagagatgaaatcttcattaggtatccctgcttctatccgtgaggcgggcgtacaagaaagtgatttcttagcgaaagtggataaattatcagaagatgcgtttgatgatcagtgtaccggtgctaacccacgttatccgctgatctctgagttaaaacaactgttattagattcttactacggccgcgaatttaacgagcaccctgttgctgaggtaaaagaagcgaagcctgcgaaaaaaagcagtaagaaataa

SEQ ID NO: 304107 - DNA, 984 bp, Proteus mirabilis
atggataataattcgctaaaaaatgcgagtttatttgataatgatcccgttctttatgctgcatggctttactatcaggacggactcagtcaaagtgaagttgcaaatattatgagcgtttctcgagtgactgttgtgaagtatttacatctcgcgagagaaaaaggtttcgttaatataagcttggattcatcagtattttctacgattgattattcaatcagaataaaagcaaaatttaatcttaataatgtgcttattttacctgatgaagaaaagaataaatcgcaacaaacatcaaatatgaatcgagaaagattagctaaagcaggggctatgtatctttctcagataatcagcaatgatgatattttaggcgtagcttggggaagaacaatccataaactagggcactatctccccactaaaacactagaaaatgtcactgtgttacaaatgattggggctgtagctccacaacctgattttactactgcggaatctgccgctttgatcgccaataagttttcaggttgtagtattaatttgcatgtgccggctgtagtgtcaaatgcgcgtttggcaatggaactacaagcagaacccataatacggcgtaatttctctgctttaaatcaatgtaataaagctttgtttgtagtgggtaatactcaagatgacaaccctttgattacaacaggcgtactcaccacaaatgagatggcacaatatcgcgatttaggtgctgttggtgtcatttgtggtcgattctatgatgcacaaggtaatcctctgctttctgatatcgaccttagaattatgggaattagtcttgcacagttaagacagatcccacagcgtatttttattgctggaggcgttgaaaatgttgctgcaaccataggcgcaataaaagggggatatgctacagatattgtcatcgatgaagtgacggcattagcattattggagttgagtatttaa

SEQ ID NO: 304108 - DNA, 786 bp, Proteus mirabilis
atgagtagacaaaaagcagcaacacgtttacgtagagaaaataaacgtacattacgtaaagagcaacgtaatgccgcccatcgagataatgttatggttttaccaggatttggggatctagaaacaattggtatggcgagagagaaacgtgatcaacgaacactctctcctcgtaatgaagttcaacgccaatatatgaacgctattaaacatcaaaatttagtttttgcgacaggggaagcggggtgtggtaaaacgtttttaagtgcagcaatggctgctgatgcccttattaataaagagatagagcgaattattgttactcggcctgtattacaagctgatgaagatttaggttttcttcctggcgatatagcagaaaaattcgcgccttattttcgtcctgtctatgatgtattagttaaacgtttaggcgcctcttttttacaatattgtttacggcctgaaatcggcaaagttgaaatagccccatttgcctatatgcgaggacgtacttttgaaaatgcatttgtcatattggatgaagcgcaaaatgtcaccattaatcaaatgaaattatttttaacgcgaatgggagaaaatgtgacagtgattgttaacggtgatattacgcaatgcgatttacctgccaatgtaaaatcaggattagctgatgcactaagtcgttttcaagctaatgatcgtgttggtgtcattaaatttaatgaagaagattgtgtgcgttctagtctatgtcagcatgtattagcagcatatagtgattaa

SEQ ID NO: 304109 - DNA, 147 bp, Proteus mirabilis
atggaattgtcttttacccaattagttaataacatttcgattgaatcaaatttcaatggagttacaggtagtgaaccaatggctttacgtaataaagcaaggctactctctgcatttttactagttcctgtgaatacaactatttga

SEQ ID NO: 304110 - DNA, 345 bp, Proteus mirabilis
ttggttgatattagtcttgcccatcattttgttaaaggtgaatgtactagtcgccaatttaatacaccagaaggcgatctaattaccttacagataattaatgctgaaattgattatataaatcagttaactacttcacaccatcgttatgataaatggcgagatggcaagatcattgaaagtgaatgggaagttttcagcttaaaatggtttggtgtgtctgaatttgaacaaatactacgcttgattggttttaaacagatcacaatatcagccgattaccagtatctgcaaacccccagtaatacgacagaaattatgacttttgaagcgtataaaaaatag

SEQ ID NO: 304111 - DNA, 1281 bp, Proteus mirabilis
atgtttcataacgcagcgcatcctttacgaatacaaggaaatattttagaagtgatgttacgtgatgtttttattggggaggtctgccaactaaaagagaatattttcagtgaaaatattctcggtgaagctattgttattgggtttcataataacatagcaatattaagtatgatgggaagcgctcaaggttactctttacaaattatagttgagccaacaggaaaaacattttcagttgccctaggcccacatatattaggcagcatgattgatagtaaaggaaattgcttattacgatttaatacagaaatagcagagaagacctttaataccttatgtcctatcgaaggtcggccacctttgtttagtgataggctgcctattacaacactatttaagtcaggtatacgtgctattgatggattattaagttgtggattggggcaacgaatggggatttttgctagtgcaggaacgggtaaaacgatgttaatgaatatgattatccgttttgcacaggccgatgtttttgttattggcttgattggtgaacgaggaagagaagttacagagtttattgaagaattaaagcaacataagcgatgtgaaaatacggttttaatttgctcaacttcagaacaatcagcggtagaaaggtgtaatgcggctttagtggcaacaacggttgccgaatattttcgtcaacaaggaaaaaatgccgttttatttattgattctatgactcgttattgtcgagcgttaagggatatcgcattaacagcgggtgagttgcccgtacgtaaaggatatccagcatctgtatttgataaacttcccgctattttagagcgtccaggggtaacaaaaacaggctccattacggcattttatactgttttattagagagtgatgatgagccagatgcgatcggtgaagaaattcgttctattttagatggacatatttatttatctcgaaaaatagcagcatcagggcactatcctgctattgatgtattaggtagtgtgagtcgggtttttcaacaagtcactgatagtaaacaacaaaaatctgctttaaaaataagacaaatattgatgcgattacaagatgttaagttattgcaagagttaggagaatatcatgaaggagataacgaattaaatgatatcgcggtaagaaaacaagccaagatagaaagctttcttactcaatcctttaaagaaaaagccgattttcaacaaacattagaacaaatgtatgagattaccgcttaa

SEQ ID NO: 304112 - DNA, 804 bp, Proteus mirabilis
atgaaaacaagccgttctgcctattatgcttggctcaaacgtcctgcaaaacagatcaccgcagaacaacttagcctgtaccgcagagccaaagttatctttgaacagagtcgaaatagcttaggttatagaacgttacgtaaacggttatgcaaagagggctttatcgtgagttcttatggtgttcaaaaactaatggctcagctgggtctagttgtcactcagcgcattgcttacaaagttaccacaaaacgcaaacacagtgatgccgtagccgataatttgctcaatcaaaattttaatcctcatgcacctaacgaagtttgggcgggtgatgtgacctatttaaaaacaggggaaggctggatgtatttagccatcgtgatggaattatattctcgccgtattgtgggttggcacatcgataaacgaatgacgacagatttagtcagtaaagctttgatgaaagcgtataacttacgccaacccgaaaaaggcttagtctttcatagtgataggggggcacagtatacgagtaagcaatatcgccgtttgctagcaagctatggtattcgagcaagcatgggcgatgttggagcctgttgggataacgctgtcgttgaacgattttttggtagtttaaaacacgattgggtactgaaaatcccacagccgactcggaaacagatgaaagaagatgttatcgcgtatatgcgctattacaacttagaaaggcttcatactgccaacggtgatctgcctcccattgagtatgaacaaaattccttaagaaaagtgtcctga

SEQ ID NO: 304113 - DNA, 342 bp, Proteus mirabilis
  misc_feature (326)..(335): n is a, c, g, or t
atgcccaaaactcttatgagtcttaaacaaaatgattttacgcataaaaaaattatcgtaggtattagttcatgcttattaggggataaagtgaggtttgatggtgggcataaatgttgtcatcttgctgctgatgaattatctgagttctttgaatatcaatctacttgcccagaaatggctattggtttaccgacacccagaccagcattacgattagttcagtctaagactggtgaagttaggttaaaatttagtaatggaagtgaaggtgacttaacccaattgatgaatgattactctatcgaatatttgaggaggtttannnnnnnnnnggtttaa

SEQ ID NO: 304114 - DNA, 360 bp, Proteus mirabilis; identical to SEQ ID NO: 300264

SEQ ID NO: 304115 - DNA, 270 bp, Proteus mirabilis
atgcgtatggaaaaattaaccaatgtaacttatggaacagcaggcctaacggccttttttgccagtctttcgttatatgaatggggatttgttatcgggatggcgttcagcatgcttctgggtttagccacttattttatgactcgtcgagaacaacgaaaacgcactcaattatttgaagagcttgttcgtcatgttgacccacaaaacccgaccgaaaccttaaaaaagcttgctgaattaatggtgaaagcgccaaaggatatttaa

SEQ ID NO: 304116 - DNA, 411 bp, Proteus mirabilis
atgatgatatacgatgataatcccagtaaaaaagtattagacggtatacaacgtcgccttacagaagaaaactcagcaccaaacaattttgtaggtattaccgacatatggatgaacttttctggaaaatactatgttgcaatcgataacaataccgctgttgctgtagctgctgtagcagatcatggagaactatataaactgtatgtccttcctgaaaacaggaagaaaggtatagctgagcagtttgtcctttatttaataaaaaaaatagctgtctctaataaagatgctctttttgtagaaatgacgaatcaatcgatacctttttgggaacgccttatacaaaaaaatgatgtttcttttgaacaatacgaagggcaactaaagatagaactatggattaactaa

SEQ ID NO: 304117 - DNA, 168 bp, Proteus mirabilis
gtgccaggaaaaaaattaagggtgattaatgaagaaactattttagcaatgaatattaaattgattgaggatatatcattctctcatgatatgcttagttatattttaaatgacgataaaaatataaaaaaaatattaacatctatttatatgccaactaaagcttga

SEQ ID NO: 304118 - DNA, 3255 bp, Proteus mirabilis
atgaacaaagaaatagctttaagtcaccatcccattaatcagaaaaaaaataccacaaactctctatttcaactctcccttattacttcggcacttcttttttctggctatgctgttgcatattcagaagttggacaattaggtaataaacaaagttgggaaagccctgaatatcaaaaagactgggggcttgcagccatgaatgcctctagtgcttatgctctgggttttcatggtcaaggtgctaaagtcggggtgatggactctggtgcactgctctcacatcaagagttgagtggatctcgttttcatgcagtaaaagccaaaggtgaatatggctctacgggaatgcgctatccacaagaaatgggcggacattatgaaaaaggccaagtctttgatgttgatggtaattggatcaaaggggtgaatgatacccatggcacacatgtcactggtactgtgggggctaaccgtgatggtaatggtatgcatggtgtggcgtggggggctgatatttatttagggaatactggggcaacagacagcaataactatggcccttatcaagactatacctatttctatactggctggaaagcgatggtcgacgcgggtgcgcaagtgattaataatagctgggggactaacccgcgcattattaatacagataaaacagaggggcctgatggtggtaataccacgatacatatgcctgttaacaccacggcacagacagaatacgaatatttctactttaaaaaagtctatggtgataaaccttcctttgttgatgctgcttatgatgcagttaaaggaacgaatgttgttcaggtctttacaacgggtaatcgcgactttgctcaaccttattatcgtcctctttatccttattttaatcccgaagccgaacagcattggattgcggtggcaggattgaagcaaaatgcggataacaccggttatgtattagaaaaagtcttcaatgaagcgggtaatgcaaaatggtggacagtggttgcaccaggtcgaaatatctattctacagtggttgataaagagggaaatccaggttgggatacctttagtggtacttcaatggcagctcctcatgtgacgggggcgatgggagtattaatgtctcgttatccttccatgaacgccattcaagttcgtgatgtcatgttcactaccgctaaccatcgtgatcctgatggctctttatatgagagctggacggctgcagaaggtactcccgatgtacgttatgggtggggaacaccagatttagataaagggatgtatggtccgggtcaattgctaggtaaatttgaatataacctaaatgcgacaccgcttgatgtgtggactaatgatatttcccaaacagctttagatctacgtaagcaagaagatctcgcatggttgaaagaatataccgaaaaaggtattgcggcaggaggtgattatcatctcggtactgattttgtgattaatgatggcaatcctgatcctacatcgcatattgttagccaagaagatgctgaaaaatggcgtcaagaatattaccaaaaacgcgctgatgctattcaagctaaaattgatgctggcttatatgatggtgctttggtgaagcgaggcgaaggtacgttagtcatgacgggaaataatagttaccgtggtggtacaactgtcgaacaaggtactttatatggctttagcggatcttttgggacgcaagccgtcaatgttaatggtgggaaattaggtattattgagcgttataacgatacttttactcaaaaaggccaattaacctcaaaccaaaaccataaagtaaacattaatattaatgataaaggtcgttatttagtgaccgcaggacacaatgttaatattggtaacttagtgcttaatcaaggagccgatattgatgtgggggcggataatgttgggcaactaaaagatatttatcttaataatagtgttgttgtcggtgaggtgaatacagatagtttagttgataatcgcactaaaacgaaaatgttagccagtaaccgtgtggttgcagatccagccacaaccactactgtcaccaataatgattatgctttatttgataaacatatcacgataacagataaaaccatcagtggtagtttaactaagaaagaaaatacgactttagccacctttgctgataatgaaaatggtcgtgctattgctaatgcattagataatacagggaatggtgagctatttaatgctgtattaccgatgaatgaaaatgatctgaaaaccacttatcaatcattgggtagtgatatgtatttaaatgccaataatgccagtattgttaatgtattgggtttaactcgtacagtgaaagatcaggctattggtatcggtgatggtcgccatgcacaactaggtaatagtaatgcgcgtatttggatcagcggcatgggtcagtggggtaagacggattatggccacagtgatatggatgttgatttctatgttgggttattaggtgctgaaattgatgttactgaaaatactaaagcgggtctatttttcggtgcaggctccaccaaatataaaggtaatcaatatggaaagatagatagtaatgatattcatattggtgcttatgggatctctaatctttatgatgttgcctcattaaattatggatttacacatacaaaccaagatagagatgccaaaagaacactctggataggacaaactgcaggttataactcaaccagttacgatgcgaaaattagtcaattctttttagaaggtgcttatactcaattgaatactagccagtactcaattgaaccttatgctggatttagttggttaagagtatccactgataatatcaatgaaaatgtgggtaatatgaagtttaccactaaaacagatgcacaagatattcaagttgctacggttggtttacgtggtggatatccatttatggcaggcaatattaatatggcattaaaaggtgatatatcagcaagccatctgtttggtgataatcgccctgaatcacgtctatggttatccaattcaggtgaggcatcactacgaggtggtaaactagataatttatttggtgttggtctaggtgttgatgcgcagttaagtaaatcaaccactttcggtatctcttatcaaggtcaatataatagtgatatcaattcgagtggtattaatgcaatattgaaaattaatttctaa

SEQ ID NO: 304119 - DNA, 1326 bp, Proteus mirabilis
atggatgaaaaaaggctacccattatcaagtcattggatttgatgaaaagaaatatttgtcctgtctgtggcaaaatggactgccaatttttgactaaagataagcattgcaaagagatgatggatctctatcattcaggggagtacgctaaagcgcataaaatctttatgcaacgttatgctcaatttattggcatgcagagatttgcattaaagaaagcgattgatacttttgattcgattacacatttcactcagggtaattatatcaataaaccaatcccctcagagttaaatttggctatcacctccgcacaatcgacgcttattccaggaaaaacgcttaataaagcgacactcgcgcctgttgctgtttttacgcctacgttaaccactgctagtacaacaacagcaatagaaacgttaggagcgattttaggtcgggcactgggtttaggggcagggctgatgttgtactcacctccggtgggtgaaggcagtgatcgctacccagccatgatttatgatgaataccctaaaaatagagaaaccgcattaacgagggaaggtagggtattaaatattccgaaagaaactcagttaagagaaatagcgaaacaaaaaggcatgataaatacgtctgccgttattgttgaaaagggggtgaacggagcaaagcaaattgaactagtgaaaacggagaccccagttaaaacacgcgtggtagaagcgagaaaaacggccgagaaaggtgtttttgcctatacgttaccaaatgaaaaacaagaaagaaaggttcaaataggcaatgcgacgattttaaaaggtatcgccccacctcaaccgaaaaggcataggtatctacctggtaaggtgtatgatatttcaagatttaatgaattgccgttagaagcacctacttttttcagcgaaaatgaaaaaagacagtcgatattgcgagagcccgtgattttgatttttccgtgggaattagggataaaaccgatctatttgtcgacagggaaaaaagacaattcttcggaaattaaaattgaaggaaaaattcaagaccagatgggaggacgtggttggagtgaaaaagatatccaagatgttattgctaaaggtgctaaaggaaaatctgttgatcagcgtagacctaaaaatacggatgatggtttaggtcgtaatgatccagccacagtgtatggtgagccaggaaaatatgtggtggtgaatgatcgcaccggagaagtagcacagattagtaataaaaatgatcctagatggattgatgactcacgaattcaatgggagaaacaatga

SEQ ID NO: 304120 - DNA, 336 bp, Proteus mirabilis
atgatggaaaaaaaattatttgattacaacgtattatataacaatggtgaagaattctttaaattaaaaggcaacgcctgcatgtacttatcaccaaaagctgcaattgaagtgtgtcaggaggcaacaaagcgtaatctgtggatttcaggtatcgatggtggtcactggctgaatcctggattccgtccagatggaagtgcatcttggtcaggcaaaactaaattatttaatgagaacaaaatatcagaaaataatcagttggccattgaaaatattcaggaagatgctgcagccggatatacagcattcattgtcacgttaagaatgccttaa

SEQ ID NO: 304121 - DNA, 1695 bp, Proteus mirabilis
atgcttattacaagagctaacgttgatcaatacccatcgctcccagatgatattattcgtgatataaaacaaaatggcttaatttatgatacggaaggaggggctgatgaagatggtggttggatcactgaagggggagtggtcagtgtagataatggggtggaacgtttaattgtgacgccagctacatcaaataacttaccttggtcaaaaatacccactcttgctgatagtgataaagatgaatatccatttcctaatatgggtaatggcggatcatcaccttttaatccaaatactaaatttaaagtgaataaaccgcaaatacccgttattatttctagcaataataataaactaactaacagctcaaataaggaagaattagttacaaataaaggtgtgatgcatttcaatggcgttgttattgagcaactagagacatttaaaaagaaatattttcttacaaaggatgctattaatttaattcaagataaattaatagagtctgttattagtttatacagcaaagaaaaccgtattgatgataataaggtgaactcagtaaaatttatggagtttagtgaatttgataataattcatttaatgagtttgaccttatgtctaccattcctgcagaaaacttaattaataatcctgatttgatgtctggaaaacttaatgaaattgcaaaaaacaatggaacaattaatgttaatgcaagaatggctataattaaagaaaacaataaagcgaatgccgcgttagttggaactgatggtgtattggtgacaaaagaagttcctgtatataaagttaattacgctgctaatagctatcatgtagatataaagaatttaggaatagaatatttacttaggcccactagttcccctagcggccttggtttacaaggaaatattattcaaaaacattcaaatgaaaataaaaaattctcatatccagaaaaaatagaattacctaataaggtagaaaacaaaaggatagatgtaccatatccgcatcaatttaatgatgcaatcattgtgtttcctaaaaattcaaatttaccccctttatatgtttattcaggctttcctgcaattaaactgaaggataaagatcctcgtcctcagcaggaaaaagagtttaatgacatcaaagatggtgtgaaatttacaatttcattttatgagaaagtaactcaagaatttggtaaaaaggcggctcaattatctagagaattagcagaacaagcaaaaggaaaaacaatcagaagtgtagaggatgcattgcgtacatatgaaaaatatgggcagaatattaataataaaattaatgccaaagatagagctgctattataaaagcattagaatctattgatgcaaaacagttagcttcaaacttaggtaaatttagtaaagggcttggatataccaatcacgcgattaatgccgtggaattacttgttgaatttaaaaaagcggttaaaacaggaaattggcgtccattttttgttaaagccactgcaattactgctggtatggcagcagtggcattgacagcctttgcctttagtttaattgtcggtgggcctgttggaattttagggtatgccctcatcattgcaacagttagtgccttgattgacgatgctttggttgaaaaagtcagcagtgcgataggtatttaa

SEQ ID NO: 304122 - DNA, 336 bp, Proteus mirabilis
atgactaaaaaatattatattcataatatgttctggggctattttatgatgttggtgatgatttatcttaattataacgatcacactattgaaagcgtattaatgctaactttaagcatacctagtgcaattttttttcctttctccaagatgcttatcgaaaaattcacattaaaatatacaacaaaaaaattctggaatactggattatttataaatacaccagctaaacatggtggagtagctctataccacttattttgttttatattttcaattccatttagcatgatatatctagctctatatttcacaaaaaataggataaccaattaa

SEQ ID NO: 304123 - DNA, 981 bp, Proteus mirabilis
atgtttactatacctattgataaaaaatgcaaattagaaattattaatactttggcgacaatggaatctgagttatttaaaaacatttcccccttggaattttttgattctattttaaacttaaggattttagcttctgaagatcctcgttatcaagatgcatatggagatttaaatcaacactacattaataataatgattggactctagagtatatcctccttgaaagatttgactttttaaaatcagacgaattatttaccctattactcaacacactggtatctccatccataatgaaaataggtgtgaatgaaatttcttacatctataacaagttaaatccaattttaattatatataacatagagtatcaattaaatggacacgatgaaaataatataccaatttatgaactatctaattttaataatgatgatgaatttaaagatataaaaaataacaacattccctttataataaaaaacaataaaaataaagaaaacgaatattttaaattaatagaaattaactggaatgatttcggaagatataataaatttctattgtcttattataaaaatcaaaaagaatacatcattggagacttaaaaataatctctaaagaagatataagtacaacaaatgagataaaaaataatttttttaaattagataataaacattgttctctaggtcaaaaatttgaatattatgagaatatatttaaaggtaatgcattatcaatactaaaagcactaaatgatgtagctttctttactaaaatacaagagtcatttgaacatttatctcaatttaaagatagtttaattcgatatgacgaacaagagcagttattaagacaggctaggcatcgaataagaaaatacgatttaagtcaactttattccttcgaatatatatttaaacctgattacattgatgatgaagataaattaaagttaacttttaacttttaa

SEQ ID NO: 304124 - DNA, 783 bp, Proteus mirabilis
atgcaaaatatagaaagtacaaaagtatctataataatctcagcttataatgcagaaaaatatattcatgaatcattagaatcaataataaatcaaactcataaaaacctagaaataatagtcattaatgatggttctacagacaatacaaagcatatatgcactgaattccaaaaaagagatccccgaataatattcattgataaagaaaatgaaggattaacaaaatctctcaataaaggaatacatttagcaactggaacatggattgctagacaagatgcagatgacattagcttagaaaatagaatagaagaacaactaaagttttgtataaaaaataaaatagatttctgtacatcacaagcaatacaattttccgctcaaaataatcttagattaatacctaaaattcgttcaagtatcgcgtttaagaagaaaattttaaaatatggtaaccctcatatacatggaactttcttttttagaaaaaaaattatagaaaaaataaattacgatgaagagataaagtatgctcaggattttaattttattctggcagttaaacatgcaaaattcaatatggctttactaaaaacaccactatataaacttagaattcacaataattctatttcctcaaataaaaagaaagaacaaattgaggcagtaaaaacatcgcttgaaaaatatagatatagcacacactatataatagaagaaaataatggtttaaagaaacaagcactaagaattatgaagcaatgtgagtctataatttaa

SEQ ID NO: 304125 - DNA, 291 bp, Proteus mirabilis
atgcgccgtcagcttgagtacaagcagctctggcgaggtggtcaggtactggcaataccccctgcctacaccagtcagaagtgcgcttactgtggtcatacagcaaaggaaaaccgccagtcacaaagtcaattcgagtgccttgaatgtggatatacagcgaatgctgatatcaacggggcacgtaacattttagcggcaggacatgccgtgcttgcctgtggagggagggtgcagtcagaccgcccgtcgaagcaggaacccgccgagttgattcagacatcagtctga

SEQ ID NO: 304126 - DNA, 597 bp, Proteus mirabilis
atgaatacacctacaacattatcctcagcaaataggctgagcttacctgtagaaggtatgacatgtgcttcatgtgtcggacgtgttgaacgagcattaaaggcagtacctgaaataaaagatgctgccgtgaatcttgcaacagaacgtgctgatattacatttagcagtacccccaatcctgtacttgctgtaagcgcgattgaaagctctggctataaagttcctgaagagatcactgaattagctattgaagaaatgacctgcgcttcctgtgtcgggcgtgttgagaaagcattagctcaaattcctggtgtattagaagccaccgtgaatcttgccactgagcgtgctcatgtgcgtcatttatccggcgtagtatctattactgatttagaagtggcggttgtccatgccggttataaaccacggcggctatcagataatccagccaatactcgtgatttaagtgaagagcgtcgtgaaaaagaagcccgctcgttacgccgagcattacttattgccactatcttcacattaccagtgttcgttattgagatggctcacattttatccccggagtccatcattgggtaa

SEQ ID NO: 304127 - DNA, 963 bp, Proteus mirabilis
atgaaaaaaccagcatttattatcacattagataccgaaggcgataatctttgggaaaatgagcataatattactacgcaaaatacgcattttttaccccgttttcagcaactttgcgaacgttttcaatttaaacccgtttggctaaccaactatgaaatggcaatagatgaagcctatattgagtttgcacaagatgtgatagcccgtaacactggggaaattggtatgcaccttcatgcatggaatagtcccccaattgttgcgttaacggacaatgatctccattatcagccttatttaattgaataccccaaatcgcagatgcgcgataaaattgcctttatgactgacttactggaaaataaactacaaacaaaaatgttaagtcaccgtgctgggcgttgggcatttaatgaaacttatgcgcagctattgattgaatttggttatcaagtcgattgctcagtcacaccaaaagtcgattggcgttttactaaaggtgatccggcacaatcaggcggtacagattacagtaatttcccaagccatgcgtactttatggatgttaatgatatcagcaaagcagggaattcaacgttacttgaagtgccaatgagtattcaatataaacattccccttttatgaataaaattaagcgagggtacgataggctaagaggtaaacgacgctcaccttcagttaattggttacgccctaaagggggaaatgcccaacagatgattgaagtggcacaaaaatctttagcccaaggtcactctcatattgaatttatgttgcactcttcagagtttatgcctggtggaagccctacttttagaacagaacaagatattgatggcttatataatgatttagaaacactatttaatttcttacaagataaagtacagggaatgacattggctgagtattatcaaaataaagtgcaggcaaaataa

SEQ ID NO: 304128 - DNA, 222 bp, Proteus mirabilis
atggaaagagaagagctaacacttggcagatatggaagagtgcctgaagggcggccccttagcgatgcaaaactacaaaccttacaactaagagctggtattagaaaaggtattgaccctattgctgaaaaaaagcgaaatcaattacctcaatttcgtactgttgatgatgtatctgtcaatgatcttcaaaaaatccaccgcctaatatctaaaaaataa

SEQ ID NO: 304129 - DNA, 183 bp, Proteus mirabilis
atgtctgatgaaatactcacacttaaagagctggctgattatctcaagctagctgaaaagactacatacaggttgacagcagagggtaaattaccaggatttaaagtcggaggtagttggcgctttagaaaaagtgacattgatagctggataaccaaacaaaaaaatagtgggtatcgatag

SEQ ID NO: 304130 - DNA, 1257 bp, Proteus mirabilis
atgttaaccgaagaaaacatccctaagttgcataatcaagtcgctcaaagacctttgacaatgcaatatttgggtggaaaatcaagaatagtcaataatattcttgatacaatcgttaggtactttcctaatcaaaacaaattcatagacctgtttgctggctccggcgtcgtagcgtttgaagctcagcatagaggctatgcagtaactgctaatgatatacagccttactcagctacacttctctcttcactactcaaccctactagtggtaatttatcttcaataattagtgaattaagtaaggtaactaataagtctctattttcgggtgatcgagaaaattatcttcctgaatactttacagagctctctttctacaaccagatcgaacatgagcaatttaactgggaatcttataaaacgttcgtagatagtgcattactttgtggtggggatgccgaagcaatcgagaatctaaagaactctgaaaaatggacattatttctggcttactaccgaaatacttactttggaatttatcagtgtgcggagatagatttcttgagagagtttgctgaaaattgtgctcccgaagacaaaaaacacatattggcttgtgtaacatctgcaatgacttattgcgtgtcgagtacaacccatctagcacaatttcttaaaccacatagttataagtctgcaatcaacttaataaaaaaacgttctatctcaataattaatgaaacaattaaaaggttaatagcacttgactccagtttattgacgacagaagctaaagttttacaacaagaatttaagagtgctctagatgaaattactcttgattccgaaacaattgtatatgctgatccaccatattttaaagagcactattctcgatactaccacgtattagatacttttgttttatatgactatccaatgctgacctttaataagcgtataggttcaacaacagttggtcgttatagagaagatcgtattacttcagattttggtaaaaaagctctagctaaaaaagcctttgaaaaactcattgatatctgtatgaatgcaaacgctaagttagctattagctatgcttgctcgtcaattgttgatagtcagtttttctttgagtatacaaaaaagaaggggttacaaatggaagttaaagagttttctcttcagcatacggggcagggacaagcgagacataaaaacgtaacagaatacttattcctaatatcaaaatga

SEQ ID NO: 304131 - DNA, 1536 bp, Proteus mirabilis
atgaaagatttaaaagatttaaaaaatttactgaaggcgactaagccaaatcatgattatcccgcaggattaatccatccttattgggcaagaaaaccaatcaatataaccgagttattagttgaaaaattaagtaacccaggagatttagtagtagatccatttatgggatcagggacatcattgatcgcagccttgaagttaaacagaagaactatcggatccgatctcagccctatatccaacttattagtaagtaccatactttcaacgacagattcatctactcatttaaagggtatattatcatcagcttttgaagagtggagaagttatgctatagagatatataaaactacagatggattatgtgttgaaagggagtctttcaatgttgaaggtagctatgtaggtggaaattttagattagttaattgtgaggtgaaaataaaacctatcgtaaataacaatctaaaaggaaaggttctcatttgcgacaatattatatactcatgtaaagatgatgaactaaatataactaaccctttagactttgaacgcattgagtttgtagaaaatacaagaatagctgttcataatggtgtgaaagcttctgatttttttactaatagaaataagtcatttattaatcactgtctcttatacattcgaaaaacagagtttactgagagtgaaagaaatttcttaaagatttttttatcctctatgcttcctttactacgattaagtgataaaaaggcaagttcacaatggccttactggcgacctaaaaaagaacttacatcaagaaacccgatagtcgctttaaataaaagaaataaagcttttattgattttttaaattggtccgaaaaggaattggccgaaacccaatgtactcatgaaacatttaatgttccagctgatagattaatagacattgctcttgaagatagcaccgttgatcttataatcacagatccgccatatgctgatcatgcgccttatttagaatattctgatttttattggtcaataattgatgaaacaagaacaaaagatttatggaaattcgaaattgtaaaaacaaatgctgtaggtcgaaatattgactctaatgattacgatataagaatgatgaattcttttaaatctatattaaaaggattaaaagatgatggttactttgcttttttctatttagacaagaatatcaagcactggaaaactataaagcggtcaattatcgaatcaaattgcgtttttgaagatgtaatcgcgatacctaaacaacgtagatccatgaaagctgttacatctccaggaaaaacattagatggagacttaattgtaatttgtaggaaaagtgcttctaaattaaagaatcagagaaaaatcactttagatgatgctctaattcaactatctgaaggaacatacttcgataggtttgctgaatttattaaaatttatctagtaaatgaagttactggtattgatgaaaaaatagaaaaagacatatcaaggataatataa

SEQ ID NO: 304132 - DNA, 2346 bp, Proteus mirabilis
atgtattggcttttttcaaaagaaaaacaaaaagcagtcagagaaaaaatagatagactagttttaacactatctgatattaatcataaaccacctcatgcagatcaattgtttccatttcaaggaagaaaagcaataaaccacgcaaaaagtgtaattgatatactaacagaggccgaggatacagtatgcgacccgttttctgggtcaggaagctttgcatacgcggcttcgctaatgaatcggaatgtgtatgccaacgagtatgagccatatacgtacaaaatggttcagttaccttttaatttgccagacaaaaatgaactaatatccacctttgaacagcttataaagatagctagaccacaaactgaatactactacagaagtatgtgcagttgcggtgaaaaaataactatagattctctttgttacgacagaacgccactaaattataaaactatcacacatcatgaaagacttggaaagaatggagaaaatataacttttaggggtaaattcaaatgtaaaaattgtggtgccaaagagaagtttttcgacgaatatgatcagagtgtgatggatgaaatcgaaaaaatggacatagatttttttgattttagattcatcgaaaactctaggataaacctaggaaaagattttttggattacaaaaatttatttccgaaaagaagtcaaatcgtatcaactattctttggaacgaaatattgaacttagactgtagtgaggcttctaaagagtatttaaaatgtaccttcttatctgtaattcccaatatgaaatataaagattacagaagtaaaagtcaggatttgcattgtcctaaagtacagttgagagaaacgaacatactcaacatatttgagaaacaatttaaaaatcggatcaatactatatatggctactcattaaataacttctcaaaaattaaatttggaaactctgattacagagagtttttatcaaaaattaagccagaaacgattgacttagtgataaccgatcctccatggcatgatggaagcgcatactttgaaagagcacaactttaccacccttggctaggttatgatttaaaaattgatgaactgcgtttagctaaagaagttattgtaagtaactccccagagagaccggaaaaaagagaatatgagcagtggtgggatgatataagtgaactatttaatcatgcttatacagtattaggtgagtctaaattcctagttctttactttaggcccgttcctgcaaatgaatggatagctaacttcaataggttgaaattactggcgagaaagaatggctttgaaccattgctcacgatagatctttctaataacgatccttctatgagaatacaacagagtgcgcactatgcttttagtagtgatttgattctaacgttcataaagctttcttatgatgaaagacgatgttatgtaaacgattatgacttagacgagttagcatataggtgctctgtttcacttcaagataaattagctggatcttttagcgaacaggcatggaaaagaagctttttttctaaattaaataatctgggactacatgaattaaacctaccaaaaaatagacatttagttgaaagagcatttcgtagagtttgccaagaaagtacagctggtcaatatcttccgagggcaactagtccatattcagatgaaatcttcaatgtaccatatatagaaagggtctcactttatatcccatatgtgattgaagaacttctgttaaatcgtgacaaatttacatttgatcaattcttgctcaaagttgcagaattcgtagaaaatggaactagagcaattttagaagatattttgaaggatggtgaagactcaatccattctcttttaaatctttatgcagagcctgtagatggaggaaaattcttcactaaacgacctatccccaaaataccaagcaatatacaaaacttattagagttagatccttatgagttcgaagtgtttgtagctaaaattctggagttagaaggatactccaatgttgtcgtttcagggcgagcaggtgaccgtggtgttgatgtcagatgtaataacaaaaatggtgacttggttattgtgcagtgcaagaggtatacaaagagtaaaattggttccacccctattcaaaggcttcacagtttcgcaaatacaagaggtgctaaagaaatgatttgtataactacgacagactttacacctgatggatatgatgaggctagattaacaggagttagaacaatagagcgaaatgagttggagcacattgtccataagcataatatctttcactcataa

SEQ ID NO: 304133 - DNA, 1128 bp, Proteus mirabilis
gtgtttaatggctctaatttgcgactggctcgtctgtatcacgagctatctcttgaacaagtagctgagcgagttggcaaaactcggcagtatatacagcgcttggaatcaggatatgcattaccaacaaaagagcttactgatgaattagcctttgttctgcaagtattgcctgaattttttaataatgaagagcagtctcctataaatgaggagattgttcattttcgtaaaagaagcgcaactagagtatcaacgaagctatccacattagcgaaagctgaattgtataggcgtttgattagtgtttttgaaaaatatttaaatttgccacctgtaaagtttcctgaaataaaggttcatactcaagatgatatagagaaagccgctgaatggtgtcgtatagaatggggattaggttttggccccatagataatatgacacgattggctgaaaaattaggtgcctttgttactgcttttgattctgtatctgatgatgttgatgcattatcaattccgcttgatagaccttttattgtgaggaatacggcgaaaaagtcaccatgtaggcaacgatttgatatagcacatgaagttgctcatttaatcattcatggcggagtttcaacaggagataggataacggaatctcaagctaatagatttgcttctgcgttattattgcctagatcctcaatggctaaatattttcctaagccaataggtggcagaattgactggaaaggattaagtcaatttaagcttgaatggaaggttagtaaagcagctataatttatcgggctcatcaattatctttacttacggatgcgcagtataaaacagcattttttgggctaaaacgtaaaggcgaagctattgatgagaaagaggactgtttaatacctcatgaaaaacctgagtttttttataatgcattacaggttttgctcaatgaagttgattttgatgcagagttattagctagtaagttacaagtaagaatagaaatgttacaagagctagttgatgatgtttctttcaagatatcaccaactatgactaacaatgttgaacctaatgtggtttcattatctgcatacaggtataaattggcttgtaactaa

SEQ ID NO: 304134 - DNA, 594 bp, Proteus mirabilis
atggcggattacaaagcaccgtgggaatgttttccccaattaacagaagaacgtttaactattattgctgaagagctgttgcgtgttctagatcaaacatacgaacaattgtcaacgcctttagatgataattatacaaaaggaacttgtacctttggtcgtcagcgtcagcttttgattaaattatgtatgagtggccaatatgagtggttatccctaacaaacccaggcatggacgttactttcaatattgatggtattcctgttcggttttttgctgatgatccagaaaatccaaaaaaaccaggttattttcgtagaaatcaagttgaccagttatggaaaacagagctatctgatccaacaatacacagatttgttatagaaaaaccagaatttgaaggagaagatgcaagagttcattttcttggatgcaatgcattagaagagattgtatctaaatggacttatggtgaaaataggatctcagtacttcattcaactgatgatgaaaaaccaacttcagtagctatcaatttagatccaatcagaccaatagtggctgatgaagatgtaaaacgtaataataaatag

SEQ ID NO: 304135 - DNA, 411 bp, Proteus mirabilis
gtgcttaaactaattagaaatgaagttgagccacttgattatagtttagatatgaaagggtatctaatttgcccgcaatattatgaaccattaattagggtaccagcgggcccttcaatttcaatgatatctaatagtagagatgctttattctggcatttaccggaccaagatgtaccgttctgtttactaaaaagtggtacaatatttggaaaacgttattcatcagaagaggaagcaaagaaggctgtcgaagatgaagaattaattattatcgatggatttaagcaagaacggtctgaaaataaaaattatgatgattttgatagtggcgagtcagaatatgaaagtagcctagaaagtagcgatggtaggttggtagatatacctgtttctagattcaatggataa

SEQ ID NO: 304136 - DNA, 1140 bp, Proteus mirabilis
atgtaccctacgtatgtaccaattcttagagcaaaaacaggcgagtttgatgcaattaaaaatctaaaaggtaaatatgcaagtgcaatttgccctttttttgaaatacctagaattactgaagatacaaaaaaattgaaagatcttagagaatcatctcagttaactaaagattatctaaaattaatagcaaatggaatttccagtgctaattcatcgccatcattattttttgatttttttgattggaaagctgatagttatactgaaactggtgagcatatccttagctatatgtatagagcattaactaagaaaggaataacagtttatccagtaattggttttgatcgatgggatatcttggattaccaaaaggcattagtaggattggatgtaagtgttgaaacaatttattgtttgcgtattgactcagtatcaattgatgatgcaaatgatactaactatttcactgaaatgcttgatgaaatcttgaatactcttggattatcaccttctcaagtaataataatgtttgattttggagatgtaaaaaataaatcaatagtttcaattagtaatgacttaacaaatttactgaatataacaaaaaattttaattttaggaatgtaatgcttgctgggtgctcatttcctatcataattaatgacgcagttaaagacactgattctacagattttgtagtacgtaaagaaatgcatgtatggaagtccatatattctgatttggcatccactataatattttctgattatggtataagaaatccaaaaggtggggatggaattaaagcagtacatgccaatgggaaaattcgttatacaatagagaataaatattttgttgctcgaggccattcaaaacagcaaggtaataaaggtgcacaaatgtatgatcttgctcgcatggtagtaaactcaccttattttttaggagctagctttagttggggtgatgaacaaattgaaaaatgtagtaatatgttaataaaagggaatcctacacaatggattagttttgatactaatcatcatatttcgtatgtaattgaagaagtattagagttccaacgtaattacatcggttcccgtaaactggataagttattagttaaataa

SEQ ID NO: 304137 - DNA, 1209 bp, Proteus mirabilis
atgaatattaaagttatccgtacggaaactcaacataaagaatatctagagcgcatatattccttactgtcaatgatgccaactctaaactctagcgaaaatgatgaactggaattacttattactctggttgaatcctatgaaaattctaaatatcctattgagccgccagacccaattgatgctattactttccgtatgcatgaaaaaggtcttaagcaggtagatttggttccttatttgggaactaaaagtagagtttctgaaatattatcacggaaaagaccattaacagtacctatgataaaggcattgtcgattggtttgggaatttcaactgatacgcttgttggtatatatagtgaacaggcgaaaaagaatactgaaaatgttgattggtcaaaatttcctgtaaaagaaatgataggaagagggtggatatcaaatagtgttgataaaataaaaaaatcaacggaagatttagttaaagactttattaatcagacagcatggtctaccggaactgttgcatttaaaagaaccctttcgggggatgcgtactcaccttcaacaaaatatgcattatatgcttgggttagtagagttgttcaaagagcacgagaaaaaaaaccttcacttggaaatttcgatccaacgacactctctactaattttctgagggatttagctcagttaagttggtttgaaacagggcccttattagctatagaatttctagagaaacatggtattgcagttattattgaacctagcttaaaaggaactaggattgatggtgcagctttaaaggatgtagatggtttacctattattggattatctttaaggtatgatcgtctcgataacttctggtttaccttacttcatgaagtatctcatatttggaagcatgttcattctagtgagacatttttagatgatattgatgttacttcaaatgataaaagagaatccgaggcaaacagattagctagagaggcatttatacctagagctgtttggaaaagaagtgatgcatattcttcaccatcaaaagaaacaattgataatttatccagagaactgaagattaatcctgcaataatagcaggaagaattagacgagaaagtggtaactatcgtttgtttaatgaactgataggtcaaggagaggttagcaagattttagaatcaatcaaagtaaattag

SEQ ID NO: 304138 - DNA, 279 bp, Proteus mirabilis
atggcaatgcgtttactcggacgagataaactagaaaaacttgtggatatagaaccttcatgtaaacgttggagcgatttgtggtcaacagaaatcgctaagagctactggaaatcaaaagaagaagtagaaaaacaatttccaacagttatcaatcttaaagataaagtttatttatttcaggtaagcaatactaattttaaggtggaaacaattatagatttcagtaaattagtagttcttattacctcaataaagggtaatgttgatgaatattaa

SEQ ID NO: 304139 - DNA, 1584 bp, Proteus mirabilis
atgacactcatctcccttttaaagcgtgaaggcccctgccttagttcaacgctggcgaatctgctgattcaaagcaaaaatatctctgctgaaaatgcgaggaaggttatctcacgggctgtcttggctggtgagataagtagcattaaaaacgtattcccaaagagggagcagtttgtatatctcaggaattcctatggtagcgatgagttttggcaggtattgaccgataagctaatagagagtggttcagcactgggtcttgctttgagcgcccttctggccagaggcggaatcattcctaaacgtgattttggtgctgcaagcggctcacctgtagctatgaagaaaaaaattccgttcagtatagtgtggcaaaggttggtgaaaatcggtttatgtattgaaattattcttcctgaaattggagaatgcatcgcactcagagaaaaagatgaaaggcggtatgacttcgtttcgagacaaatacacgcacgtctggtgacagagagcattttcatcacgacgatggttcagtggagtcagaacctcaatctgatcagctataacctggcaaggacgaggcaggatgaagaaggaaagtcacctgctatttcaaactatctgttcgatttaacaggtcccagctatctgtctcctcttgttacacgagggagcgatgcaaacaaaccaggtttttttgcctgtgacgttctgctggggaccaaagtcaccctggcccaagtacagccctttatagctaaatgtaaatcgctgaggagtataagaaacataggaaaaagtctttttatgctggccgccagtcagttcgacaaagatgcgtttcatgctctgaagaaggaaggcattatccccgctacacctgaaaatctgttcggtgaagagtttgcaaagtcactgcgtgaattgaacgattttttgttttattacttcacaaattccagctcgaatctggaaagaattgattctattatggttgcactaacgaatgttaaaggtgcagctgcacagctgcagggagcgctcttcgaatatcttgttgctgaagtgatgaaacatgaaggtatcgttgagataggaaaagttttccgttctgctgatggtaaaaaagcagaaagtgatgtgttcatcgctaagggatatcaggaagtaaggttcattgaatgcaaaggttataaaccctattcctttgtcaagcatgaagacgttaagcattggataggagatcaggtacctgtattcttcgatgccgccaaaaaagagaagccagaagctgacatttatgtagaattttggaccacagggaaactgagcgaagacagccagttatcactaaaaaaattctgtgacaataactcagtcaggaaacgctataaaataaaagtgctggaagctcacgatgttaaaaaaagattccatgcgaccagaaataaaagccttattaatgtttatgaaaaacattttgcagaacctttctacaaagagaaagatatggatgacgtcaggggaagttatcgtcttgcaggagggccacaattatacttcgaagatgaagaaaactga

SEQ ID NO: 304140 - DNA, 864 bp, Proteus mirabilis
atgaataaactcgaaaatcattttcttttcctccctaaaggggctaaggatgtgtttttatcccatttgaataaactcatcaactactcccccaccatcggcctgatgggtaaaaccggagcaggaaaatccagccttatcaacgctctattccaatcaaccctatcacctgtgagtgatgtatccggctgcacacgccaagctcaacgcttcagtatggtgatgaacaaccatacactcacctttgttgatttacccggtgtgggagaaagccttgagcgagatagagaataccaccagctctaccgtaacttattgccagaactggatttaatcatctgggtactcaaagccgatgatagggcatggtcttctgatgaacaatgttatcgctttctcactaagcaatgtggttatcaatctgaacgatttctgtttgtattgaaccaagctgacaaaatagagccctgtcgccagtgggatgaactgtaccaccaaccatcccgtgaacaagttgctaacttagaattaaagcaacaagctgtgataacagcatttaaaccgcatcatccagtgatgacggtttctgcggcagaaggttttcagctcactgaattagcagagcaattaatacaggcgttaccggcgaaagccagtagcggtgtggctaggcaactgaataacacttatcggacacaatccgtggaagactccgcatgtaacaattttgggcaatgtgttagtgatatcgtcgataccataatcaatatcattccattacccccattgataaaacatacgatcagcactgtcaaaaacagcatcgtttccgtcgctaaatccctgtggagcctattcttttaa

SEQ ID NO: 304141 - DNA, 768 bp, Proteus mirabilis
atgacgatgaattattcatatatagagaacgaaatttatggttatatgagaaagaataaagttttttgttacctcatatggcgtgtgttgagcaacagcaaagacgctaatttttatatgtttaaaatacgaaactacttaacagatctcacagttaaggacgactttagtagtgttataaaaacagtaacgaacggtttttttgataagaaatttatttttgcaccgaagagtcatgaagggcgatatgtagaatctattgaatatattaactttgttgtagctaggcttaatgcttttcaatactcagattatgttactgatatatatagtatgcttgactacttaagaaatgacgtaattaagaaaacctgccattacaagtactttgattggttaaaaccatccgatataaaaatgtgcaagtgggtctataactatctggtcaaaagtaaagcattgactaaaaccgaatatcaggatagtgaagagctttatctttacattgtgactggtttttatttatggcaatcaccccaagatgaaaaagataagcgctataaaaaattactcctagctcgaaatgagcgaaaacacagaacaactactcaatcaaaaggttcggtaaggccaaaaaaaacaccgaaagatattcaactttcagcagaggcaagaactaaattgacagagttagcccttaactatggtgtacccgcgtcggagtggttaaatagcttcattattgatgaatatgaaaaaatgaaataa

SEQ ID NO: 304142 - DNA, 588 bp, Proteus mirabilis
atgtctagttatacctacaatgaggactatcttcgtcagatagaccgaacagtccgtaaatcactcctcaccaataatcgtgtcacagctattcgcgtagatttacgcttcccgtcatcaacaacttgttaccatgaggattcaacagtcataactcgtttcattgaatccctaaaagccaaaataggcgcagacctaagacgcaaaaataaagtatgggctcgtaattattcatgccccttatcttatgtttgggtgagagagtttggtgagatcagtagtcggaaacattatcacttattgctattagtcaataaggacgtctattggggcttaggtgattacacaaaaaccgaaggaacactctatgcattaatacagcaggcatggtgtagtgcaattggtgttaactactctacggagcgttatttagttcatatcccagataacgctgttacttggctagataacaataatgccaacaatgaaagtacgatattcgaattaaaccaacgctgtcgttacttagccaaagaacatacaaaatattatggtgatggtgagcgttctttcggatgcagccgttaa

SEQ ID NO: 304143 - DNA, 231 bp, Proteus mirabilis
atgagcactcaagcgattcccttattagatgaccaatgcgttgatatgaaatttataacccgtttaaccggactaacagataaatggttttataaattgatccaagatggagagtttcctaaaccaataaaactagggcgtagctctcgctggttaaagagcgaggttgaaaattggctacaggcacatattgatgaatcgagaggggctaactcaacccttgaatcctaa

SEQ ID NO: 304144 - DNA, 144 bp, Proteus mirabilis
atggaaaaacaaccagttataattcatgctgataaacgcagaaaaaaagaaattcagcattgtaaaaaacacactaattctgttttggatttaaatctcttctattcacctgagactaaaaaaacatttagtaaaaccatataa

SEQ ID NO: 304145 - DNA, 477 bp, Proteus mirabilis
atgttttccaaagaaaaagttagcggtattttatttgcgaatggttttaagatcaaaaatcaaagtaatataggtgactcatatacgtttgatttaggtaatgaatggcaagtatctgtattttgtccttttattaggaatgtatttgaggagaatgtggataaattaaattatgaggcaataagtgcgtctttatttgatagtattggtacaaagtttaaatttgaaaacgtagcttcattggaagaaaatattaaaaaagtactcagaatactaaaagaaaactctgatgatgatgatattttaaagtgtgaaaaatgtggtgtaagatatgtgcaaccaaaagaacctacatttggtaaaaaatggaagccattcctctcttgtagtggaatgataattaaaggaacaggtaaaaatagaggagtcctttgtgatgggacatctaaaaaattaccggcagtagttttgctataa

SEQ ID NO: 304146 - DNA, 516 bp, Proteus mirabilis
atgttcgattttcttatgattaactctgagtatgtgtctattgtcggtgcggttttagcctttgttggcacaattgtactcgctttttctctgggaaaagtattgtgggaattcatgttttcaattgacgcgatatctaccagtattgaaagtatagctgacgggggagatatttacgtcattcaaggacttcataaaagaatatcaacagctatttctgcatccaaaaggcccacctggattgggataatattagtatttatatcaatgctaatgcaaggttattctttatatctaagttttgaaagtaatagaataaattcgatagagtacgataatagaataaatgaagttcatgacgaagttactgaaacaaaaaatacactgaatatattgaacagtaagttattagctaaaattgatgaaaaacagtcccaaatagatgagcttaaacgtattcagatagaacaaaatgaaagtttacagagcattattaaaaaacagaaaaagtattaa

SEQ ID NO: 304147 - DNA, 1260 bp, Proteus mirabilis
atgaataatagagaaatgcttagtctcttgctaaaaataaagcaagaagctaaaaatatcgaatatgatgacccatatcaggtatgggtcttcgacaattcctcttatgtagcaatagaggacgatatttctcgtctaaaagaagttgatgatctaaagttagaggcaataaaaaaagaaaataccatcaaggtatcacttttattaacatcagatatcaattggttttctaccaccattgaatattttaaaactcttagggtaagaataaaaaacaataaagaagcaatcgataatttttacattgaaaaattaagttcagaagaaatagaaactatatctaattcttcaaacgcatatattcaatggtgtgaaatactctcaaaaattgcagaccacgtagaatacgatgattcaaatttttggccaaattatatttttgttatggaaggtggtaaatcaaagaaaatcaccacttacaatttaccattaaaaaatattgatgagaattttctaaattcggttgatgtaagcccgtgtgatgtttctactttgacaaatgttgatctgcactcctatgagcgaaaacttgtattaagatcatcgttgattgagttatataacgattcgagtgagaaaaatacgttccttagctcaatattaaattcgccccagaaattgtgggatttattttctattaactatgaaatatacatcaacaaatattccataaataaagtaatacacgaggttgaaactcagaaattagatttcttatcaaagcttaattctttgattcaagaacatcagaccaaatcactttctatacctgctgttctagtaagcacagccataataaagggctggtctccatctggtttactgcttatatttgtagctatgctacttacgtgctcagtcgttatattaggcatccgtaatgccaaaaaatcattatcagatattattgaatcatctaataagacgatggttttattcacaaaagagaatgctaatgatgatgacgaagcattaaccaaccgtataaatcagatcacaacagaagctttaataaagctcagtaataaaaaagttgatgccgaaaaaaccttgaacaagctccaatggttgattttcattggtgtttcagtctggtctatgtttgtcttatatcaattcaaagataacataatcccagttattgaattagcctatgagcatattaagagtttcgttaattatttattaagcaagagctaa

SEQ ID NO: 304148 - DNA, 1095 bp, Proteus mirabilis
ttggcttctttacaggttttgaatgctatcgctgttaggattacacctccagaggacgaacagaaagattggtcctataccttaggcgccctctggcccaccgatcagcaggaggtcatcacatttacaacgaaagtagatgcaagatttcataagagcagcaaatctcatgcgaagtttcaaaaaccttatccaggaagttctttcccttcaaagctgtcaaaatttttagagaaagaaacttcattcgaagtcttcgtacatgattttatccagaaaaagttaattacatctgcaagacaatccagagcaagtaatggtgcaatattggtttttactcattaccaactgcaacatgaaaaggaagatggttctgttcataaagatttcgagcgacttcttgttttgatgcttaaaaacacagatgcattaagattcaaagaaaacctacaactaaatcccgttgatgtaattgacttagataaattcttgcagggagcaagagttgatataaccagattcatgtctgaggaagtagaagatgaagataaaaataatttatgcttcatccgtggaactggtgatgtaagaaaatattttaccgaatcaattggtgccgaagatattatctccaataaaaccagtagtgagcaatgtattaaagctttggagcaattctctcaccaaaaagaatttggtcgtgctttgagagaaaaaatcgaatccaagattcaggaactatttaataattgtaagcgtggacagtccataacccttgaaaagattcaaacacaaatcgatgctattatacccgttgatttagcagagcataaaaatacattcgtagattttgtaaacgaaaatggatttgaagttaatgaagaattcgaagtatctgcaagtgataaaagacaatatgaatggttagattttgaaaccaatattgcaaaaatgagtgtaagaaaacatcagattggtttgcctggttctgatagaccaattatctttgacaccgaaacaaacgaagtaaagctaactcagaagattaatgatccaataattattgctcggctgaaagagcttgcaaatgaataa

SEQ ID NO: 304149 - DNA, 210 bp, Proteus mirabilis
atgttaaatatatactttttatctctttgtgttatttttaaatattattgttttttgctttatgtcgcaaagaatgattatttatcagtggttttttctgctattatttcaatgaatgcattaataattcctatggggattattctactttttgaccctttccttcttaggattaaaaaaagatttaatgttggaaatagtcatttttaa

SEQ ID NO: 304150 - DNA, 789 bp, Proteus mirabilis
atgctcaaacacaaggaagatgaaagcattcacatagagagtaaaaaaaaacttgatatggaattgcagtttttaatagatgagatgcaagctggaaaggataaaaacactattcttccactgttgaataaactgcaattacagttttcaacctatgttactgattttgaaaattttatcgttcgagtttcagaaaatgggtattatcgttcaaaatgtgaaataaaagatgttttaattagcgtagaaaattttttaaattcaagtgcagttgttgcagaagcaataaatacagtttcaagcatattcaatttaccccaatgttatcaagaaggaaatttcataacaactgctcaaataatattaaggacacatcagaaagaaaaatctgaggaattatctaaaatttataagaataaaggattatcaacaaatggctttgatagtaaagaaaaaatttatttgaacagacacgggtttgatatgaccagatttatttcgttgatattaggattaatttgtatactgtattttttatatgaatacaagataggtaatataaacaatggtataagttggtttaattatagattgtttattccagcaggtttaggagcaataatattttcactatttccggcaaccatgcaattaaaattaagagcaggagtgacagccacagggattgtcgcatttattatatttttttatgctgtcaatccagcaaaagttcctgattttcaacttcataatattgatagcaaagaatcatcagtaaaaaacaaatga

SEQ ID NO: 304151 - DNA, 270 bp, Proteus mirabilis; identical to SEQ ID NO: 291121

SEQ ID NO: 304152 - DNA, 363 bp, Proteus mirabilis
atgaacaaaaaattactggcatctttaattctagcaggtcttgttaccattacagcaggttgtgatgattcatcgaaaaaagtggatgaaggtattgataaagcaaaagagacagcaacccaagtaaatgaaacggctcaagacaaagcaaaagaattaacagatcaagctaaagaaaaagccgctgatttaaaagagagtgcatcagcgacagctgacgaattaaaacaagatgcggctaaaaccagtgatgatgtaaaacagcaagcgcaagatactaaagataaagcgcttgataaagccgatgagctcaccgatcaagcaaagcaaaaaattgattctctaaaggctgataataaataa

SEQ ID NO: 304153 - DNA, 957 bp, Proteus mirabilis
atgatttcttcgggacagcgacttggcggcatagtaggtgtgcttatcgccgctattctctggggaacgactggcactgctgcgacatatgccccaggtctgagtcctttagccataggagctgtggcgatggggattggtgggctattacagggtattatcgctgcgacaacaataattcgccagcgtgctctgattatccagaactggtatttctcgctgaccggatcagtggcggtagcggtttaccctctcgctttttatgcttccatgcacaatgcaggtgttacggtaggtacggttatttccattggctctgcgccgattctgtccgccctgattgaataccgacttgacgctcttcgtttgacccggcagtggatgtgcggagcgggtgttggcgttacaggcatggtgctactctgcttggcagaaagtagtggaagcagtaccacaaatgaccatgccatggtggggatctttctgggactgttggctggcttcacctatgccttttactcgtggtctgcacggcggttaatggaggtcgggatagcctctcgcgccgcaatgggggtcacttttggtgctggcggtattttacttatgcctgtactttttgtaacaggagcgccgctactaatggcatggaataatgccgccgtcggtatttatatggcactggttccgatgtttcttgggtatgtctgttatggctacgggcttgcgcgcattccggccagtatggcaaccacaatcactctgttggagccgattatagccgcgctccttgccattctgctcgtcggtgaaagattgccacctataggatgggctggcgtcggtctaatagttgcgtgtctgggtattatcaccgttccggccggaaagttaagtttcagcctagttcggcaacggaaagaaaattttgaagtcacagaaaaaaaagaatcatga

SEQ ID NO: 304154 - DNA, 588 bp, Proteus mirabilis
atgacatctttatctgaaggttcaaaaactgcccgagaaaaactgctcagtgctgcacgtgttcttttttataatcatggtattaatggcacaggaattgacgccatagtaaaaagagccggcgttgctaaaaaaagcctgtacaacaactttgcatccaaagatgagttggtggcagcctatctcagagttcggcatgaagaatggctttcgttgtataaaacccggctggaactagccatgacacccaaagagagggtaatggctgttttctatgcttatgaagatcatgctgaatttgcctatgagaacggttttcgcggctgcggccttctgaatgcggcagccgaacttcccgcaggagttccgggtcgtcaggccgttcgtgagcacaaagaagaggtggaagcgattctggttgcgcatttaatggaactgatgaagggaaaggctgaaagcgcacactgtatggcaagacatcttgcctttctgctggaaggcagcatttcacgagccgggctggaaggtaacagtaactgcgttaaacaggccagcaatattgcagaacagttgatggagatgtactaa

SEQ ID NO: 304155 - DNA, 1182 bp, Proteus mirabilis
atgacgcaaagtaataagtgttttaatactcaagcaatacattatggctactctccgttagattatcagggggcattggtgcctcctgtttttcaaacgtccacttttgcatttcccacggctcaatatggtgctgattgttttgctgggaaagaaaaagggcatttttatactcgtatatctaaccctacattggatttattagaaaaacgattagctcagttagagcaaggagacgcttctgttgttttttcttccggtatgggagctatcacttcaacatgttggtcattattgcagccaggagatgaactcattgctgatatgaccgtttatggttgtacttttactttctttaatcatgggctggctaaatttggtatcactatcaaacatgttgatttaaccgatcctgaaaaattagccgaagcaattacagatagaacaaagcttattttctttgaaacaccggctaatcctaatatgcgggttagtgatattgaaaagatcgctaatattgcgcaccaacatgatgttttagtcatggttgatagtacttactgttcgccttatttacaaaagccactaaccttaggcgcggatattgtcgtacattctatgactaaatatttatcaggtcatggtgatgtgatggcgggcgcaattatcactaattatcaattagcagataaaattcgcgttgagggcttaaaagatatgacgggggcttgtttatcacctcatgatgcagcactcgtcttaagagggataaaaacgcttagcattagaatggaaaaaatttgccagaatgcgcagcgtattgcgcaatttcttgaaaatcatcctaaggtggcaacgatttcatatcccggattaaactcttttcctcaatatgaacttgccaaaaagcagatggcgttacctggtggcatgataagtatggagttgaatggtggaataaaagctggcagagaatttcttaatcgcttaatgctttttactcgagcggtgagtttaggtgattgtgaatcattggctcagcatcctgcgactatgactcatgcgacatacagtgcacaagagcgtcaacgccatggtattagtgatggattaattcgtttatcaatcggtcttgaagacgttgatgatttaattgctgatttaacccaagcgctagcctaa

SEQ ID NO: 304156 - DNA, 2127 bp, Proteus mirabilis
atgtcaacagatgaagcaaataacacaccaaaacctcgtttaatattagatgaaccagttttatcccattcttctggaataatgatctcagcagcagagcaacgtgctcgtatacaaagacatgtcgaacttcttgatatgttagaacaagggttactgaaaacgggtttagtttttacttgccaagtagctggattagctgacgatacttttcaagtcactcaatttgatttaaacgaaggactttctgagctatttacactcactattcaagtcgtgagtactcaaagtgatattgatttttcatattatttgggaggggcatcatcacttacagtaagaagaaacggtaaaaaaattcgtacggtacaaggtctattatcgagtgcagaacaaagtaatactgatggtattaaaacttggtatcagttagagatccgtcctgaaatgtgggtgatgacacttaatcaagatagtcgcatttttcagcataaaacagtacctgaaatcttaaaacatttacttgatgaagcacatatcaaatatgataacaggctctaccaacctgaacttcatcaacctcgtcattatgttactcaaaaacgtgaatcagcttatgatttttggtgtcgtttagcttttgaagagggaattaacttttggtttgaggaaggcccgaagcttttttacagcgataatcatttaggcatgacggcggggatcactttaacttataacccacagtctgaaacagatattaccgacagtactgcaacgaaatggcgttatatagaacgtttatgcagtgatgtccgtatagataaagactataaccaaatacgtccttcctaccccttatcgcaacaaacaacagggaaaaatcatcaacaacaccctatatttgaaagttatggtcgctttcaagaagatgcacagggccagccatttaatcaactgcgttatgaacaatctcaaaaccatcgtcaaacgggctatgcacaaactaattgttttgctcttatgcctggtaagatatttaccttaactaatcatccgtgtacaagaatgaatgaatgttggcaagtagttagcgttactcatcatggtgtacagcctttaggagataacagtgaaggacaaggcactcaactttctaatcacgttacctttattccgagtatgcaagagtggcgaccaccatttcattataaaccattagctgatggtgatgaattagctacagttgttggtccagatggagaagaaatttataccaatgaacaaggtgctgtaaaagtttattttcattgggatagaagaggaacacctgatcatagtggatcgtgctggcttcgggttgcgcagggatggagtggcaatggttttggctttatagctatcccgcgtgtagggcaggaagtgattgtttcctatttaaatggcgatattgacagacctattattacgggatgtacttacaatggtcgtaatacaccaccgcttgatttaccgaaagaaaaaaccaaaaccacatttcgtagtaaaactcataaaggtactggatttaatgaactaagatttgaagatgcgggtggccgtgaagaagtgtatttgcatgcacaaaatgatttaaatattcatgtgcaacatgatagtcattggcataccgaacatgatgttaggcaacggatagataatcaaagagtaactgaaatagctggtgatgagcattttattttgaagggaacacaaaaatcattaattgaaggtaatgtttcattacaaatcaaaggcgcgaagcattgcaaagtaaatgatgcattaatagctgaaagcggtaaggaaactcattttaaaagtggtggaaaaattattcttgaagctgtaagcgaaattaccttaaaagtaggaagtagttttatccgccttaccccaaatgcaatctttacttctggaaatttagatattggatcaagtggaccaggaataggtcaagatcctaacattcaactacctgatggtgtcactccttttgaacaacccctttttgcgattaaaaaatattgtgttttaacagcaaatgaagcaggtagtttattaataaagccagctaaggacgaaaattaa

SEQ ID NO: 304157 - DNA, 516 bp, Proteus mirabilis
atgtttgagcataacacggtagatacaattagattgattaggataagaaatttcattgaagacaataagttaagagaaatctacgactatatttttattgattgtccgcctaccatttcgatgtataccgaagcgtccataatggcatctacacattatataatgccaatgagaatagatcagtattcagtattagggagtaacaatttgctatcaattgtttctaagctggctagagatcaaagacttacaataaagccgttgggtgttatttataccgatactgcaccaaaaagattgaccaagaagaccagagcaattaagacggctatagaaaccgaaaaaggaatcagggatctatatttcttcaagaatcatttttcaaaggttagggatttacaggttggtcagcaattaaattttgcgtcagcgtattctcagtctaaagaaatcattgatagaatatgtacggaactcgaggctaagcttaaagaggttgatgatgaatcagaataa

SEQ ID NO: 304158 - DNA, 534 bp, Proteus mirabilis
atgaaagttgaacaatctcaagttactaagttagtaataactgatgtcgagcgtcacgaccctattcatgtttaccttgaggattatggagataatcaaaacggtcgtgtcactattagcgaatggggaaattcatggtcttgcttttggggctcgatgggtagcccactaattgagtttattcagcgtatcaataatcactactggataggcaagttagattctaatttaatctatgagatagatgatgatgacgatgcaaatgctgaatacgctaaaaaacaagttatcaaactacgcaacgataatgaaatagataaatatgaagcaagggaatattgggatttaatcgaagcatcagataatgttaaagatgagtgctgtaatagttttttaggtggtaagttgcttagtttgtttggtgatgatgcttggtataacgattggcccactatacctaaccctcaatatctaagaatggaatcacgattaaacgctgttcgcgaggcattaaagcaaataaaggtggtatga

SEQ ID NO: 304159 - DNA, 252 bp, Proteus mirabilis
atggataaatacaatagagaacaaatgaaattaggcgttctatatgctcgcaatcatttaattagcgcatacagagctaactttatagagtgtgatgagaaaccgtttgcaatgtttatgaatgcattatctcacattgcaaaggaatctatcgatattgaattaatgatggatagtgttttgttatgcaatgatgaagctgaaaattggattaaatcaaagttggtatataaaaatgaaaccaatacttga

SEQ ID NO: 304160 - DNA, 2241 bp, Proteus mirabilis
atggttgcagttagaagtgctcacttaacacctgcaggggagtttgccgttgataaatgggttaatagcttgaatttaactcatgcgaatgcggggagtgaaatcatgcaaacctgggaatactgtcatcgtactgttctgggccgtgaagatgcgcaactgttgctatggcgcggtgttgagatggttgaacttctttcgacactcagtatggataaagatagcatgagggcagcacttctcttcccacttgctgaagaagatcttattaaccaggaagttatcactgaacattttggtgaggcgatatggaatttagtgcgtggcgtaatggagatggatgctattcgccagcttaaagcgacacataccaacgaaactagctcagtacaagtcgataatgtacgccgtatgttattgtctatggtagaagattttcgttgtgtagttattaaactcgcagagcggattgcccatttacgtgaagtgaaagatgccactgaggatgaacgagtcttagcggcaaaagagtgttttaatatctatgcaccattagccaatcgattggggattggacaattaaaatgggagcttgaagatttctgtttccgttatcttcatcctgatgaatataagcaaattgcaaatttactgcatgaacgccgtattgatcgcgaacagtatattgataatttcgtcagtacggtgcgtggttatatgcagcaagagaatattgaagtcgatatctacggacgtcccaagcacatctatagtatttggcgaaaaatgaagaaaaaaaatctcgcctttgatgagctatttgatgttcgtgcggtacgtattgttgtcgaacgcctacaagattgttatgccgctttaggtattgtacatactcattttcgtcatttacccgatgaatttgatgattatgttgccaatccaaaaccaaatggttaccaatctattcatacggtagtacttggccctgaaggtaaaaccgttgagatccaaatacgtactcgtcagatgcatgaagatgctgaattaggtgttgcagcgcattggaaatataaagaaggtgctactggtgcaacaaccaaaggcgggacgggaagttatgaaaatcgtattgcgtggttacgtaaattaattgcatggcaagaagagatggctgattctggtgaaatgctagatgaagtacgtagccaagtatttgatgatcgcgtctatgtctttacgccaaaaggggatgtgattgatttacctgcaggctcgacaccattagattttgcttatcatattcatagtgatgttggtcatcgctgtattggtgctaaaatcggcgggcgcatcgttccatttagctatcagctacaaatgggcgatcaaattgaaattattactcaaaaacaccctaatccaagccgagattggctaaatcctaatcttggttatgtgacaaccagtcgtggtagagcaaagatccacaactggttccgtaaacaagatcgcgataaaaatattattgcaggccgccaaatcttagataatgaattagcgccgcttgatattaatatgaaagaagcagaaaaactgctgattgctcgttataacgtccatagtcttgatgaagtgctggcaggtataggcgttggtgatatccgtatcaatcaattagtcaatttcttacaaagtaagctgaataaagccacagcggaagatgaagacaaagaggcgttacgctcattagaaaataaaacggctacaccaaaaacaaccacgtcaggtggtggcagtattgtggtcgagggtgtcgggaacttaatgcatcatatcgcacgttgttgccaacctattccaggcgataatatcgttggatttattaccaaaggacgtggtatttcaattcaccgtgcagattgtgatcaattagctgagttactttctcacgcaccagagcgtattgtcgatgcggtgtggggtgagaattactcaagtggttattcattagtggtacgggttgtggctaatgatcgtagtggtttattacgcgatatcaccactattttagctaatgaaaaagtgaatgtgctgggagttagtagccgcagtgatgtgaagcaacaaatagcgaccattgatatgaatattgagatttataatctccaagtattagggcgtattttagcgaaactcaatcaattacctgatgtcatagaagccaaacgcttttctcattaa

SEQ ID NO: 304161 - DNA, 519 bp, Proteus mirabilis
atgtttaataaacagaggatattctttttcataacgttactttcatcattttcattaatggctgatgagacggcaaataaggcgacaatcactaacagcgaaaataatttgaggttatttggcacactatttattccccctccttgtgtgatccaaaacaatgacatgattgatgttaattttggtcaccaactgggaacgagtcgcatcgatggcattaattatacaaagaccgtcaattacacgttgcagtgtgaagaaaatgcaaatggttgggcattaggtttatccattatcggctctgcaagccaatttgatgcggctgctttacaaaccaatataacggatttagccgtacatctcacgatagatagtgagccatttattttaaataaacggtttgttattacctctgataaaccgccgattattttagctgtgcctgtaaaaaaatcaggaagtaccttaacaaaaggtgcatttgaggcaacagcaacgctacttgctgaatatcaatag

SEQ ID NO: 304162 - DNA, 216 bp, Proteus mirabilis
atgagtaatagagttatctctgatgacaaccctgttaaacgagttgcttttgatatggcgctagctttagctgctaaacaggattctattaaaacccctgagcaacttatggctgaaattgaatcgctttaccctgagtgtttagaggttgctgagaagcaatacaaaaaagagactccacctccgatgggggttttgctaaaaagtacaatctaa

SEQ ID NO: 304163 - DNA, 216 bp, Proteus mirabilis
atgattaacttaaaaatgtatgaatatctaagaaacgatggaacaagaattttctttaagacagaaagtatttcttcaataaaggaagatacctggtcagatgggaaaccaatcactaaattaactctaaattgcggaacaaccattatggaattagttccgctagaagagtttttaaaaatgcatcacataaagatagagaaattaaagtcttag

SEQ ID NO: 304164 - DNA, 1740 bp, Proteus mirabilis
atgccacaaataaaatataataacgagataacaagtatcataaaagagagacgaaaagtttttctctctattgggctatttaccgctttaattaatatattaatgttagtcccttctatttatatgttacaagtttacgatcgagtattaccatcaggtaatgaaatgacactattgatgctaacaatcattatgttagctctttttatctttatgggaggattagaatatttaagaagcattattgttatacgtatgagtaataaattagatttatcacttaattcacgcatttatactgcagcttaccgagaaaaattaaacaaaatagcgaatattaatccaacgttagcattaacagatctaattactttacgacaattcattactagtcatgccatattcactttctttgatctaccttggttccctatttaccttttagttattactttatttaatccttggttaggattatttgcactttgtggtgcccttatcttatttgctttggctatccttaatgaatatctatctaaaaatcatttaaaaaaagcgaacaattttgccaatcaagcacaactaatacaaagtcatcatttagaacatccacagactatcgaagcgatgggaatgcttagtcaattacgtaaacaatggcaaacctctcatttcaaatatttacaagcacaaacacaagccagtgataatgcagctggtattaacgctatcacaaaagtaacacgtatggcattacaatctttaatgctaggtttagggggatggcttgctattgataatactatcagtcctggaatgatgattgccggttcaatacttttaggtcgagcattagcccctattgagcaagtgatcaatgtatggaaaagttgggatagtagtaaagcagcctacaatcgattgacaactttattaaaaacataccctcaagaaaataaaaaaatggccttacctaagcctcaaggccaattacttgttaatatcgatgaagccgtgtatccacacagtgacagaatattactaaataatatcaattttgctctattaccgggagatatactaggtattattggcccgagtgcttctggtaagtcttctttagcaaaatttattgtcggtatatggcaggtcaaaaaaggcattgtgcgattagataatgcggatatctttcagtggagtaaagaagaaattggcccacatattggttatttacctcaagaaatcgcccttttccccggcactatcgctgaaaatattgcacgctttactgaggttgatcctcaaaaagtgatccaagccgccaaaatggcacatgtacacgagatgattttacgctttcctcaaggatatgaaacccaaattggtgctcacggtgaaggattatccggcggacaaaaacaacgtattgcattagccagagcattatatggcgatcccacgttagttgtcttagatgagccaaattctaatttagatgatttaggtattagagcgttaacacaggcgatcgaaacattaaaacagcataaaaaaaccgttattttaattacccaccaaaaacagctactttctgtcactaataaattattagtgatatttgatggaaacaccaaattattcggtccaacggcgtctgttattgctgaattaaataatccaactatcacaaaaacggcaaacactatttcttcaacaccagcaacctcaaataacgcttaa

SEQ ID NO: 304165 - DNA, 1743 bp, Proteus mirabilis
atgagcacattattatctacacaaaatctctcttttcataataatcacggtatattgctgagtaatatttctttggccctcactaaaggtgagaaaattggtttaattggctacaacggttgtggaaaaagtacactattaaaacttttatcacaccaattaataccaacagatggctctattactatcgccaatcaagtcattatggcttatgtcgaacaacagttaccaagtgagctacagtcaatgcgtctcattgatgcggttcttcataaattacctgaagagctacgcatatctgaaagttggcgcagtgaattattattaagtgaaatgggatttaaaaccaatgaaatcaatctattagtctcacaattaagtggtggtcaacatactcgtttattacttgcgagagcattgattttgcaaccagacttactgctattagatgagccaagtaaccacttagatctaccgactatcttgtggttagaaacatttttaacacagtggcgaggaagttttattctggtttcacatgacaataggttgttagataaagtgaccaattgtacgtggatcattcgtgataaaaccctatctgtttttcgcttgccctgctctcaggcaagacaagagcaagaagcacaagatatcagtgcgcaacatcgttgtgatgcacaacaaaaagagatagatcgtattgcacaaagtgcgaagcaattggccatctggggaaaagtgtatgataacgaaagtttgtcacgtaaagccaaacaaatggaaaaacaaattgttcgtttaaaagacgaacaagtcgatgtaacagaaggcaatcaatggacgttacagttatcaggaacaatattacgggcagatagattgcttgagctgcatcagctttcagtgatccctgcgccagatgcaccgattttatataccatcgataatcaacggatcaaaagtggtgatcgagtcgctattgttggtgctaatgggacaggtaagtcatcattattaaaaatgatttggtcatcatttcatggttcaaccacatcaacagaaaatgtgatcaggctgcatcccagagttgagttaggttattacgatcaaagtctcgcacaacttaatgataatgatacccttgccgatgcactaaagccctttgcaccgctattagatgagcaaaggaaaatggcattaataaatgcaggttttgtttattctcgccataatcagcaagtaaagtcattaagtggtggtgaacgagctcgtttactttttattggtctcagtttggcaaaatattcattattaatgctagatgaaccaacaaaccatcttgatatggaaggtaaacaggcattagctgagcaaattcaacaattttcagggggaattttactcgtcagccatgatagagaattgatagagaaaagctgtaatcgtttttggtatattcacaatggtattcttagcgaacatcatgatattgaaacaatttatcagcttatttctcaacaagatatgtcattggtctctaatgagcaaaatggccatcatgctccatctgttgaaatagtaaaacatcataatgaagatgaattgctaatgaaattgatagcacttgaagataaattgaatgctgatttagcaagaaaatctgctcatcaaaagcctatattacaggctcaatggcaagcagaaatagagatcttaaagcagcaacttgatttagcttaa

SEQ ID NO: 304166 - DNA, 369 bp, Proteus mirabilis
atgcacgtccatttggtctttgtcacaaaatatcggcgaaaaatatttgatcaggatgcaattgaaaaattgcgaggctactttgccagtgtttgtgctgattttgatgttgaactggttgaaatggatggggaacgggatcacgttcatttactgattaattacccgccaaaactggcgatatctaatctggttaacagccttaaaggggtatcgagtcgattacttcgacgtgatcgtcctgatattgcccaacatgattactacaagggggttctttggtcgccgagttatttcgcggggagttgtggtggcgcaccaatatccattatccgccagtacattgagcaacaggaaacacctagttag

SEQ ID NO: 304167 - DNA, 210 bp, Proteus mirabilis
atggtacaattattccctttcgcagtcgggcctaacggcacctgcggtaatgatgactacggagcacggcgtctcctaaactcactcctgtcctcaaaaacttctttctattctgtttatagacagatgcgaagtcttcccagtaactgtcggttgagtttatcaagtactcagttcgaagttatgggagggttcgctcatgtcagataa

SEQ ID NO: 304168 - DNA, 1503 bp, Proteus mirabilis
atgagttatacaaaacggttgtcacttatttgtgctatctgtttaggcacatttatggccactcttgatattagtatcgtcaatgttgctctacctactattcagaatgatattaatgccaatatggctacattacagtggattgtggatgcttatgcactatgtctatcagcttgtattttgtcttccgggccattaagtgatcgtttcggacgaaaaaaagtgtggctctggggggtgattattttcactctaggctcccttatctgtgctattgcacaacaacatgaaatattaatccttgggcgtattattcaaggtattgcagctgcagcccttattcctggcgcattatcacttattacacatgcctttcctgttgatattgaacgtatccgtattattggtatttggtcttcggttagtgcattatcactgattattggccctatccttggtggtgcattagttcatgccagtggttgggcaagtatatttcttattaatattcctattggtgctattacagtattactaggctggtatggattaagtgaaagtgccgatcctgaggatgttgcgttagatcccctaggacaattaaccagtatcttgggattaggtttactaacctatggttttattgaagctggctctgtaggttggtctgattatcgtactgtattcgcattaattgtcggtctgatttttattaccctgtttgttatagtcgaaaaacgtattgaacgcccgttattaccgctatcgttatttaaagatcgctcgtttttccaatataacctttcctcttttactttgggatttgccacttatagtaatgtcttttttatcgcttttttcctacaaaaagcacaaggctggagtgcattagaaacaggtttaagaatggctcctgagtttatcgccatggctcttttttctatgttatttggacggttctctcgttatatatctgtcagaaaattaatgatctttggctttttgttgattgcaatatcttcttgtttattggcaacattagcaacaaatagctcttacacaataacaggaagctatttatttatcttaggtgcaggaatgggattagcgacacccgcaataggggttttagtgatgaaaagtgtagcaccgtcccgctcgggcatggcgtctgcaaccatgaatgcattaagacaaaccggtatgacaatgggaattgcgttattaggtacattaatgatacagcaagcaattaattatatgatgatacaaagtcaagcattaggaatagtggcagaaccgattaatattattacgttagtaacagaaaataaaaccgcttccctagataatcagttggttgccctattacctgaagcatttaattcaggatttgcctatgccatgctaaccgcagggctttcctgttttattactctgtttattatgctttttccttgcaaagagaaacaaggtgcactttctcagcagatagcggattaa

SEQ ID NO: 304169 - DNA, 963 bp, Proteus mirabilis
atgtctattattcatcttgaatttgaaaagcctattgttgaattagacgagaaaatagatgcattacttgcatttaaacagtctcaagatgaaacaacggcagttgatatagacgaagaaatcgccaaacttcgccaaaaaagcctttcattaacacgctctatattttctgatttaggggattgggagatagtacagttagcacgtcatcctatgcgcccttatacattagattatatcaaagctatttttactgatttccaagagttggccggcgatcgtgcttatgctgatgataaagcgattgttgcagggttagcgcgtttagatagaaaaccagtgatgattatcggtcaacaaaaagggcgagacactaaagagaaagtaaaaagaaactttggtatgccatcaccagaaggttatcggaaagcattacgcctgatgaaaatggctgaacgcttccatttaccagtgattatttttattgactccgcgggtgcttatccgggggttggtgctgaagagcgggggcaatcagaagccatagcacgaaatattcttgaaatgtcccgattaaaaacaccgataatttgtacaataacaggggaaggtttttctggtggtgcattagcaataggtgtgggggatcgagtaaatatgttgcaatatagtacttatgctgccatatcgcccgaaggctgtgcctctattttatggaaaaatgctgataaagcacctattgccgcccaaaccatgggaatgacggcacctaaattacaggcattgggtattatagactcaattattcctgaaccattgggaggcgcacatcgccactaccagcaagtggctgaatttgtaaaaaaacagcttctcgcagatttaacagaattgaatagttattctaaagaaaaactgcttgaaaaacgttatcaaaaattaatgtcctatggttattgttaa

SEQ ID NO: 304170 - DNA, 540 bp, Proteus mirabilis
atggatcttaaaaatttaaataacatattaccagtgccacgccatgtttatgaaacaggattaaatgccagctggccattgattgatgaaaaatattcatttcccaaggattatattgaatttacaactcaatatggcatagggaagatagataatttccttactctatttaatccattcattgataatgacaattggaacttttttaagcaaaaaaaatggattatctctgatttttctgaattaaatgaatctgaccctgattattattcgtttatcttatatcctgataataacggacttcttcctattggtatcactgagaatggtgattatgttttctgggttattacatcagataatagtgacctatgggatattgctgttattgcagctagagattcagatgtcgaatatcataaaggaaatcttgtaagttttattgaaggtatattatccaaaaaaatattaagcgcatgttttcctaagagttttccctcatcaaatataatatttgataataattattttaggtcgtga

SEQ ID NO: 304171 - DNA, 1485 bp, Proteus mirabilis
atgaattgggaaaaactgttatcagcaaataggttgcgttcttcaagtttatcttttaatttagaaaatgatagaaatcaatatgaaagtgacttaggtcgagtcatatttagtccagcgttacgaagaatgcatgataaaactcaggtttttccattaaatacaaatgataatatacatacaaggctaactcactctatggaagtaatgtctgtagggtattcactaggaattggtgcctgtaataataaaaaaatccaagataaaattagatcaataagtgatatttttgataaaaatacctacagaattatcccagtgatattaaaaagtagttgtttactacacgatattggaaaccctccttttggtcactttggtgaaactgtgatacaaaactatttcagagcattatttgaagataataaatatgaactctctagtaaaatatccaatgaacagaaaaatgactttataaattttgatggtaatgcgcaaggattccgagttataacgaaacttcaggctctcgatgatttatatggacttaatttgactttttcaacactagcctcttatttaaaatatccaaattcagcatcccctaaaaaagggaaaatagaaacaaagaaaacgggtgtctttcactcagaaaaagaatacctagaagaaatatataatcattgtggcttaatggataaatataaaaaacctttgcgtcaccctttaagttatttaatggaggccgctgattctatttgttattctgttattgatatagaagatgcatttaacaaaggtataatgacccttaataatatctttgaacactttgaaaaaaaacttcaaaaaaccgaaaataaaaactctccgactttaatgaacaaagtcactgaacatattaaagtcatactcgataacaagaaaagctcagaaaataaaaaaatagttgaaataagaacttatttgataggtatttttgttgaaaaatcacttgaaaatttcatccataatttagataaaattgaaatgggggaatataataaagagttaattgaagatggtgaactaactgaattaacagaaacattacgaagcattgcttgtaatataattttcccatatagagaaatcgtttctttagagttagctggagatgctgtcttaaaaggtttattcaattattatattgatttattattttatgaacctaaaggttttgataaagaaaaagaccatgatgcaatcaaaaaaataaaagaaaaatatgcaagtaaagctgaatcaatgatatcatcaagtttagttaatgttgttaaacaggaatatataaaagaatcggataaaaaaatagatatttccgaccttcatatagttgatttatcagcatattttaagctaaaattaattgtagatttcgtttctggtatgacagatttgtttgcaattaatcattatcaaaaacttagtggacaaaaaatttaa

SEQ ID NO: 304172 - DNA, 612 bp, Proteus mirabilis
  misc_feature (576)..(585): n is a, c, g, or t
atgaaatatcaagatgtaacaaaaaccccctgtgagaacgcttattttctagtctttaatcttattaactcatcggaaacccgccctactcttatcgacttttgtaataatctatcaggtcttcttcgtagtatgagaacccgtttccctgaattagacgtaagttgtgtgatgggatttggtgctgatgcatggtctaaactattccctaatcaagctaaaccgcgagaattaaatacctttaagcaaatcaacggcgatgtgtataccgcagtatcgacacctggcgatctgttttttcacatacgggcactaaaggtatccgcttgttatgaattagctgcaattattagccaaaaattaaactctattgccacctcagaagatgaagtacatggtttccgctattttgatggtcgctcaattattggctttgtggatggaacagaaaatcctgagtttgaagatgagcgtgtcgcttatgcggttattggtgatgaagatccactgtttaccggtggaagttatgcatttgtacaaaaatacattcatgatatggcggattgggaaaaccannnnnnnnnncatcgagcaagaaaaagtgatcggtag

SEQ ID NO: 304173 - DNA, 681 bp, Proteus mirabilis
gtggtcaccgaccaccaaggaaccccgcgagagatattcagtgaaggtgggcaagccagttgggcaggacggttgaatacgtggggccaaatgcagttttggcgttaccgcgagggcaaggcggagaatgaccctaattacaccgaatgtccttttcgctttgcggggcaatatgaagatgaagaaagtggcttgtattataatcgctttcgctattatgatagggaaacagggcagtatctttccccagaccccatagggttattgggtgggctgaatccgtatgggtatgtgcattgtccgacggggtgggttgatccgtttgggttgagtggaacatcacagcttaatcctgaaacagttgatttgtatagagctgtcggcccagatgaattaaacaatataaagcaaacaaatacttttagtaatccacccggaattgaaactaaatattttaccacttcgggtgaaagtgcttccgaatatgggaaaaaagctgttttaggctttggtgatgagccatataccattgttaaaactagtgttcctaaaaatttaatcagtgatcctaaattctatgctgaggtggatggtgggattcctgcttatgttctacctagcgaaattatcgcaggtttaaaacctaatgttttaaactattcacctttgccgagaaaataa

SEQ ID NO: 304174 - DNA, 312 bp, Proteus mirabilis
atgaagaaagcttatgcaacaataattctctttgaaactgaattaggaggtcgtaaatctcctataatatcagatagatactatgcatgccctttgtttttcacgacacctaaagagctaactccacatggttttgattgtagaatgttagttaatgaagtaggtgttgatatatatcccggccagtctaaagataatattccaattatatttttatctccagatgaagtatttccatatttaaaaattggaactatttttgatatatgggagaatgggtatataggaaaaggtataatcacaaaaatataa

SEQ ID NO: 304175 - DNA, 570 bp, Proteus mirabilis
atggatacttgtcagtattgcactttaaatagcgtaaatacattagatcatattattcctaaagaaaattatcctgaatatgcagtacatcctaaaaatttatttccagcttgtagtcaatgcaacagcaaaaaatcaaataaatggttagataataataataactttgagtttataaacttatattcacatgacctacccaatttacaatatctttttgcaaacattaatttaattggtaatactttcaatgttaactttgaattaagaaatgaaaataacattaatgaagatattttcatgctaattgaaagacattatatcaatcttgatttgttaaatagatttaaatcaaaatcaaatgaaaaaatagcacaatttgaaaatatcataatttcaaacatagagagctttgatatacttctttcttctgcactaaactctgctctagttgcagttaataagagtagacttatttttggggcaaatcattgggaacaaatattataccttggattaataaacggctctgcatttagaacttattgtaacaataaaggctatcaataa

SEQ ID NO: 304176 - DNA, 489 bp, Proteus mirabilis
atgtattgcattttaccttttggattaatagctcaagttttagcccccagagttattaatactaataatgataaaataaaaaaattaactaatatttccttttgcataagtattatgttaagtattactttatatttattatcatcctatattttaaaaaataactataatactcagttattaggtattccttattctacttattcatctattattcccttactcatagcttgtgccccaataaggatatttgccatattacaaactcaagccttaatcattcctttagggtttgcaaaaatagtagcgtcaacaaccttattttttggcattattaatgttatattagatttttcattgttatatttatatggttttataggtattttttatagtactttaattgttgttagtttaaatacattatctcagtatattttatttggaaataaatttaaatggaaaaaaactggtctaagcaagccttaa

SEQ ID NO: 304177 - DNA, 1317 bp, Proteus mirabilis
  misc_feature (1277)..(1286): n is a, c, g, or t
atgacggataaagcagattgtatatcttgtggtaaaaaatgggttgaaatttatcttgtagatgagtttaatcagcctgtttttgatattgaatatgaattattccaagtctttggtcctatgactgaaccaagaaaaggaaaagtaaaatctgatggtataataatagaagatgaattgtttgatattccaattacgcttagattagatactcaatcgttaatagaaaaaatgagtgaaagaaagctaagaaaattaagaggagaagataattctattgttaagtcaaaagcaatagaaatgaatcgtagctatcgctatacaacaataggaccattatgcaaagataaaattgatattgataataaagaatatcaagataaatatcctttttatcattttcctgagcaagaagcatttaaaggattaacattatcaaagctaaatactgtctatgtaattgagatttgtccatttagagtttggtcattgattttgcaccatacagaacagtattctatgattaatgcttataatttaggtcttttaagtcaattaatttacaataatgataatttatatgatccaaattcagtcagaaacttttttgagcgacaatgctttgatctaagtcgctaccctgtggtcagagaaaaaaatattaaagcagaatatcctgctattgttattgatgtaccttttgatgaacgttatgataaagcgatatttttagatactgaagataaagtgcagcatggatcttatgctgaaggaagtactcaattattctatattcagaataaagaacaatttattattgcttggcgaggctctcaggaaggtactgattgggttgatgattttacttatcgttctaaagatataaaaacccatgcctccgaatttaagatagatggtaaaatacataaaggtttcttagacgcttatcaattagggaaaaaattctttcctgagagattttctgaaatgaaaaaaatgtcaagagaaagaaagttgtttatctgtggacatagcttaggaggagctttagctttggctcatgctacagaattgagtgtaaataaaccattgctttatacttatggagccccgagactatttactatctctgcactcaaacagctacaaaaatttactcattatcgtcatataaataacaatgatattgtctctagagtaccaccagaagcaagcttagataattggttatttaatatctatgggatttttggcactatattgggtggcgctatatnnnnnnnnnnagatattgggtggcgctatatcaattgttga

SEQ ID NO: 304178 - DNA, 498 bp, Proteus mirabilis
atggctaacggatcagtaaacaaagtaattcttatcggcaatttagggcgtgatcctgaaattcgctacctgccttctggtggtgctgttgccaatttagctgtggccacatcagagaaatggcgtgacaaacaaacaggtgaaaatcgcgaaaaaacagaatggcatcgtgtcgttttgtttggaaagcttgcagatatcgccagtggctatttgtgtaaaggctcccaagtttatatcgagggccaactacaaacgcgcgaatgggatgataacggtgttaaacgctatacaacagaaattgttgtaaagattggcggttcaatgcaaatgctaggtggtgctagtaaatcagcaggttcacaaccggcacagcaaaacccgccaccggctcaacctcaagcacagagtagtcagccaccaatggattttgaggatgatattcccttcgcacctattgggcttatgtatccacgccatttaattaatgtggtttaa

SEQ ID NO: 304179 - DNA, 399 bp, Proteus mirabilis
gtgctcttagatgaacctgaaactcatttacatccagcttttataaataagttctttgctatattagatactttattgaccttaacaggttctgctgcaattattgctacccattccgtatattttgtgcgtgaagtttttaaagaacaagttattgttttacgtaaaaatgaaaatggtaacttagagttagaaaaaccaaggctgagtacatttggtgcaaatataggtaatatatcttattttgtatttggtgaaagtgaacctacggatgttctattaagagttaaaaataaaataatagaggacaagatgacatggcctgaagtatataataaatataaagatgatttttctataagcgttttaatgcaattgaggaatgaaatagaaggataa

SEQ ID NO: 304180 - DNA, 603 bp, Proteus mirabilis
atgaataggcctatgaaaaatatgatttatctaagagttagatctatcccaatcgtaggttctatttttcgtattgcaaatgcgtatgcttttaagggggagcctcaatgcaataaaataatagctccatggaaatattggtgggctaggatttttaaaaaatttcttatagttctcatattcacgacgattatgttttttcttgaaaactctttagcaagtgaatccccatggaaccctgctgatactgtattaagtatatttccgagtattttagggtttgggattggagtttatgcgctaatgtttattatgcctagtgactttatgcattatcttaaaaggcgttatgagtcaggtaaaagcgaaataagccatcggattatcccagtagatatgggatatcctttatctatttttatagtcgttttgtgtgtggcttcgatttgtaaattgtttaatcaaaatgggattacctactttgccagtttgttatcgctgttttatgggttaagtatgtccatagaattaatgtcttttttgtttaactcatcggttagaattcaagctataagaagtatggggaagaatgacaaacaataa

SEQ ID NO: 304181 - DNA, 897 bp, Proteus mirabilis
atgcttcaagaaaatgtagttaaagatatcattgtttggatcgagcaaaacttagattcacgtttatcattagatattattgctgaaaaatcaggctataccaagtggcacttccagcgcttatttaaagcatatacaggaatatctttaggcaaatatgtcctagcacgccgtttatcttgtggcgcttatgcgttgaggatcactcgtagtagccttttagatatttctttaaaataccattttgattcgcaacaaacgttttgtcgtgcgtttaaaaaacaatttaatatcaccccttctgaatacaggaaaaagcaaggttgggatattagtgagcttatctttccagcattagaaacggttgaacttaaagcaaaatatgaagtaatgaccttaccttctaaagagttgataggtatggctcatcaatacaataaaaatatttcagcatggaattatgataagaaaaaatttagaaaagaattttggaagaagtttttaaaagaaatacataccatccctacagaaatgtatgccacacatcgtgcttctgcaggctcgctagatgatacgacttatatttatacaacagcagtaagtaaagaacaattaacaagctctgctaatatttccactatgtctaacgtagaattacccaatgggaaatatttagttattactttcgagatggataatattttagattccctcaccgggtatgatgatattatttatactgtatataccaaagtattgccaaagatgaatttgctacgtcgagctggtcctgatattgagcgttataccttaaaacaatcggttagctatgataagttaatcggccatagtgagcagcatctacaagaaattagttactatattcctgttctttag

SEQ ID NO: 304182 - DNA, 171 bp, Proteus mirabilis
atgcatattaatagtgagtttttcacacctgaattaatagctacttggataaaaaccgtttcaaattcatcaaccaatagtattgactatgaaattaatcgtattgaattagaaaaatcaataaaaaaaattaagctcagggcaagctattttcttatatattatgactga

SEQ ID NO: 304183 - DNA, 453 bp, Proteus mirabilis
atgactgaaattattgctaatataagatatgactcattaataatttttgatgaaccagaaacacacttacaccctaatgccatatctcagttaattaatagcattcactctcttgctgatcaatttaaatcttactgtataatagcaccccattctccaattattgttcaagggattttatctaaaaatatttttgtcataaaaaatgaaaataaagtattaagtgtaacacatccatcgctggaaacatttggtgaaaacttgtcaaaaattactgatgatattttcggtgcgagagatacaccacaatattttagaaaaaaaatagaagatcaaattaaaattggatatagtattgatgatattagaaaatccattcaatctgatggagttcctcttagtttaaatctttccattttattacaaaacatggagatcaaaaataatgattaa

SEQ ID NO: 304184 - DNA, 864 bp, Proteus mirabilis
atgtttttttctcgtaaattagaggcctttatggccgtcgttgaaaatggatccttaagtaaagctgctcgtgtgatgaaccgaacgacaccacctgtagcgaaatcaatcaaagattttgaagccgtgctagggaagcgcttgtttaagcgggaaaagtttggtatgagtttaacgcaagaagggttagaactctataatgatttaaaatcactttatctgcaagaaaaagagataacaaaaaaacacacatcgggcattattaataatagcattcatgtttattatgattggggtaaaagtcaatatttaacagcactctatcaagcagccaataagaattgttcacatataaatatgatgagattttcgaaagataattttgaagagataccagattatgatggaaacacgttaatcttaagctcagataaaattattagtgaaaagtttagcttaatacatcaagttaaaaataaatatctaggaatatgttgccaacaaatcttagcacaaaaagcacaagagaatatcaatacattgctaaaagaaaatatttggttatgtgatcccgctttatataaaacagcaaaaataaagaaattagaaaatgaaatagcggatcagggtaaacctgtcagtattagattgatggatgatttaaattgttgtttaaactttattcaaactcaccattcgctattatttactgatgaaaacccgattaaaagtgaggatgaaaagcaactgtgctttatacctttaacacaaacggagctgatttataattgttatatctataaatctaaatatcactcgagtatattgaacaggtttgttgatttaataaaagaattggaatga

SEQ ID NO: 304185 - DNA, 621 bp, Proteus mirabilis
ttgtcagttagtgatattgcagctaaaaaatatagaaatatagctttagaaacagaaatatttaataaatcatttattagaaattcagaatcatattttacatttaaaaattcatcttttattctaaagggcttaagttatgagaaaggaaatttattatccacaaatataacattatcacctaaaaatgaatcagaaccagtattaagttttgactttgattatcatgatgagttacctaaaagagtttgtgttttgattggtgagaatggagttggaaagagtcaaacattgagaagaatttgtatggctgctatacgtggaaataaagatatctttgaatatgttgataattccaatagaaggatattgattaataggcttttggcgttttctcctacgaatgaaagtaaatctaattttccttcagataaaaatattaaatctaaaatatggtatagacgtttttcattgaatcgggtatctaatagaaaaaacattgctaatactaatgatttgattattcagctagctagaaatgaagaaaatattagagaattaaatcggtttgatactgtctcttatacacatctgacgctgccgacgatactccttgtgtag

SEQ ID NO: 304186 - DNA, 147 bp, Proteus mirabilis
atggtccgtcccaaggatggtgatagaaatgttatcgcctcaggtcatatggatgtccgcgatgggattttagttgtagctgatgattataatgttgatctgtatgatggaaccgcttggcataagatagtgagaccttataaataa

SEQ ID NO: 304187 - DNA, 474 bp, Proteus mirabilis
atggtggtctctgataaatatcaaaataacagtgagcatatctattttggtggtcccagtcgaaaaagtgaatttgatgttttagaagcaaaaaaccaatttaatatacaaggcctcccccaatggcaatgggaaaaagcaactcccgttactgaagatgatattcctaaaattcgtgctttttatgccgaactacgacaagcatttatcgataaaaatctagataaattaaaaactatgggaaaaatatcctgggaagaaatggcctatgccgataatggctctcctgatatcttttggaaatcgcttaattttcaagaacgattagaacaaggatataaacccaatactattaattgggatgaatatacttttgttacttataacgacaatcgagtctttcgctatgaggttggttttagccgattatcccctattgaattaatcaactctgaaggaagaaattatttttaa

SEQ ID NO: 304188 - DNA, 1101 bp, Proteus mirabilis
atgaagataattttatcagctaatacttcttggtatatatataactttagaaaaaataccataattgctttacttaatgataatcatgatataacagtcgtatcaacttatgatgattatacttctaaactaattaatttaggtgttaagtttaaagaagtttatatggataaaaatagtaaaaatccaattaaggatttttatacaatcgcttcttataggaaaattttcaagaaaataaatcctgatatcatattcaattttacaccaaaatctaatatttatagctcactagcagcaaactgtaataaaactcgtattgttaataatatatcaggtttaggtaattcctttacatctaatagagtattaacttttattgtcaaatttttatataaactaagttcaaaaaaagctactaaaattttttttcagaataatgatgatttggaattttttataaataactccataacatcattagaaaaggcagaaaggatcatgggctcaggagttgatataaatagattttactattgtactcctaatacgaaaacaacgacatttatattatcggctagactattaataagtaaaggtgttcaagagtatttagatgcagcaaaatttcttaaaaagaaatatcataatactaattatttaattttaggcttcactgatgataataataaagattatataaaatcagatattataaaaaaatatgaagatgagaaaattattaaatttttaggaaagaatgataaaatagagaaaattcttgagcaagctgattgtattgtacttccttcttactataaagaaggagttccaaaaactttactagaaggagcatccatgggaaaaattattattacaacaaatttgccagggtgtaaagacactatcattgacggtattaatggttttttttgtgatgtaaaatcatcatcaagtcttattgaaaaaatggaaaaagttattttaatgccatacaacgataaattgcgtatgagtattaatagccgaaaaaaagcggaatctgaatttgatgaaaaaataatcatcgataaatatattaatgagacattattatcatga

SEQ ID NO: 304189 - DNA, 546 bp, Proteus mirabilis
atgtgcattgtactatttcatcttaggtatttctttactattaaaaatttattactttttgtatgtgttataatttctcttgtttttattttttctcttttattaaattatataaatcttgataacttatacattacttatataagaacatttgaactttttattaattactataaagagggtgaattacattcagaaagtacaactcaactagtgaaaacttttgatgtaccaaataaattatttgaccttatttttggtaatggatatgagccatggagtcaacaatcaattactgcaaattcaaatcaaagtgattctggtatttttcaaaacttgtacatctatggattaataggtttatttatatattacactcctatagtatatatatggactaaatcattaaaaataaaaggcactaacttatatatatccataatgttcctcttaggttttatttctgaaataaaaggacattatatttattcaagtttaatctttacattgataactctcccttattttattctaagaaagaagtaa

SEQ ID NO: 304190 - DNA, 558 bp, Proteus mirabilis
atgaatataaaatctttctttaaattaatatgggtaatccctttttttttaattggagatactaattttacaatgctgatgagaatatcaaggcatcctactttaattaaaaaatataaagaaggtcaatgttactgcggtaaaaatgttactattggtaatccattaaatagcaactttttaacctatagttttattaatattcgctttccctctaaaggtgtttttattaaaaaaaatacaaaaataggtaataattttactgcaatctctttaaatggaataaaaataggtaagaattgtttaattggcagtaatgttaaattattagatagtgactttcactctgtgaataaagttagaaaaaatgattctattattagtaagaaaatagaggttaaagataatgtttttattggtgataatgtacttattttaaagggcgttattattggtaataactgtactattggagcaggaagcgttgtgactaaaagttttcctgataacactatattagccggtaaccctgcaagagcgattggttttgttcagtaa

SEQ ID NO: 304191 - DNA, 1104 bp, Proteus mirabilis
atgattaattttctagatttaaaaaagataaatgaacaacataacaaagaattaaaagaagcatgtgcaagagttattgattctggatggtatattacagggaaggaattagaaagctttgaaacaaattttgcccactattgtggtacaaaatatgctataggtgttgctaatggtttagatgcattaacacttgtattacgcgcatggaaagaacaaggtaaattacagtctggtgatgaagttattgtccaagcaaatacttatattgcatcaattctagcaattacagaaaacgatttagtccctattttagttgagcctgatagtaaaacatataacctatcaatagaaaatattaaacaagcaattacagataaaactaaagttatattacccgtgcatctctacggacaaattaactcaatgaaagaaatcatggcgatagctaaagaaaataatctattagttttagaagattgcgctcaagctcatggtgcaagtattgatggaataaaagcgggtaattggggagatgcagctggctttagtttttatcctggcaagaatcttggtgcattaggtgatgcgggtgcaattacaactaatgatgaagaactggcgagtgttgttacagcactacacaattatggttctcatcaaaaatatttgaacttatatcaaggtgttaatagccgtttggatgaaatacaagcggctatgttaaatattaaattaaaatatcttgatgatgaaaatgaatatcgtagaggtattgcaaaatactacctcgataatatcgataatgaaaaaatcaaaattagaaataataactatacccaagaacatgtttggcatatcttcgccattgagtgcgaagaaagagataaattaatatcatacttatcaagtaaaggcatacaaacactaatccactatccaactccacctcataaacaacaagcatatcaaaatctaaatgttagatatccattaccattaacagaacaaattcataaaaacattatttctatacctatttctcctgtattatcattggactctgcaaaatatattgtgtctacgctaaataagtttcaataa

SEQ ID NO: 304192 - DNA, 456 bp, Proteus mirabilis
atgatacatccattaagtgacgtaaaaagtactaggattggctcaggtacaagagtatggcaatatagcattatttttcagaatgctgttattggtaataattgtaatatctgtgcacacacccttatagaaaatgatgtaatcattggtaataatgtaaccgtaaaatcaggtgtttatatatgggatggaataagaatttctgatgatgtttttatcgggccatcagttacattcacaaatgatatttttccgagatctaaacaataccttgaaaaatttttaataactcaaataaataaaggggcttcaatcggagctaacgctacaatccttgcaggagttactttaggtgaaaactgtatgattggtgcaggaagtgttgttgtaaaagatgttccagccaatgctgttgttgttggtaatcctgcaaagataattcgttttataaaatag

SEQ ID NO: 304193 - DNA, 408 bp, Proteus mirabilis
atgaataacttaataaaaactattgaatttaaaactctcggtgataaaagaggttcacttatatctttagaaagtaaccataatataccattcaatataaaaagaacttattatatttttaatacagaaaagaacgtatcaagagggtttcatgcccataaaaagttaaaacaacttgctatttgccttaaaggtagttgtgactttattatggatgatggaaagaaaaaagaaaaaattactttaaactcacctaatataggtttaattatcgatccaatgcagtggcatgaaatgcataatttttctgaagactgtattgtacttgtgttagcagataatgtatatgatgaatcggattatattagagattatgatacctttcaaaagagtataacaacgaaatga

SEQ ID NO: 304194 - DNA, 870 bp, Proteus mirabilis
atgaaaggtattattttagcaggtggttccggtacaaggctttatccaatcacaatgggtgtatctaaacagttactgcctatttatgataagcccatgatttactatcctttatctgtattaatgcttgcaggtattagagaaatactcattattaccacaccagaagaccaagaaggctttcaacgccttttaaatgatggttctcaatttggtatttctattcgatatgcaatacaacccaaaccagaaggcttagctcaagcatttattattggtgaagattttattggtagtgatagtgtctgcttagttttaggagataatatattctggggtcaaggattctcaccaaaattaataaatgcagctaataaaaaaaatggtgctactgtttttggctatgaagtacaagatccagaaagatttggagttgttgagtttgataataatctaaatgcaatttcgattgaagaaaaacctgaaaaaccaaagtctaactttgctgtgactggattatacttttatgataataatgtaataaacattgcaaaaaatattaaaccatcagatcgtggtgaattagaaataacaacgattaatcaagtttatctacaacaaaataaattaagtgttgagttactggggcgtggttttgcttggttagatactggtacgcatgatagtttacttgatgcaggtacttttgttgaaacaatagagaaaagacaaggatttaaaattgcctgtttagaagagattgcatataaacaaaaatggatttcaaaagaaaaacttcaagtagccgcaactttatataataaaaatagctatggtaaatacttagagaaattaataatacatgaataa

SEQ ID NO: 304195 - DNA, 1050 bp, Proteus mirabilis
atgaaaaataaatctgtccttatctatggtgaatatagtggttatggaaaatcattagcagatggtttcaaacaattgggttacaaatcagaagtatttagtttctcaggtgatggctttaaaaaaataaactcaggactaactctttccggagaaactaaactcaaaaaatatttatcaatcataaagttaatacctacctttttgaaatttaaaaatataataattattaatcctgagtttgtaagtcggaaaaatttagggcttttaatgctattagtttttaaattaacaagaaaacgaattatcttaatggcttgtggagatgatactccatttataaaatatggtttagaaggacttatccctaattggccatactcagatatccctcttccacaaaaagattattttttaaaggaaaaagatatttttactaacaatttagtagcttcttttgcctttaaaataattccagttatgtatgactatagagtgggctgggagcaaactaaatttaaatataaattaactgagacaattcctctagcttgtgatggtcaattaaaaccaataaaacccattaataacaaaatagttatcatgcatggtgttaatagaattggctttaaaggaacaaatatcattaaatcagcacttaatgaaatagaaaaaacatatccaaatgatgtggaaataatctatcctgaacatcttcctttaacagaatatttacaaacaatggatagagtagatattgccatagatcaaacaaaatctaattcatatggtatgaatgccatttatagtatgttttctggtcatgtggtattagcaccagctaatcatttattccttaatgatataactcttcagaactctccaattataaaaatcaataatactaaagaaagtattattaatgcattaagttttctaattaaaaacaaagagaagattgatgatatcaagaaagaatcacaaaattacgctaaaaatatacattcaccaatgatgatagccaaacaaatagagaaatatttaatttaa

SEQ ID NO: 304196 - DNA, 582 bp, Proteus mirabilis
atgagacaggttactatcaatgccaccagcctaagcccattcatgtatcaaggtaagcgagtagttacctttgccatgattgacgaggtacaccaacgcccgaaaggtacagcaaggcgtacattcaccaagcataaacgccatttcattgatggagttgattattttttgttaggtaaggacgtattgcgtccataccttgatgaaaatatcgccaagtacacgcctgaactaatggtattggctgaatctggttatctcatgttggttaagccatttactgatgatttatcgtggcaggttcagcgctcaatggttaacagctactttcgtttgtctgaattccctgaattacagcacatcaacatacccacactggcagaacttgaagccatgccaattgatgaggctcagaacttgattagccgcttagaggctgattcttatcaagggcacggtaggcgtggcagctatgccatgaacctacgtcgcaaagagaagaaagcacttaaaccaatggtaatcgccattgaacaagcctcgcagctacacattcaggatatgggagattatcactcatga

SEQ ID NO: 304197 - DNA, 1008 bp, Proteus mirabilis
atgctcattttgatactttttgtttacttgttaattttattaaatattcatatggcaaagcaaaaattcggcttcacggataatcgagaacactttcaacacttaggtgcttggattgatgagtccttatatattgttatctcagctttttcaggtattttttttggtatagctggcgcaacattaggggggtattcttgggtaaatgaatgggaagcagcctctgggttattacaaagtgtttgggttatagttagttgtccttacgttctttttatatgtgctgctatatgtatattttttggagccagaggaacaataagggatcaaaaagcacaaaaaaataaaatagagtcactaacaaataataatagaagtattgaagatgcagaattagaattatcagagacaagaattaagatacagaagcttaatattgattctattgaactttggcttaaggtatattctaagcaactagagttaacgtcaaaggatagggcatcgatatactacgaagacaaaggaaatctttatattcttgctagatattcaaaaaacccagtgttaaagcaaatacataaattaaagtttccactggataaaggaataattagcaaagcatgggaagatggtttttatgagtgttctttgcctcaatataataccgataaagatgggtatataaagcaatgttgtgctgaatttggatatagtgaagaagatatagaaaaattaacaatgaaaagtagttgttattacgcaaaggcaattattgacgctgatgaccatataggaataataatattagaaagctataataataaaatcattgatgaagatcaaaaggatacagtagctcaatttttagagtctagttcaagcttgttagcaaatttaatcagaaatgccagaaaatttgagaggcagccagtagataactcagctagttctggtacaatgaaagatgaattagaactattacagcaagcaaaaaaaggaggctag

SEQ ID NO: 304198 - DNA, 468 bp, Proteus mirabilis
atggatagaatacaaaacatagcagcttacctttgcgaaaattatccaattcaaagcgagctatctaaggctcgtttaacgaaaatggtttatctagcagattggttttcctcattgttgaataatgaacagttgactgatattgaatgggtttttaatcattatggcccatatgtcgatgatgttgttgattcaatataccgttctagaaataactttagtgtaaggagcgagaaaaatatttatggctccgataaaaacactatacatttcataggggataaaaatgacatagtactgcatgggaatgataaaaaaatattagacttagtaataaataaaactaaaggcttgtattttaatgattttatcgactatgtatactctacttatccaataagaagtcgcactagatattccatccttgatttgccaagattagctagagaatatagcaatttaagttag

SEQ ID NO: 304199 - DNA, 942 bp, Proteus mirabilis
atggcaaatgaattagtcgtaattgaacaagctacggcgctagatttgtttacggcgacagaaaaagtaaatcagatgttagagcacattaaatctctagcagaagaagagcgaaaagaactcgacagtgatttctcagtagctaaaaaccgaaaggcttttgcatctctggcgtacaaagttgctcaaacaaaaacgtatatcgacaaggaaggtaaagcagttgtagataagttaaaagagctacccaaaaaagttgatgctaatcgcaagatatttcgtgacgagctagatgcattaagcacagatattcgcaagccactaacagagtgggaagcacaagaaaaagctcgcgaagaagctgaagcgcttaagaagaaaatcgaagttgatcatgaagaagctctgcaaatgaacgagctgtttgatttacgcaaagctgaagaagaacgccagcgcattgctcgtgaagaagaaatgaagcgacaagctgcggaacaggcaagactcgaagctgaacgaaaggcacggcaagaaattgaagtggcagcacggcgtgagcgcgaagcaaaagaagccgctgaacgtgcagagcgtgaaaagcaggaagcaattcaacgtgcagagcaagcagtaaaagaagctaaggaaaaggcagagcgtgatgctaaagaagctcaggagcgagccgaacgtgagaagcaactagctatcgaacgtgagcgcaagaaagcacaggaagcagaacaagcacgattagcagaagaagaacgtaagcgtcaggaagaagctaaacgtcaggctgataaggaacatcgtcgcaagtataaccaagaaacattacaggcgttagtcagtaacggatttgatgaaaaattagcgactgaatttattaagttagttgttagtaataaaatcccccacatgacaatgaactactaa

SEQ ID NO: 304200 - DNA, 156 bp, Proteus mirabilis
atgacaatgtttgaagttcaactttttgcatacggacaacactttcattttatcttcattcaagctgaagatgtggaggatgcagaagaacaagtaaacattctaaattcgattgatagtgatgttagctttcaattaacaggaaacacgaaatag

SEQ ID NO: 304201 - DNA, 276 bp, Proteus mirabilis
atggaaatatggtttaaggagtttgagtcacacgggcgtcagattctaatcaagaaagctcataacgccgatgagtcaaaaatcggggtgcaatattgctggccagagaaacttttcgaggtcgattttggattatggatagattacgacgacgatgatgaggaaggctgtaataaagcggaagaagcacgcaacaagctattcgacaccatcgttcaggaagcagtagataccgcggtgagtaacttaattcaaaaactcaagcttgatgactag

SEQ ID NO: 304202 - DNA, 270 bp, Proteus mirabilis
atggcaactattacttttttaccagctaaagataatttaaagatgcgtagatacaaacgcaacggagaatactacaagcaacgtaatgagttaaaagctaaacaaaaaagtcgctcagtggaagaaatttgggattcaatcattaagccagtcgatgaaacagatgtactggcaagcttggtgttaagtctcaaatcagcaccagatacacgtaaaacattaaaactgaaaaaacagccgagcagtgagttcggggtgacggcgagataa

SEQ ID NO: 304203 - DNA, 1029 bp, Proteus mirabilis
atgacaaatcaaaatatagttataaataatctaaatgatgtatctgccctgatagagcgggcaaaaaataatcgtgacctagatattaatactgttaaaataaatcttgcagaatcaataaatttcaaagtttttggcgatacggagaagtataatggttctatcccatcttcaatggctcaggggatgtgtgaatttcaaacagaaatttacaaagtattttcgttaataaaatatggaactgataatctaaagagactcaccaaggaagacaaggagagtttagaggttatttttaaggtagaggaaggttgcacggatgtaatagctgccttgaccgatctggttaaggcattaggcggtacattcaatgaggttacacaaggtatgactggaatcgaaaaggtaattagcctaactttaattatgctaatcctaactggaggatggctcctgcgttccagacaaaaggattctcatgatgaaaaaatcaaacaacaagaattggactctcaaaaatctgataatgagtcacgtatcgaagaaatgagagtattaaaagatggtatggtagagatattgcaagcatcaaatgcatccaataaatccaaagaaatatccgaaggaattcaagaccatgcgacaaatgcatgtattggaatgctcaaaggtgtttctgatgcagaaaaagttgagtttagtggttcagtcaaaacaacgcttacaaattcagacattaaatccataatacaaagccctagagacaaactacaacatatcgaacaatcaatactggtagatatagaagtaataaaaaaacatcctgaaaaactgacattaacctgcacacctaacggtcaggattatactttccaagcgtatgttgatactgaatttttctctgattcaaaagaaaaaatagaccaactttttgattcaatgagggatagcaaatcagtaaaactattcgggtcatacaaaatacgatcagggatcatagagtcagttatggtaaccgaaatagaataa

SEQ ID NO: 304204 - DNA, 219 bp, Proteus mirabilis
atgtttggatatttttcaagatatcgttcagcacgttcatccactcctcaacaatctaaaaatgttgaagtcaaagcttatgttcgtgttagtaagagaggttcagtgcatattccttctgatgaacttgctgagttaccagaagtgaaagaaatgcagagaatggctcgctccatagttaacagctatgggcaaaagggcatagctaaacaaggataa

SEQ ID NO: 304205 - DNA, 855 bp, Proteus mirabilis
gtgctggccttactcttaattcccattttggttagcggttatataatggtaatcgctaacccatatcactacttccgactacatagacacgatggacaattactttatctaaaggttgcaacacatggcactctttgtttaatagcgtctgtgattattgcaacagtagtaaaattcttcttccctgactttcatttaattaatttgataatcacagaatttaaagtcactggtaacaaagagactgatagaatctatgcttggttaataattttatcttttacatctattatttcatcaataatttatgtcatagctgtatggataaaaaattccttcaaaggaatgcaacatagaaaaaaacacgcaaatttatatgaaaaaatcagacaagcaaaaaatgcaaaaatactgagaaaaactatttcgccaggaacgatggattcaatgttgtatgatgcacttgagtcaacacctaaacgctcggtgcttatcaatctttcatcaaaaaaagtttatgtaggactcattaatggtttaactgaaccaaatgaaaaagaaggtcctaataagtttatttccatattccccataatgtcaggatatagaaataaagatactttattagttgaatttactaatatttatccttcaacgaagaaagtccgttctggaagaactgtgaaaaccccaaaaacaattaaaaataaacttgatataattttatcaacagaagatataacgcatatttcttggtttgattttgatgtttttaaagaagttaatgactcaattaataatggtaaaaaagattctagactcaaaccccctcttcacagaaacagaaaaacttaa

SEQ ID NO: 304206 - DNA, 417 bp, Proteus mirabilis
atgtcaaacaaattttttcttcttgttttttcattgctggtattatcagggtgtgaccaaaatttaaaaacaatatattatccaaatactagttcatttaacgaatatgtaattccactagcagtaagtgatgagtttttatcaaagttttcaactgaatatgttagttataataaacacctatatgacatatctgttaggaacataaatataagccatgatgctttctataaaatgaacgttgatttaattaccacagaaacatatgagaatgcaaaaaaatcatattgtatgaataataaatcccctttatttagactaaataaagaggatattaaagtaactcttacgtataaagataaaagcggtcagtccacttttctatctttttcattaaacccaagctcatgtaaatag

SEQ ID NO: 304207 - DNA, 738 bp, Proteus mirabilis
atgcttgaatgtttggctttagaagagagatgtattagcgatgcatggaattggatttatgaaaattggagttggggtttttttgttgcgttggtatctctttggtatgcggctaaatcttattcgaaatcttataaatctaataaattatcagaaagctcacttgatttaacagcaagaacaactgcacttgcggaagaatcattaactgcagctaaacaagcaattgacacatcaatagatttatataatcagcaaaaaaatgatgtaaagatggaaaaagaagtcaatgaaaaaaaagccgagcaggctttgaaagaaaatttaaggcacgttattttaggtttgactccgatgtgtgataattttattagctttattaatgggatacaatcaagtaattataagtacatttctctggactcaaacatatatgtatatacagaaaatttatcatttactataaatagttttgaaccagcaatatcatcattaaatatgttgatatttgatgcaactcttataaataaaacagtacatgacaatatatcaacggctataattgctttgtctcattttcaaagaactactataccatctgtaaaacgttgcttaatgagtaatatggaattagatgatatcaagaaaggatttgaaaaagaaaaacctatttgggatggtctggtttcttcgatggaggatttgattaaatatgctaatagcatatcagacctttaa

SEQ ID NO: 304208 - DNA, 948 bp, Proteus mirabilis
atggctagtagctggatcaaagttgaagttataacaccagataaaccagagatttatcaaatagcagagatattaaacatagaccctgatgctgtgttgggaaagctaattagagtttggtcttgggctgatttacaaaccttagatggtaacgcaggaagcgttacaaaaagcgtaatagataggatcactttcatttccggctttgctgatgcactgataaccgtgggttggatgaaaaatgataatggtaagttagtcttacccaattttgataggcataacggagaatcatcgaaaaaacgggcacttactaataggagagtggcagaacatcgagaaaaaaagaaaaagaaagtaacgcagtcaccgttacaaaaaccgttaccagaggaagaggaagaagtttataaagatcctctctctaaggggaacgatgaaaattatcagccaaaccataatgcgaataacgctattttgaataatcgagttccatcaggaggatttggcgtatctgaaaaatttgtcatgtttcatggatgggagccagatcaggactttacgaaaaaggcagcgtactggggggtaaggctcatgacaccaatgaaacagcatgagttagctgaattcgttacgtactggagttcagagggaaaagctaaaacacatgaacaatgggaaatggcgttggcaaaaagcattaaatttcaacgctcaaaaaataacgaggtgagaaatgggtcaagtcagagcaataaaaccagtaaccaattcgctggaaaatcaaaaccaatgcaagaattcttacagcacgtcaacgataaatacggacccgatgctgttaccgctttggtggaaaatgatcgagctgtatggggagaaatggagcaagaagaacgggacggaaccatcattgatgtggaaacgagcactcagcggattgaatag

SEQ ID NO: 304209 - DNA, 189 bp, Proteus mirabilis
atggagattattagtcgaaaagaagctgcgtcaaaagggcttgggaaatttttcacgggtaaaaaatgcaagaacggtcatgttgctgaacgttacgtttgtaacggtgtttgcgttacatgtaattatgaaaactcaattgggtatagaacagcattaaaacaattgattgaaagcgcccgttgctag

SEQ ID NO: 304210 - DNA, 1041 bp, Proteus mirabilis
atgtcagaagtagcaactctcgaaagaaatcaatcagtaatgaataacacatcattactttttaatcctgaatcattagaccgtattgtcaaatttgctgagctaatggcatcaggtacagcaacggtgccaagacatctgcaaggtaaaccatctgattgtcttgctatcacaatgcagtccgcacgttggggaatggatcctttcgttgtcggtcaaaaaactcatgtcatcaatggtgtgcttggttatgaagcccaattagtaaatgcagttattaccagttcaaatgctgttgtaggtcgattccattacaaatacggtggcgactgggaaaagattgtaggcatgaaagataaacgtgatgaatcgggtttatttattgaagtcggtgcaattttaagaggtgaagaagaaattacatggggtgagcctgtttaccttactgatgtacagacgagaaactcaccactttggaaaacaatgcctaagcaacaaatcgcgtatctcgctgtaaaatattgggctcgtctttattgtcctgaagttattcttggtgtgtatacaccagaagaacttgaagatcgtccgattaaagacatcaccccacagaaagaacgtgtaagcattgatgaaatcaccactcagcaacagccaatcaatgaagaaccgataaaagaagctcaaggcgagtttatacctaagttcgatgcgcaagcctttagattagctattgatgatgttcagactgtcgaagaagctaaaaatattcgcgcagaaattgaaaacttaaaaaatgaaatggggatcaacctgtttactgaattaaaaaataaagcagtacaggcataccaccgcattgatgcacgtaatgccttagaagcttctatcaactcacttcctgaatctggctcacctgaagccaccgaagaatttgaaaaagtagacaagctacttaaatcaagcaagcgaaaactcggtgatgagttatacgagtctttctctatcacacttaatgatatgcgccctgaataccagtaa

SEQ ID NO: 304211 - DNA, 762 bp, Proteus mirabilis
atgaagcgaaacattgatgattttaatggtatgagtgattttattattagtattgttactgtcgtagcttgggtgttaattggaactattgtaattattggttatttcactatagaaactaaaggtgaaagcatcattatttcttttgtatccatggtatttaccataatttcatcattggggattatagctacaataagtgtttacttatggcagaaaaatgattttataaatcaaaatatattaaaatcaaaagctattgaaagcataataaaatcagaatgtgaaaaaataaatctagtaattgaacaattaatatattgtttcaccttaataggtgatgaaaaaaatgaaatagatgaaataaatttacgatataataactataactacaattatatatctgttaatcataggatatataatgaaaactatctatttgagatccataacagatacctaaataactttactcaggatggagtagctccataccaaatacaaatgctaatattaaaaacaaatgcactatcagattttttatatacttcagcaacattaaaattaaatttatacaaaaaaacaaataatgcaatatccataatgaaaaagactaaccatatattagattacttaattagatttaatgaaataactaagaatggaaattcaagggaaataataaattacgcaataattgagttaggaaatatttcaaaagacaatgaagaacttctttcaagttgcaaagcatcgtcataa

SEQ ID NO: 304212 - DNA, 426 bp, Proteus mirabilis
atgtccaataagatcactgaaactaataaaatagataaacttatagcattttgtttaatgaagggggttcaaccagcagaactgataacctctatattcgaaaaagaatatacccacattgaaacaattaaagacgctaaaagagtctatctaattatttcgtataaagagtatgttgatggtattgctcaaaacataactatgagatatacctacaattttgatagccaattacagagaatagaacaaaaaataaaccaattaaaatatcaaattcaatgggatagaattgataaattaaaagaaattataaaatctattattggttgcaaagttacggatgatgaagtacataacatactagttaaattattgccaattagtatgcacaatatgaacttacctaatttaaaactagtcgcttag

SEQ ID NO: 304213 - DNA, 1875 bp, Proteus mirabilis
atgtcttgctattttgatatacccgtaaatattgaaggaaataagaaattaaggacaccacaaatagaagcatacataaaaataaaggaatattttagtgatccactgaataaagaagcgttagtcgtgttacctacaggtactggaaaaagtggtcttatttctattgctccgtttggagtcgcaaagaaaagagttctcattttaactccggggctagttactaaagatagtatcaggaaaacacaagaagttcttaatgataatttttggataaattttgatgtaatgttcagtagtaaagatattccgatagttaatgaatattcatcttctatttctgatgatcatttagaagatagccatatagtctatacaaatatccaaaaggtatctggtaataatgtaagaggattaattaacagagtccctcctgatttttttgatttcattattgttgatgaggctcatcatgctccagctcaaagctgggtagaaactttaacatatttttctacagctaaagtactacatgtgacagggacaccatttagaggagataatcaagaaattcctggtgaaaaaatacatgaaacacctttatctgaagtaatgagggatcgatatgttaaatggctaagaaaagaaacagttaatgcgcatgagctttatttttatacacctgagcaacctgatgtaaaactatctaaagaacaagtactggaacttaaggataaagaatggttagagaaaagtgttgctttatctaaagaatgttctttagatgttatcaaatacagtattgaaaaactcaatgaattaaaaagtgcatcaccgaatgttccacataaaatacttgctgtggggtgtagtattgctcatgctgaagatttattaatttggtatgaacagcagggattaaaatctattattgttcatagcgaaatggacgaaagttcaaaagacacagcttttagagagattgaaaaaaataactgtgatgtagtgatatcagtcaatatgctgatggaaggatatgatcataagtatttaactgtattagctatttttaggccttatcgtagtttgaatgcctttgctcaggttgtgggacgtattttaagggctattcctgaaaatgaaatcacaacatttgaaatagataataatggtattgttatttttcatgaagaaatcggcttgaataatatgtgggaatcatttcaaaaagaagttgatagagccaaaaaagctgcggttagagattatacatttacaaatagagattatcttgaaagagtgactgttttagctggtgttgagagtgaaggcgctgttattagtagctcagaatcttatcttaatgatattgattttaatgaaatttttgaaaagaaaagagctgaaattagtcagtcagtcactgaaaaactggaaaaaatcaagtcactacccaatcttgaactatccgatgatattttaaattcattcagagagaaattagcagaagaagaaacacgcaaagttgcttatgatataatagatccggagttaatcgaaaaaagacctcatcaagccagagctactttgcgagatatacttaccaaaagagctcaggatatggcagctaacttattaatagaaaatggatttaatgaaaaaggaacagaattgtatagtatttttcgttattccattcgatacttaaagccaacagatgcgaatgatggtatactcgtgcgcttcatttttgcaaaattagctcgcttatatgggcctgttaatgaaagagataatcaaaccttgctactttctatcaaagcacttgatgagttagtaatggaagttgagaggatgataaagaatgtccaataa

SEQ ID NO: 304214 - DNA, 2973 bp, Proteus mirabilis; identical to SEQ ID NO: 56202

SEQ ID NO: 304215 - DNA, 558 bp, Proteus mirabilis; identical to SEQ ID NO: 25161

SEQ ID NO: 304216 - DNA, 474 bp, Proteus mirabilis
gtgaagttatcactaatggctgccaagtcgaagaacggtattatcggtaatggaccagatattccatggagcgccaaaggcgagcaacttctatttaaggcaattacatataatcaatggcttttagttggacgcaaaacttttgagtcaatgggctctctcccaaatcgaaagtatgcagttgtaactcgctctaatttttctacgaatgatgagggtgtaatggttttctcctcaattcaggatgccttaataaatttagaggaaatcacggatcatgttatcgtttctggtggtggtgaaatatacaaaagcttgatttccaaagtagatactttgcatatttcaacagtcgacatcgagcgagatggagacatagtttttcctgaaatcccagatacattcaagttggtatttgagcaagatttcgagtctaacattaactattgttatcaaatctggcaaaagagttaa

SEQ ID NO: 304217 - DNA, 840 bp, Proteus mirabilis; identical to SEQ ID NO: 6027

SEQ ID NO: 304218 - DNA, 426 bp, Proteus mirabilis; identical to SEQ ID NO: 25795

SEQ ID NO: 304219 - DNA, 276 bp, Proteus mirabilis; identical to SEQ ID NO: 25796

SEQ ID NO: 304220 - DNA, 1680 bp, Proteus mirabilis
atgattaaacaaaataaaatattaacacttcatgagttatttaaattttgtgaagcgaacggtgtttttcgattagtcaaagtcgaagaaaacgactcatttgttaaaattattatctgtggcgtttatcaaattaggcttaataaaaaaacacaaaaagtcacattgcatacgtggttttttacaaacttagagtcaggcgagtggcgagttagaaaatcattacctaaccgaatcccttgtttttggaaaaatgaaaatatatataatatacaatattggttacaaagtgcagtaacccatgttattgactcaatagtgaaatcaaattactcgatcagtggtatatgttatatgtataaatcattttatggagggattgaaacgaaaatacttcttgaagatatacaaccagattttgatacgactagtgaaatgtttgaggaaaaaacctttttttatcctcattatttagcgggtatgagtatgagtaaaatgcgtcatgatatttgcataaaaattatgactagaataaatgcatttattaataatgaaacccaaaaatatgcaagcatgagtttatccaaaaatatatggaaagttattgataagggggtattttctttatacggaaaagcacattttaattccttcgtacgtaattcaatattagatgctaattttttggattattataaattctcaaaacagatacgcatcaatgataatgtcgattataaaggactttggttgatgataggttttttacggaagcaaaaaaaatctaattatcactatactttaacaggtaaaataaaagacctgtataaagagctacaactacctgaatcaatttcttacggggattttaaatatatgtacacattaaagccctcattaatcgcacagttaattgaatttataagtctacgtgacagatatcggtttggtataaatgataaaattaaaataatcatgaaattactcaggcagcctgaaattaaaaaataccctactaaggctatttttgattttttagagaccgtatggaatggtttacgcgttgaacatggttatacttcggtttaccgcattgcattaaaatggctcgattatcatcaagacctttataaaaatattggttataaatcggtaacaagacgctggaacacggaactaaatcgctttgcacatgctatagaatgggtgtttaacaccgatttttacatccaaaaaaatcagtctttagcttctatctatcgattatcagaagaatgggttgaagaactcaatcatgacgattatgactatgcagaaatttcccctcaatggaatggtattgatattgattggcaatcgtgcatttctgaaatgacggtaagtgaaattacgacactagaacaactaaaaaaagaaggtcaagaaatgcatcattgcgtttattcctacgctcatgattgcgccaatgaaacatatcgagttttcactatcataaataatgatgaaagagccactttagggatttcacaagtcgaaaaccataaaatattcaaatttgaccaagtaatgggagtatcaaactctgcggtttcaagtgaaataataaaaatgagtaaaaaagtattaaatcaagtcaacagcaaaataaataaagttaatttaattaatttaggagagtaa

SEQ ID NO: 304221 - DNA, 195 bp, Proteus mirabilis; identical to SEQ ID NO: 298995

SEQ ID NO: 304222 - DNA, 2355 bp, Proteus mirabilis
atgacataccacacagagcaaggctttattcttacccgccattggagtgataccccacaaggtatcgctgtctcctattggttggcgacagaaaatggaccgcgtaaagtcacggttgcaaagcagtatgctattggttttgttgcccaacaaaatgaaagtatattacgctcagtggttggtcataatcgcgatattgatattcgtcctctggcgttaaaagactttgaaagacaacctgttttgggggtttattgtaaacaataccgccaacttacccagcttgaacagcaattaaaacagtataatattcgcctgtatgaagccgatatccgcccacatgaacgctatatgatggagcgttttatcaccgcgcctgtatggtttcgttatcaaaatagtcatactgtcacgctaaaacctgccagtgattatcgtcctacattacgtaccgtctctttagatattgaaaccagtgagtttggtgagctttattctattggattagccggttgcggtgataacgttgtttttatgcttagtgacaccctcccagaagttcaagaaagccaacaacctgaaggctatcgtctgtgctatgtaagtagtcgattacaactccttgaaaaactaaatgcttggatacaagagtacgatcctgatgcgattattggttggaatcttattcaatttgatttgcgtatcttgcatacccatgctcagcgttacgggatcaatttattattaggacgacaaaataccccattagagtggcgtgaacatggctttaaagcggggcacttttttgcctcagcacaagggcgtttaattattgatggtattgatgctttaaaaatggcgacatggaattttccctcttttagcctagagtcagttgctcaaacactgttaggggaagggaaagcgattgatacaccttatgccagaatggacgaaatcaatcgccgttttaaagaagataagcccgccttagcgtattataactggcaagattgtgtcttggttaatcgtatctttgataccacacacttaatggaattcttattagaaagagccagtgtaacaggactggcagcagatagaagtggtggctctgtcgcagcatttactcacctctatttaccctcaatgcatcgtcttggttatgttgcccccaatcagggtgaaaaacccgaagagcatagccctggtggttttgtcatggactcaacaccgggtctctatgactcagtggtggtactggactataaaagcctatatccctctattattcgtacctttttaatcgatccggtgggtatgattgaaggtatgcatcaccctgatagcacacatgccgttcccggttttcgtcaagcgtggttttcacgagaaaaacactgtttacccaccattgtttcacaaatctggcatgaacgagataatgctaaacgtcataacaacgccccgctctctcaagcattgaaaattattatgaatgctttttatggtgtattaggctcggtaggctgtcgtttttttgatcctcgattggcttcatcaattactttacgtggtcatgaaataatgaaaaagacccgtgaattaattgagtcaaaaggctatcaagtgatttatggtgatactgattctacttttgtttggcttaaagccgctcataacgaagtacaagcagagcagatcggccgtcaattagcgcaagatgttaatcaatggtggaaaagctatctgactgaaacttaccagcttgatagccaattagagcttgagtacgaaacccattatcgccgattcttgatgcccactattcgaggcatggaaaccggaagtaaaaaacgttatgcagggctaagtcatgataaaatggtgtttaaaggattggaaacggtcagaacagactggacaccactggcgcaagcgtttcaaaaagagctttatacacgcatctttaatcagcaaccttatcaacagtttattcgtgattatgttgctgatacgctattaggaaaatatgatgataggctggtttatcgaaaaagattacgacgaaaattatcagactaccagcaccatatcccccctcacgtcaaagcagctcgattagcggatgactataatcagttacaaaataggccgcaacaatatcagcaaggcggttggattagttatataattactcacttggggccagagccgttagagcatatcacttcgacacctgactatgaacactacattaataagcaattaatgccgatagcagatgctattttgccatttctacaagatgatttttctaccttgttaaatgggcaaatgacgctctctttttaa

SEQ ID NO: 304223 - DNA, 2904 bp, Proteus mirabilis
atgccttttactcttggtcaacgttggattagcgatacagaaagcgaacttggactaggtactgttgtggcaattgatgcccgtatggtgaccttactttttcctgcatgtggcgaaaatcgtctttattcccgccatgatgccccaataacgcgggtgatgtttaatgtgggggatactgtcaccagtcatgaaggctggaagctcgccatcgacaacgttgtggaagataatggcttacttatttatcacggcgtacgtttagataccgaagagccagcacaactgcgtgaagtattcttagataacaaactcacttttaataagccacaagatcgtctttttgccggtcaaatagaccgtatggatcgttttgctttacgctatcgtgcgcgtaaatttatgagcgaacagtttaagcaagcacaaagtggtctacgtggtattcgcgcaagtcttattcctcatcagctctatattgctaatgaagtgggtaaacgtcataacccacgcgttttattagcggatgaagttgggctgggtaaaactatcgaagcgggtatgataatccaccagcaaatcatggatggacgcgctgagcgtgttttaattatcgttcctgaaagcttacaacatcagtggttagttgagatgttacgtcgtttcaacctacgtttttcactgtttgatgatagccgttatagcgaatctttattagatagcgataatcctttcgaaacagagcagatgatcatttgctcattagactttgtgcgtaaaaacaaacaacgctttgaacaccttgttgaagcgacttgggatatgttagttgtcgatgaagcccaccatctggtatggagtgaaaaggcaccaagccgagaataccaagttatcgaaacgctggctgaagcgatcccttctgtattgttattaaccgcaacaccggagcaacttggtcaagagagccattttgcccgcttacgtttgctcgatcctaatcgtttccacgattacaacgaatttattaatgaacaacaaaaatatcgccccgtggccgatgcggtaaccattttgctttcagaagatgatttaaataacgaacagcaaaatagcatcagtgagatgatcagcgagcaagatatagagccgttgctaaaagcctctaatacccaaggtgaagagcgtacaaaatctcgccaagcacttattcatatgttgatggatagacacggtacgggtcgtctgttatttcgcaatactcgctccggcgtcaaaggcttccctaaccgactgttgcacgcaataaaaatgccactaccaactcagtatcaaaccgccattaaggtggctgagattatggcagcgaaaaagagcctcgaagtacgagcaaaagagatgctctaccctgaacgtatctaccaagagtttgaaggtgaaaatgccacatggtggaactttgatccacgcgttgaatggctactaggctttttaaccgccaatcgtcatgaaaaagtattagtcatttgtgctcaagccgccacagcattgcaattagaacaagttttacgtgaacgtgaaggtattcgtgctgcagtattccatgaagggatgtctttacttgaacgagatcgtgcagccgcttatttcgcctcagaagaggaaggcgcacaagtgttactatgttctgaaatcggttcagaagggcgtaacttccaatttgctaatcaactagtgatgtttgatctcccctttaatcctgatttattagaacaacgtattggtcgtcttgatcgtatcggtcaaaaccgcgacattgatatcagtgtgccttatcttgaaggaaccgctcaatctgttctattacgttggtatcacgaagggttagatgcatttgaacatacctgcccgacgggtcgtacaatttatgacaacgaatatgatgcgctagtcaattatcttgctcaacctaatgaactaggtgattttgataagtttatcgtttcttgtcgtaagcaacatgatgagatgaaactcaaactagagcaaggtcgtgaccgtctattagaaatgcactctaacggcggtgaagttggcgttgagttagcgaataagattgcagagcaagataacgatcccgatctggttaacttcgccttaaacttatttgatattgtgggcattaaccaagaagatcgtagtgatagcttaattgtattaacgccatcagatcatatgttagttcctgacttcccaggattaccacaagatggttgcacaattacctttgatagagagcacgcactctctcgtgaagatacgcaatttatcagttgggaacatcctattatccgtaatggtttagatttagtcttatctggtgatacaggtagttgtgcggtttctttattgaaaaacaaagcattacctgtaggtacgctattagttgaactgatttatgtcgtagaagcgcaagcccctaaacaccttcatttaactcgcttcttaccggcaactccagtacgcttattacttgatttaaaaggtaataatcttgcatcacaagttgaatttgaaagttttaaccgccaattaaatgcggtgaatcgccacacatccagcaaattggtcaatgcggtacaaaatgaagttcatcatgtactaaaagcatcagaatccttaatggaagcggaagcgaaaacgctaattgaacaagcgaagcaagaagcagacaacgcattaacacatgagttatcacgcttagaggcattacgtgccgttaacccaaatatacgtgatgacgaagttgaagcaattgaaaatgagcgtacgcatattcttaaccacttagatgaagcgacatggcgcttagatgcgatccgtttaattgttgttacccaccaataa

SEQ ID NO: 304224 - DNA, 801 bp, Proteus mirabilis; identical to SEQ ID NO: 296989

SEQ ID NO: 304225 - DNA, 1230 bp, Proteus mirabilis
atgtatctattttcaccttatgatgtagaacgagtatatggcgttcctatgtcagaaatcagtattagcgaaaaatatactgaaatggtcaacaatgcagagatacgtaagaaaaaaattaaagcacgggcattttttcaaactttagctgaaattcaatttgaatcaggttatccctatattatgtttgaagataccgtcaatcgcgcaaatccgattgcgggccgaattaatatgagcaatttatgctcagaaatcttacaagtaaatagtgccagtgaatacaatcctgatttaagttatcgacaaattggtcatgatattagctgtaatctcggatcaatgaatatcgctatggcgatggactcaccagattttgcgcataccgtaaatgttgccatcagagcactgacgagtgtggcacaaatgactaaaatagaatcagtaccttctattgaaaaaggcaaccaagcatctcatgccattggtttagggcaaatgaacttacatggttatttagcccgtgaagggatttattacggttcagaagaagggcttgattttaccaatatctatttctataccgtaacatactatgcccttttagcctctaaccaattagcgatagagactaaacagcgctttaaagggtttgaacagtcaaaatatgccactggggagtattttgataaatatttatcaaaacagtggttacctaaaacccaaaaagtccaccagctatttagccaatccaatattcatattccaacccaagaagattggcaaaaacttaagctctcgattatgactcacggtatttataatcaaaacttacaagcaataccgccaacaggatcaatctcttatatcaatcactctacatcgagtattcaccccattgtggcaccgattgaaataagaaaagaaggtaaaatcggtcgggtttattaccccgccccttttatgaccaatgaaaaccgtcatttttatcaagatgcttatgaaattggcgcagaaaaaattatcgatacctatgcccaagcatcacaacatatcgaccaaggattgtcgctaacattattcttttctgatgaagcaaccacaagggatgttaataaagcacaaatttatgcatggcgtaaaggtataaagaccttgtattacattcgtattagacaaacagcattagccggcacagaaataaaaggctgtgtttcatgcgccctttaa

SEQ ID NO: 304226 - DNA, 756 bp, Proteus mirabilis
gtggtcaccgatcaccaaggaaccccgcgagagatattcagtgaaggcaggcaagccagttgggcaggacggttgaatacgtggggccaaatgcagttttggcgttactgcgagggtaaggcggagaatgaccctaattataccgaatgtccttttcgctttgcggggcaatatgaagatgaagaaagtggcttgtattataatcgcttccgctattatgatagggaaacagggcagtatctttccccagaccccatagggttattgggtgggctgaatccgtatgggtatgtgcattgtccgacgggttgggttgatccgtttgggttggagtgttgtccaggaaaaataactggagattctaagactctaagagaaaaaattaatttagctcgatcaggagatgtttctgctcaagcagaattggcttatgctaaatatatgcgtgacaaaggacataacattcattttaatacgcctccaaatcgttctatatcaatggctgatttcacagtagatggggttcaaattgatactaagctattaagtggaataggtggtaatgcagctaaaaatattacgaaaggtgtaagacaagttggtgataatggagtggttcaagtaattagaaactcagattcacctataagcttagaacaatttcaagggtttattaatggatataagtctccaaacccttcagttaaagttgagctaatcgatcaatcggtcctgaagccttactgggatttttaa

SEQ ID NO: 304227 - DNA, 609 bp, Proteus mirabilis
atgacattttttgaacgttggttacaagagataccaacaagggaagttatggatttccctgaacactataagccaaatgggtggatttatattttaagcaataaatctatgccaaacctatttaaggttggattaacaacaacaagcccaaaaatgagggctagagaattgtcttcatcttcgggtgttcctgaaaaatttgaaattgaacgagtgtttatatctgaatcaccatcagatcatgagaggttaattcacaaggaactggggcggtatcgagttaacgacggaagggaattctttaaatgcccaatcagtaaaataatttctgtatgtgaaagaattattccagatggaaatgcaaaaatagtcaatgatctttctgataaatataacttcatttcttttgagtctcttggtgatccatctccaagtgagatcatacaaacatttggcattaatcatttcggtgatgataaatcgaccctaataagactagcaatgtttggggctgaatttgttaggcatctaacaagaaatggtggtgctgttgtgcttgatgatcacaaattcaatatattgttaccggagggaaccgatgaaatctaa

SEQ ID NO: 304228 - DNA, 912 bp, Proteus mirabilis
atgaactttttcaaaaatgcgattgtatatcgtatgactcgtgatattcaaatttcagcagaacaacttgaagaggcattaaaaactttagcatttacaccatgtagcagccaagatatgagtcgcactggctgggtgtcaccacttggtgatcacggtcagatgttaactcacgttgctggcaatcagattttactctgcattaaaaaagaagaaaaaatattgccatcgacagttatcaaggaagccctacaagaaaaaattgaaaaactagaaagtgaacaaggtcgcaagctgaaaaagacagaaaaagcgacattaaaagatgaagtcattcactctctcttgcctcgcgcattcagtaaatattctcaaactcagatctggattgacttggataaacaaagaattatcgttgatgccagtagctttaaacgcgcagaagattcacttgcattacttcgtaagacattgggctcattgccagtcattccacttcacaccgagaaaccagtcgagctaacacttaccgaatgggttcgtaataatgataccccagcaggatttatgcttcatgacgaagctgaattaaaagcggtgttagaggaaggcggtattgccaagtttaaaaagcaagatttagcttcagacgaaattgctacccatattgaagccggtaaacatgtcactcagttatccatggagtggaaagagcgtatcaacttcacattaaccgatagctttatgcttaaaaaaatcagcttatcggatgttttgaaagagcataacgacgacattcatcatgatgattatgctcaacgatttgatgctgatttcattttgtttactggtgaattttccgtgctgatcgatgaattagtgtctgcgctaggtggcgaatctaaggcttaa

SEQ ID NO: 304229 - DNA, 270 bp, Proteus mirabilis
atgacgcctaaagaatacgctgcaataacagctaaaaaaataaaagaaacaccatattcttcagttgagttaatagaagaagcagaacgtgttttagaaaaatcaaatattaatgaagatagtaaaaaacaattctggattgaattatattcagaactgactgatttatttggaattcatctatcttttggtatggaaagccaaggctctggtgaattgagtaaaatagtggctatggctaaagcaatcatcactaaaaaggcaagctaa

SEQ ID NO: 304230 - DNA, 462 bp, Proteus mirabilis
atgcagcaagatctctataatttgttaagtttaattacgtacattgtatcagccgtaattgcgctacttatgttgtggagtgtgagaggtcagataaaagaagccgttgagtcaaataaaataaacactttaaactctttgcttgctttagaagctcagatagctgaacgacgcagggaattaagttcagcaggaatttctctaggtaagtttgacactcaagaagtatctgaagaatatactgctgccaatcttagattcggtgaagctgtacaaatgtacttaaatggactagatagactttgctattgcgttaagaaaaaatacctagataacaatgatatgaagctagaatacagaactataatttctgacgctatagctgaccaccctgaaaaattcacagcaactacaatatatacaaacatattagatattaatgaacaatggaaacgaagttaa

SEQ ID NO: 304231 - DNA, 285 bp, Proteus mirabilis
gtgacatatcaagaatatgctaaaaaagtagctaacgagttatcttccaatatctctgactacaaagaaatcatttcaaaagcggaacaaaaaataaaccaatccggtatctctgaacagagtaaaactaaattctggttagagctgagtaagcagtttgaattaaataataaacttgaatgtgattactcaaaaccacatgcaattagcgaaagtcaaggtgctgatgaattaagcaagattatagcaaaagctaaatctgtaattgctcaaaaaacgaaatag

SEQ ID NO: 304232 - DNA, 408 bp, Proteus mirabilis
  misc_feature (392)..(401): n is a, c, g, or t
atggcagatatagcaacaatatcattaaaggctgatacgtcagatctggagcgtggcacacaaaagttaaaggagttcggcgatacagcagagaaggtaagcggttcttcgcgaaatttaaatgaccagtttaatagaggggttgctcatcaaaagagagcagccgacgcgataaagaggcaaaagaaagaacttgatgacttattaaattcaataaatccaaccaataaagcatttgatgcgcttgataaagccactcaaaaattaatagaggcaaataaaaaagggatattaccaaaggatcagtttgcagactataacgccatacttgagcagactagagactgtctcttatacacatctccgagcccacgagacgtagaggaatctcnnnnnnnnnncaaatag

SEQ ID NO: 304233 - DNA, 357 bp, Proteus mirabilis
ttggtctttgtcacaaaataccggcgaaaaatatttgatcaggatgcaattgaaaaattgcgaggctactttgccagtgtttgtgctgattttgatgttgaactggttgaaatggatggggaacgggatcacgttcatttactgattaattacccgccaaaactggcgatatctaatctggttaacagccttaaaggggtatcgagtcgattacttagacgtgatcgtcctgatattgtccaacgttattactacaaaggggttctttggtcgccgagttatttcgcggggagttgtggtggcgcaccaatatctattatccgccagtacattgagcaacaggaaacaccgagttag

SEQ ID NO: 304234 - DNA, 471 bp, Proteus mirabilis; identical to SEQ ID NO: 301560

SEQ ID NO: 304235 - DNA, 159 bp, Proteus mirabilis
atgtcatggaaatctttaattatcgttatcagctttattcttgtattacttattacagtcgctgggggcatttatctctcaattgataattcatgtattaacgataaagcaagcttagacaaacgctgtcagatagctctctcacatcatcggtactaa

SEQ ID NO: 304236 - DNA, 228 bp, Proteus mirabilis; identical to SEQ ID NO: 300275

SEQ ID NO: 304237 - DNA, 1041 bp, Proteus mirabilis
atgtacggcgtctatattaaacctgatataggtaatgcatattatttagatgctgatgataatcaggtcatggggtatttaggttcagttaaaatcggattttataattatttttatccaaacaccggatggaatacaatgaagcacaatatccctgaatatgagagatataacattattattattcctagaatagtgtctaggacatataaaatccctggttcgtattattggttctcatcaaatgtaacagattataatatatctagtgataattttaatttttatgttgatgaaagacctgctggctcgcgagttaactcagaggatgcagaggaagatcctgaatttatgtttgatttttatggatatcctaaatctaataatgaatcgtggggtatacgattacatggtatgaatggcattagtgaactaactccttccatgcgtggttattgtgtattcgccgaagtcgtcaaaataaatggaggtcgggataatggctggagaatgccgtcatatattaccagtgaaatgaatcctgtcatatttgtaagacctaaaaattcaagcgccttattttcatataatagagcaaggggattagttgttagtagttcatgtgaaatgtatgtagttatcttttgcaccaatttcaaattagaaccacccaagaatggtatagttatttataacgacaaaaaagaaattacattttcatccaactataagcccatgaaacttggagaaacgacacgatttagtaatcgaaatggagcctcattttctaaacttaagaaacccatgattattccagatgctcaatttgttaactggaaaattcaaggaagaaacagggatgatgttatctatatgcgcacagggtttggattcgaaaatgacggtaatagagtttattgggatgacatatatgccattgggtcagagtatggtggttcttacggtgctgttgggggtaatgcattcagaatagaattcagtatttacggtattgaactcagcgactacttcaatatttaa

SEQ ID NO: 304238 - DNA, 237 bp, Proteus mirabilis
atgattggtgaggcgcgtttaataaaaccgttactgtctaccgttgtgtttttggtgctccatatcgcattccaaggtgtcgtagtatcaacaacatcatttgatgaactgaaacgactcattaatatgccagatgtattcataaataacatagctcggcgatttccgttatatgtagattgccagccggcaccattacttgggaaacctggtacacctgttgatggtgagccataa

SEQ ID NO: 304239 - DNA, 822 bp, Proteus mirabilis
atgatcacttggttacttcttgctttatctttattgttattagggttccatcgcaaacttgcacttactactttagctataaccaccattagcgcatttataacaggtgttatcacttggtatgtacttccggttatattgagcttgattttactctcttgtgcatatcgccattacaaaacaaatcgtcttattgccactattgttattcttgcatttatcgccattattgttgggttaacttttcattttattcctggttttaataacttacgctacattaaacatgttccattagggcaatatagcccccctttctctttttatttcaatgccgataaagcagtaatcccttttattttaatgatttttattcctacattatttaaaacggaaccagtaaaaaaagccaataaatatcaatgggttttactggctatggcgatccccgcactgttattattcgcaatggcattgggtggactcgctattgaattacatttaccacaatggctacccgcctttatgttagcaaatattttctttgtctctcttgctgaagaagcactatttagaggagccatacagcaaagtctatctcgctatttatctccctatctcgcgctatttattaccgctattttatttgggttagtccattttgccggggggatattactcattatcttcgcctcattggcaggtattatttatggcttagcgtggatgtggagcggtaggctttgggttgctacactctttcattttgcactgaatctcactcacctgctctttttcacttacccttttaaaatcgcgtaa

SEQ ID NO: 304240 - DNA, 1281 bp, Proteus mirabilis
atggggaaagcatctttcgctacattgcaagacatgggcggccgtatccagctttatgtctctcgtgatgatctgcctgaaggagtttataacgagcagtttaaaaaatgggatctcggtgatattttaggtggccgtggccgtgtatttaaaaccaaaacaggcgaactgagtattcattgtactgagttacgtttactgactaaagcactacgtccgttacctgataaattccacggtctagctgaccaagagacacgttatcgtcagcgttatttagacctgatctctaatgaaaattcacgtaatacttttaagatccgctcgaaaatcatgtctgctattcgccaatttatggtgaataaaggctttatggaagtagaaacaccgatgatgcaaactatcccaggtggagcaagtgcacgtccgtttatcactcaccataacgcgctagatattgatatgtatctacgtattgcacctgaattatatttaaaacgtttagttgttggtgggtttgatcgcgtttttgaaatcaatcgtaacttccgtaatgaaggtgtatcaccacgtcataaccctgagttcacaatgatggaactctatatggcttatgctgattatcgtgatcttatcgaattgactgaagagttattccgtacattaactcaagatgtattaggttcgactatcgttaaatatggtgatgaagagtttgatttcggtaaaccgtttgaaaaactgaccatgaaagaagctatttgcaaatatcgtccagaaaccaatatggctgatctagatgatatggataaagccgttgctattgctcaatctattggtattaagattgaaaagagttgggggttaggccgtgttcaatgtgaaatttttgaagaagtagctgaaagtcatttgatccagccaacttttatcattgaatatccagcagaagtttcaccactggctcgccgtaatgatgataatccatttattaccgatcgctttgagttctttattggtggtcgtgaaatcggtaatggtttctctgagcttaatgatgcgcaagatcaagcggagcgttttgaagagcaagtgcgtcaaaaagaagcgggtgacgatgaagccatgttctttgatcatgactatatcactgcattagagcatgggttaccacctacagcaggtttaggtattggtattgaccgtatggtaatgctatttaccaatagccatactattcgtgatgttattttattcccagcgatgcgtccgggaaaataa

SEQ ID NO: 304241 - DNA, 534 bp, Proteus mirabilis
atggttgttatagcaagaccactagaaggttttgtttccatttgtcatgacgatgaacgagctgttaacgctttaatgcattatttccatcgagacaaacattatcaacatataagttttatcgggatccaaattaatgatgaaacaacgggtttattacgttatcaaacttatcttcaatattgccagcaacatcaattaatatctcaagctcaacttggtgaacttaattatcaaagtggctatttacttgccaaacaagcattagcaagcaagcctcaagctattttatgtgcgaccgactctctggcctttggtgtacaaaaatatttagccgaacagaaaatagatcatattgaggtggcctgtatcggtcgtaatgatctactcacctttttatttcctcaaactaaattctatcgattaggttttagagaaagtggacaagaagctgctaacatattgatacaaatgctagaaaaaaatattcctgcacaaaaaatcattatatcaagtcatgacttaaacccatga

SEQ ID NO: 304242 - DNA, 501 bp, Proteus mirabilis
atgatgttaataggtattatgattattggaggagcatgtttaatcggtcatcaaattgattatcagtggcgagctaatgatttctttattgtcatatctatgcaagcaatgggggaatgtttgctacttatcggattaattgcctcatttgttactaatatcaagccacaagaagcgttacatttaggggcatatatttcgatagcgagagtattaatgccagcccttgcaggagctattatcaatacttatttgaggatctcatatgatactcattatgatttgttaagaggatacatacaaactggtgagcaaaaattagcagggaatattgctgaacattatcaaacaacgatggcattagtaataagagaagcacatgttgcctcttttattgatggttttgatttgattatgctcttggttattttaggtgctctttgtatgtcatttttaaaatcgtcaccagaaaatccggtagtcccaaggctagtaaaataa

SEQ ID NO: 304243 - DNA, 1236 bp, Proteus mirabilis
atggcatcaaatcaacctgctttatttcatatgatggcaaagccgacaagctaccactgtaatattaaatgtgaatattgcttttatctggaaaaagaaaatatttttcaagatgagacaaaagaaacaggccatacagtgatgcctgatggtgtacttcgtcgttatattaaagactatattcagtcacacagtggcgatcaggttgattttgcttggcaaggtggtgaaccaacgcttgcaggattagccttctttgaaaaagtggtcaaataccaaaagcaatttgctaacggcaagacaattaccaatagtgtacaaaccaatgcgattgccattaatcgccaatgggcacaattctttgctgataaccactttctattaggcgtttcaattgatggcattgaagccgttcacgataaatatcgtatttcagtcaatggtagcccaacatttgaacgcgtaaaacgcgccatcaatttactaaatgagtatggtgttgaatttaatacattaaccgttgtaaatgatcaaaactggaataaaggaaaagagacttatcaagctttaaaaaatttaggttcaactttttttcaatttattcccatagtcgaagtggatagacgtttcccacacactcatggcggacattatgctcccggtcctaacgcacaattagcggctttctctgttcccgctgaaggttacggaaaatttatgaccgatatattcaatgaatggatacgccaaggtgatgtaggaaaaatatacattcgcttatttgatagcttattagggacatggatgggatatcctgcatcaacatgtattcaatctaaaacttgtggtcaagcattaattattgaagccaatggtgatgtttactcttgtgatcactatgtttatcccgctaataatttaggcaacatacaactaacaagtcttgcacagctcgcaacatcaaaaacacagcaacgctttggtcaaaataaatacgataaacaaaccaacctttgcaaacagtgtgaagtgcaaagcttatgttatggcggttgtcctaaacatcgcattattgcgatagaaggcgaaaaatatcgccacaattatctatgtcactcttataaaaaaatatttcatcacacggcaatcggcatgcaattaatgcgtcaagcgatagctcgtggaggccttgccagtgatgcacttgaggcgatgcaaaaaaactatctcaagtga

SEQ ID NO: 304244 - DNA, 147 bp, Proteus mirabilis
atggaagcgccttggggagagctacaacgttttcaagccggtgatgcagttgtgcaatctaccaccgataaacaagatatttatcggatccaacaggccgcttttaaatgcacttatactattttaaaaaccgccaaagagatttga

SEQ ID NO: 304245 - DNA, 675 bp, Proteus mirabilis
atgcggatcttaattattgaagataatatcttacttcgccatcatttatctgtgcagtttcgcgatgcaggacatcaagttgatgcagcacaggatgcgaaagaagccgatcactttatcgcagaaagtacacctgatgtcgccattgttgatttaggtcttcctgatgaagatggtatcagccttattcgtcgatggcgggaaaataatattactattcccattatggtattaacggctcgagaaagctggcaggaaaaagtgaccgcattaaatgccggtgctgatgattatgtgacaaagccttttcattttgaagagatcgtggcacgcgttcaggcattaatgcgaagaaacatgggcattgcatcacaaatactgactattgccccttttgagttggatttatcacgtaaagagttcatgatcttaggtgagcaaatcaagctcactgcattcgaatatactattttagaaacattaatgcgtaatcaaaacaaagtggtgagcaaagatgtgctaatgcgccaactttatcctgatgcagagcagcgagaaagtcataccattgatgttcttatggggcgtctgcgcaaaaaaattctccaaaaatatgataatgatgtcattgtaactgtacgtggacaaggttatcgttttgatatgaaagcttaa

SEQ ID NO: 304246 - DNA, 1464 bp, Proteus mirabilis
atgcataaaaaacaacgttcgcccttctctttacgaacaagatttttacttgccaccagcgccattattttagcactgacactctcttatggtttggttgccatagtcggttctattgtcagttttgataaaacgacttttatgctaatgcgtagccaaagtaatctctactatagcttagcgcaatggaaagatgggcaattgcagattgaatttccgactaacctcaataacaacaacacatcgctggtggttattttcgacgagaaaggcaatgtgctatggacgccaacggatttacctcaggtgatcccaaacagtatcgcgccaaaatggcgcaataaagaaggcttatttgaaattagtgtgaatgttaaaacgacacgttttatgttacagcaactgcctcaatatcgagcctatctaaaaaaactcaacgaatattcaagtaatgataccttaacgcattccgtggttattaatcactatcctgcggcggataatatgccttatctatccattgcggttatcgatcctattcctcaaagtctgcaaaatgtaagtagagtctgggattggtttctctatatattactagctaattttcttttggtgatcccattaatttggttagcagcccattggagtttaaggccgattaaatccattattgagcagatcagcgcgttggaaaaaggcactcgcgataatttagatgaaaatcctcctaaagagctcaaaggattagtttataatctcaacattttattgcgtaatgaacgcaaccgttatagtaaataccgtaccagtttatctgatctgacccatagcttaaaaaccccccttgctgttttacaatcaacattacgtgctctacgtgctggcaaacaaatgtctatagaacaagctgagccaattatgcaaagtcaaattgaacgaatttcacagcaagttggttattatttacatcgagcttctcttcacggcgatcacgatataacaacacgcaagctccactctttatcaggcttacttgacaatctttgtagtgcacttaataaggtctatcaatccaaaggcgttgatataacgttaaatgtttcccctgaaatgatgtggttaggtgaaaagaatgattttatggaagtcatgggaaatgtacttgataatgcttgtaagtactgcttagagtttgtcgagatcaatgtaagtcatgatgacaattgtgtgattatcaccgtagatgatgatggcccaggagtcagcccagaaaaaagggagcttatttttcagcgtggtacacgtgcagatacattgcgcccaggacaaggcttaggattatcaattgctgttgatattattgagcaatataacggtgatatcaccattactgatagtccattagggggggcaagactcatcgtcacctttgctgagcaacaactcactactgaaatagagtaa

SEQ ID NO: 304247 - DNA, 330 bp, Proteus mirabilis
atggaaaataaacagaatccaagaggattttttgataacggaaaagcattctttgaacttggtggtaatgcaataatgaaattatcaccaaaagctgcaattgaagtgtgtcaggaggccaccaaacgtaacctgtggattttaggtgttgatggtggtcactggttgaatccaggtttccgccctgacggaagtgcatcctggtcaggtaaaactaaattatttaatgaaaataaactttcagaaaataatcagttagcgattgaaaatatctgggatgatgaggcagccggatatacagcatttattgttacgcttaaaatgccttaa

SEQ ID NO: 304248 - DNA, 1602 bp, Proteus mirabilis
atgagtgatactatcactgttaccggtacacaaccgaccgggccgggtaatccggatccaatccccggctcaggcggtatcggccgtattccggtcattcctaaccccgggttattgccaaggctggaaaaagcccggaaaaatccggaaaccatcgctgaaattgattcgaagattctcagtgcaaccgcgatagctgcgatcccgacactgaatggctctgctgtctggggatttacatataccactgaggctgccggaactgccggggcttatctcgggctgaaagaactcagcaatttaatcacaaaatcactggacaaagcagtcagtaaatcacttccggttctgggacgaatagcgggtgttgccggtctgctgttttacccgaacaccagtatcatgtctgaaaaagatgaaatgcgtcagctgaatgactggcggacagcgtacggatctgcggataatgcttaccgagttgtggttactgccgcagatatcatcagccgggtgccggaaaaaagtattccgcagagtgccgccgttgaaagtcattttcagatgcagacagtgattgatatcaaaacggataagcagattatcgccgccacaccggcagccggaaagattccggtgattaaagcggtgaaaacagataaaccgaacgtgtttaaagcgcagattgtgccggatatgccgccgttttatatcaaaatggaaagtgccggtaatgcttctgcaacggcggtaccggttccggctaaaaatttaaccgccacacaatatttaccaacaccggctcccgatactcatcaggctttcgtctggtttgagggggcgcctgatatccggccggtttatgtttccgcgtcaaaaatcctgagtgagacagagcagaagacgcaggcggcagaagcgaaaaaacgggaacagcaaaaactgaccgaacaggataaagcgcttattgctgctgagcaggaactcagtgctgcggttgcggcgctgactcaggcacagtcagaagaaaacgcccgcaaatcaaaagtggcggcggcacagaaagcctatgatgttcagaaggccgaatatgatgactggctgcggcgttttccgtcgggttttgtgatgctgaatccgattactccgctgaatattcataacgtgtacgggtcgaagaccaaagcccgggaagcggaactgaatcaggcgaaatcggcactggcggtggcggtggaaagccgcaaaaaggcggaaggtaagaaaaaagccactgaggataaggtcaaggaagcaaaagacaagaaaggaaaaacacctgaactcaaatttgaggaaaaaattaaaaaccaaatgggaggacgcggttggaccgaacaggatatcaaagatacggtagccaagggtccgacaggaaagtcggttgatcaacgtagacctaaaaatacagatgatggcttagggcgaaatgatccggcgactgtgtacggtgaacctggaaaatatgtagtggtgaatgatcgtactggcgaagttgctcaggccagcgataaaaaagatcctgagtgggtcgatgattcgcgcattcaatgggagaaaaaataa

SEQ ID NO: 304249 - DNA, 303 bp, Proteus mirabilis
gtgataacggtattaaccacagatatttttgatgactggataggtgcgctaaaagatatccgtgcgaaaacaaaaattcaggcgcgcatcaggcggattaaaaacggtaatttcggagatattgagccgataggcgagggattttctgaactgaggatacatgagggaaagggttacagggtttatttgcgaaaaacaaacacatttattgtaattttactttgcggcggggataaaaccacgcaacaaaaagatatcgagaaagctaaattaattttcaaagaaatcgagggtgaagtatga

SEQ ID NO: 304250 - DNA, 696 bp, Proteus mirabilis
gtggaaaaacttatagcagtaaaatcaaatgctttagttgaggctagctataagctaacacttcaagagcaaagattgttattgatgtgtattgggcgattaaatcctcgggctgacgttttggaaaaaaactttcaaataactgctagagatttttatcaagcatttccagatattggattaagcaatgcagaaagacgtttacaagaagcgattgatcgacttggagaacgttggatattgattaattggaaaaataaaaaagaagaaattcgctggattcaacgtaaagctagatattttgaaggtgaagggaaaattgaaataacattttcagattcaattatgccttatctcactcaattacaagaacaatttactcaaattactataaaaaatatttcggctttaaagcggacatacagcatccgcatttacgagttattaatgcagtttaaaagcattggtgaccgcatcattgatattaatgatttccgttccatgctgggagttgaggaaaaatatagagattttcctattttaaatcgcgccgtaataaaacccgcaatcaaagaacttaacgagaaaagtgaccttgctgtcactgttgatacagtgaagcaagggcgcaaagtcgtcgcgctccatttccgatttacggaggacaaacaaatcaagatggcaatcggaaagtaa

SEQ ID NO: 304251 - DNA, 1311 bp, Proteus mirabilis
atgcttaaaatagaagatatctttggagttagtggaaagcaagttggaagctacattgagcgtgaccatgttgatgcaaagctaatagatgcattaagaacagagaagcaaattatagtttatggagcatctaaacaaggtaagacagccttggttaaaaaatatattacttatgacgatcatattttgattagcttatcccctacacacactttaaaagatatatatcaatcaatacttcgaaaatgtaacgttgtactcaaaacttcttatacagaaggtactggagaaaaatataaagcaactggtaaagcatcaattcaaggagctgtagcactaattgctaaagtaaatgcatctttcacaatacaagatgaaaaaaatacaagcaatacagaacactacgatgaaattgaattcaatttagatctgcctgatgatgttgcgtatttgattcatcatgttggtagtaagaaaatcataatacttgaaaattttcactatcttcctgaggaaatacaaagagcatttgcttttgatctccgtacatttcatgatttgaaagtacggtttattatattgggagtatggaaagaagctaatcgacttacccaattcaacggagaactacaagatagaattagtgaaatacctgttgaaccttggctagaggccgattttaggagtatagcaaaaaaaggtggggatcttttaaatatagacattatacctgcgattattgaaaaatgtatctccaactcattcggaagtgtaggtgtttttcaagaattattaaagggatcatgtattgcggatggtattctcacaaaacaagaaacaacaaaacacttcattaatatagatgcagttaatactgcaatagcgatgaaaacaaatgaatattctggacgtcatttacgaaacttagaaactatggctgttgcaaatagtgcatctataactaaaggcaatcctttaccatatttcctaaattattatattgtaatgcacattctttccctaggatatcatggggtaaatggtggaattagcaaagaaaacatccttcatgcattaaaacaagtacatcatagaaaagatgaactaaaaggacaccagttagttactgctttgaagagtctaactgggttgcaggctagtaaaggaataactcctcctgtaattgcgtatgattcaaattctcgacaactaaagattgtagattccactttttacttctttttaaaaaattctgatttagaggaagttaaatcagagataccttgtccaatggatgggctagatgtataa

SEQ ID NO: 304252 - DNA, 291 bp, Proteus mirabilis
atggcgaacttacgcaaagaagctcgaggccgtgaatgccaaattagaataccgggtgtatgtaacggtaattctgaaactgtcgtcttagctcattatcgaatgtctggcatttgcggtactggaataaaacctaatgatatttttggtgcgtgggcatgtagtgcttgtcacgatgaaatagaccgaaggacacgaagtactgacgcggaatacgcaaagcaatgtcatttagaaggcgttattcgtactcaggatattctcatcaaggagggtaagattaaggtatga

SEQ ID NO: 304253 - DNA, 366 bp, Proteus mirabilis
atgaacgagtatcacttaaaattgccgtggccaccgcaaacaaatcatctatacacaatagcaagggggagaaaagtaaaaagcacgaaaggtagaaaattcaacgatgcagtaattactcaaatcaccaaagcaaatcagcagtacaacctatctggcaagttaaaaatcaagattattgccaaccctccagaccgaagaaaacgtgacttagacaacctccttaaagccccattagacgcactgacgcaaagcggtgtaattgctgacgatagtatgtttaaaagcataaagattgtctggggtgaaaaagttaaagatggctcattagatatcacgatatgggagatagatgatgttcactga

SEQ ID NO: 304254 - DNA, 540 bp, Proteus mirabilis
gtgaaaaataaaccaaatgatttatttcaaattggtatcgcagtttgggaccgttattgtaatgctcatccagaacaagataaatttatatttggggaggagtgtagtataagcgatccgtatctttataaaaaagtttcaaaagttattaacgaacctgttattaaagacatcttatatgttcgaggtgatattcaggatccgaaattaaaaaataaagaagcggtagaaataattatagcaaggacatatccaaatattttaatgattgctgatgtaatgatggtaaatccatatgaacccatagttcctcaaaaatatgatttctatgagtatcgtggacttggtcttttttcagaatttttagagaatgctagaaaatattgtaaccagcatcatattaatgaaatttgccttactgctgctaatcttcgattgaaaaagcattttgaaaaatatggttttgttgtacaagatacacgtatgggaaaagccgcattagaattaggtgttggtatacctatgagtttatatatgtaa

SEQ ID NO: 304255 - DNA, 240 bp, Proteus mirabilis
atgggtgtttttgatatatttactagattacctgaattattaaataatgatgaaacagttttatgtgttaatagcggaatcgtaaaatctaatatttggttgatcatacctacaaataaacgaattatttttctgcataaaaaaagtgggattttccataaaaaagttgatttatcttcagtaaactatgatgcaattacttctattgactcatcttccggattgacaggagtaaaataa

SEQ ID NO: 304256 - DNA, 456 bp, Proteus mirabilis; identical to SEQ ID NO: 297827

SEQ ID NO: 304257 - DNA, 1716 bp, Proteus mirabilis
atggcgcaacaagcaattaaaagagcaataacatattcggtcgtaataggtacacttctctcagggcataatgttattgcctcagaaagtgaaacgccactgctattaacatcagaaacacctgcattagtacccgcattcacagaagacgtggcaacacaagatacattaaattcaccatcagtgagtaagcaggaagttagcactaaactacaatcttggttaccaagcgaatataaaccactttactttaagcaactcgtggatgtttatcaaagcaatgatttagcactgatttggcaagatgaacaaattacaaaacaactagagcagcaactggcagaggttgccttaactggaattcaaccacaatttggacgttggttaacgctattagaaacagcacaattaacgccagaagcacgagatattattttatctgacgcttttttaggttatatcagctttgttgaacagattaatcaatcaggaacaacactgttatatcgcgctgcgatacaagcattaccggcaccgactgtgcaagctgtcgagcatttccaactcaatctacaacaaaataccttagggcgctttgtcgtctcctttgcaccctcacacccttactatccattaatgaaagaggaagtgcgcaaacagcttcatcaagaggttatttggcccgtcatggaagggaaaaattcattaaagccaaaccaatcggcagaagaagttattgcattaagacaaatattgcgtaacttaaatttactgcctcaattggctgaaaatgagcaagaagtagcaacaacgatttatgatgagcctttaattgctgctgtaaaatcgtttcaagcggcccatggattagaaactgacggtattattggtagacagacgcgtaattggttaaatatgacaccaatacagcgtgctggaattatggcattaaatatacagcggttacgtttaaccccacctattggtgacactggaatttgggtcaatattcctgattactccctctatttttatgctaataatcaactgattttagattcaaaagtgattgttggtcgaccagatagaaaaacccccattatgagtagtgcgcttaataatgttgtggttaatccgccttggaatgtacctacgagtatgacgcgtaaagatatagttccaaaaggaaaggctgatcctagttattttagccgtaaaggttatacgatttattcagggtgggggaatgacgcctatccaattaatccttacgatatagattgggaaaacatctctgcggctaattttccatatcgcatttggcaagcccctgggccaactaactccctaggccgatataaatttaatatgccaaactctgaagcgatttatctgcatgacacaccaaaccacaatttatttactaaaaatatgcgagcaattagttcaggttgtattcgtgtgaataaagcggcgcaattagcgacgatattattaggtgatgcaggatggaaacaagatagaattgatgcagccttaaaacgaggttcaacacaatatgcaccaattcctgaacgtatccctgtctatttatattatcaaacagcttgggtagcagaagaaaatgcccctcaatatcgagcagatatttataattatgaccaaagcattaataatgcaacctcttttttagagaatattaagaaatatttgtaa

SEQ ID NO: 304258 - DNA, 759 bp, Proteus mirabilis
atgaagcaaaagaaagtaaagaaagcaggtttacgcaaaggcgggtttacatttaaacaattttttgtcgctcatgataagtgtgaaatgaaagtgggtactgatggcgttttattaggtgcttgggcgcctatcactaaagcaaaaacggtgctcgatattggtacgggaagtggattaattgccttgatgttagcgcaacgtgccccgcaggttgagcgtattgatggtattgaacttgatgaagatgccgcattacaggcgcgtgaaaatgcgcaacaatcacagtggagttcgttaatccatatttatcatcatgatatttatcaatatgcgcaacaagcgccaactcgctatgatcttattgtgagtaatccaccctattttgagccagcggttgcatgccgtaaccaagagcgcgagcaagcccgttatacgaaaacattgacccatgaaggtttgcttgacagtgcacaacaacttattacagatgaaggcctattttgtgtggtgttaccctatttaatcggtgaacagtttattgaaatctcacaaagaaaagggtggaatgtcgtacagcgagttaatattaaagatagtgcagataagccttaccatcgcatattgctagcctttcaaagacagtatcaaggcgaaactaaaccatgtaatattgaagagctgattatccgcaataatgacggtcattacacaacccagttccaatcttgggtcacagatttttatttatattattaa

SEQ ID NO: 304259 - DNA, 822 bp, Proteus mirabilis
gtggtcaccgaccaccaaggcaccccgcgagagatattctgtgaaggcggacaagccagttgggcaggaaggttgaatacgtggggccaaatgcagttttggcgttaccgcgacggtaaagcggagaatgaccctaattataccgaatgtccttttcgctttgcggggcaatatgaagatgaagaaagtggcttgtattataatcgctttcgctattatgatagggaaacaggacagtatctttccccagaccccatagggttattgggtgggctgaatccctatggatatgtgcattgcccgacggggtgggttgatccgtttgggctggcgggtggtaaggggaataagggtgctccagtaacatctagttttataaatgatgatattattaaccattccgcaaaaggagattggaaagaagctagctctatgcctccaagagatagaaaaacctttccaaatggaagattaagtggtggaggtcatggtcaatcagctatattagaactggaagcaaggggaatcctttataatatagagcacacatatccaaatggtgttcgagtgggaaatataccgagtcacgcatcgaaagcaaaacgctcagggacagctcagtcatggtttcctgaaaactggagtgacgctgatattaaagatgcagggcaagcaatatggagatcatcgaatagtgtccgagttgatatgccttctgggggagttatggtctcaggtacgcataatggtgtatttattcgtgttgtccgcgaccctaaagggggaggctctatattccctgataacacaattcaaccatga

SEQ ID NO: 304260 - DNA, 1032 bp, Proteus mirabilis
atgaaaataaaaaatatacatataattacttctcttgaaagtggtggtgcacaaaaagttctttatgatttcctctcttattcgaaaaataataaaaattctattgtctattgtttaagaggaaaagcattttatgatgataaattagcgtcaattggaataagagtaaaacatctaaataaaatatctaatatcttctcttttttttatgacctttattcttctaaaggttatgttaaaagctggatgtatcactcatgtatattgtcgctgttctctaaattaaatttcaaacgaaatatcttttggtcaatacatcatggatgcattgataaaaaaaccgattcattcagtactattcttgcagctaatttagctgctttacttagttatataatacctaaaaacgttatttttgttagtcaacactgtatgaacacccatattaattatggttttaatcctaaaaatgcaatttttatttataatcatataacactacctaaattaaacgtagaacaacttaataaaaatttagtcacattcgttggacgagagcatcccaataaaaatcttgatctttttttagaaatgagtaaaaaaatagatctctccatatacaatatgcagtattgtattgttggtaaaaatactgataaaagaaatactgattttaataaccaaaattatttattttatggtgaagttgataaagaaactttagataatatttatcaaaaaacaaaagtttacatttctacttcacatgttgaatcatttggattaaccctaatcgaagcattatcacatggatgtgatattatttgccctgaacaacctgtttttaaagaggttgcagaaaattgggcgtactactatacacctaatgatattaacgcattaactgatagtttaaataaattacttttgtctagacaaaataaaaaagataacatcaaattaaagaatttcttaaaaagatattcttttgaagaaaccactaaaaaacttatcgaattagtagaaaaatga

SEQ ID NO: 304261 - DNA, 1056 bp, Proteus mirabilis
gtgtataagagacagctacttaataatgaagtggattctataaatataagcaatttacctttttcattctccccttctacaggacaaaaaaaagataattccagaaaaaatttttttaaaagtctttataatctaaaacccataaaaaaaattttactgcctattagaagtatagtctttaatattaaaagattgtcacttttaaaatatgaaattaaaaaaaatgattttattctttttggcggtggttcactgctgattaacaacagcctagtttttcctattaacttattttttattacatttctctgtaagatataccaaaagccttatggttttgcaggtatttcatgtagaaatattcaaaataagttagctaaatttctaataaaatcatcgataaaaaatgctaaatttatttacatgagagattttttatcctgtcaaataatattacagcaatacaatattagcactagttatattcctgatttagccctttatattggtcttcaaaatatagaaatagagagcaatcataatattgcaataaatataatgggaaaacagagccatggttttttttctaataataataatttttataactatattcggaatattataaactttatttacaatagttcttttaatgaatatcatttattcactactggtgaaaaatctgactttgatgctattcaaattttaatatctctacttcctctacatacatcgaaaaacattacaatctctcaataccctatatcaataaatgaagttgaacataaatataaggaatatgaatattttctatgtacacggctacattcagctattattgccttatcatacggaaagaaatttattacttttaattgggataaaaaaattgaaggtttcatgaatacttataatttaacattttccttattcaatagttctaccaactttgaaaagtattttcctttatttagttccagagtaacaattgacaaatcattatatttaccattaattaattcattaaaagaaaatatatctactaaatcatga

SEQ ID NO: 304262 - DNA, 168 bp, Proteus mirabilis
atggaagattatcccgttaaggagaaatacaatgagactaatagaacgcaaggaataaagaatagaaccttaggtataaagaatttgattgttttagcaaatagaagagctaaaaaagcattaaaagctattagcattaatagaaacctttttaaaaaagacaaataa

SEQ ID NO: 304263 - DNA, 348 bp, Proteus mirabilis
atgatgaaatcaaaaataaaacaaatgattgctcactactttaaaactaaaaaagagcctaaaaactatgatttttaccctaatcatatcgccgtacttgagaaaccgccgacaccttatagtcgtattattgcaataataatttcattaagtgtgattatatttttactctgggcatatataggtaaattagatgtgctttcttcagctataggaaaattagtggtttcaggttattcgcaacaaattcaaatttatgaacatagtcgcttaagcgccattcatgtaaaaaatggccaacaagttaccaaaggagaagcgttattaacacacacaaaacacaagtaa

SEQ ID NO: 304264 - DNA, 585 bp, Proteus mirabilis
atgagcaaatcattagttttcaaaggtaatgaaattactccatttgataatggtgataataagatttggtttaccagctctcagatggctaagctactcgaatacaaaaatgagaagtcagtaaccaatctatataacgccaacaaagacgagttttctgatgatatgacaatggtcactgaaacaatgaccaatggaataaacaacaacttacgtaagaaaaaggtcaggatcttctctgttagaggtgcacatctaatcggaatgttagctaatacagatgtagcgaaatccttgcgtcgatggttacttgatctagctgaaaaagagtcaaaaccacaaacagggttagcaaaccttgacatgaatgagcttaaaaccctgactatcaatgagatgcaaaatagattagtagcagccgataactggtcgttcgagaactttggcaggaaaggtagtgacttaatgaatttacgcaagcgtcacttaaagaaaatacgcaaagcgaagaaggcaattaaagaactatcacaattaaccttgcctgatatgggcgaatttccagatggagaagagccagcatga

SEQ ID NO: 304265 - DNA, 177 bp, Proteus mirabilis
atgcaacgtaaattattatgtgatccgcaaacttcaggtggcttattactggcagtacagccagaagccgttgagcaagtaaaagaagttgctaaacgctttaatattgatttgacctcgatcggtgaattaacagagccgaaagcaggaagagcgttaattgaagtgacaaactaa

SEQ ID NO: 304266 - DNA, 981 bp, Proteus mirabilis
atgagtcatcaacttaccttcgccgacagtgaattcagcagtaagcgccgtcagaccagaaaagagattttcttgtcccgcatggagcagattctgccatggcaaaacatggtggaagtcatcgagccgttttaccccaaggctggtaatggccggcgaccttatccgctggaaaccatgctacgcattcactgcatgcagcattggtacaacctgagcgatggcgcgatggaagatgctctgtacgaaatcgcctccatgcgtctgtttgcccggttatccctggatagcgccttgcctgaccgcaccaccatcatgaatttccgccacctgctggagcagcatcaactggcccgccaattgttcaagaccatcaatcgctggctggccgaagcaggcgtcatgatgactcaaggcaccttggtcgatgccaccatcattgaggcacccagctcgaccaagaacaaagagcagcaacgcgatccggagatgcatcagaccaagaaaggcaatcagtggcactttggcatgaaggcccacattggtgtcgatgccaagagtggcctgacccacagcctggtcaccaccgcggccaacgagcatgacctcaatcagctgggtaatctgctgcatggagaggagcaatttgtctcagccgatgccggctaccaaggggcgccacagcgcgaggagctggccgaggtggatgtggactggctgatcgccgagcgccccggcaaggtaagaaccttgaaacagcatccacgcaagaacaaaacggccatcaacatcgaatacatgaaagccagcatccgggccaaggtggagcacccatttcgcatcatcaagcgacagttcggcttcgtgaaagccagatacaaggggttgctgaaaaacgataaccaactggcgatgttattcacgctggccaacctgtttcgggcggaccaaatgatacgtcagtgggagagatctcactaa

SEQ ID NO: 304267 - DNA, 864 bp, Proteus mirabilis
atgaaacggatattagtcgcgggagcaacaggatatttgggtggttttttagttcaagaattaaaaaaacaaggatattgggtacgtgttttagttagaaatcatcaacaagcgacaaagtttgcggatgttgatgacatatttattggcgagatcacaaaacctgagcaactctctttgattgctcaaaatattgattgcgtgatatcaacggtagggatcactcggcaaaaagaagggttaacctatatggatgtggattatcaggcaaatgccaatttattagaggaagcgattaaatcgaaggttaataaatttatttatatctcggctattgatggcgaaaaacaccgaaatctaaagatttttcaagcaaaggagcgctttgttgataaattaaaacaagccaatttagcatactgtattgtaagacctaatggctattttagcgatatgggggattttttacagatggcggcatcgggtaaagtttatttatttggtgatggcgaacaaaaaataaatcctatctctggaaaagatttagcgcaatttattgtcgagaaaatgacaaccaatataaatgaattcactgtaggtggaccggatattctatctttgaatcaaatatgtgaactcgcaggaagcgcattagataaaaaaattaaaataatccatttacccgatacgttaagaaaaataactatttttacgttacgtcattttacgagccaaaaattttatgggccattagagttttttttaacttttatggcaaacagtcatattggtatgtgttatgggcatgatcatttatcaaattattatattgaattagctgatccgacatataagagaaaatag

SEQ ID NO: 304268 - DNA, 1455 bp, Proteus mirabilis
gtgtcagacgattttgcagaaaacgggattttaacccgacgcgttcctggatttcatccccgtgaagctcaacgacaaatggcgatatcagtaacagaggttattgataaacaaggtgtgcttattgcagaagcgggtactgggacagggaaaacctatgcctatcttgtgcctgcattacgttctgggaaaaaaactatcatctctaccggatctaaggcattacaagatcaactgtatagtcgtgatctccccaccataatagaagcgctagactacgatggtacaacggctttattaaaaggtcgctctaattatttgtgtttagaacgtttagatcagcaaattctcagtggcggtgatttagaagcagaagtacttgctgatgttatgcatgtacgccaatggtcaacgcaaacagaagatggtgatattagtcgctgtcatagtgtggcggaagatagcaaagtatggccattggtgactagcactaatgataattgtctgggcagtgattgtcctcgctacaaagagtgttatgtattaagtgcccgtaaaaatgcgttagccgctgatgtggtggttgttaatcatcacctttttatggcagatacggtagtaaaagatactggttttggtgagctgatccccgatgcggagataatgatcttcgatgaggcgcatcaaattcctgatatagcgagccactacttcggtcaacagctcactagtcgtcaattattcgatctagcgcgagatatgattgtggcgtatcgcactgaagtgcgtgatcaagtgcaactgcaaaaaagtgctgaccgtttaactcaaatggtacaagattttcgtcttagcttaggtgatacgggttttcggggtaacttaagggaattattacaaaataaggaaaccaaacgctatttaaccttattagatgatgcgttagagctaagttatgatgtaatgaagctctctttagggcgtagccaattactggatagtgcgtttgaacgggcaacactttatcgtaatcgcttaaaacgcctaattgatacgacgattgccggatacagttattggtttgaaagctatggtcgccattttttactggcgatcacgccactttcggttgctgataaatttcgtgagctgataaagtcccataaaagtagttggatatttacttctgcaacactctctgtagatgaaaaaatgtcttattacacagatagattaggactggaaaatgccacaacattaattttaaatagcccatttgattatcaacatcaaacgttgctctgtgtaccacgttatttacctccgttaaatcaaccatacaccgcgaagcgtttagccgctatgctggctcctgtgatcttaaaaaaatcaggggcgttgtttttttctttgtacctctcacgctatgatgcgtggattagccgaagagtttaa

SEQ ID NO: 304269 - DNA, 276 bp, Proteus mirabilis; identical to SEQ ID NO: 297101

SEQ ID NO: 304270 - DNA, 2988 bp, Proteus mirabilis
atggcaaggaggcagattctttctctgtcggaaagagaatcattactggcattaccggacgaagagttaacgctgacccggatggcgtatttcagtgaacatgatctggcacttatcagtgcccaccgtaaacctgccagccgttttggttttgccgtccttctttgctatctgaaaaatgtcggctttaccccggataaaaaaatccctccctctgatgcgctgctgaagcatatcgccagcaggctaaaacttaccggggatctctggccagcttacctttccggcagggaaactacgcgacgcgaacatttaaccgaactgtaccgctatcttggcttaaaagcgttcaccggcaaaatacagcaggactgtattacacacctgctgccgatggcgacgcgcaccgataaaggtattctcctggccgaagaactactggtctggctccggcagaacaacgtgataatcccctcgattgatgtcgtggagcgttcctgtgctgaggccatggcaggcggcgataaaatcgtgtttcagaccctgaatgccccgttaactccggctcacagggatgctctggattgtttacttgagtcatcggataatcagtcttccaggctgacatggcttctgcaacctccgggtaaaatcaatggtaagaacgtgctgcaacaccttgatcggctcagtagcattgaatcgctggcattaccggaaggtatagatcgtaccattcaccagaaccggttgctgaaactggcgcgggaaggccgaaagatgagcagccgggatttgacccgattttcagcagcccggcgtcatgcgatcctggtgtgcgtgctggaagaagccagagccacactgacagacgaagtgattgagttgcatgagcgaatgctgaacagccttttcagcaaagccaaaagaacacaggctgagcgccttcagcagaccggaaagctgatccagtcaaaactgaggcagtacatcaatgtcggtcaggcgctgtctgatgcccgtgattccgggggagatccatggctcgcaatagaaaacatactcccatggcctgaatttgtcgccagtctggaggaaacacgccatctcgccagaaaaaataattttgacccgctgcatattattaccgagaaatacagcacattacggaaatatgccccgcgcatgttgtcagctttacagttaatcgcaactccggcagcgcaacctctggctgatgcgctggttgtgatcaaggatatgtaccggaagcagtcacgtaaagttccggccaccgcgccgcttgagtttgtcccagaaagttggcgcaaggtggtaattacacctgcgggtattgaccggcagtactatgaattttgtgcgctcagcgagcttaagggggcgttgcgttccggggacatctgggtcaaaggttcacgccgctacaaaaattttgatgattacctcattcccgaaaaggactttgacaaactcacaccggcgctgccacttcccgtatctgctgattatcatgagtacattaccagccgtatgaccctgcttcagtccaggcttgaagaggtcaatgccatggctgcccttggtgaactgcccgatgtggaaatatcttacaggggcgtaaaagtctctccgctggataacagcgttccggtgcaggtttcaccgctggcagagctggtttacagcatgctaccgcgccctaaaatcacggaaattctcgatgaggtaaacagctggacgacgtttacccgacatttttcgcatataaaaactgacattacccgtcccgatatccgcctgcttctcaccaccattcttgcggatggcatcaatcttggcctgaccaaaatggcggaagcctgccccggtagcaccaaatcatcactcgaagatattcaggcatggtacatccgcgacgaaacctattcagcagcccttgcagagctggtaaacgcgcaggggaaaaggccgctggcggcattctggggagacgggacaacatcatcatcagatggacagaatttcagaacaggcagatcaggccgctacgcagggcaggttaacccaaaatacgggcaggagcccggacgtcagttttatacccatatttcggatcaatacagcccgttttacacctgcataatcagtcgggtcagagattcaacccatgtgctcgatggcttgctgtaccacgaaagcgacctggaaatcagggagcattacaccgatacagcgggtttcaccgatcatgtctttgccctgatgcatctgctgggatttgcgttctgtccgcgaatcagggatctccacgacaagaagctatttatcaaagggaaagcaggccagtacccggcgcttcagtcactgatatcaacaaccagcctgaatctgaaagagatcgaaattcactggcgtgaagtgctgcgtctggcaacctcgataaagcagggaaccgtgacggcatccctgatgctgaaaaagcttgccagctaccccaagcaaaacgggctggccaaagcactgagagaaattggccgtattgaacgaactctgtttatgctcgactggttccgcgatcctgcactgcgtcggcgggtacaggcggggctgaataaaggtgaagcccgtaacgcgctggcgcgagcggtatttatgcaccggctgggagaaatcagggatcgaaaaccggaaaatcagagctatcgcgccagtggactgacgctcctgacagctgccatatccctgtggaataccgtctatatggaaagagctgtcgatgctctgaagcgtaagggagtgaagatcaacgagcaactgctgtcgcatttgtccccgctaggctgggaacacatcaatctgacaggcgattatatatggaaaagcaaccggataccgtcagccggtaagtttcgtcggctgaggccagctaaattaggcaggtcaaaaaataaccttaacgtacaataa

SEQ ID NO: 304271 - DNA, 597 bp, Proteus mirabilis
atgtacctgcacattgttccacgattgtttcatctgatggcaaataaatgccatcttgattcaataaacattcctgaacttgatttcataatcgaaggtgatgcactgtcaacgggaagaccctacccgaataaaaatatctggattggtatgaggaaaggaagaaaagccataaatggacttttactaaagactgataagcatcttaagtggtttaccactgattaccagtggaatatagaaaacatgggcatgatcaatcatcgtgtgacaacttacatcgaagatagcgattttgatatggtctcacacgatataatgttaaatggtggttttgattcatgggaacgtcgggttcattcagcttatgaaaatcttgctccggtgaaaattcagccaaaaatggaatcatttctgaataagcccagagaaaatacccatgatgtgtggattgagtatgaatggggtgattttcttaagagcagagaggaaagtctgttactgcatactattcagtcagagagactaaatacgcaacattctctttttgagcgactgccatcttttgaaagtactattgttttgactgagggctaa

SEQ ID NO: 304272 - DNA, 333 bp, Proteus mirabilis
atgaaacttaaaatagtgattgcattattatcagttttgctggcaacaacggcagaagctaaacgccgacaccatactgacggattgaatcaggtgggtaatacagatgaaatgcttgtgtgtatggcggggaaagtacaaggtgacatacaacctgcttgtcagcccatcaatcagcgtttctttaatgttcgtgtctatactccctattacaaccccgaagcaacagcgagggtaagacagggggtgcttaatacagcaaaaggagccgccgtcaatcaggaagcggtaacgatgataattgagcgttacgggcgttcttttcaggaataa

SEQ ID NO: 304273 - DNA, 390 bp, Proteus mirabilis
atgaaaaagttattactgcttagtattttcctgctcggggcgtgttcatcaccaccggaagcccctaaagtggattgggacaaaaaagaggaagtaatgaacacacaactcatgacatggtcgcctactgatcatgttataaaaagtgatgttgttaatggtcactggcaacaaaaaatcacaggttttgtgcccgaaaatcgattctataatgattcggttttttatgcggttgctcactcaaaacgtatcatcgtcgaaacatccggaagcactgcatttttcactgctaaaaattggctgcggcagcatggtgcaacgggcttgattgagtaccgcaacaaccagccttgcataacctgtaacacaaatatctacttcgggagataa

SEQ ID NO: 304274 - DNA, 1863 bp, Proteus mirabilis
atgaaattacccgataaatcacaacggttatttatttttattgttatgcttcctgtggcgtattttattgcggatatttccgtgtattttattaatggtgtgcctgtaaaaactattttacgtcattttgatattaaaatggtgctgaatttggttgttaattcagatgtacgttctgatatccggttaacggtaattcctgctctgattgtcgggatcgcaggttcatttattgttccttttgttattatctatcacttaaataaaacaagtgattcattatatggaaatgccaagtttgccagtgacaatgatttaaataaatcaaagttgcttaaatggcaaaaagaatgcagcaacggtattctggtcggaaaaaagaaaaataaatatctgtggtataccgcaccggatttcgtttcgctgggtgctggaacaagggcgggtaaaggggctgcaattggtattcctaatcttcttgtgtggctgcactcactgattattcttgatccaaaacaggagtgttggaaaataaccagtaaagttcgtcagtttttgctgggacacaaagtttatttaatagacccattcaacagtaaaacgcacggtattaatttctttgactatattgagttagccaaagaaagcggcgcaaaagatttattaaagttagtggaaattttatttccgtcctacggttcgacaggagcagaagcacattttaataatctggcaggtcaatatttcactggattaacgaagctgctatatgtctttatttatctcgacaaaaaatatccggaaaaaaattatttaaatcggtttaagattaaaagtcctgttttttctatcggctcagttgtagatctgtatggcagcattgatagacaatttgtaattgatgaaagtgaagaattattaagtttaccattagataatctgatgctttaccatttacaggacgggttaacaaaattaaaagagtaccatttaacagaggatgaacaacgttcaagtattgacggctcattccgtaaaaaaatgagtttgttttatctgccaactgttcgtgcctgtactgaccacagcgattttgatttacgtcagttgcgccgtgaaaaaattacgatttatgtcggaatcaatgcggaagatttaggtattgcctatgatttccttaacctgttttttaattttgttgttgaagtaacgctgcgcgaaaaccctgactttgatccgacgctgaaacacccttgtttgttgatgctggacgaatttccgtctatcggatatatgccaattatcaaaaaaggctccggctatattgccggatttaatctcaaattgttaaccatttatcagaacgtcagccagctaaatgaaatctacggcatcgagggcgcaaaaacattattaagtgctcatccctgccgtgttatctatgcggtcagtgagcaggatgatgcggagcagatatccgctaaattagggtatgtgacaactaaatcaaaaagtgaaagtaaaagcaaaggacgggcgcagtcgaaaagcgaatcagaaagcgaaacccgccgtgcgttagtgttaccacaggagttaggtacgctcgattttaaggaagaatttattttgcttaaaggggaaaaccccgttaaagcagagaaagcgctgtacttttctgatccgtattttatggacaggttacttgaagtcagtccaaaactgcaagatgcggtaaagaaactcaataaaagagataaggttatcggtgttaatggtcttcgctatcccgataaagaaacaatgttatcgctgggtgaactggagtcagaggtgttaaatgaaaaagttattactgcttag

SEQ ID NO: 304275 - DNA, 1038 bp, Proteus mirabilis
atgtccgttaaaacaagtaagtctcttgattatttaagaaaaacaatttttgcaccatttcttgatgagtgcaaaggactaacggaactcgcggttaatcgtcccgatgaactttttacaaaagaacaggggaaatggataaggcatgaggttaagttaagtgtggatgattgtctggctttcttaaatccattagctaatcttaatatggattatatcggcaaggaaaaaccgattttatcaggaacattgcctacaggcgaaaggattcaggctattttaccgcctgcatgtgaaaaaaacactatatcaatgacaatccgtaaaccaagccagcggattattacacatgcagattttgtgtctcagggtttttattcaaaactagaaaatccggaaaatataacaaatcattatgtcactgataatttattatcagagttatatcaacaaaaaaaatattctgagtttttacctgagtgtttacggcaaggaaaaacaacggtgttttgcggggggacaggttcaggtaaaacaacatttggtaacagtgttttagaatttattcctgattattgccggatgatatccattgaggataatgatgaaacccgtttccggcatcataaaaattatgtgaaattattttatccggctgatgacagagacgcaattatcacaccgtctcttttattgcgatcctgctaccggatgaatcctgatcgtattttaatgacagaaatcagaggggcggaagcatgggaatttatgaaaggtacaagctcagggcactctggagggatcaccaccgtgcatgagaatacgccggaagatgcaatctgcgggattattgaaaggtgttatcaaaaccctgagtgtaacaatttgccatacaatgtactgttacgaaaagtgcttaataatattgatgtcatcatgagtataaaatactttgatgaacaggataaacggtttgcgtcaggaatttattttaaagatttaaaccgtaatgagttttttgataaattgaaggtgtga

SEQ ID NO: 304276 - DNA, 1203 bp, Proteus mirabilis
atgagtgaacaggaacataaaactgctgctgaattagaaaaagaactcaccgaaagacggcatgaggaaagtgaaaaggcagaagaacaaaaagatgaaagtaaaaaattaggcatatctaaattaaacaaaacgaacaaaggacggacaattttaatttccatcctgttactcgccttgctggttgctgctgcttattatcttctgcctgttttgggaaaaatgaccgcagaaaaagaagatactaaacaaactcaacaaacagacggtcgcctgtcaggaaaacgtactgatttgggtcaggctattgatccgtttccggcaacaagtcagaaaactgataccggagtcacagataataaagagactgacaatcgtcccgtcacacaagaaaaacccgtattcagccgtgcattagcgaaaccattatatgttaacagcagtaacagcaacgggggtaattcgtcacaacagaataatcaaaataacgcagaaacgaataccacaacagaaatcagcgagaatacagataatcgacaaaacaacagtgaaagccacgctcctgtattgacaaaaataacgaaagtaccctacgacccaaatttatttatccctgaaaacactccgatacagtgttctttagatcgttattttatttcaacactaagcggaaagttaacctgcaccatcaatcatgatgtgtacagtgccaacaataatgtgaagctcatagaaaaaggtacggtagcacatctgctctataaatcaggcacattaaagcatggtcaggggcgggtttttgtcatggcaacgaaactcagaacacgctcagtgccttttattgatattcctttgttagatactcaggctgcgggtgagttgggagaaatgggcgtaaatggctggatagatacccatttttgggatcggttcgggggggcaatgatgctgggtattattcctgatgcggctttagggctaagtgattcagttaagaataacaaagataatcagactgactataccgccaacagcagacaggcgttctctgaaatcgcaaaatcagcatttgagaacagtgtgggtataccgcctacgatgtataagaatcagggggaaatcatcacacttattattggtcaggatttggatttttcttcaatctaccgcctgaaactgaaaggaaaaaacaatgtccgttaa

SEQ ID NO: 304277 - DNA, 924 bp, Proteus mirabilis
atgatattaaaaaaaatagccttgattgttgggttggtgatgtttgctcacggtgtacaggcggcggcaattccgaaaggaagtcagtatgacaaacggaatcagagcgtgatttataatcctgcaaatgtgacggttgttaatgttgcaatgggatatctgacaactctcgtctttgatgaagatgaaaatgtattggaaaaaccacaagtaggatttccagccggatgggatgttcaggaatccggcaatgtggtgtatgtccggattcagcctgtcacacaaaacgtcgaacaggttaacagtgagggagaaatagaggaaaaagaaatagcatttgaccccgaagaagatttagaccgtttcagaacaaatttatttattaagacgaccaaacgaaattatcttctggagttaaaagcaaccagctttaccaaaccggagcaggtatcatttgttgttaactatcgttaccctaatgaggaaagaaaacaacaggcagaattagaaaaaaaacggcttgaagaatatcagcgtcaacaggaacaaactaaaataaatcgtgcactggaaaatgccaaaatgccgcgtaactggaaatactatgcccgtgtatctgagggcagtgagtatattaaacctgattatgcttatgatgatggacggtttacttactttgggtttaatcctacacaaaaaatcccaagtgtttttgttcagttcggtgaaaaggaaatgatagttaaccctgtcattgaaaagaaaggaaactacactgttattgtcatcagtcagttaagtgataaatgggtattacgtttaggctctcaggttgtgggtgtggaaaataaaggattcggtaaaatccgcttgcctgacagtgatactgtttcatccgatgtgaaaaaagaggtgatccaatga

SEQ ID NO: 304278 - DNA, 726 bp, Proteus mirabilis
atgaataatgtcattaaagatttttttaaaaacagaaaaaaagaaaaagtgtttgaggtttcaaaaaactttgaacaaaaaacgctggaagcaaaagaaaaaataaataagctggcttattttatcggtgggacaggtgtgttatttggcgttctgtcaatgattgctttaatcgcattgttgccattaaagcaaactaatgtggaagtttttaccgtcgatgcacaaactggacggacagaaaaaataaccacggtaaaaaaagaacaggttactcaggatgcagcgttatcaaaatttttcgtatcaagttatatcaaataccgcgaaagttataattactttcgtttgcaacaggattatgacgctacgctaatcatgggttcaccggatgttaatcaggaatacattgattatatgaacagtgatttctcacctatgaaaaagtataacaatgcagatcacacggttaaggtggaaatgttatctatcaatatttctaactcatcaaatcctgatgatcctgcaatgtttgcgatagtcagatttaaaaaaataattaaggcggttgcttcacgggagacaaaagaagaatacttcaccgccagattaacctatcaatattttccagaaaaagagatgacagaagaacaaagagaattaagccctttaggatttacgatcaccagttatcagccagaaaaagatttgcggggtgagtcatga

SEQ ID NO: 304279 - DNA, 1050 bp, Proteus mirabilis
atggcggatgtaccatcctatacgtcagattttttcaaaacggcacaccgattaattgatcaggtgctcgataccgcgacaaaaggaaaattggcggagtattcagggattgcggttgatttggttcaggcgggggttgttatctggatgattatttatgcttttcagaccattgcgggaaaacaaaaaaaccccgtggctgattttctctggcaaatggggaaaatggcgatcatccttgtatttgtcaaaaatactggcggctggatggatgcggcaaacaatgaaattaatgcgttaaaaaccacgttagcgggggggcttgacccgtgggtgtggttagatcagttatgggttaaaacaagtcaggtaggagctttgttaatgcagctagacacatctgattatgtaaaagttgagggggcattgggttcatgggcaacttatattggttcaattattgccttactgacggcttccattatcttcttttcagcagagattacgctaaagctgttaaccatcacagcaccgctgtttgtgatgtgtctgatatttggctttttacgccagatgtttaataactggctgcaactgattttcagttcactgttaacgtttatgtttgccacgcttgcgctgcgagccggaaccagttacctcaatcatgttttatctgttctggttcaggaagctgataaatcaaatctgatcgctatggggtttatggcaatggcagccggaatatttaccgcgtttgtggcatggaaagcggcgcagtttgccagtcagatagccagtgtcggcgttgaggggtcaatgcagggagctgctgcattgggactaggagcggcgggattcgctgcaaaaagagcgttatccggtatgactcgtcgtgtgggtaataccgctaatcgggttggcactcagaaccgtgagaaattgtggaacaatgccactaattcaacgcaaaacgcatctaatcctaatccgtctcagaatattggtaagagtgttgcggaagcagcaagaaaaagatacgggagttaa

SEQ ID NO: 304280 - DNA, 264 bp, Proteus mirabilis
atgaaaaaattaatcatattaagtgctgtggttgtttctttttttgcactgaccggatgtcaggaagaaacgaaatccgttgattggtggacttctcaccctaaagaaaccactgaaaaatataaagagtgcatgaaaacaggtgaagatactgataattgtaaaaatgtaaaacgggcggcgcttaacattgctaattatccaccaatgaatgaaatctttaaacaagaagctaaggaagtaaaaaagagaatgggcttataa

SEQ ID NO: 304281 - DNA, 723 bp, Proteus mirabilis
atgaaaagaaaactgatagccgtattatttctgtcattaagcgcaaacgcttttgcgataacaggcggtgtaattgttcatgatgcaaaacaggggatagaaactgccgcccattgggttaaagagggtaaacagtggatagatgaactaaaagcctatcaggatgaattgttagctaaaacaggacttcgtgatgttcagggattaattcaggatgcaaaagatatttcaaaggatttgactgatatttataacgagggaaccgcattttatgatgattatatcaataatcctacaggggttttgtcacctaaagcgcgggcattactggataaatataaagtaggggaaatgtgcgctaaacagggtttttccggcgacctgataaaagggtgtgaagcgcgagtgttgtctgatttagccagtgttgcctatggggaaaatttgcaggaaaaaataaacaaagataacaaaaatatgaaagggctgattgaccaagttaaatcagcttctgacccgaaatcaaccgctgatgcaactaatgcgattgctcttgaacaactgaagtttgaaaaaatgaaatttcagtatgaaatgtatcgtgataagcaggagcagttagctaagtataaaaaagaaatggctcaggcagaatacaggaacagacaggcaacagcaccattaccaacatttggtgataaaccgtttgaagaactgaaataa

SEQ ID NO: 304282 - DNA, 2793 bp, Proteus mirabilis
atgagtaatttgtttaaaggtatgacccgccccgcaaccattcgcgggctgggtgtccctgttaccccttttatcatttcaatggcagtgctttttattggtggtcattacgtcagtaaagtatgtttttttctgatgccggttgcttatatcgctatcaaaatgctttttaattacgatgaacacattttttcttctctctggctgaaatataaaacgcggggaaagatgaaaatgaacaggtactatggagcaactcatttttctggcggtaattatgatgaaacagatattaaaaggttagagaaagccatgaaattaaaccagcaagcacctatcactgaaatcattccgtattcatctcatgtaactgaaacaattatgtttacgaaacgagatgattttactgcaacgtggcatataggcggaaattattttgaatgtgagccattgcaaaaactgaaaatattaaccgaccagctcaatacattaattcgcagctttgaagggaaaaatattaccttttatacccatcgaattagaaacaaaaacaaagcggataatgtttttacatcagataatccgatggcaaatgagtttatgggggagctttattcttccatgaatgatagtgaaacgtttactaatggcttgtttctgacagtatgttaccgaccttatgcgctggaagatcagatagcaaaaaaagtcagtaaaaaagaagaaaaaaagaaacaatttgctaatgcactgactgaaatggaagaaataacggataaatttaatgtctcgttaagtgcttttcatggcagacaattaaaagtctttaaagaaaaagaaacatactattcagaggtgctttctttatatcaatatttattaacaggcgtatggcaaaaagtaagagtaaccaatacacctttttatgagtatttaggcggaaaagatattttcttcggacaggattccggtcagattggtgcaggtgaaaatgcacgttattttcgcattatcgaaatcaaggattattttcagaacactgaaacaggtatttttgatgccttaatgtatttgcctgttgaatatattgtgacaagttcatttacttgtcttggacggcaggaatcgataaagaaattggatgatcagataaaattactttcatccaatgatgatgcagcaaaaacacaaattgcagatttagaagtcgctcaggatatggtcgccagtggtttaatttcgtttggcaatacccatttatcactgatggttttagcggacacgccagaggatttagtcaaagatacgaacattgttgataatgtacttaaagagcttggcttaatcacgacttactcaacattgtcactggctgcggcattttttgctcaacttccggcagtttatgagttacgcccccgtttagcggcaatgagtagcttaaattatgctgaaatggaatcttttcataactttttctcaggaaagaaaacgggtgcgccgtggggcaattgcgtactgacactgaaagcgtcagggggcggagaatatcaccttaactatcatcatacgtctgattttaaaaatcagtttggcggagagccgccactaggacacactgatttaataggctcgtcaaatgcaggtaaaactgtttttttgatgacacagtttatggcggtacaacaattcggggtgaaagactcctttccggcaaacagtcgggcgaaagagcttaaaacagttcttttcgataaagacagagcgggtgaagttgctatccgcgcaatgggcggagaatattatcggattatgtccggtgaaccgtctggctggaatccgtttcagcttgagccgactaaacgtaatgtcaaattcttaaaagacttaattaaatttatttgtaatttaaaaggtgaaccgttagacccgttacaggaagaatctatttctgttgcggtagaccagttgatgactaaacctagagaagtcagatgctacgggattactgaactatacaataatattccggaaccacagacaaaggaatttcaccgttacggcatacgcgcccgtttaaaagcgtggatggacggcggggaatacggctggattctggataatgaatatgacacctttgatgtcactaaaaactccgtttttggcattgatggaacagagtttcttgatgatcctatcgcttcacaggtaattacatattacctgctatatcgtgttaccagtcttgcgaacggaagacggttagttatctatatggacgaatttcatcactggataaaaaaccctgaattggcgaaatttgttgaaaacattatgcggacagggcgaaaactgaacatcatactggtatttgccacgcaatcaccggaagagctggttaaatcaccgtcagcggctgccctcagagaacagtgtgcgacacacctttatatgtcgaataatgacgggacaaaaaaagattatgtggatgggttaaacgttcagcctcatcactttacgatcattcaggggattgacccgttatcccgtcaggtcttggtcgtcaaaaacgcgcaacggaaaggcgaccctgacaaattttcggcgttacttacagtggatttgggggatgcggctaagtatttgcctatcctcagtgcttcaaaagaaaacctgttaatttttgaagaaatttatcgggatggtatgaaacccgaagactggataggaacgtatttaaccgaagtcaataaacaacagcaggctcaggataatgagaaaagaggtcattag

SEQ ID NO: 304283 - DNA, 297 bp, Proteus mirabilis
atgagtaaatacttttcttttatcaataacaaaacacttttatttttctgtgcatttatgacaagtgattttgcaatggcgaacggattatcaactacagggggcggattcttctccaaagttcaggatgtgatgtttagctgggcgggtgctgtgatcactatcgcatgtgggattgttggttatcgaacaatggtcagaaaagaaagcattatggattgttggggcgttattttgggtgctgcaattctgacgtttgcgcctgatgttcctggctggttgggattcaaaaactaa

SEQ ID NO: 304284 - DNA, 630 bp, Proteus mirabilis
atgattaaagaaacgttactctcattagctttgcaatgtgccccgtcagtgcatactgatacggtgatagatattgcaaaaacggaaagcggattcaatccgtttgccattgcggagatcgtaacgaaagataaaatcattagtcatttgccgaaatcaaaaaatgaagcactggaaattatcgaacggctggaaacaaacaacggacgattttcagttggtctgatgcaaatctactccggaaattttaaagggtataacgttaccgcagaggaaatgttgaatccgtgcagtaatcttaaaatagcggaaaaaattctagtcgattgttttcaacgtggaggaaatttaaagaacgcattaagttgttattactccggtaattttgaaacaggacacaaaaaagaaacaatatttgccaacaccagttacatcgaacggatagggatgagcaatacaaaagccgctcccataaaaataatagtgccaagcacaagaaccattacagaagtgaatcaaccgtcagggggtgtagtagcaaaaaataaagtgaaaaagataatttatccaccatacgtgttacgcggcagtgtagcctataaaattcaaggaaattctgatcatgagtaa

SEQ ID NO: 304285 - DNA, 201 bp, Proteus mirabilis
atgaatcgatgtagcttagagcttacagatgatgaaattactattagtcctctaaaccatttacgtatggatcattgggtaggtgagggaatatctgatagtgcaattattacattaaaagccaattgtagtgatgaggttttaggtgcttcaataaaaaaagcttttacacgttgtatcagtcgaaaaaccatcacttaa

SEQ ID NO: 304286 - DNA, 258 bp, Proteus mirabilis
atgtttaaattaaaaggtaataaattaagagcaagtgtttattataatgatacttattattttttattaactttttctggtcattctatttatataatggatctaaaaaaaggctataaggttttacctaatgatattattgatgacgaattaggtcattatgccaaactcgctctgattaaaagtgaacaaataaaaggaaattcagataagtttaacttatcaagactggataaaaaaaataatcaaagaatataa

SEQ ID NO: 304287 - DNA, 261 bp, Proteus mirabilis
ttgcaactaaaagagttaaatatcaataaaccatctcgtttaaaacaagtgctttcgcaaccatcagccatagaaaaaaagatgcaaactagcgcacctgaaagtgatgatgaagagcgtgagcggataatacaagcccttagagaaactaacggtgtagtggctggtgccagaggtgcggcattaaaattaggattaaaaagaaccaccttattatcacgtatgcaacgcttaggtatttccattcctgaaattctttag

SEQ ID NO: 304288 - DNA, 2040 bp, Proteus mirabilis
gtgaataacactgctataaataccgcctctttaagttggaatgaacttggtactccgatttcaaaacagtttgatgatatctatttttccaaccaagatggtcttgaagaaactcgacatgtattcctacatggaaatcattttccatctcgttttggtacacatgtacgctctgagtgtgttatagcagaaaccggatttggcacaggattaaactttttaacactgtggcaagccttcgagcaatttcgtcatcactcacctgatgcgtcattaaagcgtttacattatgtcagttttgaaaaatttcctctgactaaagctgatttgcaaacagcccatagccattggccagaactagcacaatattcaacagcgctttgtgcacagtggcctttacctattgccggttgtcatcgtcttattcttgctaatggcgcgataacgcttgatttatggttcggtgatatcaatacattactgccacaaactcgccaagctttacataataaagttgatgcgtggtttcttgacggctttgcaccaagtaaaaacccacaaatgtggagtgaaacattatttcaagcaatggcagactcgatgcgtgaaaatggcacttttgccacctttaccgcagctgggatagtaaaacgaggattgcaacatgttggttttgaaataaagaaaataaaaggctttggtcaaaaaagagaaatgttaacaggggtatttccccatcctcctgccaatgcatttgttccctactatgccagaccttgtgctacacaaacaaaagatatcgccattatcggtggggggatcgccagtgcattaactgcgctcgcctgcttaaaaagaggcgccaaagtcacgctctattgtgaagatacacatcctgcggcaaatgcctcaggcaatcggcaaggtgtattatatccattacttaatggcaaatctgatgagttagaacactttttcactagcgcttttttatatgcccgccgttattatgatgagttaaaccataaaggcgtaaacttttcacatcaatggtctggtgttgcccaagttatctataatgaaaaagtacgcaaaaaaatagcgcgaataatcgagcattccacacctttttctcaactcgctcattatgttcatcaagatgaaatgaattcactttgtggattagctatcaaccaagatggtcttttttatcctcaagcaggttggctttctcccacagagttaaccaccaatgcattaaaatacgctcaacaacaaggtctcaagctactctttgaacatcaagtcactcaattaacctcacaacaacagcattggcagttagaggtgactcaccaagcaacaacgtataaaacacaacatgattgcgttattttagctaatgggcaccgtattactgattttatacaaagtgaaaaactgcctatcagtgcagtaaggggtcaagttagccatatttcaacgacacctgatatcgcacaattaaaagcggtgctctgctatgatggctattttacgccggttgatcctcaagataatctgcattgtgttggggcaagctttcgtcgtgatcgactagatttaaatgtttcaattgaagagcaacaaaataatcaatggcatctcacacactgtttagcacaatcaccttgggcacagcaggtagattttagtgataacgatgcgcgtgtcgggatccgctgtacaataagagatcaccttcccttattaggtgaagtacccgattttgaaaaattagttgtcgcctatacgcatttagatcgatttaagcgtagaaagcaaacacctattttggcaccgagttatcatcagctttatattattagtgcattaggttcacgtggtttatgctctgcacctttatctgcggagatcttagcaagccaaatctttgatgagccatttcctgtagaagatagtgtgttaaatgccttacatccaaatcgtttctgggtaagaccattactacgcggaaaagctattgaattaaaatcatag

SEQ ID NO: 304289 - DNA, 366 bp, Proteus mirabilis; identical to SEQ ID NO: 121650

SEQ ID NO: 304290 - DNA, 981 bp, Proteus mirabilis
atgtctcaatattttgatccaataccttgggctaaaaatccccatttacagacacttttgcctcgaatagtgcgaagaacgccactattaacgccttattggcaacggcttaatttgcctgataatgattttgtcgacttagcatggagtgaagaacccaaaacagcgcaacataagccccgtttagttatctttcatggtttggaaggtaactttaatagcccttatgttcacggcatgctagccgcggcgaaagcgcgaggatggctaggtgttgtcatgcattttcgaggctgcagtggcgaacccaatcggcaaaaacgtatttatcattctggtgaaacagaagatgcccgctattttctgaattggttaaaagagcaatttggcgaacaaccaaccgcagcggtaggttactctttaggaggcaatatgctggcctattatcttgccgaaagtggtgaaaatgcggtattagatgctgctgttatagtgtcagcacctttgatgttagaaccttgctcaaccaaaatagagcgaggattttcgcgcttctatcaatggtatttactgaaagggttaaaacgcaatgcaactcgcaaattgatccgctatccccaatcgttacctattagtctattaaccattaaatccattaaaaagttacgtcaatttgatgatctgatcacggcaaaaattcacggtttcaaagacgcccttgattattatcgtcaatgtagcgctctccctttactcaatcagatcaaaaaaaatacacttatcattcacgccaaagatgatccctttatgtctacagaagtgatacctgatatcacaacattacccaaaaatattgaataccaattaacagaatttggtgggcatgtaggttttgttagtggaaaactctctaagcctgtaatgtggcttgaaaaacgtatccccgactggctatcaacctatttggagaaagtaaaatga

SEQ ID NO: 304291 - DNA, 156 bp, Proteus mirabilis
atgaaagttgaactaccaaagattacggatgatgatattgcttgggtagtgagagtattaggtttacccgatgatgctttttccccagaaaaagatggtggtgcaagagagcgaatactaaaatcccttggcgaaatacgatccagatatcgctag

SEQ ID NO: 304292 - DNA, 2067 bp, Proteus mirabilis; identical to SEQ ID NO: 300148

SEQ ID NO: 304293 - DNA, 312 bp, Proteus mirabilis
gtggaaatttactatcaaccaccaaaaaaatttaaaggcaacccaacaccagttagcgttaagaaagttaacagcaactcattcaaggctaggcaatacgctagatatgcatctttcagagctaacaaactgaaagaagaagaaattgctaaagctaactcagtgaaagagaagaaagaacgccctgttctctctctcaaaccaacaaagcattatccaagtggagataactgttgcttacctaatgtagcagtattttcaggagttaaaacaaaacagccgagcagtgggttcggggttacggcgagatag

SEQ ID NO: 304294 - DNA, 216 bp, Proteus mirabilis
atgattaacttaaaaatgtatgaatatctaagaaatgacggagcaagaattttctttaagacagaaagtatttcttcaataaaggaagagactttgtcagatgggcaaccaatcactaaattaactctaaattgcggaacaaccattatggacttagttccgctagaagagtttttaaaaatgcatcacataaagatagagaaattaaagtcttag

SEQ ID NO: 304295 - DNA, 216 bp, Proteus mirabilis
atgagtattaaagtaatttctgatgacaaccctgttaaacgagttgcttttgatatggcgctagctttagccgttaaacaggattctattaaaactcctgagcaacttatggctgaaattgaatcgctttatcctgagtgtttagaagtggctgaaaagcaatacaaaaaagagactccacctccaatgggggttttgctaaaaagtacaatctaa

SEQ ID NO: 304296 - DNA, 183 bp, Proteus mirabilis; identical to SEQ ID NO: 301477

SEQ ID NO: 304297 - DNA, 177 bp, Proteus mirabilis; identical to SEQ ID NO: 301478

SEQ ID NO: 304298 - DNA, 885 bp, Proteus mirabilis
gtgagcacgtcaattattgagtttgtgcagcaacaagaaccattgttttgtaacgcactgacagatcaaacgatcacatgggctaaggaaagccagttcgcaatccaagcgtttcaacgaaatgatgagctagcaagagtggctatggaaaaccccgctagcgcacagaacgccattattaacgtcgcagcgattgggatcacattgaatccagcaagcaaactggcgtatttagtgccaaggaaaggttttgtttgccttgatattagctacatggggcttatgcacttagctcaagcgactcaagctatcgaatggggtcaatgcaagttagtgcatgaaaatgacgtttatgaatccaatggtctagacaccccaccaacccacaaatataacgcatttagtgacagaggtagtgttattggtggttattgcacagtgaaaacagcaagtggtgactatctcacggaagagatgaggctagatgagataaaagctgttgaagctacaagtaaatcaagaaatgggccatggaaaacatggtgggatgagatggctcgtaaaacaatcgtgaaaagagcaagtaaatactggcctcgtcgtgaaaggttagatcaagccattgattatgtgaacaccgaggcaggcgaaggcaatgattttgatgtgccagcaaataaagcaaaggacataacgccagcaagtgaagatcaattaaaggctatcacggacttgatgcttaaagttaatggcgagtggagtgatgcttttttcacattcattagtaaaaaattcaaccatcaaatatcccatccagagcaattaaccgcatttgaagccaataccattatcgacatgctaaggaaaaaggcagaagggaaatga

SEQ ID NO: 304299 - DNA, 699 bp, Proteus mirabilis; identical to SEQ ID NO: 301480

SEQ ID NO: 304300 - DNA, 429 bp, Proteus mirabilis
atggcaattaacacaataacggcaagtggaaacttaggtaaagattgcgaacagcgatggacgccaaatggtaaagcggttgcatcttttagtttgccagtgaaacaaggttacggagagcacgaaaaagtatcttgggttatctgtaagatgtttggttctaaagctgaaaagctacctgaatacttaaccaaaggaacaaaggttacggttactggtgagttcgtcatggaagaatggacaagccagagtggcgagaagaaatcagctccagtaattgtcgttaaccaattggattttggcggtaacggtggtaatcaggcaggaagccagaagtcacagtctcaaggatggggacaaccacagcaaccgcaagcacagagtagtcagccaccaatggatttcgatgactctgatatcccgttttga

SEQ ID NO: 304301 - DNA, 180 bp, Proteus mirabilis
atgacagataaactcaaagaagaaaatgaaaagttgaaagaagtgctttttgctggcgctttcttaatggctaaagcggttcataaatatgatttcggcgttggaatggaagagcaagccaccgactttatgaaggacgcagaggaacttacaggtaataagctaccaaaattcgcatga

SEQ ID NO: 304302 - DNA, 459 bp, Proteus mirabilis
atgaaagacagaatcaagtttaacgatgtaatgctaaaggctgtcatagatggcagaaaaacgcagacacgcaggccgattaaaccacaaccaaaagtaaccgaagatgggttacgctatcttagcgcatggcaaggtggttacacactatcagagcaagtatgcgcagcatggcggcatggatttgttgatgttgattgcccgtatggtgagattggcgacattatcaacattgcaaacaaggacggtaatatcaaagggaaaattgaaattactgatatttggttgcagcaagtaaatgatatcagcgaaagcgatgccaaagccgaaggactcgataggaaattgaactcatgcacgtctgaattcgccgctgtatggattagcatatacggaattgatagctggatgaataaagattgggtatgggttattgagtttcactatataaaaaagtaa

SEQ ID NO: 304303 - DNA, 516 bp, Proteus mirabilis
atggaaaataaacatataaaatcttatcgaaaactattttcacatacgccttatatgcgaaaaaagatcgacctacttgccgatgaaaattatagaaataaggagtacaatttttattttatatcatcagcatccttatcaataatttcagcaactttttttataggaatgctaagttttaattttaaatcggctggagtaattgagttaatagaaatatatttatcaatattttcattttccatgtctctttcattaaattcattttttcttttctcattatttatatcatctagtaatgagcttgataaagtagaaacaataataattttcaagtatagaatttttggtatgtttaaatttctatcatttacatttccgtttattggaatgttttttctaatatcatatttcagttttttaattgcctttttctcattgataagtttttttgttatgaattattgttatgataaattaacaaagaaggcaaaaagaagagctaatgaaatttaa

SEQ ID NO: 304304 - DNA, 162 bp, Proteus mirabilis
atgcaaataattgaatatgtattactcatgctaatacagggttctactgtacctgtaacggaagatatatacacgcaatcggaatgcaataaacgtgctgaatatttaatgtcagtgaggaatgttaaagttgtttgtggagaggtatggaatgaaagataa

SEQ ID NO: 304305 - DNA, 177 bp, Proteus mirabilis; identical to SEQ ID NO: 297340

SEQ ID NO: 304306 - DNA, 339 bp, Proteus mirabilis; identical to SEQ ID NO: 297339

SEQ ID NO: 304307 - DNA, 246 bp, Proteus mirabilis; identical to SEQ ID NO: 297338

SEQ ID NO: 304308 - DNA, 915 bp, Proteus mirabilis; identical to SEQ ID NO: 297053

SEQ ID NO: 304309 - DNA, 2310 bp, Proteus mirabilis
gtgcgcctgataatcagtctactttttagcttttttctgactatctcattcaatacttcggtgtttgctgcggatgttgataaattacgtcaagatatcaaacaacttgaaggcagtactaatcctcaagatattgaaactgttcaggcgctacaaggcaccatcaattggataaatgatggtgaaaaagctcaagttaatgcggataattatcaaaagactattgatgaatatccgcagatcactcaagagttaagggctaaattactcgaagagagtcactcagttccaacaattccagaaaaaattactattcctgagcttgagcaaaaaatcattcaagtgagtagccaactgatggaacaagctcggctacaacaacaagagcaagataaaagccgtgaaatcagcgaatcactcaatttactccctcagcaactttcagaagctcgtcgtttactaagtgatgcaacggcacgtttagcggcaataggggcatcaaacaccccactagcagaagcacaaaataaattaacccaagctgaagtcacagcacgaaaagcgatggttaatgagctggaaatggcgcaactttctgctaataatcgtcaagaaattactcgactgcgcttggagctatttaaaaaacgttatcaacgacttgacgtacaactgcaacaattgcgtagtttactaaatatcaagcgccaagaagtggcagatctcgctttagaaaagacagaaatgctcgccgagcaagggggcgaactccccgagtttctgactaagcaaatcgagactaaccgtcaactttctcagatcctcaataaacagacgcaagaaatgagtgagttaaccgaaaaacagcgtctaacaacacaacaaacccaacaagtaagacagacactcacaaccattcgagagcaagcccaatggttaagtggctctacggcattaggtgaagcattaagaacacaattggctcgcttacctgaaatgccccgctctcaagagctggatagagatatcgttcagttacgtgttgagcgattaggctatgaagagatgctagaaaacctaggcaaaatccagcctcctgaaactaccgatggctcaaagctaccagaagctcagcaatatatttttgactccctcattcaagcgcgccaagagttactcaattctcttttatccggttatgactcccaaatcctagagttaaccaaactcaaagtagccacaacacaacttgcggatgccttaaaagagacaaaagatgccacaaaccgctatatgttctgggtggccgatatcagcccaataaaactcaattatccggttttattaattaaagatattactcgcctactctcattagatactttctcacaattagggcatgctgcggttaacatgctcaaaaaccaagatacctttatctatctactggtcaccctatctattgtcggttttagtcttcgtacccgtaagcattacaatgcgtttcttgaaagagtcagtaatcgcattggtaaagtcactcaagatcatttctcattaacggtgcgtaccgtattttggtcaatattaatcgccttaccactaccgctattatggtctgccgtaggatatggtttacaaagtgtcgaatggcgttatcccatggcgggagcgattggttatggtgtgactgccgcagcccctgtgctatggctatttatgataagtgctacctttgctcgccctaatggattatttatcgcgcaatttaaatggaaagagagtcgtgtgaaaaaagcgatgcgcttttatcaactgtcgattttcgtcattgtgccgttaatgatgtcgcttatcacctttgaatactatagtgacagagaatttgcgccaacggttgggcgtttttgctttttattattgtgcattgctttaagttttattacctcaagcctaaaaaaggcacatgtgccgctttacttagataaacatggctctggtgataatgtgataaataccattttatggtggttcttacttgttgcccctgttcttgcagccctcgccgctatcttaggctatctctcaacctccatcgtattactgggtcgcttagagatgtctgtggcgatttggtttgccttgctgattatttatcatattattcaacgatggatgctgatccaacgtcgtaagcttgcctttgaacgagccaaacaaaaacgggcagaaattttagctcaacgagctaaaggggaagatgagaataccattgttggcagcagtggtgagagtaccgctaactcttag

SEQ ID NO: 304310 - DNA, 993 bp, Proteus mirabilis
gtggattttcaccacgacgatcaagaaataacaccagaaacatcacttgtattggcggaaaaacaaccattattagatctcaatgcaactttcacctctccgacacaaactaaccctgcactggcttatttacgcagtttaggttctaaacgtagtcgccaaacgatgggatcatttttaactatcgtggcaaaaatgattggcttctcttcaataaagcattgccaatggggagcacttcgccgccaccatattcaagcaattatcgacatgttatctgatgcggataaagcacccgccacgattaacacttatttagctgcactaaaaggtgtcgctttagaagcatgggcgatgaaattgatggatacagaaagctatcaacatattcgccaagttaaatcggtaagaggcagtcgattacctaaaggtcgagcgcttactggacatgaaattcgcgcactttttcgctgttgtgaaaaagaccactcctcaaaaggtttaagagatgcggccatattaagtgtactacttggctgtggattacgccgttcagaaattgttgcgcttaattacgagcatattcaatttcgtgatcaagcttttattgttagaggaaaaggtaataaagaaagaatatcctatatgccagaagatacttgggagcgtgttcaattatggatcgaggaaataaggggatcacaagatggcgcccttttcacacgtattcgccgctttgatgatgtaacggatgaacgaataacagaccaagccatttattatattttagagacacgccaacaagaaagtggcattgataaatttgctcctcacgatctgcgacgcactttcgcctctgcaatgttagataatggcgaagatattgtaaccgtaaaagatgccatgggtcatgccagtattatgactacacagcgctatgatagacgtggtaatgatcgtcttagaaaagcggctcgacatttacgtttttag

SEQ ID NO: 304311 - DNA, 1038 bp, Proteus mirabilis; identical to SEQ ID NO: 296353

SEQ ID NO: 304312 - DNA, 1101 bp, Proteus mirabilis; identical to SEQ ID NO: 297478

SEQ ID NO: 304313 - DNA, 1743 bp, Proteus mirabilis; identical to SEQ ID NO: 297479

SEQ ID NO: 304314 - DNA, 1533 bp, Proteus mirabilis
atggcattagcagtaatatatacgcgagcctcattagggatctctgcaccacttattactattgaggctcatattagccagggattaccaggactcactttagttggtttacctgaaactgtcgtaaaagaagcgaaagatagggtaagaagcgcattaataaatagtggatatagttatccagcaaaaagaattacaattaacctttcacccgctgatttacctaaagaaggagcccgctatgatttacccattgcattagctatcttaattgcctcagagcaattaatctctgataaattaaatagttatgaatttatcggtgagcttgcactttccggtaaattacaaaaagtgaatgcggttattccctcaattttaagcgccaacaaagataatagaatatctatcatttctattgaacatcaatcagaagtttcgctcttacctaataaatccgcgttattagctagccatcttttggatatttgtcatcatttagaaaataacactccattaattgaagctaaaaacaatattaatcacaaaacaattgaaaaccaaaataataaagatattagtgatattattggacaaaataacgcaaaaagagctgcagaaatcactgcagcaggaaatcacaacattttatttcttggccctcctggcacaggaaaaacaatgttggcacaacgcattaatactctcttacctccacttacagctaaagaagcccttgatgtattaattatcagtagcctatcaaatacgatacatcatgatggtaaatggcctttacgtccttttagagcacctcatcatacggcatctgccgttgctttaaccggaggtggatctattcctaaacccggtgaaattacacttgcacaccatggcattttatttttagatgaattgccggaatttgatagacgtgtgttagatgcacttagagagcctcttgatgcgcgcaaaattaccatttcacgcgctaaagccaaaattagctatcccgcaaatgtgttacttgtcggtgcattaaatccaagtcctacagggcactatcaaggtactcataatcgaacgcccgtaaaacaagtattacgttatttaagcaaagtatcgggaccttttttagataggtttgacttatccgttgaaatgccattattacctcaaggtgcactactacaatcgactcatacaaatgaatcgagtagcatcatacgagctcgagttttacaagccagagaacgtcagttccagcgaagtggcaagcttaatacttatttatcaagtaaagagattgagcatttttgtcaattacataccgaagatgcaatctttcttgaagagacattgaataaattaggcttatctattcgtgcatggcataaaattttaagagtttcgagaactattgccgatcttgagaatgagcaaaaaatacaacgaaatcatcttattgaagcgttgagttttcgcgccatggatagactgatgatctatttacaaaaacagttagaagggtaa

SEQ ID NO: 304315 - DNA, 825 bp, Proteus mirabilis
atgatctatgctgatttacatgttcacacaaaccatagtgatggtgtttgtgaaataaaagatgtccttgaaaatgcatttagaaacggcattaagactattgcgatcaccgatcacgatactaccaatcattatgacgaaatttaccgagaaggggagcgtcttggattaaatatcgtcaaaggtgttgaaatgagttgttatgactttgacgtttataaaaaagtccatgtagtgggactttggcttaacgaaaaaacgcccaacgtttacaagctgtgtgataacactctcaactgtcgtgatcagtttcaccgagaattaatattatctctcaatcaacaaggctacgatatttgttatgaagatgcgaaaaagttctcaaaatataatatcgtttttaaaatgaatatattccaagcattgagagaaaaatatccagaggaaatgaccaaagagcgttataaacaactttttggctctaaaacaaaaatagaaacagacttaaaaatggggtatatccctgttgatgaaggaattgctgctatcttacaagacggtggtattcctatacttgctcacccatgtgtctatgacaactatgatgaaatagaaaaatatgtccagtttggattgaaaggattagaaataagtcattctagaatgaaacctatcgactatgaactgacccaaaactatgctaataaatttggtttgctaaaaagtggcggtagtgacttccatgatcctgcgttacttaaatttggcgattttggcctaaatcaaacacaatttgagaccttaaaaaaggacgcaaataaataa

SEQ ID NO: 304316 - DNA, 597 bp, Proteus mirabilis; identical to SEQ ID NO: 297507

SEQ ID NO: 304317 - DNA, 300 bp, Proteus mirabilis
gtggaatttaagtttgataatatattggaactcattaatataagtgtaaattctggtatttctatatctgattatataaatgaactagctatatttagtaccgagattaataaccatattgatttaagtatgcaattaatggaatattacgcagttgataaatcaaagaccgatattaacaccataaaagaaagtataaatagtatacttgataaactttaccctatgattaaagatagtataaacgatatagataaggagttagatgaaatagagaagaaattaaatttagagaaatag

SEQ ID NO: 304318 - DNA, 441 bp, Proteus mirabilis
ttggcaggggggataaatttatatgcttatgcgccgaatgcgttgacatgggtggatccgtgggggcattgtgcggtcaaactttctaaaaatatggtagctgatggtacgcctagacctgccaataccgcagctcatcatattgttggtgatacatctaaaggtgcccagccagccagagatattctgaaaaaacatggtattgatgttgatgatgctagaaatggtgttttcctgccaaatagaaataatgttgatgaagcattgtcaggaataaaacataatggcagacatccaagtgattatattgacgcagtaaatacaagaattattaaggccgatgacgtgggtggtaaacagggggttttagatgaactatcaaaaattaatgatattctttcctctgcacgcagagacgcaagttggtatacaatactatga

SEQ ID NO: 304319 - DNA, 417 bp, Proteus mirabilis
atgtgtttgtattattggcaacatgatgtattattatttttaataaaaaaggtaccgcaatattattacagtgccttttctattttttctgttactgaattttttggtttaaataatctcttttttatcataattaggaggtatataagttatttgtgtgatattactatgtggttatttagctcaaccatacatatcatctatagctattttaccatcagacaaatagaagtaagttgtttttttattgaattaaaactattcatactaaattctttttaccaaaagagaatgttctatatttcttacttttataatgataggagtatatatagaaataaatgttataaaaacatactatttatttcgtatatttttagttggttattattaatgtttatacgcatattgtgctga

SEQ ID NO: 304320 - DNA, 777 bp, Proteus mirabilis
atgcatgaacttcctcttgtcttttttactgttttaggctctagcgcagcaggtctgtttctgatcgcttatatcagtaaaaagttaggtcaaattgatgaacaacaactgcgtaatgccaatattcttgctctgatattaatgcttgtgggcttaggtattggtggattacacgtaggtcagccactacgctttttcaatatgttattaggcgtaggccgttctccaatgagtaacgaagcttttctaagtggtgtatttactggttttgcttttgcaacagtggcactcactattatgaaaaaatggcggggattacgtgaaatttgtaatctatttaccgttatttttggtttagcttttgtttggtcaattccgcaagtttaccatattccaacaattgctaactggaacacagattacaccacattacagttttggatgacgctattaattggcggtggagtacttgcaatggtcagtggtgcaagacgtttaggggcattgtcctttattatcggtgccataattacctttgcagcacgctccggttatgtcagtttcctaagctttaatggcccagaattaagtgctgagcaatcactgttttggggtttccaattagcagtattagcattaggtattgtggttgtcgggtttagtgcattaaaagcgcaaacctcaaaagtgaccttagccacttgtgccgcagcggtcgtgattgctgaattatccggtcgcattgccttttataacttatggcatataaccatgtaa

SEQ ID NO: 304321 - DNA, 240 bp, Proteus mirabilis
atgaaaaagaattttctctattttaccttactagcggctatatcaacatcagcgctagctgtaacaccttcggctcaattacagatcaatggggatataaaaccgccaacttgtacaatcaatagttctaacaatacagaagttgtctttgactatggccgcatatcgccaagcttgataccacaatcttcaaactatcaatatgtggatatgaaaccagaaacaagcatcagtatttaa

SEQ ID NO: 304322 - DNA, 543 bp, Proteus mirabilis
atgaaatatagtttaatatattctattgtcctattttttactctttcatttacagcctattctaatgacagggaaaatatttctttagacgatggtattgtgacttttaaagggggaattgtagagcctgcttgtacagtatcttctgaaagtgaatatcaaattgttgatcttggtgttattagtagtaaccaatttcatggagtaggaagtcactctataaaaatcccattttttattaaattaatgggatgtaataaaagtattacggataaagtcagtataattattataggtgatgtaaacaataatgataaacgattatttagcatcaccgatcaacaaaattcagcttcaggattaggtgttgcattatttaatgatgaaggtgaaataattattcctaataaattcaataagtataaatttattgaagagaatgaattaaaactaaaatttaaagcaagttatctggcaacgaaagaaaacgttatcggtggaaaagctgacagcgtagtttggtttgttttcaattatcaataa

SEQ ID NO: 304323 - DNA, 1011 bp, Proteus mirabilis
atgagaaataaatcattttatttcacgctattattattttttattgctatggatacttctgctgctcgatgtcggaatgtgtcaatcaaatataattttccagcccaaatagatattacaaataaaaaagtgggagataagctttattcttttggtgcgccagacgcccctataaacgttgctggtcaatgtctacgtgctaatagtggggcgggaaatacaaatggaaattatatttatattgttgatcaatatggatcatcaccaacattatgcccgactactggtacagttgataaaaattcaccagatggatacttgcgttttcgttcaacgggaagttgtgctaattcttcttggctgctagttcttgattataaaatatctggggttggctggaccaatttaacaggtcccggtggtggtactgattcaggcgttgtttatttacaaaaaaagccacctgtaggaaaaacggttattaatcctgtctatatgttgaaacgtaattattattctcgaattggtcaaatgggcaatacgttacaaaaggaaagcgttgctcttagtgcaccaacatcgatgacgttgataaataatgcttcttgtgcagtgtctgttaatgacgtcgcatttggtgaacaaaccgctagtgacgtaaaaatgaatactattgcaggaaaaaatataaatatttcttttacgtgtaatgctgtattacctgcatacacactcagtttttctggtaaagatggtgtgaataatgccacaacagggatcattaaggttaaagataatagttcagtggggtatcaactttcttgggcagatagcacggttaaacccattaatagtgctgtagttattaataatgtggcaatagctccgaatacaaagccaaaaaccaataattttactattccgataagggtaaaacctgttgcgttatccactcagccaatccctgggccggctaatactgcattaacgattaatataaagttaaattaa

SEQ ID NO: 304324 - DNA, 213 bp, Proteus mirabilis
atgaaatctatcttaaacctgacttatccagccacttttaaatttgctttcacaaaagcggaaatcaaagacggtaaagcattcatgaatacctacggtatcaaacaagcatttgaagtgaaaagtcatgccgaacttgaaatcctgatccagtctatcgctacaaaatgcggcgtaaatccttccaatgttaattttgaaattatcgactaa

SEQ ID NO: 304325 - DNA, 138 bp, Proteus mirabilis
atgaataacggaacattagcaatgtacgaaaaagaatacgaaatttattttaattcactaaaagaaggtgacgaggttttaagctttgatgaatttgttgagtgtatgaaatgttttgaggatgaaataggaggttag

SEQ ID NO: 304326 - DNA, 852 bp, Proteus mirabilis
atgtcgatacctcaagacaaccaagccattgaagagttaattactcttgttggaggttcagataatgttattagcgtttcacactgtctaaccagattacgttttgttttgaatgatcccaatctcgctgatatagataaaattaaaaaaatatcttttgttaaaggctgttttaataatgcgggtcaatttcaagttattgttggtatggatgttgatatctactataaattattaattgataagctttcattaaaagctaaatctaaagatgatataaaatctgacgcgaaaaagaatatgggattctggcaaaagctgattgccaatttagccgaaatttttgttccattattacctatcttaatttgcggcggtttattgttaggattaagaaatgttattggcgaaatgcctatatcagataataaacccctcacttatttttatccttggttaacgccaatatatgattttctctggttaccttgtgaagccatcttccattttctacctgtgagtatttgctggtcgagtgtaaaaaagatgggtggtacacctgcactaggtatcgtactaggtataaccttagtttctccacaactaatgaatgcttacaatttaggttcacaacttcctgaggtttggaattttggtttatttactattgagaaagtaggttatcaagcccaagtgatcccttcgattttagcgggactatttctgggatggtttgagactaaattacgtcgttttatccctgattacctaaaattagttattgtgccgattgtaactcttattgtcgccgtttttgttgcccatgttattttaggccctatcggtagatag

SEQ ID NO: 304327 - DNA, 543 bp, Proteus mirabilis
atgttaggtgattttgcccctattggttcaactatttttgcctttttctattcccccatggtgatcaccggcttacatcacacaacgttagcgatagatttacaaatgactcaaagttatggcggtacacctatttggccgattatcgctctgtctaatattgctcaagcatccgccgttgtaggcattattatcgttagccgcaaattaaatgaacaagaaattactattccggcagctatctctgcttatttaggtgtgacagagccagccatgtatggcgtcaacttaaaatatggctttcctatgctgtgcgccatgattggcgctgcgctagcgggtttgatttgtggattaaataatgtgctatctaatggtattggtgtcggcggattacccggtattttatctatccaacctacttattggttagtttatttattggcaatgatagtggctattgtcgtccctattggattaaccattctggtctatcgctataaagaaaaagcaggcaccttgcaagtcgatttaaatttatga

SEQ ID NO: 304328 - DNA, 438 bp, Proteus mirabilis; identical to SEQ ID NO: 14572

SEQ ID NO: 304329 - DNA, 549 bp, Proteus mirabilis
atgtgcaaatctatattgcttaccagcctgttaatctttatcacaagaagttgttatggctctgagttaaatgcaacctcaatcattggcggtgctgttcaatcgcaatttagtatgaatgtaaaaatagctacatgcttacccgctactgttgacaatgttacttttggagcagttgatacagcgactattttatcgggtgaagttgaagggcactcaacactctttttggattgtacgggcacaattaagccacaaagagttacaatactttttgaacctgctaatcctcatttaaccatgggtagtgtgggttatattggttcaaaaaataccacacttggctattttgtgtcgtgggaagatgaacaaataggtgctattggtgaaggggtaccaatggggaaggcacttttttttaaaaaaacggatgcttcattgatgaaagttaaacttaaaataaaaccagttgtacttccattaggaggaaagtccgttcatttgggtaatggaaatacccatataactatcaaaataaaatatatctga

SEQ ID NO: 304330 - DNA, 381 bp, Proteus mirabilis
atggcctattttttagctacaggtgggctcgttgttttaatgagtaccataaaagagagttacgatgtttttcctattgggtatattaataaaaatatcggttacgattttatcggtcattggctaaatgatatggttaaagtggcgattattttggtttctcctgtattaattattatgtttttaagtgaagttgcattaggggtttattcattattttgtcctcaactaaatgcattttctctctctctttgtatcaaaggtattatcgcttttttagtattactgctcttttttacctcagcaatgacaaatgaattatatcatttttttaacagtagatacttttattctatttttatgagtatttatcatggctga

SEQ ID NO: 304331 - DNA, 369 bp, Proteus mirabilis
atgaaatggagtgatataaaaaatgataggatatatataactcaaattaaaacgggagcaaaaatatcaataccgacgtccttaaaaatcgatgctgttaatgtctctataaaagaagtgcttggtaatatagaaaagaaaggtgattttatctgtggcgttaaagctcaatccataagaaaggctttcttgcaatccttacctcaaaaagacaatatgccaacattccatgagataaggagtttatcagcaaggttatatgaagatgaaaaaggagccgaatttgccaaaaagatacttggtcataagtccatgcaaatgactgacaggtatcttgataatagaggtagtgactatattgaattatga

SEQ ID NO: 304332 - DNA, 165 bp, Proteus mirabilis; identical to SEQ ID NO: 299402

SEQ ID NO: 304333 - DNA, 240 bp, Proteus mirabilis
ttgctttatattgcattaggaattgccactgaaaaaaaagtcaaagtttggtgtgataacagggatgaattgttagaaattaaatctggggctttaagttatgaaacattattagagcgaagcaaaatattaatagaaaaaattgagcaagcttttcaacaaagtcaattaccagaaaaaatcaatcctcaattaattaagcaagtattagtgaatattcgtaaagaattatatcaataa

SEQ ID NO: 304334 - DNA, 477 bp, Proteus mirabilis; identical to SEQ ID NO: 295847

SEQ ID NO: 304335 - DNA, 720 bp, Proteus mirabilis
atggatcaaaccaacatcatacgtgatttactcgcttggcttgacaataatctggatcagccactatccctcgataatgtcgcaactaaagcgggttactctaagtggcacctacaacgcatgtttaaagaagtaacggggcaagcgattggttcttatattcgttcgaggcgtctatctcgcgcggctgtggcattgcgtttaacaaggcgtcctatcttagatatcgctttacaatatcgttttgattctcaacaaacatttactcgcgcctttaaaaagcagtttgatagaactccagccctatatcgccgttctgatgagtggtgtgctgttggtatttgtcctccaataaaattagatcctcagcctttgcccaaatgggaatatgtgcaattaccggagataaaattgattggtattgaacaaacttgtagccatacactagaacaatgggccaatgcttgttccgatatgcgtcaaacattttggcaaaattatattactaaggtaaacactatcccccatgaggtttatggtttgcaccatacacaacacagtgatgagcatgaagatgaacagcgtgttatctacaccaccgccgttgagcctgcttatgcgagttttgtagaagatgatactgcttatgaagtcatattagaggctggcgattatattcgctttgacttcgagggagaggcaaaacgaggcgccatgtag

SEQ ID NO: 304336 - DNA, 3627 bp, Proteus mirabilis
atgaatacgaacaacattaaaaaatacgcaccaaaagcgcgccgcgaatttatggatgcggtagctaaacgattaaatacctttggtatcaccgcgaataaaaagggcgagctacaaattgcagaagcgaatctacaaggttctgtgcttcaaatcgccggtaacagttttgacggtaaactggcggagcccagaaaacgcatagtggccagaagccagaagctggggtatgcacaacttattgaacaagtagcttatacctggttcaaccgtctgtgtgctattcgctatatggaaatccatgactatctaggccacggtttccgtgttttgtcgcacccagacaaccctaaaggctttgaaattatcgaccatgcgcaagatgctgcggatgaactcgggttagatagagctcgcattatcgaactcaagcttgcgggcaacaaagacgaagagctgtatcgtgaactgctgttaggccagtgccataagctacatgaagcgatgcctttcttatttgacgcattggacgatgaaacagaacttctgctaccagacaacctaatgcgtactgactccattctgcgtggattggtagacggcatccctgaagaggactggcaacaggtagaagtgattggctggctataccaattctacatttctgaaaagaaagatcaggtcatcggaaaagtggtcaaaagtgaagacattcctgccgctactcagctatttacgcctaactggattgtaaagtacctggtacaaaactcagtcggccgtcaatggctgcaaacctacccagactctgccattaaaagccagatggaatactacattgagcctgcgcagcaatctgacgaagttaaccaacagctaaaggctattacgccagaatcgattgaacctgaaaccatcaaagtacttgacccagcttgtggttcgggccacatattgattgaagcctataacgtgctaaaagccatctacgaagagcgtggttttcgctctcgtgacattccaaagatgatcctggagaacaacctctacggcctagacattgatgatcgtgcagcacagctatctggctttgcgctgatgatgatggctagagatgacgataagcgtatttttacccgtaatgtgcgactcaatgtactgtcattgcaggaaagtaaccatattgacctgccgaccttatggaaagcactcaacttatcgggaagttggcaaagtggcacgtcccagggcttgttctcagatgaagagcaagatttaagctcgttcaatgcagacaaccgctaccaactgctgacgcgaacattggcaagattttctcaagctaagacctttggttctttgattgatgttccaagcgatgagcatgaccagctaaaagagttgatgaacacgcttgtcgagcttcaagagtcaggcgactcaatgcaaaagccagcagcaaagcaattgattgaaattgtgcatcaggctttggttttatctattcgttacgatgctgtgattgctaatcctccctatatgggagcaaaaggaatgaatgcagatttgaaagagtttgctaagaaacaatacccaaatagtaaatcagacttgtttgccatttttatggagcgagcatttaaattgctttctcaatatggatttaatgctcaaataaatatgcagtcatggatgtttttatccagctatgagcagttgagaaataacctgctggaagaccatacttttattactatggctcatttaggtgctcgtgctttcggtcaaatcagtggtgaggttgttcaaactaccgcatggattattcgaaataagcacattaagaaataccagcctactttttacaggcttattgaaggcaatgaggaagaaaaacaaaaagcattattaagtcgagattttgaattttcaattacaaaacaagatgattttaaaaagattcctgggagtccgattgcttattggttagatcacagtctcgttacactatttgatggtatcaaaattggagatattttagatgttaaagccggtctaacaactggtaatactgaaaagttcttaagatattggtttgaggttgatttctccaaaataaatcgttcaaaaacgaatggcgagatttcaaacttcttggaatatgttccatatcaaaaaggaggcgaagagcgtagatggtatggtaataatgattatgtcctctcatacagtactaaatcattacaaaacatgcaaaaaatgccaggacatcgaggtgatggtatttcaaagttttttcttcccagtataacttgggcaaagattgctactggagatttttcatgtagattaacagatttaggaactgcttttgatgcaactgcttcctctgcttttgggagcgctacaaatatagaaaatgcagccgcgatactaaactcacctcttgggaactatattttaaactcactgaactcaacgatggtatatctacctagagacatcaaaagtattccatttcttccaataaaaaatgctcatgatttagttatatcccttcgtgaaatttcaaaatctgactgggatgactttgaatattcttatgattttaaacgcttaccattaataaactttaaaagttcattaatagaaggttcattaattcaatataaaaactattgtcaacaagaggtaaataagtttatttccttggaggcacaattaaatgaaaatgttagcgccgcatatggctggccagtattagaagaaacaaaaaatcgaaaggttactcttaaaaaagaatacgttaaagatatttcctctatctctaataacatgtatatgttagccacgtcaaaagagctaatttcttatgctattggatgtattttaggtcgctactctcttgaccgagagggcttgatttacgcctattcaggcaacaaaggctttgaaaaattgtttaccgaaggagcttacaaaacttttccagccgatgaagatggcatcattccgttaacagatcaagaatggttcaaagacgacgcaactagtcgttttcgtgagtttgtccaagttgtttggggtgaagaacatctacaagaaaaccttgattttgtcgctgaatcactatgcttaaatgcgataaagcccaagaaatcagaatcagcgcttgagacgatccgccgttatttatcgactcagttctataaagaccacctgaagacttacaaaaaacgccctatttattggctgtttagctcaggcaaacagaaggcttttgagtgcctagtgtatttgcatcgctacaacgagggcacgctttcgcgtatgcgtaccgagtatgtcacccctttactcggcaaatacgatgcttatgcagagcaacttgagaagcagattgaaacggcagactcgaccagtgaagcgaaccgcttcaagaaagagttggatgctttaatcaagaaacaggttgagctacgagagtttgatgacaagctaaaacacttcgccgatatgcgtatttcactggatcttgatgatggcgtgaaagtgaattacggcaagtttggtgatctgttggctgatgttaaggccattaccggttcggccccggaggttaactaa

SEQ ID NO: 304337 - DNA, 1077 bp, Proteus mirabilis
atggcagagaatccgctcgcagaagctcagcgagaatccgcaggggcaagcacatttggtaagtataattaccaatttcattgggcgttgtgcgagatcattgagaagcacaagaataagaaagagtatgctttactaattgagtatcatgaggatgttgtaattgcagatagcttagatgcagatgtggcacaatttgaattttaccaagtaaaaaaccagaaagctgcgtatacaccagcttctctgactaaaagaaaaaaaggagctaacgatactctgaagaactcagttctcggtaagttacttagctcttgtatcaatacagaatatgaagaccgaattacaactattgggttggtctcctcaagcgggtttagcctaaaccttgataaagggttgaagctggacgttatcaggggtggagatattgctgcaagtgatttggcaagtttgacgcaagatattgataatgagctgggaattaaagtgctacctgaacacttacagtttattgttcctgatatacagttaaagaatcaggaagattatgttttgtctcgctttgcgcgtctcgtaaatgagctgtttcccggagcattttgcaacccagtaaacatttatcgctctgttgttgatgagatgggacgaattggccgcgtagagtatgactatagagattgggcaagacttatcgagaagaaatctcttacttccactgaagtacatgacgtgattactcagcatacgactcatccatgtgttgatgatttaaaaagtgactttgacgacttagcaagagacttaggttggaaagcaaaacaaaagcgtactttcaagagtaaactggctgtgctagcactgcgaagagctggattcatgagcgcgctagatattgagattacgaacgcatttaaacaatctcataacaaggtcgatgaaaataactattctgacgataatacttatcttgaggcgctacaaaaacaagctattgaagattgcttacttgtgaaggttaatgaccaagatgaactattgttagaagtcatctactgtttattaaaggctaattga

SEQ ID NO: 304338 - DNA, 1725 bp, Proteus mirabilis
atgaaaggcttgcaatttcaacgtctagttctactgtccgattcgaaaaggctggcgaatcaattcacgtttccgaagagactcaatctcgttacaggaagcgacaatagtattggcaaatcaacactagtcaaaaatctattctgggcaattggttgcgagcctcattttgatgaagaatggaactcaaatgacgttaaagccatcttgtacttcaaagtaaatcagcatgaatacattgttagccgctacgcagatggcatttattttggccgtaaaggtaaagaattggcaaagtactcaaaagtaacaggtcaatttgctaaagatttcgctgaagaagtaggttttgatctgatgctcgcaaataggcaagacggacttgattgcccacctccagctttttacttcctaccattctacatcgaccaaaagaaaagttgggatgaaccatggaatgggtttgaagggcttggtcaatacagtaattttaaaaaaaccttaatcaagtacttctgtggttacttacctagagagcattttgagctcgaagaagatgtatttgcgcaaaaagttatagaacaagaagctaatcaacaagtaagccgaattgtagacgcaattagtgttcttgaagagatagcaccggagcagactattgctcttactcaagcagaatttgagtctattcagcaggagattgaaaaagaattaacagcgttttcagcgcaccaatctgagctgtttgagcaacaatcggcgctagcaaatgaaatccatgatttagaacaacaacaccttatcgctagcacttatgcaagagagctcgacgaagattacacattcgcagtagaaaacgtaccatcagattctctagagtgccctttatgtggtgttgaacacgataactccttgttaagtcgagcgggtcttttagctgataaggaaggcttagagcaacaagcaaatagcattaaggctgaacttgaagaaaaatatagacaacgtgcagagttggcagaagagttgaattttgtagcctctgaaatcgagcgaatcaataaaaagtacttaaaagaggatacgcttgaagataaaactaatgaacaacgggcgtttgagcaaacacttcatgccgtttcccaaaaaaaagttaacagtagcgtttttcagaaaaaggaaaactatctacttcaatcgcaacatgctaaggacaaacagagcgacataaaaaaagaacaacgcaagcttgttaagaagaaagataaagacgatctgaacgagctatttatgggcaacttagtcgaaagcattaacgcgttatcggctactggagttaatctaactggtgtcaaagcaccgatggattataaaaaaatcctaggtggcggtgcagcagaaggaacacgaggtacactagcctatcagctagccgttcttcgccagattaatcatgctaatcattgccaactagctccgtttgtaatcgatactcctaaccaacaagaacaagcaaagcatagatatgagcaaattatggatgttgtcactgcgaatatccctaatggctatcaagtgatcttatgtgctatggacagcgacgccttatccaactataaaaaggatgcacatatcattgagctagacgacaaccgtttattgcaacatgagctttatgcacaacttcgcgttgagtatgagcaagtcgttctaagcaacagctag

SEQ ID NO: 304339 - DNA, 684 bp, Proteus mirabilis
atgaatagaactaattttctcgttaccttcttaatagcgttgttcgctatccctgcatttgcagaacacccaacatcgttcagccaggcaaaacgatttgcccgagaaatttaccaagacaaccagagtacgttttactgtggatgtagctataacaatgatggtgcgattgatgctgcatcttgcggatatgaaccaaggaagcaaccgaaacgaggagaacgcttagagtgggagcacgttgtctcagcttgggaaattggccatcaacgccaatgctggcaaaatggtggtcgtcggaactgtgaaaagaatgatcctgagttttctaaaatggtttcggatctccataacctcgtaccatcagtaggagagctcaatggggataggtcaaattttcgatttggcatgattccgaacgaaccaagggcctatggtcaatgtgatttcgaagttgatttcaaagaccgccgagcagaaccaccagctaaccgtcagggtgatattgctagaatttatttctacatgcgagatcaatacggcctaagactaagcagacaacaaactcagctatttgaagcttggtcaagaatggaccctgttgacgaatgggaaaaagtacgtgatttgaagattaaaacaatccaaggcaactcgaattgctatgtatcaaacagctgttaa

SEQ ID NO: 304340 - DNA, 846 bp, Proteus mirabilis; identical to SEQ ID NO: 293112

SEQ ID NO: 304341 - DNA, 198 bp, Proteus mirabilis; identical to SEQ ID NO: 293113

SEQ ID NO: 304342 - DNA, 489 bp, Proteus mirabilis; identical to SEQ ID NO: 272906

SEQ ID NO: 304343 - DNA, 222 bp, Proteus mirabilis; identical to SEQ ID NO: 12986

SEQ ID NO: 304344 - DNA, 477 bp, Proteus mirabilis; identical to SEQ ID NO: 293118

SEQ ID NO: 304345 - DNA, 816 bp, Proteus mirabilis
atgcagcatgtccctgaaagcgtgattcaggcaccagaatcacccgacgccccggaggcgctgccggggtgtcgttccatttctgatgatgacctgtgcgcctggtgtacccgtctgctttaccgtcccggagaaatcagtctgtgcagactgagtatacaggcaatggcatctggccatccgtctgtgaccggaacggttacgcgtacggctgtccggaatttcagccgaatatcattcatccctgatattaccgggtcatcacggtcagtgatgaacgtgatgttgccagctcccgacctttactccctctcatttattcacattacaaggatttcatacatgaaaacattgtctcagaacaccacctcttcggcctgtgcaccggagactgacctgcaacaactggtagccactcccgtccctgatgaacggcgcatcagcttctggccgcagcactttggcctcattccacagtgggtgaccctggagccccgtatcttcggctggatggaccgtctgtgtgaagactactgcggtggtatctggaatctgtacaccctgaacaacggcggggcatttatggcacccgaaccggatgacgatgatgacgaaacatgggtactgttcaatgccatgaacggtaaccgcgctgaaatgagcccggaagccgccggcattgctgcctgtctgatgacgtacagtcatcatgcctgtcgtacggagtgttatgccatgacggtccattattaccggctgcgggattacgccctgcagcatccggaatgcagcgccattatgcgcatcatcgactga

SEQ ID NO: 304346 - DNA, 819 bp, Proteus mirabilis; identical to SEQ ID NO: 293120

SEQ ID NO: 304347 - DNA, 195 bp, Proteus mirabilis
atgaccggggctttttactttcagggagcaacagatatgccgggttgtacatcacgtttattgcccgaaggccctttctcacgcgaacaggctgttgccgtcaaaacagcttaccgcaatgtgtttactgaagatgaccagggaacatattcccggctggttatccgtaatgctgaaggtcagttgcgctggtga

SEQ ID NO: 304348 - DNA, 2847 bp, Proteus mirabilis; identical to SEQ ID NO: 293122

SEQ ID NO: 304349 - DNA, 873 bp, Proteus mirabilis; identical to SEQ ID NO: 293123

SEQ ID NO: 304350 - DNA, 873 bp, Proteus mirabilis; identical to SEQ ID NO: 6091

SEQ ID NO: 304351 - DNA, 603 bp, Proteus mirabilis; identical to SEQ ID NO: 6093

SEQ ID NO: 304352 - DNA, 207 bp, Proteus mirabilis; identical to SEQ ID NO: 6094

SEQ ID NO: 304353 - DNA, 570 bp, Proteus mirabilis; identical to SEQ ID NO: 272910

SEQ ID NO: 304354 - DNA, 384 bp, Proteus mirabilis; identical to SEQ ID NO: 293130

SEQ ID NO: 304355 - DNA, 210 bp, Proteus mirabilis; identical to SEQ ID NO: 293131

SEQ ID NO: 304356 - DNA, 276 bp, Proteus mirabilis
atggaaatatggtttaaggaatttgagtcacatggacgtcagattctaatcaagaaagcacataactccgaagagtcaaaaataggggtgcaatattgctggcccgagaaactttttgaggtcgactttggattatggatagattacgacgacgatgacgaggaaagctttgataaagcggaagaagcacgcaacaagctattcgacaccatcgatcaggaagcagtagataccgcggtgagtaacttaattcaaaaactcaagcttgatgattaa

SEQ ID NO: 304357 - DNA, 684 bp, Proteus mirabilis
atgattgaaatctcatcaaaagttaaaaactttattttttggatatcattaacttcagtatctttaattgtatttggtattttcattatcgatatctttgtcaccgatgctaaaggaaaagacaaactgagcattatcttctcctatctatctaccgtatttgcatttttatctgcattagctttatttgcgactattgttgtttacttttggcaaaaaaaagataataaaagtaaacaaagagagatagatagaaagttactttattttgttaatataaaggctaacgacttcctagaaaaaattaataatgttttacacctcattgataatgagaaaaaataccagcaaatagaaatgcagaaaaacgacttgtgctatattgaggtcttagagtgtgacaatcctttattttataaaataaaccttagattaaatagtaatgaattcttagatagaaataatatacatgcgagtttggatttatttaagttcatcctagaggttgattcgttaaatgaagaattttttaataaaacttcacactatattatatatgcatatatgtatggtcccgatgttcctgatgagttttatcactgtacagataaaaatgaattaattaatttcttacataacaccaaagataaaataaaagaatatttaaatagttcgagctattaa

SEQ ID NO: 304358 - DNA, 180 bp, Proteus mirabilis
atgaaagataaatattatgctggattagaaaattacaaagattgtattgaaattgaaccgacaataaaggattgctttgttttaaataccccatcttggaatatggatgtgacaaaacaagacttaattgacatcagaaatactattacagaaatactagaggctgataatgaaatttaa

SEQ ID NO: 304359 - DNA, 198 bp, Proteus mirabilis
atgaaatttaaggtcggtgataaggtttatattaaaccgtggcatatcatagcaattatttattatgttgatgacgaagattacgctattccctacttggtcgaggataagagcagtcaaacatcatggtggcatgaggaagatttggagttaatcaatgaaacaagttcaagcaatgacgacactagtgttaattga

SEQ ID NO: 304360 - DNA, 228 bp, Proteus mirabilis
atgaaacaagttcaagcaatgacgacactagtgttaattgatggcgttacatatcaaatagtactccctaaacatattatcgcattacaaaccaagcaagcattaacgatggctgatgaatttgatggcttattattcccatgcaagtttgctgatataaagccaatggaagctgatggactgccgttttatataagtgatagtggagcggagaatgaaaaagtatga

SEQ ID NO: 304361 - DNA, 822 bp, Proteus mirabilis
atgaacactaatttaggcatgacttatctagaaaaagtcgcgcatggtaatgccggtgaattttatttcgcatattggatatcaaataagttcgtctggccttgtagaatcctagatatagatatgggattagatgcacaagttgaaatctatgatgataaaaataattcaactggaatgttcatcggaattcaagtgaaaacgacagctaaaacattggatgaaagcccctctattagtgttccgttaaaaaatatagtgtactgggaaagtattagtgaccctattattcttattcgggtttgcctcaacaacggtaaaaaaacaccttctttatactggcaacatttgaataaaaaaaaactaaagaataatattaaaaagggaaatgaaagtatctcttttaaattcacaaaaaaaaataaattaaaaaaaatagataaaatgaaatggaaaaatctattcttaaacgctaatgatttaaattttattgaacagattgaaagtattaatattaatcttatcaattatggtgaacttttcaaaaataattaccctaacggttggaactctgacaatccgcaagatgaaatcaatgagttacttaacgattatgataaatttcaaagtgttatcaatataaatccacgaatactgttcttatctagcgacacaaaaaaacttcaaaaaaattataataaatacattgagttaattaaagatgggtttgaagatatgattcggaaaggacttttctatcatgaagattttaatcgatttgttcctttaaacccattgattcaatcttggttagcacgctaa

SEQ ID NO: 304362 - DNA, 1185 bp, Proteus mirabilis
atggcattaaccgatatcaaagtgaaaaccgcaaaacccaaagacaaaccctataagcttgctgatggcggcggtatgtatctactgattaacactaatggttctaaatactggcgcatgaagtaccgctttgctggtaaagaaaagatgctttctattggcgtataccccgatgtaacgttagccgatgctcgcgagaaacgcagtgaagccaggaaactcctcgctgctggaggcgatccaggggaggcaaaaaaggaagaaaaaatcgcgcagcaaatgagtctgaaaaatacgttcgaggctattgctcgcgaatggcaccagtcaaaagctgatcggtggtcattacgctatcgtgatgaaatcattgatacctttgaaaaagacatttttccctacattggcaagcgccctattgccgaaatcaaaccaatggagttactggaagcactacgtaaaatggaaaaacgtggagctctggagaaaatgcgcaaggtccgccagcgctgtggtgaggtgttccgctatgcaattgttactggccgggcagactataacccagcccccgatcttgccagtgctttagctacaccgaaaaaagtacattttccctttcttactgctaatgaacttccccacttcctcaacgatctggcgggttataccggaagtataatcactaagacagctactcagatcattatgttaaccggcgtacgaacacaagaactgcgttttgcacgctgggaagatatcgattttgagacaaaattgtgggagatcccggcagaagtaatgaagatgaagcgacctcatattgtgccgctctctgagcaggtcattatgctatttaagcagcttgaaccaatctcaaaacatcatcccctagtctttatcggtagaaatgatccccgcaaaccaattagtaaggaaagcattaaccaagtaattgaattacttggatataagggaagactcacagggcacggtttcagacacaccatgagtacaattctgcatgaacaaggctttaattccgcctggattgaaatgcagttagctcatgtggataaaaattccatcaggggtacctataatcatgccctgtatctcgatggccgccgtgaaatgatgcaatggtacgctgattacattgattcactctccagccgggaaagttaa

SEQ ID NO: 304363 - DNA, 738 bp, Proteus mirabilis; identical to SEQ ID NO: 293095

SEQ ID NO: 304364 - DNA, 204 bp, Proteus mirabilis; identical to SEQ ID NO: 31953

SEQ ID NO: 304365 - DNA, 405 bp, Proteus mirabilis; identical to SEQ ID NO: 27346

SEQ ID NO: 304366 - DNA, 267 bp, Proteus mirabilis; identical to SEQ ID NO: 27347

SEQ ID NO: 304367 - DNA, 1185 bp, Proteus mirabilis
atgaggatagtgtattttgtcaatgcagcgtggtacttcgaactgcattggttggaccggtcagaagcggcaattagcaaagggtatgaagttcatcttgtaagtaattttgctgatgacgccatcaaaaataacctggaaaaaaaaggtataaaatgttgggatattgagcttaacagattttctaaaaatgtgtttaaaaacatttcaatattcactgcatttagaaagatctgtaagcaaattaaacccgatcttattcatctaattactataaaaccaatcctttttggtggattgtatgcccgggttgcaggcatcccttttgtcgtgagctttgtgggattagggagattgtttggcaataaacgaggttggttgaataaattcattttcaactcagtactgtcaatttatagtcttttgctatcagcaaaaagcccagcgcaagtaatatttgagcataatgctgactttgctgagctgagtaaatatattaaatttgatgaaaataacatccacatcattgaaggagccggggtagacaggtttcgctttagttatcagccagaaccaactcagaataatttctcggtattatttgccagccgtttgctatggtcaaaggggctcggtgaagtagtcgaggccatcggtaaggttaaacaaaatgaaaataacacaaccttatacgttgcgggaattctcgatgacaaagatccggatagaattgaattagatcaaattttgcaatgggaaaaagaaggaaaaatcatttggttaggtcgaagagatgacatccaaaatttaatcagaaatagccatgtcgtgattttgccaactaaatattcagaaggcgtgccaagaataatcattgaagcgtgtgctatgggccgaagttgcattgtcggaaatgtacccggctgtaaagccataattaaagataatttcaatggatgtgtactaaaaacacatagcgctaatgagattgcggagaaaattgaatatcttagagataacatggaaataagaaaaaaattcggtctacgctcagccgaaattgtaaaagaaagattcagcaaagaaattgttatagataaaacgggtaatgactccaacttattgatagtgttttatgttcagataatgcccgatgactttgtcatgcagctccaccgattttga

SEQ ID NO: 304368 - DNA, 660 bp, Proteus mirabilis; identical to SEQ ID NO: 52324

SEQ ID NO: 304369 - DNA, 216 bp, Proteus mirabilis; identical to SEQ ID NO: 52322

SEQ ID NO: 304370 - DNA, 411 bp, Proteus mirabilis; identical to SEQ ID NO: 52321

SEQ ID NO: 304371 - DNA, 561 bp, Proteus mirabilis; identical to SEQ ID NO: 102670

SEQ ID NO: 304372 - DNA, 657 bp, Proteus mirabilis
atgcttattcttggcagcgttaaacagcttacccaggatgcggtcgtgcaggtcgatgatttcgtcggtgacggtggccatgccctcggtggccagcgccacgagagtggcgtagcgccgttgcggctcgaatttggccaggtcggcgggtgtcatctggccgccctcgcgggcaatcttgagcaggcggttctggtgaaccagccgctcgatgccggtaggcagatcgagtgcctgccatgccttgaggcgttcgatgtgttccagcatatgccgcgaatttggcttggccggagactggcgcaaccaagccaaccaggtcgtcttgccgttgtcccggcgcttgagcagatcgtcgaggcggcggcgatgcgcgtccgccagtggttcggccaaggcgtcgtagatgcgccggttagcacgggtgatcgcctcggcactcgcccgctcgacggcgttgagggcgggcagaatgaccgactgccgccgcaggtgcccgatcaaggcgctggccagcacgatgcctttgtcggtttgcatcgccagctcggtcagcatctggacggcctgccggtaatggctcatggtgaagggccggaaaccgaacacggtttgcagctcgctcaggtgctcgcgccggcactgttgcaaagttag

SEQ ID NO: 304373 - DNA, 1017 bp, Proteus mirabilis
atgaatgagttaaactgtgataataccgatgtttatgtctatataggcgacataactagaacaggttatgataacctatctgaacaaatagaaaacagagtaaaagaagataagatatctgaaaatgtaattttttgtatatctacttatggtggagacccaaacgcaggctaccgaatggggcgggcgttgcagcattattacgctggaaatgtttccgttcttgtgccaagcttatgcaaaagcgctggtacactagctgtaatatcagcaaacaatttaattattggtgatcgtggcgaactggggcctttagatatacaactgagaaaggccgatgaaatgggggagtcaagttcaagcttagatatatttaaagctgtcgatcaacttgaatcaagaactttatccgcctttaggcaatatttaacagatattaagtatggaagtggcattagcacaaggctatcagctgacatagcatcacagctagtaagcaacttatttcagccagtagccagccaaatagacccgcacaaaataggtgagcatcaaagagcgatggggatcgccttatcctatggcgaaaggctagccaaaaaatccaaaaatctgaagggtgacgccttaaacaagctgattgttggttacccatctcatggatttgtaatcgacagaagcgaagctaaggaactttttagtaaagtaaattgtcctagtggactatctgctactgtatacgaaattgttagtagttgggttacacagaacccatccatcattggaaatcaaccattagttattgattttgaggaaattttaaagagtaaaatttccgatgaatccaacaaagagattagagaaaatgacaatagagataatggaactgagccggaacctgtcgagggagaaccagtcggaactgaatctagtgaagctagtaagcaaccagaacaaggagatgaatcgggaactaaaaaaagcagaacaacaggaagcaaaggtaaggcttcataa

SEQ ID NO: 304374 - DNA, 687 bp, Proteus mirabilis
atgaatcaattgaataacttagtaaatactggcgaaccaacgatgagtagtttagaaatttcagagttggttgagtcaaggcatgacaaagttaaacaatcaatcgaacgccttgctaaacgaggtgttatcaaactccccccaatgggggaagttaaaaatcacctaaaccagacagtttctgtgtatcaaattaacaagagagatagttacgttatcgttgctcagttatcacctgaatttacagcaagactggttgatagatggcaagagctagaatcaaaacggtccctcatccctcaatctttaccagaagctttgcgcctcgctgctgacttggcagagcaaaaacaaatcgcagaacagaaattagcaatcgcagcgcctaaggctgaatttgttgatcgctacgttcaagcaactggattactgggttttagagagacaagcaaactgttaaaagtgaaagagaacttctttagagagtttctactttcaaaacgaattatgtacaaactggctggtaaattaacaccttactcagagcaccttgaagcagggcgttttgatgtgaaaacaggtgagaatcaaataaacggtcacgcttacacacaagttaaattcacacccaaaggaattcagtggattgctgggttattggcggtggagcaattggaggcagcttaa

SEQ ID NO: 304375 - DNA, 816 bp, Proteus mirabilis
atggctagagcaagaaatattaaaccaggcttttttactaatgatgaccttgctgaatgtgatccatttgcacgaatcctattcgttggcttatggactattgcagatagagaaggtcgcctagaagataagccacgtaaaattaaagcaatggttttgccatacgatgacgttgattgtgaaaaattactcgcacaactacacagtaaaaactttattaccagatatgcagtagatggaaatgagtttattcagattaataactggaagaaacatcagaaccctcacgtaaaagaagcggctagtgaaataccagaacaagtaatgcaacctactgaaaacaaaggagcaccagaaaagcaccatacaagtacagtgcaagaatcagaagagcatgcaacaaatcctgctgattcccttaacctgattcctgattcccttaacctgattcctaataacacccaagccgaaaacacggcttgtcctagtgagccagaaaatcaatctgcaagtattcaccaaatgtctagcaagtatgcattcgagggagaagtgatccgcttaaaccacaaagactttgctgaatggcaatcgctgtattcaaacatcgacttggtgcatgagttaaaacggctagatatcgagttcagagccgctaagcctaaaaattggtttatcactgcaagccagaagttaaattaccaaaacaaaaactccggtaattcatggagagccacgccacctaagcgagctgtaaacgagaattttgcatccaaggattacggtaaaacggatgcgccaacatggatgaattaa

SEQ ID NO: 304376 - DNA, 855 bp, Proteus mirabilis
atgaacctatcagacaaaatcgagcaaatcgaaaggcaacttgaaagcctaagcaaaccgccagcagaaataccgaacaccgaagtaacgattattgaattaacctgctctaagcatggagcatatcaagccagaactcgctcaagtaaaactgcgatatcaattccatcaagaccaacaccttgcccacactgtctcatggaagagctggaagctttgaagatcgaacagcgtgattgtgacatgcgtttcaagaagaaacttacagagaaactccttgatgaacttcatgttccagagcgctttaaatcttgcacactggataactacgaggctgtgaacaaggatgctcaatacaatctcaatgtctgcaaagcctacgttaaaaaatgggaagatcgcctaaaaaatggcggtggtttagtgatgtgcggaaagcctggtactggtaaaaatcatctagcattagctattgcgaaaagtgttgttgaggattatcagaattctgcgctattcacgacagccttacgaattgcaagaaagtttaaatccacttggagtaagaactctaccgaaacagagtttgaagttattcggatttacacaaaaccagatttgttaatcattgatgaagttggtgtgcagtttggcactgaggcggaaaagttgatcctatttgaaatcatcaacactcgttacgagaagatgaaaccaacaatcctaatcagcaaccaaactagagaggagttaggcgcattcattggagagcgagttattgacaggatgaatgacggcggtggttgcacgctggcttttacatgggatagctaccgaaccagaaaacaagtcgcttaa

SEQ ID NO: 304377 - DNA, 174 bp, Proteus mirabilis
atgaatgacggagcagtttacaaaattactggtacatggaacggaaaacaatttgaaaagctaatgcaagctgaatgtgagttagatgcagaggcaacggtaatcttctgggctaatttaggtggtgctcatgtagataatttgagcgttgaataccacagcgctattaattga

SEQ ID NO: 304378 - DNA, 222 bp, Proteus mirabilis
atgaaagttagattattaaataatggcgagtttgagacgctcgaacatttgcagtttcctatagaggttaatggctctaaatacggcgacggacaactcattaaggttccagttaatacgctaatcgatataaataacgttgatagtgaggcgctcaaacgtgatgtctctcctcatgatttttatttattcgagattggttctgagtgtgaggttatttag

SEQ ID NO: 304379 - DNA, 261 bp, Proteus mirabilis
atgaaaggaacaacgttaacagagctgaataaagcttacttgcgccaaggtagatttatggctggtagatacatccatgcgaacgttaaatatttcatagataaaacagacgcaatattttttgagcttgaactggcagccgataagcagaggcctagaggcaaggcgtatcagagaatcaatgatattgaaaacgcttctagaatggcaaaatttaaagcgttacaactaaaagtaacagtaagaaagggaggcatctaa

SEQ ID NO: 304380 - DNA, 201 bp, Proteus mirabilis
atgcagggaactaattggacagatagaaaatgtcatttctgcgaatcagaaaaattggaaatcatgcaggtatttcataatacatttgttcgttgccggagatgcggagcaagagggccggttgcaattactgatgaatcggcagttactttgtggttaaaaggtggtcaggatgccactcccaccaatgccagagggtga

SEQ ID NO: 304381 - DNA, 174 bp, Proteus mirabilis
atgaacgagctcaagaaatgcccgttttgcggagggcgcggtgaataccactacttcgaggatttaggtcacttagtcatctgttctaacaccatttgcccttcaaataagtttggatatacagatgctgaagaagctgagcaggcatggaacaggagagctaacagtgagtga

SEQ ID NO: 304382 - DNA, 246 bp, Proteus mirabilis
atgctgaagaagctgagcaggcatggaacaggagagctaacagtgagtgaattaaaaccttgccaccactgcagatcagaaaaactagaggtcatgcaggtattctgtaactcctttgttcagtgtaatcgctgtggcgcaagagggcctattgctaaaaatatgaaattagcaatcgagtattggaatgcacgaggtaactatggagaacttctgtctacacgaatcaacgaaaaagctatttga

SEQ ID NO: 304383 - DNA, 234 bp, Proteus mirabilis
atgaacccaaaactaaagctaatggatgactcagttgattttgtaatcatcggtgagaagtcatttaaaagatggtgtgttgttaagagagcatttaaatacctatttttatctgtctttggtaaacagggcgcagttgattatcttggcgtaatgtttcgcctcgggtctgttcatacagcggaacgattgaatgagctaactggatttgatgcgacaaggaaaatcaaatga

SEQ ID NO: 304384 - DNA, 453 bp, Proteus mirabilis
atgagtaagaaattgctaattgcctgtgctgtgatgatgacattgttatttatcatgactcgttggcaggcaggaaaaattgatgaactgaaagaatcaaaccaatcactcactgaacaactttcacagcaagtcgaaataaacaaaaactaccaagctcgcatcactcgattaaatcaactcgatattaaatacactcaggagttagccagtgcaaagaatgaaattgacactcttcgtgatgctgttaactctggctctaagcgggtgtatgtcaaagccgagtgtccaaagagcgccagtaatcccaccgaaagcggaagcaatgaagccaccgcacgacttaacaaagcagttgaacaagattatctacgtctcagagaaatgatagtcgagaacgaaaagcaaactttgtatttgcagaattacattagaacggagtgtttacgatga

SEQ ID NO: 304385 - DNA, 1074 bp, Proteus mirabilis
atgaaatttactcctcaacataaaatggatgctgcattaatggcaggcacatccttaaacacacccaataatcattcaatacaagagcaacatcatcgtttaaaagatgatgctaccgttagtgcttatatgagccagaattatatttctgtttctgtcgcagattcggttgaacatgtaaaagcacagctggttaatgatttaaaagatgaattaattccaacttatctgtatgtcgtagataaagataattatcttaacggtattttgccggttaaatcattactacttgctgataatgggctttttgtttcggatattatgcgccaaacatttttctcagtttcaccggagcaaagccgacatgatgtttatcagttaattagccaaagtggtttagacagtgtacctgtgatgcattttggtaagttagttggtgtattacggcctcaagatattgctgatttaattgaagatgaaaatacgctagatgcacaaatgcagggggcaacgtcgccattagaacaaccttatttagagacaagtccggttactttgtggcgtaaacgtgttgtctggctattaatgctgtttattgctgaagcttataccagtacggtgttacatgcttttgaagacagacttgaagctgctatctctttagctttctttattccattattaattggtactggtggcaatagcggtacacaaattacctcaacattagtacgtgccatggcattaggtgaggtgagcttgcgtaatgtatggtcagtattaagaaaagagatcacgacctcgataatggtggctttaaccatgggaatagcaggatttattcgtgcttggaccttaggggttggcatggaagtgatgatagtggtgggattaacgctaatttcaattacggtttggagtgctattgtctcttctattattccaatggtattaaagcgtattggtgttgatcctgcggtggtgtctgcaccttttattgcaacatttattgatggtactgggcttattatctactttgaaatagcatctcataccatgagtgtgtttgcttaa

SEQ ID NO: 304386 - DNA, 534 bp, Proteus mirabilis
atgtcttatattgcaacagcaacaaataaacatttctattacctcgatgtacggatcgaagatatagacattcaagatattgcgacaggtttagctaatgagtgtcgctttaatggacagattgataatttctattctgttgctcagcattctgtatatgcaagttatttagttgcacctgaatttgctttagaggccctacttcatgatgccagtgaagcttatgtcaaagacctaccgtcaccacttaaaaagttattgcctgaatataaattaattgaattgcgtgtggaaaagatgatccgcaaaaagtttggattacctgaaaatatgtctgatgaagtccattttgcagatctaatgatgttagctacagaaaagcgtgatttagacattgatgcaggtagtaactggttaatgcttgaaggtattccagctagcgattttgctgtcaccccgctaccccctcgacaagcaaaattcctattcttacgccgttttaatgaactttataagggggttgagaatggctaa

SEQ ID NO: 304387 - DNA, 375 bp, Proteus mirabilis
atgagccaagaagatcgtaagacaaatgtccctgactttctttccgaattggacgctggcgtttttgaaaataaagtctctgctgttttaaatgatgtggctttaggcgttttaaataatggtggaaaaggcaaagtcactattgaattagattttgctcgccttagtaattcaatggaagaaaaacgagttgaaataactcataagcttaaattctctgcaccaacacctagaggaaaacggactgaggaagataccaccaaaacacctatgtacgtaggtaaaggtggcaagttgaccattatgcaagaagatcgaggtcaattattttctttgcaaggtcggcccgacgggaaattaaaagccattaattag

SEQ ID NO: 304388 - DNA, 468 bp, Proteus mirabilis
atgaaaactattgaagaaattagacgtgaatggcttaatatgcttattgaacaacataaaactattgctaacttgaatatagctttaggaagagcaaaaacagatgcgactttatcgcaaataagaaataaggctatagatagcaaaagtggtaaccccagaaatatgggctcccctttagctagagagatcgaagaaaagcttggtttagaaataggtacgctagatcatactccatgtaagactgataaatctcatagaaataatagctttctagaagcttatgaatctgctgatgacgcaataaagtcaataattgattttattttacataaagacacttccacgccaatccctcagtgggttgatacagatgctaaagctcatgctgactcgttagaactaaaatcaagaaaatggtttgcaaacaataaaagcaataaaaataagatcaaaaccagagcttaa

SEQ ID NO: 304389 - DNA, 222 bp, Proteus mirabilis
atgacactaaaaacatacacaagtaacaaacggggaaaatctacagaactagccagaaaattgggagttccaacgacacttatttctcaatgggctaatggtgttcgcaaaattcctgctgaacgttgccttgaaattgagaaagcgacgttaggtgtagttcggtgtgaagagcttcgacctgatattgattggtcgtatttgcgtggaactcaacaatga

SEQ ID NO: 304390 - DNA, 804 bp, Proteus mirabilis
atgaatggattaattgttattgatggttttcaggttcgtagagatatagccggtcgctattgcttaaatgatttacatcgagtgtcaggtggcgaaaaacgacaccaaccatcgaactggagttcattggctcaaacgaaagagttgattgatgaaatttcgaccgctcctgagatcacaggagcgcctattgccactgtcgctggtggatataaccaagggacgtatgtttgcaaagaattagtgtatgcctatgcaatgtggatcagcgcttcttttcatttaaaagtgatccgtacctttgatgctttagtgtcacaacagcaccaggagaaactcagtgataaggttcaagcgggcgtgatactactggaatcgatgtctaaaagtttaaacttctcgaattcatcaaaattaggggcttatcaaaagttacaagcaatggcggggttacctgagttagcccctgtttatgcgattgatgcgccaagtggatctatggatggctccagtcgtcctactgtggctttatcaacactgattaaaaaacacaatttacccatttcagcacagcaagcctataagcgattagccgaactaggcattgttgaacgtctatcacgcccaagcacgaaaactgctagcaaaacgaaagagttttggtctgttacggctagaggttgtcagtttgggaagaatatgacgagccctaataatcctcgtgaaacccaaccgcatttctttgagagtaaaacggatgagttgatccgtatggtgatgttgaataaacaggtgagcgcatga

SEQ ID NO: 304391 - DNA, 195 bp, Proteus mirabilis; identical to SEQ ID NO: 298769

SEQ ID NO: 304392 - DNA, 354 bp, Proteus mirabilis
atggataaatcaaggcagcagtttgaagagtttattaagtttcacatggatgatgcggaaataaataataaatttgaaacagcaaataacggattaaattacgctgaccaatatgtagatttaatgtggattagctggcaagcatcacgagagagcttaattaataacttaccagaaagtattaattgccctaccgcaccagaattaatatggctacaagtcgaccctgagccagaggaggaaaataaacctgtatatccagttaacttatatagtgatgatgtgacttggtgtgcagatagaattcattcaactgacacattatatattcgcgctgatttaattcaaaagtaa

SEQ ID NO: 304393 - DNA, 183 bp, Proteus mirabilis
atgactattgaacagttacaaaaagaaaatgaaaagttgaaagaagttctttttgctggcgctttcttaatggctaaagcggttcataaatatgatttcggcgttggaatggaagagcaagccaccgactttatgaaggacgcagaggaacttacaggtaataagctaccaaagttcgcatga

SEQ ID NO: 304394 - DNA, 240 bp, Proteus mirabilis
atgcctgtaactactgaggtggtaaaagtctattactcgccaactaggaataggcgatatttcagcaaggaatccgcaattaaagcagaggccaaggcgagaatattcaagaagtatccatctgaaaaaccagaatacgacactggatatgctggctacaacatttgggatgacagacctgaattctatcaacgagcattacgctttctttcttacctaataaagaaaaacatcaattaa

SEQ ID NO: 304395 - DNA, 288 bp, Proteus mirabilis
atgaataaatgctgcttatgcaagaaagaacttgatgactataacgggtatgagtaccgaggctttcattcctgtgaagagcactttgacgaagtcattgctcgtgttgatagaaagcgccaagagattattagtcaattcgattcaatttctcgtccattaaaagggttagatataagtccagacaaccctatcgggaaagctaaccgagaattacttaagggaagtctcgaagtttgtagtaaagaaactttgttagaaaaagagtatcgcaaaggaattatttaa

SEQ ID NO: 304396 - DNA, 126 bp, Proteus mirabilis
atgacaagcaatagttatgcttactttagtgttgcgtatttaataaattggtacagagaaactggaatacctgtaattgctgatgccgattatcaagttgctcatctagaagattatattgagtag

SEQ ID NO: 304397 - DNA, 483 bp, Proteus mirabilis
atgaataaagttacaaaaagggattattcaatgactgatagtgaagataaagattctcctgttatcgaagttttaaaatacatgaccattccaggatattctttttataaactatatgatgttctatctaatactgaagataacacaactgatgagcttaaagaaaatgtaaaaagaactgagttggaatcattaatacttcagtccagagcgaaagtagagcaagagctttcgattgctaagcgtattatgtatgctgatgaagtggagatagaagaatactatgatatcaatggtaaaggaaatgtagggttaaaatctgaagaatcatctttctttacaattggtgcgtctggtgagggcagaaaagtaacaaaaagagtaataaagtttagaggattcagtgaaaaatacatgcaagaaataaaatctgaaatagatgaacggaaagatgaaattatggctctaacaaaaagtaaataa

SEQ ID NO: 304398 - DNA, 468 bp, Proteus mirabilis
atgaaacactggaaactttacattgtcgttgtgatggtggggattgttgctggtggttgtgcgctgattaatgcacaagcgaaaagaattaacacactgacagaaaacaacaaagaactgactaccgcactcgaagagcagaaggctatcaatactgactatcaagtacgcatagagcgactaaatcaacttgatacaaggcgcacacaggagcttgttaatgcaaagaatgaaattagtcgcttgcgtgatattagtgagcgtaaccctaagcgggtgtatatcaaagccgagtgtccaaaaagcgctaccacttccacctccggcgtggctaatgcaaccaccgcccgacctactgacaccgctatccgaaattattggttactcagagagcgaataacacagtctgagcaaatgatattagggttacaagactatattatggcggagtgtccgtttaataaataa

SEQ ID NO: 304399 - DNA, 513 bp, Proteus mirabilis
atggatataaataaatatgatcgcgctttgcaattagatattctaactgccttatataattccttccctaatcctttagaagatgatgaatacacaaaacttagtgaaaaatttaataaccaagatcatctcatagcaaatatgttatatcttgagatgcatggattaattgaaaaaccatttattcaaagctcaacatttgatgggcttgaatatatttttaatagttatacctgcttcattactgaaaaaggaattgattttttattagatgatggtggattgagtgcaatactaaaagtacaaacaattcgtatacatagtgattcaattaaagcattagaagatattattttaacatctaatgaatcaccagacataaaagctaacttgaaatcaaaacttcgtgaccttcctgcaaacgccataacacatttgatgaatgaattattggtgaagggggtaatgaatcttcctgttgcaattcagataattcaaaaattcctccagtaa

SEQ ID NO: 304400 - DNA, 270 bp, Proteus mirabilis
atgaagatattcacggctaacattcatcccaatggtttttttatcaatgcggattggaaagatgattatttttggatttatttaagtagagcgctggggtggggtaaattcactttaattaggcgctctactacatatagtgttactggaggaatttttgaattatctgaattgcaacaggaagattcattacccccttcaccaataattcattcatcaaatgtgttatggcgtttgcaggaaggtcacgaagttttgatttcaagttag

SEQ ID NO: 304401 - DNA, 159 bp, Proteus mirabilis
atgagtaaaattataaaaaccaataagttcattggtgacagtatgccacctggtctagctaaagctatatatgaacaggcgaagcagcagttacaacaaacaggaacacaaaccaaccaaaactccaaatcaaacggaggcaccgaaaaagggcagtga

SEQ ID NO: 304402 - DNA, 501 bp, Proteus mirabilis
atgaaccgagcacaattgttataccagatttattattcataccggctacactcaatgttcagtgtgctgcttggtagaatagataaaatgttgtcatttctacttttgttgctcggctcttccgtaattggaaatttaggaaatcaggtatttatcggtataagcatcgctgttatcacatcaataagaatggcgttttcatttgaaaaagcctctgagtcagctagaaagcaagcaataaactacttgaatctatatacgtccaaagcattaactttgcctgagaaacaactaacagaagagttaatgaatactcaagttagtgattcaaatgtttggatttcaatagtcaatgccgcagaaattcgtacacgactaacttttggagaacccattgaagtgaaactcagcttctgggaaaagttcatgtcttttatatcaggtgacttaccaaagtttaaaaaacaacctagtaattctgataaagaaaaaatcacctaa

SEQ ID NO: 304403 - DNA, 249 bp, Proteus mirabilis
atgtacgcacttaaattaattactaaacgtgaaggtcgtaaagtggaagcagtccaccgcttaggggatatgtaccgtttggagttttattctgaatctgaaaataaagctatcgtagctagagtcgaacactcgaaaaaagactctattccatcattttatattaaacgtatagatcacgcctacattacaacagtaacaggtgatacggctagagttatctccagaggtaaattagtttatcaataa

SEQ ID NO: 304404 - DNA, 1023 bp, Proteus mirabilis
atgcaattatacaataatgatgcattagctatattaaaaacattacctgacaattatattgatttaatcgctacggatccaccgtatttcagagtgaaatcgtgtacatgggataaccagtgggataatgttgaggcatatctgtcttggcttgatgaggtactagttgaattctggcgagtattaaaacccaatggcagtttgtatttattctgtggttctaaattggcatcagatactgaactgcttgttcgcgggcgatttaatgtattaagccatattatttgggctaaaccatctgggccatggaaaaaacaaaataaggaaagcctacgcacctttttcccttcaacagagcggatactctttgctgaacattatcaaaagccaatcaccgctaaaggttctgaattttctttaaaatgccaggagttaaagcaaaacgtatttaagcccctgattgattattttagaaatgctcgtttagcactacaggtgagttctaaggagataaatcaagcaacagataagcaaatgttcagtcattggttcagcaatagtcagtggcaattacctagcgaggaagactacaaaaagttacaaacactgtttacacacattgctgataaacaagaaaagttatcgccgttatcccgccagtttaccgaattagagcgcgagcaggttacattacaaaaagactatcaagaattaataaaagaatatggtttattaagacgaccattctttgtaactgtagatgtaccttacaccgatgtgtgggattatccacctgttcagtattatcccggtaaacacccttgtgagaaaccatcagccatgatggaacacattattcgctctagcagtcgagagggtgacttagtagccgatttctttatgggatcaggagcaacactgaaagcagcactaaaacttaatcgaaaggtattaggtgtggagcttgagaaagagcgttttgagcaaaccgaacaagaaataaaagcatcaattcgtaagtaa

SEQ ID NO: 304405 - DNA, 1143 bp, Proteus mirabilis
atgatgaagcgcaatattcttgcagtagtaatcccagctttaatgtttgctggtgcagcaaacgcagctgaaatgtataacaaagacggcaacaaagtagatatctacggtaaagttgacgttcgtcattacttcgctgacaaagattctggtgaagacggtgatgcatctcgtgcacgtatcggtttcaaaggcgaaactcaaatcaataaagatctagttggttttggtcgttttgagtacgaaattcgtactaaccgtatagaaagcgataacgatactcgcactcgtttagcatttgcaggtctgaaatttgctgatttcggttctttagattacggtcgtaactacggtgttgtatatgacaccaacgcatggactgacgttctgcctttatggggcggcgactcaatgtcacaaactgacgtttatatgactggccgtgctactggcgtattaacttaccgtaacactgatatgttcggttatgttgatggcttaagttttgctctgcaatatcaaggcaaaaataacgaaaatactaataatgagcgtggtgacaaattcactgatcacaatggtaatgttgtaggctacagtgtagataaaaaagctaacggtgacggttttggtttctctaccgcttataacttaggctggggcgtaacactgggtggtggttactcaagttctgctcgtacttctggccaacagcattacagctcagcaaaaggtgaacgcgctgaagcatggaacgttggtggtaaattcgaagctaacaatgtttacttagcagctatgtacggtgaaacccgtaacatgactaccttcaacaaaggtattgcgaataaaactcaaaatattgagttaactgcacagtacgactttgctgatttaggtatcaaaccatctttaggttatgttcaatctaaaggtaaagatctatataatggtacagaaactgctgcaaaccatattggtgacgaagatttagttaaatatatctctgtaggttctttctacaaatttaacaaaaacatgactgcggttgttgattataaaatcaacttattaaaatctgataataaactaggcatcaacgacgataacgtagttggtttaggtctgacttatcagttctaa

SEQ ID NO: 304406 - DNA, 951 bp, Proteus mirabilis
atgtataggaataaaaaaatagactctataaagggtgttttaatatttttagttgtttttggacactttttagagtctatgattgggtggaagggtagtaactcttccgctttattgcatgtaatatactctttccatatgccattttttattttgatttctggttacttttttagtgtaaataatttcaatagaaaatttttaggtgtgctttttgtttatataatataccagaccatatacactctcccagcaatcatcaatgggacactatcgtacagatatttctatgaacctaattggatcatgtggttcttgatgagcacgctgttctggatgagtataacaaaatttataaaaaacataacgttatcagtaattatagtttctattatatgctcattattggtatcaatgtgccatatagatggacatatactaagctatatgagaactattgttttttatccattttttatcataggtttatatttaaagcagaggaatattggtgttgatagcgtttcaaggttaagggttattccattaattttaatattcattttgtttacatctatttttctttattttgatgttgataagtgggtgctttttggtttgtatagctataatgatgctggttatacagatgcagaaggcgtcttattaagatcgttagttttctcatactctgcgctaataattattttattatccagaataataaaagagagcaacattctgtcatatataggtgagagaagtttatcaatctacctaacccacggaatcattgttattgttttaaataaatttattcatttaaatgatagcgttacatctgttattttggttctattattatctattgcagtcacatttgttttgtcgttaaacataatagagaaatgcaacagatacatatactcgctaggattcatcaaaaaataa

SEQ ID NO: 304407 - DNA, 162 bp, Proteus mirabilis
atgagcaaaacaagaacattttattgcaaagttacattacgccgttacatgaagccgatgttaatcatcgctgcgttaactaattggcgatggcttacggatttgtgctttaaggttgaggctgtacctcaagggaaagaagtggagttgagtagtgaataa

SEQ ID NO: 304408 - DNA, 288 bp, Proteus mirabilis
gtggccttttttattgggtgggatatgaaaaacaatgacaacttagaaaacgataccgatattgctgttgggttgatccctgtatctgataatggtcgtattaccgctttcacatcagatggaaagcctatccgaggattagtctgttgtaatgtcgatagtgatcatggtgatttagtaagaatgacattaacagtggaagttaccaatcgagatgggaagcttgcaatatgtaacttcaaaaaagatgaaattgaagaaataagagcaaacttcttaatgaaataa

SEQ ID NO: 304409 - DNA, 687 bp, Proteus mirabilis
atgtctttagtggaaattaaaaagtttgatttgttaactagctcttctgcaattgctgatggagttaaaaagaaacacaaaacagtcattcagcttgttcgtcactatgtcgatgaccttaatgaatttggaagggtagcatttgaaatgcgatcctttgataccgatggtggacgacagaaacaacaggtggcgttacttaatgagcagcaggcaacgttgttaattacatatatgcgtaataatgatgttgttagggcattcaagaaaaggcttgtttctgaattctttaaaatgcggtctgccttggctgctaagaaattagatagaaacacatcaagattggaatataagccaatgactgatgcagttaaaaagtcgagagaagagcaaggtaaaactatttcacctcatcacttcagtaacgaggcagacttaattaatcgtattgtgcttggtatgacatctgctaagtttcgtgttcataacgaaataggaaagaaagagcctattcgtgattacctaactccagagcaaatacattgcgtaactgaattgcaaagagccaacacagtgtttatctcaatggggtggagctttgaacaacgaaaggatgaattaactaagttgttcaataaaaaccataagcaaccattactcgatgagatgcatagattagcagcgtaa

SEQ ID NO: 304410 - DNA, 300 bp, Proteus mirabilis
ttggaaataaataatttctcattgaattttgaatatatttcagaaagaaaaatattttgtcattcgattggatatgaactttttcttttaaggcaacgtaattctatgacgggggctgagttaggaaaattattgaatatctctcaacaacaaatttctcgttatgaacgaggaataaataaaatacctattgatatacttttttctttgagaatattatttaaatgtaagataaataatattattggtggcaagtatattaagtatatcaatgaattaattaatagggattttatttaa

SEQ ID NO: 304411 - DNA, 3660 bp, Proteus mirabilis
atggaaacttatttcaccggaaacttcctcaatcaatatgaagatattaatattctaaatgaatatgatagagaaaatggcaagccatgcttattagaagctgtacaaaatgccaaacgagtgctaataaaattttggcctaaagatgaatcaaaaaagaacgatataattgaagatttatggcgatatgaaataagacaactccataggttgaaaggcttgcccggtctaggagactatatatcttctataattgattcaggaaaagatgaaaggggtttttacttagtattggatgcagacttcagagttcctctgtcatatgtatttaaagaaaaaaagattctaagcttaaataaagaatggatcaagaatagtagaaaaattgagaatagaatcaaactttggcataattttataagaattattaaagccatcgagctattgcattcccaaggtctgcttcataggcatctggataaagattctatactgactgatcctagctcacttgagtttgacttccaattgactggcttcgaatggtcactacgtgttcacgctgtttcagataaacataacgaatatatatctagagatttgaagaacaataagcagtattcttttttatctgattgggctgatctaggctttctaatagccgaattacttaacattagctcagatagattaataaaccttcaagccacaattaatgatttagtagatgaaaccgatctaattcttgatgaattagctttaattcgcggattaattggcattatgaaattggaaaccaacttgtcaagggaggctataaatggttctataataatagaaaaagcaaatactatattaaagtcattagaatctctaatttcagaagaaaattcaactaggtatattgaatttcttttttcggcaaaagcaaactcggaagtaacaccagataaaataacatctgtttttaatgccatacaatataccataaacaaagatcatggaatcacaatttcagataaggatattgatgaatgtttggactttatatcaagggatctatctgggaaaatatatctatctataaataaaaatagaagtaataaagaagaaattcttctttacggagaaaaactcacttatgtattagagaaaaaacgtaatggtaaaacagaggattctgattggaacattgcattctgccatgctgcttatgttgagcctccaagacaaataaaattcaaaactaaaagaatagctttagaaagagatgtattaaaatgtattcagtttaaatctaacaatcgttctgaaggtatatataactcttgggataacctaatccttgaacttgaaagagatgataataatattcttcccaatagagttattgtcgaagggtttgctatatatcacttaacagaaatagcttttgcaaaatcagaaatttaccctgtagaactaattagttatgataaggacaaaacagagtcaaagttttttacagtaaggatacaatgcagacaagatgatgaccatatatcgaaatcattaggtattaagccacctgcaattcgattacatgacaacttagagaatgatagaattaattcaataagctggattcttacagaaaacaataatttctatgatggtgataatgaagtcacattagattttataaagacagaaagaaaccatgaaggtgtttacgaatatatatttacaacaaatacacttaacccaggcttcaaaaaatgctttcttataccttcatcagtacagggaactattaagcaattaagtagaagagcatcatctatagatgaattaagtaaccacgcagaactaaggagtatgttaaatgatccttacaataacactattatatctgaaataaataacaatcttcatagttctttttattctctggatgattctaaaaaagatgcatttgaaaaaataaataagaccttgcctatattcttagtccaaggacctcctggtgtagggaaaacttatctcataacgactcttgtaaatcaaatattttctaatgaaagtgagagtcgaatagttctaacggcacaaagtcattctactgtccagcatttataccaagaagttacttcatccttagatataacgaactccaaaccattaattgttagttgtataaaaaaagattcggatgatgatagcgatgacatttcaataaaccaattagactcccttgcactagaatatattaaaaaatttatcgatagtaatatttttgatgaatgtacatcaactataagtaaaaattcaattatatcagccagtcgtaaatcatccaaatcagacagatattctcttatcaagcagatattgaagtctgcaaatatggtttttgctacaactaattctagacaagtagaagaactaattagtgagaaatcacaatttgactggtcaataatggaagaaacaggaaaagtaacaggtgtagaacttcttagcccaatgttactttcatatagaagactgatgataggtgatcataagcagttacccccttatgcaacagaaaaaatgagagagatcctcactgatattaataaattgaagaatgcaataattattgcaactgatataaataatcaacaaataaaaggtgattggataaaagagcgttttactgaaaattttatctcaacaattgataacgaatcacttgaaagattgagttctagtgcagtcaggcttcatctcttatttgaaagtcttgtgcttgaagaaaaagcgaaatcacagaaatatatagatcgttatggtgatgagagaaagcatagaaaaattgcgagcatgcttaacttccaacaccgtatgcatccagatatcgcaaacttaatctctagcgtattttacgataaaaagcttaaaacagaaccttcaaaagaaaaattctatagagatgtaaatactattaccccttttacatttaaacctaactctccattacttaactccccagcaattatttggattgatacccccgatgttcaacaaactaaaaataattatgccgcagaatctcttcctgcttggacaaataacctagaaaaaaatactcttttatccgtccttgaacatttgaggctgaattcaaaagcagaaaaattaccaaaactagcaatcatgtcaccttatgcaaaacaggtagatttaataaagagaagcctagacaaaaaactgcataaagaaccaagttccttagaaatagagtattttcaaaaaccagatgatcattcttcattttgtagcactgttgatggttttcaaggggctgaggctgacatagttattgtatctatggttagaaataatcatcattcttatgttagagcatctctaggatttctccttgatagtaggcgcatgaatgtcctactaagtagagcaaaatataaaatgataattattggttcattcgaattccttaaatattggtctgatttaatcgacaaaaaagaaattaaaaaaggagatttaagtaatcaatttttagtcgatcttgtcaataagctcatcgaatatgagcgtgaaggactattaaagaagattaactctagagaattcaaacacgtaaagcaagataaaaataaaaaaaggacttaa

SEQ ID NO: 304412 - DNA, 1818 bp, Proteus mirabilis
atgtcattaattacatacgtaatagtaccttttggatacggcatgcatcgttttagtttagcgaaagcaaaaccttgggggccaattgaaaaaatattgttaggatatattgctaaaacaccttgtacctcaacttttttagctaagacatcaaatctccccagacaactagtcgtggaaatgctaatccctcttatgaaagctggatggatcgaaataaaaccaatcaatgatgaatatttttttgtaacaacaaatagaggggcagaagtagccttatatgaagaactacctactgatagcatcccttattcaagagttagaagttttatagtggaccctttgactcgtgagtgttaccgatacgagaaaagaaaaaagaaacaaagttttcaactatactctaaacataatattttagaggctacaaagtcattccgtggtttatgctctgaattaaatatcatctctagctacactactaccttatctagaatttatgaaaaaatcacaaattacgatgaagaggttgttgatatagaggatgacataatagatacaaattattctaaaaatatacattttgctcttgccgccatagacgacatggggaatattacaggagtgcccgaaatatcagatgaattaaagtatgagataattaaaagagataaaaagattcgtgagcgcgcagagattttagatataagtaaatctgatatctatgtaggagaaaatattaatgaaactgttaaaacattaccaaaacggttaattaacaaagagcaagttagactgattgcaggtcctgaagaacatcagatgcatcttttcaactcaataagcaatgcaaaaagtagattaattatacattccacatttatcaatgaagaatgtattactgatgtatttgataatttaatagaagcagcacaacgatcagtccaagttgatattttatggggccaaacagaaccagaggaacaaaataaacttgaatcttataaaaatgtcatagcaaaatttgacgaattaaataaaaaaatagcacaaaaaggattatctacacaaataaaattccatagagctcccactctatctcatgcaaaattcataattcatgatgaaattatgggtatttacagtgctacattaggttcgtgcaattggctatcgagcagatttaatagatttgaagtatctgcctgtataaccgacgatttaatcgtagcggatttaactgatatatgctcccatctatcaatggggggaactggattagcaaataacctgagcagagaactagccgttttctctgcaagcttatataaaaatgttaataaacgcaaagaaccagatggtaaaactagtgttcaaataatttctgcacctgagcatcaccctatagtaaagcaagcttgcaatatagttaaaaacaatatgtttatttgtagtcatagagttagctatgcgggagatagacctataatattaccgctgaaaactgtgaaagcgcacgataagaatgtatctattgatattgcttatggaagatcaagtggggatctaaaatcaacagaacttaaggaattaaaacaaaaccttcagtctttaggttttaatattataacagcagataatcctcaagtacatgctaagtttttttcttgggacaatgacaatattgtagtcacaagtcttaactggttgtcatcttcttcgaagggtgatatttataatgaacttggtttccttattacacttcctgacattggatgtgaagtgaaagaaaaattccatgaaatgtatccagaataa

SEQ ID NO: 304413 - DNA, 504 bp, Proteus mirabilis
atggtaagaaagaaaatttgggcatacgccatcaataacaaaggggaatatattaaaaataaagaaataaataaagagcgattattctttatttgggaggttattaggttgcgaaaagaaaaccctaaagaattttctttgctaacctttataagcatacaatctaacaaggataaacgagcagaattaacaccagtaaaaaaaacaaaaactgcctttttcagatataaatctgattcaatagcatttaccgaaaaccatgattctgactcagaatatatatctcatgaaactgcaattctagttttatcggaaatgaaaaaaataaactttcaagataaagataaaatatatgagattgaatttgacagaataaaaaaagatgacttacaaataaaatttgaagatggatcaatttattatcctgatctagtaggtttttttagcaaaccaatagaattagccagaaaatgggggggaaagttgccattgaagttaaggtaa

SEQ ID NO: 304414 - DNA, 537 bp, Proteus mirabilis
atgggggggaaagttgccattgaagttaaggtaactcataaatgtagttatgaaaaaataaaaaattttcaagaccataacatagccataattgaagtttcattatcggataagatgagactcaattcagaattaaacaatactgatatcgacgaagatgaaatggaacgatattataattttctaaagagtaaatttaataacattgtttatatgaaaattttgtctgaccctataatgttaaatgagcataaatttataattaacaaaaaagatgatacgattattaaggttataaaagagattgaatcatttaaaggcaagctagcaaaagaagccgcaaaaaaagaatcatttgaattaacaatgaaagaaatgaaacaggaagtacttaagttaaaagaatcaatcgataatgcaaaacatcttaataattctttgctaacgcaattagctaatgaaaagatcaataacttaaaactcaaagattataaaaacatgaactttctagagcgttttaaacgacttttcaggtaa

SEQ ID NO: 304415 - DNA, 1293 bp, Proteus mirabilis
gtgttaggtgaaaatggtaagttaaaaatatttccatacccgaatgctaaaacattcgatatttccttccagcctaaaggaacactgggtgaatggaaagataaggttgcggaatctgctaaatatagctcttatattatgcttgctttatgttcagctcttgctggtatatgcatttattttacaaaaattgagtctggaggatttcatttctgtggagatagttcaaaaggtaaaagtacaaccctagatatagcagcttctgtattttgggggaatccatacattcttgattggaatattactgatgctgcatttgagcagtacgcagaatcacggaatcatgggttatttttggctgatgaacttgttttaatagaagcaaataagcaagttgctgcgcagaagatgcaaaaatttgtttatatgattggttctggcttaggtaaattaagaagtaatacatatcaagagcatttagctagttggcagttcgttgcattaagtaatggagaaaatgctttaagtcaacatgctagtgaaggacaaatgaagcgtaaaaatggcgagaaagcacgattcattgatattcctgtaagctgtaataacgacatgggaatttttagctcattgcctaaaggtatgtcgtcatctgctgaatatgtggagcgcttaaaagttgattatagtgacaattacggtacagcaggagatggatttatacttaagatattgagtaaagtgagaaaaaaatcttctgagtatattactgataggcttgaatattatatcaccgaattcttaaaaaagaataaagtaggtcataatgggctagaaagacgtatagctactcgttttgctttagcatatgcaagtgggattttaggcattaaaactaagattcttccttttactgagacggaggtctttgatggtgtcacagattgttatctgaaagctattgaccaaaacccaattaaaaagatggttttcaatcaaaaactattagatgcattgaaaaagccctgtaaaccgaaaaagagcctagtagatgaggacgagctaaataacttagatgttattgttttaaaaatcaagggagaatattatgccgcagtaaagtcgtcattttttgataataatattattgggaataaaaaaactgtgattcgccagttggtctcagaaggaaagttacttactgatgcccaaggcaaaagcactcgccagtgcaaggttaatggcgtgaaattaagtcgccgctattgcttgaaagtagatgttgtgggttaa

SEQ ID NO: 304416 - DNA, 2511 bp, Proteus mirabilis
atggttgattttgggaagcttcgtactcagaccaaaaaagtagtgcctattgaacctggcgaaatatttcgtcggctgcctaaacctgagggatttaacgacatttacactagccaagagcaggttttaaaaagctggtttgatcgtcggaatgacaccgacgtcgtgatcaaacttcatacaggtggagggaaaacactagttggtcttctgatggcgcaatccactcttaatgagactaaagagcctgttctatatcttgcaccgactcgccaacttgttaaacaaaccttagaaaaggctaaggcgcatgggattgctgcagtgtcttacgaaaaaggaaagccacttgctgatgatttcataaatggcaaagccataatggtggccacctacaaggcacttttcaatggacaaagtaaatttgggatccgtggaggggctaaagcaccagtaaaagctggtttaatcatccttgatgatgcgcatgttgccttttctgttgtacgcgaatctttcactttagtcgtggatgcagataagaattcaacgtgttatgcagggctaaccagcttatttagacgaactttccgagatagtgaccgattagggacattcgacgatatcattgaaggttcgagtggcggcgttatagaagtaccatattgggcttggcatgaacaactggacactgtgagggaatatctacgcaataattcagacaatcacgcacttgtgtggcctctccttcgagacaacttgcatttatgtcatgccttgatcagccgtaattctttcacaattactcccgttcttcctatggttaacgagtttcctacgttttctgactcaccacgtcggatatacatgtccgctacaatctcagacgatagcgagatagttaaaaccttcgatgcggaaccacgtttcgtgagcaatgcgctaacatctagatcactcgcaggtattagtgaaagaatgatcctgattcccgaccttatgccattttcggttgacacacttgatgctgtgagcaaattactcaaatggactgctgagaaacggaattttggatctgtagtacttgttcattctaaggctgccgcgaaacgctgggaagaggtggcaacatttgctaataactctgaagaggttgatcgtcttgttggacagcttcaggaacgagtgattaatggaccagtggtgtttgctaatagatatgatggcattgatcttcctggtgattcttgtcgtttgttagtcatcgagggattaccagcaggtactacggactatgaactcatgcgcgcagctacactctacggtggggcatcaattagtcgtatgctagctcaaagaattgaacaaggtattgggcgtggcgctcggggatctggagatcattgtgttgttattttagcgggtgcagaccttgctgggtggatcgcgaaagatgcaaactttcagctgttgacaagtgcaacaaaagctcagctagacataggttcaactgttagcaaagaggtcaaagaccatagagagttagcgaagactgtcgctactagtttcgaccgaaatcctgactggattgaataccatgcagaaacattagcggaaagtttagatcaggaccccacagatccagatcgctttgagattgcagccgccgaacgtaaggcatttaatctttggtctgatggctatcatgacaaggccataactaaactggacaatagcatcaattccgcaaaatcactagatgtgcagactcgtggatggttacttcagctagcaggacgcatagctaaccagtggggtcaaacagagcgtggggatgaattgcaacgagatgcttatgggaataatcgaaatctattacgccctagaattataccaccatatcgtcccttggcgactccaactgctcaagcaactgtgatctctcagcaattccaaagttatcgtatccgccgtggcttgctcaaaagattcgaagacgtggtgtcgcatctacatccaaattcaactgcaaatcaatttgagcaagccttggtagacttagcacaaatgattggactaacagctgagcgattcgatactggaggattaggacccgatgtactttggctacttcctcagaaaattggattcatcattgaagctaagagtcgaaaattaaagaaaaatgcgttgacaaaagaaaatcatggacagctcctagttgcgcaggaatggttcaatcaaaattaccctggctacgaggctgtgcgtatttcagttcatccaactaacaaagcaaccaagtcggccgcagctacagattcctatgcattaacgtacgaaacactgactgaactgattagcgacactaggactctgcttacaaaattgtgcgaatcacaactaactaacgctgagctagcagcagagtgtgcacgtgaacttggggtatcgtcagttcgcgcagacaaactaatccaaaattacttaatcaagtttgtggaagtataa

SEQ ID NO: 304417 - DNA, 288 bp, Proteus mirabilis
atggcaaagggtgttcgtattttacccgaaacacagggttctcgcttcaggaaagagatacgtgctttaaacaaagcagaaaagaaaggtattaccgagaaaaaacttgcaaacgaaatgaccaaggatatggttgacccagattcagcggaaacattgattcaggcagctgcggtgatccgatatatgaaaggggttaaacaaggtgaaacgccactggctaatgctatggaaagacttactaatcctgaaactaacccaggggctggtgaaccagaacctgtataa

SEQ ID NO: 304418 - DNA, 870 bp, Proteus mirabilis
atgatttttgatgatattgatggttattacaattatcgggagttgcactccattgctgatgaaaaaagagtgctgaataaagtcaatacttttcgccaagaattcaccgctcttgctaaagaatggtctcctgaacgtaattctcagtgggtttgccgtatctatttttgtacaaaaatgattctaaatgcaaccgtggttttaaaacaggcggaatttgccgaagaaaaaaatttgagggctgccattccttattttcactattatgccatgctctcaatcttgcgttgtgtggttctaactttgccgactgaagactgggataacgaggatatcctgagtatctctcataaaaaagcgagagacaaaaccagagagtggttggctcgatatgatagaacattggctacacgatttgatgatttcttcctgacccttaaatcaaacagagaattactctcatataaggcgcctgccagcggggaccgaaatattagcagccaggatgaggtaatatatttctgtactttactagcagaagttgctcaatttaacacagcaatattgcacaactccgttgtcaaacacgcatcagaagatgattttgttgtgttcgatcatgacatggcacacatttataacgtcgagattgaagggaaacgtttctatgatatggaggacagatatcgtctggattatctgagaagaaaaggcaatactcctcacagcatttacatgaccatgacagaggggcagactgaagattttattggtgcctgggatgctgatgaagatgatgttgatagcgaagaaagccgtttttattccggctcaccctcatcatggcaggatatattcgatattccctga

SEQ ID NO: 304419 - DNA, 1209 bp, Proteus mirabilis
atggcgcgtacaacagttccactcagtgataccaagcttaaatcagcaaaacccaaagataaagattatacgctgcaagatggaaatggcttatatctgctaatcaaaacaactggatcaaaaatatggcgctttaactactaccggcctataaccaaaaaacgagcacttattagctttggtagctatcctacagttagtcttttagatgctaggcttaaacgtgaaaatgcgcgagagcttcttgctaaaaatatagacccacaagaacacaaaaaagctgaagaacaacgcctgtttgaagaaaaaaataatacttttgaaaaaatagctcagcagtggttcgaaatcaaaagtaaatctagcttgcaagaatcgaccttgaaagacatttggcgttctcttgagttacatgtcctccctcatgttggtgatatagcaataactgatttaaaagcacgccactttattagcgcattagaacctttaaaagcacaaggcaaactagaatcagttaaacgagtagcacaacgcattaatgaagtgatgttctatgctgtgaatgtgggctatcttgatgccaaccctgctgcaaaaattactgctgcttttgaaaatccagttgtaaaaaacttacccgcattaaaacctgatcagcttcctgaattgatggctgcaatccaaggagttaacattgagcgacaaacatactgtttactacagtggcaattattaactatgacccgcccagctgaagcagccgaagcgacatggagtgaaatcgatcttgataataaactctggactattccaccagcaaggatgaagatgaaaagagaacatatcattcctctatctcctcaagcattggcaatattagaaactatgaaacctataagcggtcatagggaacacatttttcctagtatgaaatcaccacacactaaaccaatgaatagccaaacagttaatgcggctatcaagcgtgttggctttgcaggtcgccttgtagcacacggattccgttcaattgcatcaacagcattaaatgagcatggatttcaacctgatgtgattgaagcagctttagcccatatagatagcaatgaggtaagacgtgcttataacagagctatttatcttgaacaaaggcgtgagatgatggattggtggggagagtttgttaataacgcaatcaataaacgttag

SEQ ID NO: 304420 - DNA, 609 bp, Proteus mirabilis
atgaaagtaaaattaccactcattgatgctgacttaatccgcgcagctttagccttaatatccacaaatgatgatccgcgcatagtcactaaggttgttcacattaataacctatacatagaagcaactaacgggcatgcattaattagaatgaaacataatgcggagttcaaccaggatgttgctgttcagtttgtatgttcagtacctgatgaggcagagtttcttaatatcaatagccatgatgatagaagtcacactgttacctattaccgtcatgatcaagatgaggaatttagaccatttgagaagtcagaattaattctcatgcaagggagttaccccaattttggcgacttgctggaccgcaaatataaaaaaggaaaaacaccttatatagcatcagtctatttagctcttccttatttaatgtttggcagaggtagcgtggatattttgcctagcgaagacgatctatccgtgatgtttaccatggatgccctaacatcggaaatgtatggagagcctatcttaatcgccatgtccatgaaaaaggatgtccacaaattatctcaatccttacgagaccaaatcatagggaatgattaa

SEQ ID NO: 304421 - DNA, 699 bp, Proteus mirabilis; identical to SEQ ID NO: 6085

SEQ ID NO: 304422 - DNA, 1275 bp, Proteus mirabilis
atgtccaccaacttatcagtgataaagaatccgcgcgttcaatcggaccagcggaggctggtccggaggccagacgtgaaacccaacagacccctgatcgtaattctgagcactgtcgcgctcgacgctgtcggcatcggcctgattatgccggtgctgccgggcctcctgcgcgatctggttcactcgaacgacgtcaccgcccactatggcattctgctggcgctgtatgcgttgatgcaatttgcctgcgcacctgtgctgggcgcgctgtcggatcgtttcgggcggcggccggtcttgctcgtctcgctggccggcgctgctgtcgactacgccatcatggcgacggcgcctttcctttgggttctctatatcgggcggatcgtggccggcatcaccggggcgactggggcggtagccggcgcttatattgccgatatcactgatggcgatgagcgcgcgcggcacttcggcttcatgagcgcctgtttcgggttcgggatggtcgcgggacctgtgctcggtgggctgatgggcggtttctccccccacgctccgttcttcgccgcggcagccttgaacggcctcaatttcctgacgggctgtttccttttgccggagtcgcacaaaggcgaacgccggccgttacgccgggaggctctcaacccgctcgcttcgttccggtgggcccggggcatgaccgtcgtcgccgccctgatggcggtcttcttcatcatgcaacttgtcggacaggtgccggccgcgctttgggtcattttcggcgaggatcgctttcactgggacgcgaccacgatcggcatttcgcttgccgcatttggcattctgcattcactcgcccaggcaatgatcaccggccctgtagccgcccggctcggcgaaaggcgggcactcatgctcggaatgattgccgacggcacaggctacatcctgcttgccttcgcgacacggggatggatggcgttcccgatcatggtcctgcttgcttcgggtggcatcggaatgccggcgctgcaagcaatgttgtccaggcaggtggatgaggaacgtcaggggcagctgcaaggctcactggcggcgctcaccagcctgacctcgatcgtcggacccctcctcttcacggcgatctatgcggcttctataacaacgtggaacgggtgggcatggattgcaggcgctgccctctacttgctctgcctgccggcgctgcgtcgcgggctttggagcggcgcagggcaacgagccgatcgctga

SEQ ID NO: 304423 - DNA, 678 bp, Proteus mirabilis; identical to SEQ ID NO: 54015

SEQ ID NO: 304424 - DNA, 276 bp, Proteus mirabilis; identical to SEQ ID NO: 10326

SEQ ID NO: 304425 - DNA, 585 bp, Proteus mirabilis
atgcactgcgcacgagtcgcaagtcatgccggtgattttgagagtgctcataccatcgttccttattcgtgtgggccgccgtgtcgcacggtcagccgtctttcacaagcgcttggcggggagttcgcagccgtccggtccgcaacggcgatgcgccggcgacacgaagtcccagatcgacaccccaatcatcaaggccaggccgacgtacatcaggttcgccgtccaccagttgccgagcagccagaccgtggccgcaaacacgatggccgggccgatcatgccgagcagactgcgcagccattgccgatgactgaaccaacccagcgcgttcgccaggaaggccagcgcggcaaacagcggcagcaggcggctgatgaacagtccctcgtactggctcaagaagcccagcccgatggccgcgccgaagctggcgagggctggaaagcaggcggcgcagcccatcgcggaaacgacgctgccgagcgcgccggttttatcggcaatgcgtgtcatcagtcccatgaagcggctctcgctgttgtcgttggcttgctggctcactgcttgacgctggacggatag

SEQ ID NO: 304426 - DNA, 1614 bp, Proteus mirabilis
gtgcaatcagcggatgtctcctacgccaagggcagcgccaagctcgccattgaggtcggcacgtcacccgacgcgctgacggccgctgtagctggactcggttatcgggccacgctggccgatgccccctcagtttcgacgccgggcggattgctcgacaagatgcgcgatctgctgggcagaaacgacaagacgggtagcagcggcgcattgcatatcgccgtcatcggcagcggcggggccgcgatggcagcggcgctgaaggccgtcgagcaaggcgcacgtgtcacgctgatcgagcgcggcaccatcggcggcacctgcgtcaatgtcggttgtgtgccgtccaagatcatgatccgcgccgcccatatcgcccatctgcgccgggaaagcccgttcgatggcggcatcgccgctaccacgccgaccatccagcgcacggcgctgctggcccagcagcaggcccgcgtcgatgaactgcgccacgccaagtacgaaggcatcttggagggcaatccggcgatcactgtgctgcacggctccgcccgctttaaggacaatcgcaacctgatcgtgcaactcaacgacggcggcgagcgcgtggtggcattcgaccgctgcctgatcgccaccggcgcgagcccggccgtgccgccgattcccggcctgaaagacactccgtactggacttccactgaagcgctggtcagcgagacgattcctaagcgcctggccgtgattggctcatcagtggtggcgctggagctggcgcaggcgttcgcccgactcggagcgaaggtgacgatcctggctcgcagcacgctgttcttccgcgaagacccagctataggcgaagccgtcacggccgcattccgcatggagggcatcgaggtgagggaacacacccaggccagccaggtcgcgtatatcaatggtgaaggggacggcgaattcgtgctcaccacggcgcacggcgaactgcgcgccgacaagctgctggtcgccaccggccgcgcgcccaacacacgcaagctggcactggatgcgacgggcgtcacgctcaccccgcaaggcgctatcgtcatcgaccccggcatgcgtacaagcgtggaacacatctacgccgcaggcgactgcaccgaccagccgcagttcgtctatgtggcggcagcggccggcactcgcgccgcgatcaacatgaccggcggtgacgcggccctgaacctgaccgcgatgccggccgtggtgttcaccgacccgcaagtggcgaccgtaggctacagcgaggcggaagcgcaccatgacggcatcaaaactgatagtcgcacgctaacgctggacaacgtgccgcgcgcgctcgccaacttcgacacgcgcggcttcatcaaactggtggttgaagaaggcagcggacgactgatcggcgtgcaggcagtggccccggaagcgggcgaactgatccagacggccgcactggcgattcgcaaccggatgacggtgcaggaactggccgaccagttgttcccctacctgacgatggtcgaagggttgaagctcgcggcgcagaccttcaacaaggatgtgaagcagctttcctgctgcgccgggtga

SEQ ID NO: 304427 - DNA, 363 bp, Proteus mirabilis; identical to SEQ ID NO: 39670

SEQ ID NO: 304428 - DNA, 390 bp, Proteus mirabilis
gtgccgaagtcgtcggcggcgaagcgcacgccgatggcgcgcaaggcgtcgaaactggcgaacagggctggattgccgaatgcgaccgattcggtcagttcgatctccagaagctcggcgggcagggccatatcggccagcacccgctttacctcgtcgtcgaacgttggcccaacctggctggcggacacattgatggcaagacggaacggttgccatgccggtccttgccacttgtgcatctggcgacaggcctcgcccagcacccacgcgcctatttccggcatcaggccgaacgactcggccagcggcaggaactggccgggcggcaacaggccaagcctcggatgccgccagcgcatcaacgcttccgcgccagcgatccggtga

SEQ ID NO: 304429 - DNA, 1311 bp, Proteus mirabilis
  misc_feature (276)..(285): n is a, c, g, or t
atgcaagcatttattgattatgaagttagtgtattggccgatatgcctatgcctcatatgccaactctgggagatggatatgaggcgattacaagagatgttttaatggaagacttttccttacctcccgatttaaatttacaggtcgtatctggttttgtatccattggtggggaaatgctaaaaaatcaagtggattgtatgcttgtcagtggcgaagggagaagatatggaagaacagataattacctttatgatatagaacaagttttatgnnnnnnnnnngttttatgcatatttgaagtaaagaaaactcttacaaaaggggcattgtcagatgctgtagatcacctttcggtaattcgtaaatcttattcggaatactttgaaaacaaactagaaaaagataagtatgttcctgatattgagagtgcaagaactcattttgctcggataactggaagagatggaccaaaacattattatgagataaatgaactcccagtcgaggatgcacttttattttatactcttgttcaagaatctttagctccaattagcattattcatggttataatggatataaaacagaagagggattgcgaaccgcctttataaatattctcgaagataagttctctaatggagataaatcctatggtgtgccatcgatacccacacttatcacatccaatgagtattgtttagtcaaaacaagtggatttccttttgttgtttcgaatgtcgattcagaatggattccattggtatcaacaagatttaattctgctgaggttattttagatacggtttggtcaaaaatatctcactattttaagcgtgctatgccgtgggatgatggtgtttatataaataatattgcaccaatgttgagcgccaaggtgggaaaaaattcagaaacggcaggttggatatacaaaaccattgagcttactgaaagggagttgttgagggaagataacatcacttgggaaccagaaagaatttgtgccgttcacatttccatgattaatttaatggttgcatatggagaactttctttgtctgaggataatatatcttactttaaaaataattattccgtagacttatatgaggagatgttatatttatcaaaaacacgattattcatgatcagcggagacgctttaaaacctataaacaatatgacaatagttctatcgctcgatgataattctggctatgtagcatcagaacgtgacagacttgacaagtggtgtgagaacaataacgtgtcaggaagcatcatgaagcttattaaattatga

SEQ ID NO: 304430 - DNA, 984 bp, Proteus mirabilis
gtgaaaagaaaatttatacacgagtttgcttttggatacttaaatagttttacagcaatggttactgctcagcaactgacatctgatgcaaaaataaattcagctcaagaagaaatgctttcaaaatgccatatatactttatatgcgcacgtccaaacttttatttcattaatggtacaattaagcacgataaaaacaagctctcaggagagatcggttacaaaatagaaggtaaagaaagcaagttctattttgaatacaactggatattagaagacgatgcaattgatataatatgtaactaccctttcagagaagttgttagtataaatgacaaagggaaagaggtaacctatgtctctgcctctatcattgccaccttctattcaagtaaattaaattgctattcagatctgtcttcctatgaagttctttatatcggacaagctataggtaaaaatggtagcaggaatgctgtggatcgtttaagaaatcattcaaaattacaaaagatattggcgcaaacactttataacaaacctgaccaagaaatcatgctttttatgtatgcctttgagcatgaacaaatattttcttctatagatgggcgatctggattaattgatgatacggatagcgataacaagagatttaagttggcattaaaaaatcgcccaaaccaaaatcaaactattaatatgatcgaagctgccttgataagatattttcagccagaatataatgaaaagttcaaggagagtaaaatctcaccaaaattgaaagctttagcaaaatgctatgatttagatatgtctggaattgttgtggaaattaacacagaaaaccttttttactcattatactctaaaaacattaaaaagaaatatcatcacattgtgaagatagatttagtttcccatcagcaaagattatccttttttcggccgactggatttagtgctctaccagatattattgaataa

SEQ ID NO: 304431 - DNA, 843 bp, Proteus mirabilis
atgccacaaataaaatataataacgagataacaagtatcataaaagagagacgaaaagtttttctctctattgggctatttaccgctttaattaatatattaatgttagtcccttctatttatatgttacaagtttacgatcgagtattaccatcaggtaatgaaatgacactattgatgctaacaatcattatgttagctctttttatctttatgggaggattagaatatttaagaagcattattgttatacgtatgagtaataaattagatttatcacttaattcacgcatttatactgcagcttaccgagaaaaattaaacaaaatagcgaatattaatccaacgttagcattaacagatctaattactttacgacaattcattactagtcatgccatattcactttctttgatctaccttggttccctatttaccttttagttattactttatttaatccttggttaggattatttgcactttgtggtgcccttatcttatttgctttggctatccttaatgaatatctatctaaaaatcatttaaaaaaagcgaacaattttgccaatcaagcacaactaatacaaagtcatcatttagaacatccacagactatcgaagcgatgggaatgcttagtcaattacgtaaacaatggcaaacctctcatttcaaatatttacaagcacaaacacaagccagtgataatgcagctggtattaacgctatcacaaaagtaacacgtatggcattacaatctttaatgctaggtttagggggatggcttgctattgataatactatcagtcctggaatgatgattgccggttcatacttttag

SEQ ID NO: 304432 - DNA, 582 bp, Proteus mirabilis; identical to SEQ ID NO: 302087

SEQ ID NO: 304433 - DNA, 399 bp, Proteus mirabilis; identical to SEQ ID NO: 302088

SEQ ID NO: 304434 - DNA, 1014 bp, Proteus mirabilis
atggcaataaataaacaacctgatggtcgttggcaagttgagagctaccctaacggccgaacaggtaaacgaattagaaaagtattcactacaaaaggtgaagctatttcatttgaacgttatattcttgaacaaacagaagataagccgtggctaggtgaaaaagaagataaacgtttattatctgagttggttgaaatctggtttcgtgctcatggtattacattagctgatggtgaaagccgaaaacaaatgatgttattcggttgccaagcaatgggcgaacctttagcaacagagtttaatgctaagttattttctgtttatcgtgaaaagcgattaagcggaaaaattactcgtgccgataggatcaagtccgttgctccacgaacaacaaaccttgaactagcctattttcgcgctatgtttaatgagttgcatcgattgggtgagtggaaagatgataacccattaaaaaatgttcgctcatttcgtactgatgaatcagaaatggcgtttctttctgatgaacagattatccaactgctagaagaatgtgataaaagcaaagcgaaagacttatctattattgtcaagattgcactttctactggagcgcgttggtcagaagctgaaggtttaaccagttcacaagttactccttacaaaattacatttaccaaaacaaaaggtaaacgtaatagaactgtacctatatcagaagagttgtttaatgaaattacgaaacgtagaggccaattatttacgccctgctattctgcgtttcgttcagcaataaaacgcgccaatattgaattaccccataggcaatcatctcatgttttacgacatacttttgcctcacactttatgatgtcaggcggtaatattttagttttacagcggatattaggtcataccgatattaaaatgactatgcgatattcgcatttcgccccagagcatttaaatgatgcgctgatgtttaatcctttggtgaagttgaaaatatga

SEQ ID NO: 304435 - DNA, 276 bp, Proteus mirabilis
atgtttgacaaaattttatttaaacaaggtgttctattccccaaagccccaatagcgattcaaaatggacaaaattactacattatagattgccaattttgtgaggtttacgatggtaaatggctagtcaaaatagataatagagttagtgtaagagaagtaactaggatgccaatgcaatgcatacgcgtttctgatgtgggaatggcttttgattgtgaaatttctgatataaaaattcacggtcgagtaattactattattgataatcagtaa

SEQ ID NO: 304436 - DNA, 1017 bp, Proteus mirabilis
atggcgcaccgttcgctgatcggtggttcaggcggcatgacggcggggtgctcaagcccgccgtgctggagaggcagcgcaagagcaagggggtgccccgtggtgaagcctaagaacaagcacagcctcagccacgtccggcacgacccggcgcactgtctggcccccggcctgttccgtgccctcaagcggggcgagcgcaagcgcagcaagctggacgtgacgtatgactacggcgacggcaagcggatcgagttcagcggcccggagccgctgggcgctgatgatctgcgcatcctgcaagggctggtggccatggctgggcctaatggcctagtgcttggcccggaacccaagaccgaaggcggacggcagctccggctgttcctggaacccaagtgggaggccgtcaccgctgatgccatggtggtcaaaggtagctatcgggcgctggcaaaggaaatcggggcagaggtcgatagtggtggggcgctcaagcacatacaggactgcatcgagcgcctttggaaggtatccatcatcgcccagaatggccgcaagcggcaggggtttcggctgctgtcggagtacgccagcgacgaggcggacgggcgcctgtacgtggccctgaaccccttgatcgcgcaggccgtcatgggtggcggccagcatgtgcgcatcagcatggacgaggtgcgggcgctggacagcgaaaccgcccgcctgctgcaccagcggctgtgtggctggatcgaccccggcaaaaccggcaaggcttccatagataccttgtgcggctatgtctggccgtcagaggccagtggttcgaccatgcgcaagcgccgccagcgggtgcgcgaggcgttgccggagctggtcgcgctgggctggacggtaaccgagttcgcggcgggcaagtacgacatcacccggcccaaggcggcaggctgccccccccactctattgtaaacaagacatttttatcttttatattcaatggcttattttcctgctaa

SEQ ID NO: 304437 - DNA, 2628 bp, Proteus mirabilis
atggctaaattattcaagacgattgatttaaatgttaaacataaaagtaagcagtgcagaggtcgttctgctaccacactgatctatttcgtgattatagggatggcaagtattgccagcgagtcatttgctgttagcaaagatattgaatttaactcagatattcttgacttaaaagatcgaggaaatattgatttatcaagcttttcccgagcgggatatattactcctggcaagtatgagttaattattaatattaataacaatgaattaagtggaacttatcgtgttgactatattgtgcccaaagatgatcccaaggcaagcgaaccttgtatctcacccatattagttaagcagtttgcactcagaccagaatggttaaaaaagttaacttggaaagataagggtaattgccttaatgaggcatcgttaccaggtatgagcctgaggacagatttaggtagtggggttttttttattactcttcctcaagcttatctagagtattcatcaccgaattgggaatcgccttctttttgggacgaaggtattgctggattattgtttgattataacgttaatgccaatgtcagagcgcctagtgatggcaagcagaaacagcagatcaccgcaaatggtacggcgggggcaaatttaggtgtttggcgttttcgggcagattggcaagcaagttatgagcacactacaggtgtattgcatagcacagaaaatcactggaattgggatcaattctatctttatcgagcgataacgaaatggggcgcccgtttagtcatgggggagacttacttacgttcaaacctattagataatttccgttttacgggaataagtttacttacggatgagcaaatgttgccccctaatttacgaggttatgctccagagatcacgggagttgcaaaaacgaatgcaaaagtcactgtgagtcaacaaggacggattatctatgagacacaaatcgcgcctgggccatttcgtattcaagatctgcatgatgcggtaagtggacgcttggatgttcgtattgaagagcaggacggaacaatacaagaataccaaattgatacagccaatattccttatcttacaagaccgggacgccttcaatataaagtatctgcgggtaagccttctcgattagatcataaaactgaagggcctatttttgcaatgggagagttttcttggggagtgaataatggttggtctctttttggtggcactttagtttctaaggattataactcggcctcgctaggttttggacgagatctaatgatgttaggtgctatctcttttgatacgactcattcatgggcaaccttcgctaatgagaataaacacaatcatggcagttcatatcgaattagctattcaaagcgttttgaatctattgatgggcaaatcacttttgcaggctatcgattctctgatcgtcattttatgagtatggatcaatatttagataggcgttatcgctatggcgcacaagaaaataataaagagctttatacccttacactgagtaaacaatttcctcaatggggacttagtacctatataaattataaccatcaaaggtattgggatagaccgaataacgactattacaacttctctttatcaaagtatctcgctatcgggaagtttaaaaacattaacattagcttatccgcttatcgtaatcgttttaatggcaatcatgacaacggcgtgtatttcaacattaatttgccttggcgtgatagagcaacgataagttataactcggtcataaataaagaaggtaactcacataatgtcagctatttcgatcgcattgatgataacaataattatcgtctaagtgcaggagttagtagtcgaggtaaaccatcggcggatggtttctttacacattatggtgatgttgctttagtaacggcttcagccagtcatattaacggcgactatacttcggcatctttatctttccaaggtggggcaacattaaccactaaaggcggggattttcaccgtagcaatatgccgggggcaacccgtttgttaattgatactcaaggtgtttctgatgtcccggtaaaaagtcttagtgccatatctcataccaatatttttggcaaggcggtgatccccgatattaatcactattatcgaggcagtgcttctatcgatcttaaacagctaccagacaatgttgaagcactacgttctattcatcaattaactttgactgaaggcgctattggctatcgtcaatttgatgtgattgccggacacaaagcgatggcaacagtacagttggctgaaggaggcgctccgccatttgcagcgacagtaacaacgcttaatggtcgagaattaggtgtttttaacgacggtggaaaggtttatttaagcggtattaattcaggcgatgtcttgtatgtacattgggatggtaaaaaccaatgccaattatccattcctaaattggcggatacacaactgatcacatcactgcttttaacttgctttcaaagacagccgactatttcaacatcattcctggaaacagataaaacgcaagcattacctcaacattcattccttagtaaataa

SEQ ID NO: 304438 - DNA, 231 bp, Proteus mirabilis
atgcctgaaagccacttgtgtgaatatgaagccttttatcgcaaacaaccctttggtttatggcgagaggattatcggatggcacaagtggcacatcttctcgcgatgataaatcgtgatccgaaatctaccccacctcaattaactgactttatgccaatgtggcagaaaaagcccacagaagctgaagagtgggatagtgttactgagagtgtattggctcatcgatag

SEQ ID NO: 304439 - DNA, 3288 bp, Proteus mirabilis
atggctggcgcattggggagactaaatatcgatttgacgctgaatacggcaaatttcacaaatgcgatcaaccgtagccagcgccaaacagaacaatttgggcaacgtattcgcgtcagtcttcaagctatcaccgtgcaacaagagcgaatggtatcgcaaactgcaaaatcctcggcactctttacccgttttgcgagcgtcgcagcaagtgcattatcggtacggcaagtgattaattatgccgatggttggacggaattacagaaccgcttaaaactggtgacggaaagttctatcgagttaaataaagccacacaagccgtctatgatattgcccaaaaaacctatcaatcattggatgccacagcacaggtttatcagcgttttgcggataatgccgatcgtctaggattaagtcagcagaaagtcgctgaacttacggaaaccgtctctaaagcggtttctctttcaggagccagtgctgcctctgctgcaatggggttaactcagtttggccaagcattagcagcaggtcagttacgtgggcaagatttaaattctgttatcgagcaaatccctggtttagcacaggccatcgcagaaggcatggggatctccatgggggatttaaaaaagaaagcccaagacggtgaaatggcgattgataaaatcattcaggcattggagaaagtcaaaaattctgttgatcagaagtttgcttccagtgtgacaaccgttagtcaaggttttactaatttacaatcagcaatgacgaggtttgttggtgaagccaatcaaggtacaggtgcgactcagcttttaacgtcgggcttagagggactttctaatcacttatcgacggtggctaaaatcgcagaaggacttgcagttacagctttagtcgccaagctttctcaatggacaaaagccacttacttaaaaaatcaagccacattgaatgaagccaaagccacattacagagtgcagaggcaaacagtgtggcagcaaccagtgccgtgaggaaggcatgggcggataaagaggcggcattatcggcattgaattctgcaaaaatgagttatcaagtggcgaaaggaaccgcggcagaaggttatgccttagagaaagtgattgcgacaaaatcgttagcgacggaagcctctttaagatacaaacaagcactgatagcagaaacggcgacacagcgggcattaacgacggcacgccgtcaagccacggtcgcaggaagagcgttgagtgggacattggcattagttggtggccctgttggactggcgttaacggcaataacggctgttggaatgggcgtctatgaatatagcgaacatatcaaacaagctaaaagagaatcgatcgaatttgccaatgctctagatacatcaacagaagctttaaaagcaatgaataatcaagcattgctgacgaatataagcaaattgtctgaaggtattgatgctcagattgaaaaattcgaaggatctctagaaaaagctaaaaaattggcagcagactcgaagtctggttggagcttaaatgcctcgagttacttgagctttacgggtgaccatgaaggttataaagcgataatcgcacaacagcaaagagaagcgaaaatcgggcttgatgcggcgatgggggaggtggcttcacagttgacagcattagagcgtcaacgagccaatatgcgacaactgctggcattggttgaagaaaaacacggtaagcaaagtgatgaatatcagcgttatgcatcgaaagtaaaggagactgagagtgtcattaatcaatttagggtgaccttaaaaaacttgggttatgattttgatgcattaatgaataagaccgatgaggcggcaaagagccaagccaatatgactgaagtgatagcgaaaaaaatagaagattctatcgctgaatctcagcgcactatcatgaaagccaaagcttctccatctgagttggctaagttgaatgcggaagatgtgctgaaaagacggggaattaaacctgaagaaaaaggctatgaagaggctttgaccgaagaaattaaagcgcaaaacgcgttactggctcaaagacataagccaagaaaagccaccattgattatgccaaacagtacaccaaaatcttgacggaattagagaaaaaacaagcctcattgattgcagatggacaaagtattcagctgtatggcactacctcttcctttaatgaatacacatccgccttagctgatatcaaacagaataaagataagtttgatgccatcttaaaaatcgatcccaaagcgattgagacgataaaagaaaaagcgaaagccattgatgatctagcgcgtgccaactcggttgcgcaatttgcttatgatcgcggtaaagaaattgagcagatgcaatttgaaacttccttgataggaaaatcacgcgcagagcaagaaaagcttaatgcccttcgtcagattgatgtgctgtatcagcaagccagtgtggatttaggcgaaaaagagctggcgaacttacaacgcaatgtcgagctcactaaacagcaaattgaggaagagctgaggaaacgagaggccatgaaaggtgatccgatggcgggattaaaacaaggcttatcggatttcagtgagtcggccatggatgtaatggaaaacgtcagaaacgtcactaccaatgcccttaataatatgtctgatgcattagccgattttgctttaacgggcaaaggaagctttaaagattttgccaatgctgtgatctccgatatcactcgaatggtgatgaaaatgctggttttcaaagccattgaagcaggcggacaagcaatgggctttgatatgggatggatgagcaaagggcatgcttacggtggctatacggggcatggaggtaaatttgaacctaaagggattgtgcatggtggtgaatttgtttttaccaaagaagcgacggctaaattgggtgtcggcaatctctatcgcttaatgcatgcggcgcaaggttatgcttcggggggctttgtgggggcgatcgctgggcgaatacccgttacaccgcaaccgacgttagcccgtgcgggtggtgtgcaaatgacggtcgttaatcatattacggtgacaggaaatggtgacgccgtacttgcgcaggcaatgaaggaagccgcacaacaagggacagaagccggtgcacagaaagctcaggcgatgatgttacaagactttcaaagtaatggtgcagctcgcagaacattaggagtttaa

SEQ ID NO: 304440 - DNA, 1119 bp, Proteus mirabilis
atgtggccaactgttcaggttaatcaacataaccaactgcaaggcgaaacaaaggaaattgagcgcattttactgtttattggtaaaggaaaaaccaatattggtaaaactattgcggtcaatacgcaaagcgatttcgatgaggtgttaggaacgccagatagcccgttaaaaagtaacgtgttatcggctatgcgtaacgcaggtcaaaactggtcaggttatgtgcatgtattagcagaagatgccgaagaattggcatttgttgacgcggtgatggatgcacaagcggtcgccagttgtgcaggctacgtattagtgggtgatgcgacgaaagccgttattcaatcggctaaatccttacgctcggatttaatggctaaatatgggcgctggctgtttgccattttgggtgtcggtgcaacgcaagacgatgaaacgtggtcaggctatgttgaacgcttgtctgctttatcaaaaggggaagcggaatcctctatacaattagtaccaatgttatggggtaatgaaacgggagcattagcagggcgattatgtaaccgtgcagtgaccattgctgatagccccgcacgtgtcaaaacaggcgcattaaccgatttaggtagtgcgtatttaccgctcgacggtacgggtaaaagccttgatttagcaacactgcaagcattggaaaaacagcgttttagtgtgcctatgtggtatccagactatgacggcatttattggtctgacggtcgcacattagacgttgaaggcggtgattatcagtcaatcgaaaacttgcgtgttgttgataaagtcgcgcgcacagtgcgtattcgtgccattgctaaaattgccgaccgcagtttaaacagcaccccatccagtattgaagcccatcaagcctactttgccaaagtattacgtgaaatgtcacgcagtacgcaaattaacggagtaagtttccctggtgaagtgaaaccgccaaaagagggtgatgtggttattacatggaaaaacaaaaataacgttgaagtgtatatcacggtgcgaacctatgaatgcccgaaagggatcaccattggcatcctgttagacacgtcattggagaatgaataa

SEQ ID NO: 304441 - DNA, 1761 bp, Proteus mirabilis
atgaaaatagataaaatcaatattaggaactggcgctccatcaaagttcaagaaatccatgctcaagatttaatggttataattggccaaaataatcatggaaaatcaaatattttatcttcaatattatttttctttggggaagtaaaacatcaagatttagatttccataaagaggaaacagtattatttgttgaattacaatttagtgatctcaatgatatagataagagtacatttaaaaaatatttaacctctgaagaaaaaattatcgtaagaaaaacagcttatctaggtggtagctttgaatatcgaggttacattgaaaatccagaacaagaatggttacaagaggcaaatgctagcgcatatacaaacagagaactggcaagtagccttccgctttattcctttgttccacaaaatggtagaattactaagcaaattataatagatgcacaaattgaatatattaaacaaaataaaaattccatagattttagatttgaactagagtcgacaaattttttaggtctcaaatcagttgcaactggaatattcggtgaaatttactttattccagcaataaaagaagcatctgatgattttacttcaaaagagtctagtacctttggaaaaatttactctgatattgttaattcaatgtctgaaaataatagagaatggaaagtcataaaagaaaatcttggaaatttgttttcaacgttgaataaaagagataaagatgggaatgaaaatcttaatagacctaaacaactttctgattttgaaaatgaattagcattagaattagtttcgtggggaacaagaattgatattgaaattagtccaccagatattgaaagtgtttttaaaactaatactcaagtgtgggttaatgatggtgtaaaaacagatataaaacgcaaagggcatgggttacaaagagctttaataatcgcactaatacaactaattgcaaaaaaaacagctatatcagttgaaaatcaagtaaatgaaagtgttagaagtgtttcaaactctagatatttcatttttgaagagcctgaattatatcttcatcctcaagcacaacgtgcattatttgactcatttataaatttatcagaatctgggaaccaagtaatactctgtactcattcaagtggccttattgatgttgaacgttacaaatctatttatattgcaactaaggaaaatgattcagacgaaactacaataaaacactgtattgatgaactttttgaaggtgatgcaaaaagagattttaatttgtcatattggataaatccagatagaggagagctttttttcgctaaaaaagttatcctccttgaaggtgcaactgaaaaaataatttttccattacttgctaaaaaacttaatttattccgatacgattatacactaatagattgtggttctaaggataatattcctttatatattagactattaaataaatttaaaatcccatatatagccatttatgacaaagaccatcaagcttggaaagaaacagatgctataacctcagctaacacctccacaaagaaaattgaagaagcaattaattctaaaattggctcatctattatgctaataaatgatattgaagaagagttagggttaccaaaaggtggaagcagtaaaccatatgttgcattaaatcatatcaattcaaataattttttaatgacagacgaaataaaaaataaaattcaaactatttatagctaa

SEQ ID NO: 304442 - DNA, 1026 bp, Proteus mirabilis
atgaatgaattaaaaccaacatggcagttattcgaagatcttgtatgccgtattctaaaagctaataactttaaaatcgaaaaaaatgatcttagagaggacaaaggatttgacctactagcaaatttaaatgatgaaaactgggctattgaagtcaagtattaccgcacagcacgagcacaagcctctcttatagatgcggctgccactagagtagtaaacaatggcatagaagttggaatttccaaaggaatgttaatcgtttcttgcattctcttccctgaattacgagaagctctcgaaaataaattcagtatcacttttgttgatcaaactgacttaagaatctggtgtaatttatatccagaactagctgaagagttggatatactattagaaactaacttaaatgacacttttcctgcgtactattcctataaaacaaacaatcctattagaaataatactcttattcgtgtttcacgccctgacagcaaaggtacagaactatgtgataagctacagaacatcaaaaaagggaaaatatcatggaaacaatatgaaaaagtatgtgaagaaattctcaagtatttattccctaacgatcttcaaggctggcactcacaaaaaagaactgatgatggtttaaatcgttatgattatatatgtcgcataagaccaacaactgagttttggaagtttgtcattgatcatcttaacagccgttatgtacttttcgagtttaaaaattatatagggaaaattaagcaagggcagatactcacaactgaaaaatatcttttggaaaaaggccttagacgtatggccattattatgacaagaactggtgcagaaaaaaattcaatagctatgacgcagggtgctatgagagagcatggcaaattaataattatcataaatgacaaaaagatatgtaaaatgcttcatatgaaagaaagaggagaggatccaacagactatctttttgaaattgtagataattttttactatcacttcctagataa

SEQ ID NO: 304443 - DNA, 288 bp, Proteus mirabilis
gtgagtaaatatcttgtacattatcggcatacaacatcccaagcaaaacgaggcgaacaagtcacaccaaatacattaaccacaacgtttaaaaaagcgcgagataagtgtgggttaacttgggagaaaggtactgcaccaacctttcacgaacaacgctctttgtctgagagactttatcgcgaacaaggaataaatacacaaaaattattaggccataaaacccaaaaaatgactgataaatatcacgacgatagaggcaaagaatggcaaattattgctgtttaa

SEQ ID NO: 304444 - DNA, 777 bp, Proteus mirabilis
atggataaaattacgattaaaacccctgaggaaattgaattaatgcgtgaatcaggtcgtttattagcccaagtttttacaatgcttgatgattttattgtgccaggtgtttccacattagaaattaacgataaagtagatgattttattactcatgatctgcaatcgagacctgcaagcaaaggacaatatggttatgagtatgtacttaatacttcaattaatgaggtagtatgccatggtgttcctaaagccgatgagctattaaaaagtaaagatattattaatgttgatattacactagaaaaaaatggttttattgctgattctagcaagatgtatgtcatgccagatgcctcacccatagcaagaagattagtcaaaacaacttaccaagcgatgtgggaaggtatcaaagaagttaaacctggtgcaacactcggtgatatcggtcatgcaatccaaagctttgcacaaagtcatgggtatagtgttgtaagagagtattgtggacacgggattggtcgagaaatgcacgaagcccctcaagtattacattatggtattcgaggacaaggtgttgtactaaaagaagggatgacctttaccattgaaccgatgattaaccaaggtggacacaaaataaaaaccaaaaaagatggttggactgtagtcacccgtgataaaaaattatcggcacaatcagaacatactattttagttactgctgatgggtatgaagtactcactttgcgtccagaagaaacacttccataa

SEQ ID NO: 304445 - DNA, 543 bp, Proteus mirabilis
atgatatctcttgaaggtattttacaaaacctttcctttggaatgccttcggaaaaatttgaatcagctttaatggaaattggtgaagcaattggatttatcagccaacggcctgataaagaaataaaaaaaggccctgataacctatggtgtggagttgaaaatcaatactttcttttagaatgtaaaaatgaagttgatgaaactcgtagcgaaatatcaaaatatgaggctgggcaaatgaattctcattcagcttggtttgaaagcatttatggaaatgctaaatgtaagagagtcatcataattccaactttaaaattatcttatcacgctgactttacccatgatgttgaagtaatgcgaaaaaacatgcttaaaaagcttaaaaataatgtgaaaggattctttaaagaatttgggcaatatgatattcacagtgttagtgatcaaaaaatccaacagttaattaacattcatgaattagatataccaagcttaataaataaatatactgaacgttataaaagaatgtctaagtga

SEQ ID NO: 304446 - DNA, 180 bp, Proteus mirabilis
atgctaattggtgattatggtttaggttctataaacccaatatttactaatgatgatttaaaaaacacccaacacacttcttttttatgcagggtggtggtagcgggactaacctgtttacaaatcatgggggcattcaccttgcttataattcaacaattaagctggcttgtttgttaa

SEQ ID NO: 304447 - DNA, 357 bp, Proteus mirabilis
gtgcaacgtcatctggtatatcccccgttttttgagaatgttaatagcgctttcaatgctggattttatgctggtggtggctctattgttcaattccaatttagtgcggatggtagaaggttagcatctaggtttcgtgatagaaatatttggagcgagtggattgatttctcaagtaaagctacatcagatacgcaaaaatttgatgggcaattagtatcacataatgatttgtttagttttgataaatctaatccaacaaattattttgagctgctgaagctgaaaaatgcatgccttatgggctttattgttcctatgatggggttgggtatactattcgactccctgaaataa

SEQ ID NO: 304448 - DNA, 333 bp, Proteus mirabilis
atgatatacacaacaggcgctgttagcacagtgtcaggggttgctattgtctctggcacaggtaccaaatggatagttaataatcctgctattcgctcaggtacgattattttaattaaaaatggtaatgctaattctatttacatggtggatagagttaatagcgatacagaattagtcatttcacagccggctacatttaccgtaaaaaacaccagttatagcattaatctcactgagctgaactcatacagcgatgctaataatcgtatgaccgctattgtcagatacgacgtattttctgcgagcaatggatcaatgaatgatgaataa

SEQ ID NO: 304449 - DNA, 309 bp, Proteus mirabilis
atgaccgtacctttattacgccgtagaggtatgtcaatgactcaatcggctgcaatggcaaacacattgacattccctttagcattaacggcaacactcacttatatcttattgtctttcactaccccgttaggggatagcgctggatttgttggctatatttggataaaagcagccgttattctaatctgtagtacatggataggattaaaaatagctgaacgttttttatcacgtataccggataaatggcatgcgagagtttatccgctgttattgatattggtgttagtcgttatgctgaactaa

SEQ ID NO: 304450 - DNA, 252 bp, Proteus mirabilis
atgaatacatcaataccaacccccgtttttatgcctgcacaaattgctaataacgaacacgctattgttttagattccacattagcgttggcgcgtaacgaacaaaagcaagcctgtgcggatagatatgcgtcccgtattcgtaaactgtctagtttaattattcaaaataaaatggattacgccgacgttgctgaactgttggaaagtgaagcatcagagctagaacgtcaagcacaagaactggtttga

SEQ ID NO: 304451 - DNA, 339 bp, Proteus mirabilis
atgaaaaaacgcaatatctatggtggtcgatgggctaaagtgcgattagcgtttcttaatgaacatccgctctgtgtcatgtgccaagaacaagggcgcattactgctgccacagtagttgaccacattattccgcatcgtcttaaagaagcacttgaatcaggtgataaagaacgtatcgcaaaagctcaagccttattctgggacacaaagaacttccaaagcttatgcgaattgcatcataactcaaccaaacaacgtatcgaaaagagtggcaaagtcattggctgtaatgcggatggcattccactcgatcccaattctcattggaataaataa

SEQ ID NO: 304452 - DNA, 630 bp, Proteus mirabilis
atgaaaaatgaaggtattgcgtgtactgaggatagcattatcggtatatggaaaaatcatcatatcgagtttgtattagattggcgaggaaaagggtatagcaatactacaggaacaaaaaattacgatgaaattgtctacccaagtagaaatcatattttgaatatactcgagtatgggcttgaaagtagagatggaatgattaccgaaatattagtaaaaccttattcatcaaaacaaattgaaatagcttctttagaaatcactcacccactatatggcagttgcattaattccaatctattagatgagctttctgttgaggataaatatttaaaaataataaaaaagtcactcaaaaacttaaagattgcaccccatggtaataaaaaacgctttgaacaagagaaagaaaaatttttaatcaaggccaaacacgtactaacctttcacactgaaaaatgtagaggtattcggggaaaaataacacaagaaaaagttgcggaagcgactttaagtagccattgcccagagtgttcaatggtgttgttaaccagcagtattgataccgcgaaaaaatatttaagaggcgacactgatatcatgaatgaaataaaaaagctaggttag

SEQ ID NO: 304453 - DNA, 189 bp, Proteus mirabilis
atgagtaagatgataaaaatttgtagcatgacagaagtgatgttaatccttgatgtccgttctcggaactcagtatacaatcttgagcgtaaagctggttttcctcctcgtattcgcatcggaattagacgtgttggctatgatcttaatgctgttcaagaatggcttaatactcgcactgtaaaataa

SEQ ID NO: 304454 - DNA, 765 bp, Proteus mirabilis
atgaaaatctatgccaatagaagaagtataaataggcggatcagtaaagaagataaagaaaataatgttcgcattaaaatattggagtctgtttataataaaacaaaaaataaaatccataagaatttagctaaaaaaatttataattgtgaggaaaatgatccatgtaatagcttagcttgtgctaaatgtattaagactaaacaattatatctagtaaataaatacagaagtcatataaataaagactatgtttttgtgactcttattttctataaaaataaaatcacaataaatgaattatcagaattcaatcctaatttattaaaggacaagttaagaaagaagcttaaatctattggttctaataactttatttttggcagtctagaattagacctccacttatataagagcattaattctagttattatcaacctcattttcatttattaattcctaatgaaagtgaaaaaatcaaatctcttagagattacatgaagtcatctaagaatttaaactctcggcaaggcattaaaaatagacctatggtggttgatgaaattaatgatattggcggggttatcaagtatataactaaaatcatgtggtgcgaaatagcattttttactaataaggagggaaagctcaagcatagtggtaaacgccgtatatcaaatagtcatatgtttgctgattcattagttaagctagatacactgaaattcagtgacatattttttaagtgtaattccagtaactaa

SEQ ID NO: 304455 - DNA, 402 bp, Proteus mirabilis
atggcagagcagggaaaggaattgccgggctatgtgcaacgggaatttgaagaatttctccaatgcgggcggctggagcatggctttctacgggttcgctgcgagtcttgccacgccgagcacctggtcgctttcagctgtaagcgtcgcggtttctgcccgagctgtggggcgcggcggatggccgaaagtgccgccttgctggttgatgaagtactgcctgaacaacccatgcgtcagtgggtgttgagcttcccgtttcagctgcgtttcctgtttggggtcgtttgcgggaaggggcggaatcctacgctaaggctttggccagcgatattctccggtgagattgatgtgttcccaggggataggagaagtcgcttgatatggcactgttgcaaatag

SEQ ID NO: 304456 - DNA, 1113 bp, Proteus mirabilis
atgactcaaccaaatacagcaacagacttttcaattaatgatatgaaaacattaattgaaacaatgcaaatttataaaaaagataaccatgacaaagggataacacgtattgcctatagcgaagaagatgaagcagcccacctctatcttgctagtgtaatgaaagaggcaggccttgaagtctatcgtgatggtattggcacactctacgctcgcttaccggggcaagatagaacgttacccgccgtaggaacaggctctcaccttgataccgttccccaagggggcgcttatgatggtgccttaggagttattgctggtttttatgctttgatgcaatacaaaccacaacaactgaaacgtgatctagagttaattgtattccgagcagaagaatcgagccgatttgggttttcatgtatcggaagtaaagtgttaacaggaaaaattgaccgtactcgatgggaacaaaatagagatgatgaaggtaataatttctttgatgttttaaaatcccttggttatcaacatgaaaacttagatcaatgtttacttaaatcagaccgttatagtgcatttgttgaattacatattgagcaaggtaaacgtctagaaaacgatcaaaaaacaattggaattgtcaatggtatcgctgcgccaacacgtttttcagtcaccgtaaatggccatgcagaccactctggtgcaacaccaatgtatcaacgtcaagatgcgttagtggcgagtgcgggtattattactgatatcaatcatgctgcctgtacggaagcggtatatggcaccgtaggtaccattggtaagcttaatgtcataccaaactcaatgaacgttattccagggcaagtaaaattctccgtggatattcgtggtattgatacggacagtattcaacgggttgtacagcgtttaacaaacagtgttgagaaagcagaaaaagattttggtgtaaaaataatggtgcaacctatttcggctgaatcaccagtaaaactggatgactcaatttgccaagttattgaaaatatttgtcaaaaacacgatatcaattatatgactatgttaagtggtgccggtcatgactcaaaaaaatag

SEQ ID NO: 304457 - DNA, 264 bp, Proteus mirabilis; identical to SEQ ID NO: 301818

SEQ ID NO: 304458 - DNA, 567 bp, Proteus mirabilis
atggcttttgccacactcttaccaaagttttgtcctgcaacggtagttttatttaatgttgtttctgtaaactcaatcggggtgagtaaatctgtaaaccaattgaacacactttttaccgctttccacaccacacccaacgcgttgccaatatcgtcaaacatggaaccaacgggcgacatagagtcaaaggcctctaaaaacccttgcacaaaccctttaaaaaatgccttgatgggttgccaaaatttcacaactgcgatcgcaattagggcaaacaagccgattaataataaaacaggccatgtaatagaagtaaatcctaatgctgtagcaaacgaggccattttggtgatgtttaaaaatctcgttaatttgacgagggaaccactaaaaaagcctgtggcttttgtcactaaatcgtatttgcctttcatcaaggacagtaatactccgcccgttttccacaacggcaagataccgacccacagcaaccgaccaattcccaatacgatattggccatcgcccccatggccgtaaatgcaataaaccctgtcaccacataa

SEQ ID NO: 304459 - DNA, 567 bp, Proteus mirabilis
atggcttttgccacactcttaccaaagttttgtcctgcaacggtagttttatttaatgttgtttctgtaaactcaatcggggtaagtaaatctgtaaaccaattgaacacactttttaccgctttccacaccacacccaacgcgttgccaatatcgtcaaacatggaaccgacgggcgacatagagtcaaaggcctctaaaaacccttgcacaaaccctttaaaaaatgccttgatgggttgccaaaatttcacaacggcgatcgcaattagggcaaacaagccgattaataataaaacaggccatgtaatagaagtaaatcctaatgctgtagcaaacgaggccattttggtgatgtttaaaaatctcgttaatttgacgagggaaccactaaaaaagcctgtggcttttgtcactaaatcgtatttgcctttcatcaaggacagtaatactccgcccgttttccacaacggtaaaataccgacccacagcaaccgaccaatccccaatacgatattggccatcgcccccatggccgtaaatgcaataaaccctgtcaccacataa

SEQ ID NO: 304460 - DNA, 885 bp, Proteus mirabilis
atgtcttatatatcaagagaaaagatagattacttgtccattggtcatcgactgcgtgcttatcgtattgcctcctcattaaaagctgaagatgtagctgaaagtttagggatctcccgtgccgctgtctatcgattagaaaagggtgaaatcgttaaaattgagacattagataatcttgctcgattacttaacacctcattaagtagcttattaggtattaatacggagtattactctagcgctaatggtttttttgaacgaatgcgccaacttgaaacgcaatcttcccatatttatacccatttcgaacccttttcttatttattaacctctgattgttatgataaaacgcttgtcgaaatgttaacagaagcctctcctgaaaatgcgctaacaaagaagcaacaagaagttttatctattttaaaagagcgtaaaaagcatcaatcattacactcaccgcatatttataatttaattagtcaacagcaaatcgaaaaatttctttatgttggtatgctaggctctgttaatgtaagtaaagccattcaacaagaaagaaaacaacgcgcaaaacaagaaatcagccatttaattgaaaagttagagcaaaaaaatagtcatcttaatattgcgattatttcagatacgatgccatctttaacctttcaattgttttatcaaaacaaagcacctctctctttagcggttagtccatttcgtttaggtgaatttcctaatgtaagtacgggtattgcgacagtatcttcatcaacagaagcaatattccaatatcaatctctgtttgatacgttatgggcaaaagcaataaaaaatgatgatgccattacacgcttaaaagagattatcagtcattattga

SEQ ID NO: 304461 - DNA, 525 bp, Proteus mirabilis
atgagaaaaagctttattgcaatgttgattgctacaacgtctatttttgtcgcgaataatgcattagctgcagatggaacaatcgattttacaggagaaattatcgataacgcatgtgaattagcagctggatctgatgctttaaaagttaatttaggtaaggtatctaaaacagcattacctagtgccggagttactgctgcggcaactaaatttacgattaaattaattaattgccctgcaacagtaagtactgcatctgttaaatttgatgcagagtcttattctggagacgatactgttattgcgctaaaacaagagtcgggagtggcaacaggtgtcggtattcaaattacggatgatgcaaataccgttgtccctttatttaccgcatctaaaacttatccattaaaagaaggtgttgaaaataatttagactttagagctcgttatattgctaaaacagattctgtcactgcgggtttagcaaatgcgaatgcaacatttactattaattataattaa

SEQ ID NO: 304462 - DNA, 558 bp, Proteus mirabilis
atgcctgatttcaaggaacgattaaaaggcttaaatttgccgtcatggatgaacaaaggcgaacccgcaaaactgttaaatgcggtccgtaaattttggtcaggtgtttatgactggatgttatggccactcaaacaattggacgcagaaacctgttcagaagaattgttatcagtgctggcctatcagcgcgatattcaccgttttaaaggggagccattagatttatttcgcaaacgggtaaaatttgcctttattaatgcccgtgatgcggggtcggtcagtggttttattgctatttttgagcgcttaggcgtgggctatgtcgagttgttagagcgtcagccggatattgactgggatgtcattattttacgggtcagtgacggacaaatcgcaggcaaccccgatttgttgatgggcattattcgccagtatgggcgcacgtgtcgccgttatcgttttgaagtgatcaccaataatcaattagtgatgcgctttggttgggctgattgtgaatatcagacctttggcgcatcactgttacaaggagagtaa

SEQ ID NO: 304463 - DNA, 558 bp, Proteus mirabilis
atgcctgatttcaaggaacgattaaaaggcttaaatttgccgtcatggatgaacaaaggcgaacccgcaaaactgttaaatgcggtgcgtaaattttggtcgggtgtttatgactggatgttatggccactcaaacaattggacgcagaaacctgctcagaagaattgttatcagtgctggcctatcagcgtgatattcaccgttttaaaggggagccattagatttatttcgcaagcgggtaaaatttgcctttattaatgcccgtgatgcggggtcggttagtggttttattgctatttttgagcgcttaggcgtgggctatgtcgagctgttagagcgtcagcctgatattgactgggatgtcattattttacgggtcagtgacggacaaatcgcaggcaaccccgatttgttgatgggcattattcgccagtatggacgcacgtgtcgccgttatcgttttgaagtgatcaccaataatcaattagtgatgcggtttggttgggctgattgtgaatatcagacctttggcgcatcactgttacaaggagagtaa

SEQ ID NO: 304464 - DNA, 627 bp, Proteus mirabilis
ttggcattgttattggcattattggctgtggtttgtgcggtattggctttagtcaccgcactgtttgccgtattttgcgcattcgtcgccatggttttagcttcattgacttgtgcgggggtcgatgcgcccacatcgcccgcgtttaaggtaatatccgcatttaactgcttaccattcactttacgggtgttaggcacacggccattggcattgttattagcattattggctgtagtttgtgcagtattggctttgctcacgccatcattagcggtcttttgggcattgtcggctttcgtaaccgcactgtttgccgtactttgtgctttatctgccttggttactgcgctgtttgctgtattttgcgcattgcttgccatggttttggcttcattcacttgtgcaggtgtcgatgctccgacatcacttgcggataaagtaatatcttttgtgccatcaaaaaggacacccgaaattttgcgcggagtcgccagcttttgtgaggcaacggccgttcctgttgaaggtaatcgcgtattggcattgtcgttagctgattttgctgatgccattgcgttattatgtaaatcggtcactaatttttgtgttggagttaatgcctga

SEQ ID NO: 304465 - DNA, 762 bp, Proteus mirabilis
atgggattaactatgttaatgacaatgattaaatcacttatttttatcccttatttattattaagtggatgtggcgagtatatcaatatatatcttgataataaatttcccgtcaatatgaataatgatggcaaaaaaatcacggtttattcaactatttaccctgaaatggtagtgcaagtccgaggtacttatacatctaataagtgtgaacgttctcattttaattctgattataccgaagtctcttactcctctttaacacaaaaagtagaggtagagcgtaaaatagcagaggataataaaaccgcgacctatatcgtgcctattgatggagggggatggtgtaattggaagttgaaagaaatagatatagcaccaatatcggtgaaatacaaacaagatagaattagcactcttgtttttcctattgttaatagtgaatattcgagagtagaattatttacaacaatagctcctataatgattgaaagtgaaaatggccaatcaatctattattcactatcaagaatagaaggtgaaaagagtttatccaataaattaaatggaaaaatttattttaattataaagttgaacctaaactaactacgactatctcaaaggatgacaaagctattttccctaacggtaatattaaaacactgagtggttcgacttatagtaaaatgattggttttaatgaaataatcgagaatagtgatgagaaagcgtttacttcttttgttcgatatattgattga

SEQ ID NO: 304466 - DNA, 705 bp, Proteus mirabilis; identical to SEQ ID NO: 8686

SEQ ID NO: 304467 - DNA, 753 bp, Proteus mirabilis
gtgaccgcgccgctggagcaggtgcagatagaccatacggtcatcgacctgatcgtggtcgatgaccgcgaccggcaacctattggccgcccgtacctgaccctcgccatcgacgtgttcacccgctgcgtgctcggcatggtcgtcacgctggaagcgccgtctgccgtttcggttggcctgtgcctcgtgcatgtcgcctgcgacaagcgcccttggctggaaggactgaacgtggaaatggattggcagatgagcggcaagcccttgctgctctacctagacaacgcggccgagttcaagagcgaggccctgcgccggggttgcgagcagcatggcatccggctggactatcgcccgctgggacagccgcactatggcggcatcgtggaacggatcatcggcacggcgatgcagatgattcacgacgaactgccgggaacgaccttctccaaccctgaccagcgcggcgactacgattccgaaaacaaggccgccctgacgctgcgcgagctagagcgctggctcacattggcggtcggcacctaccacggttcggtgcacaacggcctgctccaaccgccggccgcgcgctgggccgaggccgtggcgcgtgtcggcgtaccggccgtcgtcacacgcgctacttcgttcctggtcgattttctgccgatcctccggcgcacgctgacccgcaccggctttgtcatcgaccacatccactactacgccgatgggcactgttgcaaatag

SEQ ID NO: 304468 - DNA, 186 bp, Proteus mirabilis
gtggccgaacgtagcccaaccttgcgcgctgatattcgtatgcagattgtgttactggttgaagatgatgagcgacttattccaggcaccattattgttgatgaagaaaacgtaaaaaaattatgggtgaccgcagatacttatgattttggccgtattagtgtcggggtgaattatggcgaataa

SEQ ID NO: 304469 - DNA, 579 bp, Proteus mirabilis
gtgattgttgcttcaaaacgcgcggtaaaaaatcagcagacacctgatggtgaggcatggcaagggcgacacggtaactacaaaaaaaagatgctccgtaaaatgcctaagctattaaaaattcgtgaaattcccgaaaaaggcgtagtccgcatttatctcgggggcggaaattatcgcaatggcagtaaacctgtgggtgctggtgtcgtgggatatagccagcaatatggtatgacagcaaaaattaatcgtaaaaatgccaacgataataatatccgaaaagcaacgagtgagaagaagccagaacctaccgcaacaccgaaacaagccaaaaaattacgggcattgggctataaagtcaaaaaagggaagcgttgggtaaagcctcctttaaaagagattgcgggaaagatgcgtttttttcaggcggggttattaattcgtcttttacaaaataaacctaaaaaaaacagttgggaggtagatatccccagtcgtgagtttttaggcatcagtgatgaagattttatcaaagcgttagagagacaacttcaaggcatcggctacggtgcataa

SEQ ID NO: 304470 - DNA, 489 bp, Proteus mirabilis
atgtgcagtcattggttcaacaatagtcagtggcaattacctagcgaggaagactataaaaagttacaaacactgtttacacacattgctgataaacacgaaaaactatcaccgttatcccgccagtttaccgagttagagcgtgagcaggttacattacaaaaagactaccaagaattaataaaagaatatgggttattaaggcgaccattctttgtaactgcagatgtgccttacaccgatgtgtgggattatccacctgttcagtattatcccggtaaacacccttgtgagaaaccatcagccatgatggaacacattattcgctcaagtagtagagagggtgacttagtagccgatttctttatgggatcgggtgcaacactgaaagcagcactaaaacttaatcgaaaggttttaggtgtggagcttgagagagagcggtttgagcaaaccgaacaagaaataaaagcgctaacttgtaagtaa

SEQ ID NO: 304471 - DNA, 186 bp, Proteus mirabilis; identical to SEQ ID NO: 304468

SEQ ID NO: 304472 - DNA, 336 bp, Proteus mirabilis
atggaacaggcgaaatatattgatttactgataacagagcgtgatttcacgctcaatgcgggctttgagccgatattgtgtaataaccgtcaaagtattacgcaagatattgcgcatgcgattgttgagagcggtttagccacccaattagtggccgaacgtagcccaaccttgcgcgctgatattcgtatgcagattgtgttactggttgaagatgatgagcgacttattccaggcaccattattgttgatgaagaaaacgtaaaaaaattatgggtgaccgcagatacttatgattttggccgtattagtgtcggggtgaattatggcgaataa

SEQ ID NO: 304473 - DNA, 360 bp, Proteus mirabilis; identical to SEQ ID NO: 297330

SEQ ID NO: 304474 - DNA, 441 bp, Proteus mirabilis
atgttatggccactcaaacaattggacgcagaaacctgctcagaagaattgttatcagtgctggcctatcagcgtgatattcaccgttttaaaggggagccattagatttatttcgcaagcgggtaaaatttgcctttattaatgcccgtgatgcggggtcggttagtggttttattgctatttttgagcgcttaggcgtgggctatgtcgagctgttagagcgtcagcctgatattgactgggatgtcattattttacgggtcagtgacggacaaatcgcaggcaaccccgatttgttgatgggcattattcgccagtatggacgcacgtgtcgccgttatcgttttgaagtgatcaccaataatcaattagtgatgcggtttggttgggctgattgtgaatatcagacctttggcgcatcactgttacaaggagagtaa

SEQ ID NO: 304475 - DNA, 318 bp, Proteus mirabilis
gtgaatggggatgtgtcggcagagggggagctggaattatccactaaatatctcaacgtcattacagccaaagctcgtagcgcaggctcttggcgagccattccgttagtcgatttgatgtggtacgcgaaagcgggcacagaagagcttaaggttgagtctttcggctgtaaattaaacgtcaccgatattttagacgttgacccgaaaggcggtgctgtgatgacgcataaaattaaatttattgtcacctcaccggactttgtgcgtattaacggtattccatacttagagtctgaattaacagacaaactgtaa

SEQ ID NO: 304476 - DNA, 291 bp, Proteus mirabilis
gtgctaaaaatagtaggatattttattgcatcatggaaagaagatattgattatcaattaccaaatataaaagatttagctttcgtttttggtggcggaatgggaggaatatgggaagatggatttgaaggggcttggatggatacttttattaaaagagtgggaaatacgttacaagtaagatataaagaagctgttctttggagcacaggcagtgcaaatcgtgatttatctagatttccatctacttgcttaataatagatgtgagcgatattaagaaggtattatga

SEQ ID NO: 304477 - DNA, 261 bp, Proteus mirabilis
ttgtgtaataaccgtcaaagtattacgcaagatattgcgcatgcgattattgagagcggtttagccactcaattagtggccgaacgtagcccaaccttgcgcgctgatattcgtatgcagattgtgttactggttgaagatgatgagcgacttattccaggcaccattattgttgatgaagaaaacgtaaaaaaattatgggtgaccgcagatacttatgattttggccgtattagtgtcggggtgaattatggcgaataa

SEQ ID NO: 304478 - DNA, 243 bp, Proteus mirabilis
gtgggctatgtcgagctgttagagcgtcagcctgatattgactgggatgtcattattttacgggtcagtgacggacaaatcgcaggcaaccccgatttgttgatgggcattattcgccagtatggacgcacgtgtcgccgttatcgttttgaagtgatcaccaataatcaattagtgatgcggtttggttgggctgattgtgaatatcagacctttggcgcatcactgttacaaggagagtaa

SEQ ID NO: 304479 - DNA, 243 bp, Proteus mirabilis
gtgggctatgtcgagttgttagagcgtcagccggatattgactgggatgtcattattttacgggtcagtgacggacaaatcgcaggcaaccccgatttgttgatgggcattattcgccagtatggacgcacgtgtcgccgttatcgttttgaagtgatcaccaataatcaattagtgatgcggtttggttgggctgattgtgaatatcagacctttggcgcatcactgttacaaggagagtaa

SEQ ID NO: 304480 - DNA, 198 bp, Proteus mirabilis
gtgtctgcctttaaacaagtaacgggaaaaagtgcagcattgaacccgaatgatccgttttattggtggtttgtcgaatttggtaccgccaagatgcccgcacaaccgtttatgcgccccagttttgaagcgaaaaaggaagcgacggctaaagtgattgttcaaacacttaaagaggatattgaaaaagcaaggtag

SEQ ID NO: 304481 - DNA, 186 bp, Proteus mirabilis; identical to SEQ ID NO: 304468

SEQ ID NO: 304482 - DNA, 186 bp, Proteus mirabilis; identical to SEQ ID NO: 304468

SEQ ID NO: 304483 - DNA, 246 bp, Proteus mirabilis
atgtggtcaaaaggatatttaaaagataataaatttgaaatgaaagttaacaccacttatttaaataggatagaggaaaaaatcagagaattaataaacattaataatgcactagaaaatgaaaaagtaaaaataatttatgatataaataataaaaaagcaccaatatattcaaaggaaatctttattgcgataaataacctttatgttttttttatagaatcaatttcatcttcaatcaaatga

SEQ ID NO: 304484 - DNA, 186 bp, Proteus mirabilis; identical to SEQ ID NO: 304468

SEQ ID NO: 304485 - DNA, 1410 bp, Proteus mirabilis
atggggagtaaatttgaaactaggttacttggtgaactttgtcatgagataacagttggttttgttggtacgatgacgaatgaatatatcgaaaatggtattccatttttgcgttcaaaaaatattgaggagtatgatgttaaatgggatgacatgaagtatgtgtcatctgcgtttcataaaaaactttctaagtccgtcctcaaaccgggcgatgttgcaattgtgagaaccggaaagccaggaactacatgcgttataccaaatgaccttcgagaggctaattgttcagacatagttattgctcgagttaataacgagctactatgtccacattacttatcgtatttcatgaatgcaatggctcatgggcaagtaaatgctcatattgtaggagctgtgcagcaacactttaatgtcagctcagctaaaaaattggaaataccgctaccttctagagtgaagcaaactaagattgttcaagtacttaagactctggatgataaattaaaactcaaccgccaaatcaaccaaaccctagaacaaatggcgcaaaccctatttaaatcatggtttgtagattttgatcctgtggttgataacgcactagatgctggtttttttgaacaggatttagctttctctgatgaattactgcgtcgggttgaagtgcgcaaagcagtacgcgaaagtgataattttaaaccgttatcagaggatattcggcggttatttcctaatgcgtttgaagaatgtgctgagcctgcattagggcttggcggttggatgccgaaagggtggatgagtaaaagtatatctgatgctatttttattaatccgaaagtaaatttagctaaagatactgttgcgaaatttgttgatatgaaagcccttccaactagcggatattcaatagaagaagttagtgaaaagcctttttcgggaggaatgaaatttcagaataacgatatattattggctcgtataacaccgtgcttagaaaatggtaaaactggaatagtagatttcctgtcagaaaatgaagctggttttggttcaactgaattcattattcttcgtggtaataaaaacatacattactcatatattgcctgtttagctcgatatgaatcatttaggcaacacgttatacaaagtatggttggttcatcagggcgccagagagttcagaatgggtgctttaatgactataaaattgcagtgccctctggcgaagtaatgaatagatttgctgatatagtttcaccttcgtttaaaaagttaacacagaatacaaatgaaagccgttcattaactaaactccgagacacactcctcccaaaacttatctccggcgagctgtctttgagtgatataaaaatagatattccagaagaaacacttatttaa

SEQ ID NO: 304486 - DNA, 1374 bp, Proteus mirabilis
atgactgtattaaatgccattgttaaagataaagccgaatatttagttgcacgtaaagcacagcaacctttatcaacctttatagataagattgcgccatcgacacgctcattttatcaagcattaacgcaatcacacccagtgtttattttagagtgtaaaaaagcatcgccctcaaaagggattattcgctctgattttgatcccgttgccattgcgaaaatttatcaaccctatgcagccgctatttcggtactgactgatgaaaaatattttcaaggcagttttgattatttacgtcaagttagtgatgccgttcatcaacctgttttatgtaaagattttattatcgatgaataccaaatttatttagctcgttttcaccaagctgatgccattttattaatgctttctgttcttaatgatgaacagtaccgtgcgcttagtaccgttgctcaccaattaaacatgggagtattaacagaagtgagcaccgaagaagagcgtcagcgagccattgagcttaaagcaaaagtgatcgggattaataatcgtaatttacgtgatctctctattgatttatcccgtaccgaacaacttagccaaggtttaccgcaagaggctattgttatcagcgaatctggaattcatacccatcaacaagttaaaacactaagtcaatatgctaatggctttttagtgggtagtgccttgatgtcacaagagaatattgcccaagcggtaagagcacttattttgggaaagcataaagtgtgcggcttaacccgtacacaagatgttaaagcggcctatcaagcgggtgcctattatgggggattaatttttgctgagaaatcaccacgaagagtgacactgtcacaagcgcaattattgataacacaagcgccattagcttttgtgggcgtttttcaaaaccaatctattgagcttatttgtgactatgctaaacaacttaatttatctgcggttcagttacatggcgctgaagatgcacaatttatagcccaactaagggaaaaaatcgccccacaatgtgaaatttggcaagcgcttaatatggcttatcaccatgatattcagcacattgcacaagttaacaaatatgtattagataatggtacgggtggcacaggcaacacctttgattggcaaactattccgcctactttacgccataaagcattacttgcaggtggcctaaacagtgataactgtttagatgctctaaacaccggttgcttaggacttgattttaattcaggggtggaatcttcagcaggtatcaaagatccacaacgtctatcgcaagtctttacacaattacaacaaagcaaattttcacaaaatttctga

SEQ ID NO: 304487 - DNA, 573 bp, Proteus mirabilis
atgaaatatattattgggatcgcggtattgatgctgacggcttgttcaagtgtgcctgataaagcttattatcaattacctgatgtttatcaaggtgcaaataataaggttgttacaactactgagagcgcaaagcaagatcagatttgggttcagcctatccgtttatctgatatgttagttaacacgggcattgtctatcaaaccagtgatatcaattataccgttgctaaccaacatttgtggataaacccgcttgatcaacagctacagcaaaatctggttgtgggattagcaaaagaattccctaatcgagtggtctcgacacaacctattgaagataaacttgctaaattgactgtcaatgttaattattttcaaggtcgatatgacggcaaagtgattattgctggtgattggatctacactcaaggcaataaagtgattagtcagcctttttctgtcgcgttaacacaaacggaagatggctatccggctctggtacgtacgctaggggaaggatggcagaatgtcgtcgctgagatcgcaaaaacaattaaatcacaatattaa

SEQ ID NO: 304488 - DNA, 279 bp, Proteus mirabilis
  misc_feature (264)..(273): n is a, c, g, or t
atggaattaaatttatgctggtggaatataggaatatctccaccgacaaaatcaaaacagaacgtcaagactgaaaaagttggcttagcgaaaaaatatcttgaagaacttatcattaaaaaaacacttgatatcattgcgttgagtgaggtttctgaaaacgagagctacgcttttaagcagttggcgactcaattaaaaatgggttatatcgatctctcaggaaaaataggacggattattattgatatatcatataatatnnnnnnnnnnatataa

SEQ ID NO: 304489 - DNA, 618 bp, Proteus mirabilis
atgaataaactagagtttatttcaagtaagtttttaaccaaactccagcctgataatagaatggtaagggtaggcgttgctgttgtatttaaagaaatcgaacatcaaaaaataatcaccctttttttatcacattggccatcaatattaagtgctaatgatacaactcgagaagtggctgctgcaggattaagaagtagtattaataaactctttgaaaataatggagatgatgttcagtttatttgtatgggggattataatacagagccttattctaatgcgatgcttaatatattgtatgcgacaagagattatcatttaataaaaaagaaaagaaaactattatttaacccattttggtatctcttatctgataagaagactaataatttaggtacatattattataattccgcatctattaatcgttggtatgtgtttgatcaaatgattttttcttcatcatttttatatggaaaagaagattgttttaaattagatcttgaacagcttgatttttatcgcgtcctaaatgatgataatcactgccttgatgatatcttttttaagaaatttgatcattaccccatattttgtaggatcttccatgaatga

SEQ ID NO: 304490 - DNA, 1125 bp, Proteus mirabilis
atgagtagtgataattcacaaaaggattttaacaaatattttgagaatacttataaagaaaactgccctaactttgatgaacatgtaaatatagcgctagtaggtaaagttagtgcaggtaaaagctcacttctgaacgcaatacttgattgctcacgggaggaaccaattgctgaagttggtgccggttctggagttacgacaaaagttaccccttttaaactagatgagcatgtcttaattattgattgcccaggtctcgatgatgtcagacaagaaaatagtgatgtaacagtaaatttcctaaattcaatagacctaggtatttttgtagtcacaggctctgctgatgcatcacaaaaagaaaattttgatgatttaaatcatagctcaaagaaaacttttgtcgttctaaataaaatagacgagtgggatgacttagaagaatcagcttatgaagaagttgtaaagcaatggaaatcagttctaggagtagaacaaatttatgggacttgtactaaagggtttgatcctaaaatgaaaaaatcagccccaatggatattagaggtgtagaagaactaaaaattgatatctttaattttttagaaactgaaggaaaagacatcctccttgccaggcacttgaaaaacaaggaaaagtatgcaatcggaattattgcaactgcaatcttagctgttactggcgaagcatttgtcccaggaagtgccgcatatattactgcaacacaagtagtcgccttaacatcattaaattacttatatactggtgaagtacttagcaagggatccgctttatccttattaccttcatttgtaggtcaatctataggaaccaacgcctttctttgggctaaatcttttttacctccaactcttattcttgatatgactgctgctattatagctgtaataattacatttgctatgcttgctgctgttaagtggatgcttgaaaatgagcaatcattaagtgatcgagagttattgaaaaaaacatttcttcatttcaaaaaattaggtgatatctttaaagatatccagtttaatgatctaaagaataaaaataacattattgcattattaggaaagttattagcgaagtaa

SEQ ID NO: 304491 - DNA, 261 bp, Proteus mirabilis
atgaaaaatgggcaaggaaaagtattaggggatacggtgctggaagaggaaccttttggcgattctcgtgctacctttgcaggactggcaataccttgtgaggtcgtcgcagagtttgaagtggttaaagcagtagaagatcaaaacggtcgtaaggttgaattacccctatccatctttcaggctaataatccagaactagctaagatgttggtaaaaaaacaggacctcaatgatgctaaaaatctgagtgtttattag

SEQ ID NO: 304492 - DNA, 675 bp, Proteus mirabilis
gtgatcagtccccagtatgtaaaaccctttgtccgcgggcaaaaaaatgacagtaatgatgcacaggctatcgcaattgctctgatgcagccaacaatgcagtttgtccccccaaaaagccctgaacagcaggatattcaggctctgcaccgtgcaagacagcgtattgttaatcaccgcactgcgacagtctgtcaaatccggggactgctgcttgatcggggaataacaatcggcgctgcagtctcaagagttcgtcgtgctgttccgcttatccttgaagatgctgaaaatggtcttagcgttagaatgcgcaggacgattgcagaactttatgatctctttaatgatcttagtcgtcgaataagcttttttgataaagaaattgatgctgtgttcaggcaatcagaagcctgccagcgcattgtcaaagttaaaggcattggccctaaaacagcaacagctgttgttgccgcgattggcaaaggaactgaatttaaaaatggtcgtcattttgccgcatggcttggtctggttccacgacagcactcaagtggtgacaggcaggtactgatgaatatgacgaaaaaggcgacaagcatttgcgaaccttatttattcacggagcccgggctgtcatcagagtggctgcaaataataatgagggttacttaa

SEQ ID NO: 304493 - DNA, 183 bp, Proteus mirabilis
atgaatattatctatctcggtattgatctggctaaaaatgtttttcagctttgtgggttaaatcaggcgggtaaaccggtttataaaaaacgtactgatcgtaaaacgttactacagaccgtcgcgaatattccggcctgcctgattggtgtggaagcctccacgggtgcattttactggtag

SEQ ID NO: 304494 - DNA, 1947 bp, Proteus mirabilis
atgatcctaactgataatgaaacaaaagttgatcttcttaataacgaagcaatcgctagtacgattatagaattattgcgctctcgacctaaccacccaatcactattggtgttcatggtgattggggagcaggtaaatccagtgtactagaaatgatcgagtcaggcttgaatgatacagaggaagtattgtgcctcaaattcaatggctggagatttcagggcttcgaagatgcaaaaattgcattaattgaaggtattgtatcaggcctagtagaaaaacgtcctacattaacaaaagctgctggaattgttaaagatatattctatcgcattgattggttaaagcttgctaaacgcgctggtggcctggcagtctctgcttttactggaattccaacggctgatcaaatcaagtctttagtaggctcacttcaatccatggcaagtgatcctgggaagtttgctacacaagaaaaccttttggctgccatcaatgagatacaaggggccttgaagcccagtgaagcaaggaatgttcctgaagaagtagaagctttccgaaaagcttttgataccctactcaaggaagcgggagttactcagcttattgttcttgtcgatgatcttgaccgttgtttaccagacacagccattgaaacccttgaggctatccgactatttgtcttcacagcacagactgcatttgttgtcgccgcggatgaagcaatgatcgaatattcggtgcgaaaacatttccctgatttaccagacagtacaggtccgagggattacgcccgtaattacctagaaaaactcatacaggtgccattccgtatacctgctcttggggaaacagaaactcgaatctatgtaacattactattggcaggaatagatctcggggaagatagtcccgattatataaagcttatagatgcagccagagcacaactaaaacgtccatggatgagtggtggcctgaatgcagcaattttccgaagtgcattaggtaatagtgcagataaagcgaataatgcgcttgttttaagtgatcaaattgcacctattcttgctagtggaaccaaggggaatccgcgacaaataaaacgctttctcaatacgctacttttacgtgaacgtacagcaatcgctagagggtttggtgaagatatcaaacttcctattcttgcaaaattaatgcttgctgaacgatttatcccaaaacttttcgaacaaattgcctatgtagccgcgactaatcccaaaggtcaatgtgaagagcttgaaaaacttgaagaaaattttaaaattgtaattccaattgataattccaacattgatgataaaaccaaggtggcatcattaggcgcaccttccctctcagaagccacagtacttactgaatggaaagaaactcatgagatacgcgaatgggctctgttaacaccatatctagcaggtgtcgatttacgaccatacctcttcgtgaccaaggataagaaggattattttggaccagtatcaatcttaggacatttatccacagtggtcgataaactgttaggtggcaagatggttgtacaaggacttgaggcagagttgaagcaactagctcaaccagaggcggataaggtatttgaggccttacgtagtaagatcgtaagtgctggagactttagtgtaaaaccagagggcatagatggtctcatcgtactggtaaaatcccaaccctgtttgcagagccctctattagattttttggaatcattacctaaagataaatgcggggcttgggtggttggtgggtggcaagccgcaattaaagattcagagtccaagtctcgtttagctgctctactgaaagcatggagtaaagttacaaataatcagcttttaaaaattgcggcagaaaaaacgcttaatcaacctaaaggaggtcgttaa

SEQ ID NO: 304495 - DNA, 864 bp, Proteus mirabilis
atgggtacttcaacaacatatggtggccctagaggtgataccccattaattccatcttggttagataatactgcaggtacaggacctagccctgatcaagacggagcggatcctcctaatcctaatgattcaccaactcctccagataaaacacctattcctaaacctgccgatcccaataggttttctggagctcgcggtaattttactaggtttgctaggtctggagggagtgatcgagcaagcctaggccgcgcaatttcaaattatgtatcaacctcttcaggaggagcccgccaagcagcacaacgaatgggggcttcaagaggggctggagcacggctacttggatttctttctgatgccaatacgagaggaatacgcgaggccctacatgaatttaatttagaatcaatggctggacttccaatatcagaagtatttgttgctttagcagaccatatttgtcctggtgcaggtaccgtcgatgaaggaatagcaagagaagcctatattgaaacaatcattgatcttgctggtgaaggtttagcaagcttagattcttttactcccgaacaaatggatactgtttttgaactctatgctacacacgctattgaagccagaatttgcaatgacataggtactaaattagtaagtatgccttctaatgctaaaattgcacaccaagttgaaaagcaattacaagactttattcgaggagcagtaagtgatgcgcttataaaagcacgtgagggtaaaccgaacataactaatgaccaagcacttgcgtttgttgattccgtatacgaatcagcttttgctattttgaaatctttaggtgatgcggaggctgatcaatga

SEQ ID NO: 304496 - DNA, 1362 bp, Proteus mirabilis
atgaagcgacaattactagtaggtctgtttggagctgatgaccaaatagaaatatccatgggaagtgatgaacaaaaaacatttgtgcaacttattgaaggaaaaaatcatttagctcatggtattggaagcgcgttatcctacttgaataaactaggaatttatccttctgaggtaggcttggatctactcattttagcagctcttgtccatgctgccgacacccgaatttcccgtgaacaacaatcacaagactcttggactagagaaattcgcctggtggtacctgttagtgatccagagaaatggaatgctactacaccaatattaaagaaaatgttgaactttttgactggagatttatgggaatttgggtttataaatcgccccttaaaattccagtctctcgttgaacaaggagagggaaatcttgttgcaccttcttttgatacacttagtctattttctggggggcttgatagccttattggagcgattgatttattgcaaaataacaatataccactattgatcagccattcaggcgatggagctgcaagtaatgcacagaatcagttattttcaagtttaaaagatcactacaaggaaaattcttttgcccgtttacgcgtaaatatgaattttaaagaaggattagtcaagggagtcagttcagataaaaatacacgaggaagatctttcctcttctttactttaggtgtatttgcagggacaggttttcggcatcaatttacacttcgtgtccctgaaaatgggctgatcgcattgaatgtacctttagatcctctaaggctgggctctaatagcactagaactactcacccttattacatggctcgttggaatgaattattacaaagcttagacatcaatggaaaagtactaaatccatattgggatcaaacgaaaggagagatggtatcaaactgtttagataaaaatttactaaaacaattggcgcccgattctttatcatgttcttcacctacaaaagggcgttggcaggggctgggaattgaacattgtggttattgccttccatgtataattagacgggcagcattagaaactgcactcggtaatgataccacccattacacagtttttgacttacacacgcgagaattaaatactcttaaagcagaaggtgttcaaattagatcgtttcaatatgcgattgagagactaaaaaaacaacgagtgcttgcaagtgtattaatccataaacccggttctcttgcggatgaaagaaaaaatttggatcaacttgctagtgtatactaccgtggtctgatggaagtcagtaagctaataaatggagtacaaactaggccaaaatga

SEQ ID NO: 304497 - DNA, 765 bp, Proteus mirabilis
atgatgaaaaaaagtaacaatactaaatcagggttagtggattttcattgccaccttgacctttatccgaatcatgagcaagctgtaaaagacgcagagttagcaggagtatttacacttgccgtaacaacgacaccacgagcttggcctcgtaataatgagttagcacaaaatacgaaatatgtccgtgcagcactaggattacaccctcaactaatctcagggcatgaagacgaaatcactatttgggataattacctatctgaaactcgttacattggtgaagtaggtcttgacgcagggcctcgtttttataaatctattgatgctcaaaaaagagtatttcgacatatattagaaagatgcgctgaaactggagataaaatcctctcggttcatagtgtaagagcctctaagttagttttggattatatagaggaatttctgccattagaaaaaggaaaaattgttttacactggttcactggatcaaaacaagaagtacagcgagctgtcaagctgggatgctatttctcaataaattcagcgatgttctctaacgaacgacatctgcccatgattatggaaataccaatagatagaatactgacggaaactgatggcccttttacaaaatcaggtggtaggccatcaataccctctgacgtggttaatgtaatagatactcttgctcttcttcataaaaagaaaccatctgaactttcttcaattattagggataacttaaggagtctgttagcttaa

SEQ ID NO: 304498 - DNA, 1524 bp, Proteus mirabilis
atgtcaacattgagaatcagtatggatatccaagaatttgtcagtaaatataaaaatcatcctgtactttttgttggtacaggttttagtctacgctatttagaacattcatatagttgggataatctgttggcacatatttctaatgaactcactgataatcctgaattttattatgatctcaaagctaacgctgaacaaaacggtgaatatagatacgatatactcgcaagcgctctagaaacagagtttaatgaacgcttatcaaaagatcgagatggtaaatttaaagctatcaacgatatcttttatgataaaatgaaagtgggtattaaaaccagccgttttaaaatctacatatcatctttattagaaaatatagagctaaaagaaaacgtatccaatgaaattgatgctcttgtgaaaacaagaaaaaatatcggttctattataacaactaattatgaccaattaatagaaaaaattttcgagtttagccctttaatcggtaataacattttactaagtaatccgtatggttctgtatataaaatacatggctgtactagtgactataataatataatcatgactgaaaatgactatattaatttcaataataaatacgaactaattagggctcaactgctatcattatttatacataatccaatcattttcattggatacagtattagtgatacaaatataaaacaattattaaaaactgttttttcatatgtagatttaaataccgagctagcaaaaaatataagagataattttttattagtagaatactccgcaggtgaaacttcaactgaaatagtagagcacgatatagacatagaaggcatgtctataataagaataaataaaattaaaactgataactatagcgctgtttacaatgctatttctaatttagttctccctgtatcagcaatggatataagaaaagttcaaaaagtctggaatacaataaaaagtggaggtgaaataaaagttaaaataacagaaaatctagacacactaaaaaacgaggaaatggtaattgctgtaggttctgaaaaaaccatacaatatatgtatcaaactaaatcagaaatgatggaaaattacttcaaaattattgatgagtctaatcagcaacttatagagctattaaataaacaaaaaattcaaacatctcagttttttccaatctttgcattttctgagatttgttcagcactagaaaacgttatagaatataaagaacaacaaattagaaaacttacagaacactatattaaaactgatgagaaaagaaattgtgagaaccaccacaaaataattgaagatatactagatgacgttagtattcctaactccaagaaatcagactgtatttttcacagttattactgtaataaaatagttgataatcagattaaaaattatttactcaactatggtgataagacatcaactgattatagaagattactctgcctctatgattataaaacttatggtgtataa

SEQ ID NO: 304499 - DNA, 564 bp, Proteus mirabilis
atgagcaatattagggatagattggcactcggtattgcagctttatcactagtagtatcagcggtggctgtttacattacttattcaggaataaaaaatcaggaagctaattttattcgggcagttcaacctcatatttctcttgttccccaagcagaccctagtaataatggggtaggtttttatttttacaatagtggcccaggtattggctatattgaaaatttaataattattaataaaattggtcaaaaatttgatttatccaataccagtgaaaaaagtcctgcggcagcgttagcagatatagttggttttaatcaaacttgtttaagaatgggttttccgaaaaaaggaaattcgttagctgtagataatatggaaccgttaattgcgattagcattccaattatccgaccagagtgcgctgaatacttaagtgaaatggtgcaatacacaaaaaataaaacatataattttcaagttgaaatagtttatcgctctagttatgggaagaaatatggttattctttcccatctaatgtaacaaaagaactagattaa

SEQ ID NO: 304500 - DNA, 456 bp, Proteus mirabilis
gtgcaaaccgtaacacagcgtgatgctctgctacaacatatctctaccgcttttagtatcgacttatctgatatacaaaaaagcacattagagcgtcatatcagtgatcccgatattcctttgccgttacgtgaactattagccatacgattacaagtttgtaccaccagcatcagtaaatataaagcgctgatgaatggtgttagcgctgatggccgtttacgtggaacattgcaattttgcggagcttcacgtacagatcgttgggctgggcgattatttcagccgcaaaatttaccaaaaccaacacttgaccaagacaccattgataacggtatcgaaacgttaaaagcaggatgtactgatcttatttacgatgacataatgcaactgaccagctcagctttacgcggttgcattatggcaccagaggggcaaaaagctagtcgtctctga

SEQ ID NO: 304501 - DNA, 294 bp, Proteus mirabilis
ttggcctatgctcgagcattcaatattagccccgaagatgttgataagcacatgggccaaatcggtaaagtaatggaattaggcttagggtgcggcggcggtgctgctttcttaacattcaccctcacctatggtctagatttagatgaactcgccgaagctgctttacctaatatcccaccaaaagtgaaacacgatgcgcttatctggtatcaaaaatccgttgaaatcaagaaaacctatggcctcagtgaaacagtatttattacctgcgattcacttgagcgtatgtga

SEQ ID NO: 304502 - DNA, 279 bp, Proteus mirabilis
atggaaacggctgaaaacctatgggggaaattagtggaaaacgtaacccaagctgcagcgcgtgatgttctcgcgggtaacatgctaacaattgaagatcacggttatgatattgtgctcacagtgcatgatgaagtattgaccgaagcactcgataactacgaattcaaccatgaacaattatctgaattactcgccactaaccccgaatgggctttagatctcccacttagtgcgggggactttgaagcttatattatagaaaggattaaggaataa

SEQ ID NO: 304503 - DNA, 192 bp, Proteus mirabilis
atggctaaagtagaatgtaaggtttgtgaatacgtatatgatgattcagaaatagattattgtcctcgttgtgatgaaacaactcctcctaaaggtattcaatgtgagttttgcgataacttagcgacttcatatgttcaagatcatcccgtttgtgatgattgctatgatgatgcgtatcctgttgattaa

SEQ ID NO: 304504 - DNA, 228 bp, Proteus mirabilis
atgacattcgtaaacaacgatagcccgttgtatttccgcgcggctcgggacgctgtacatattgagcaagccggaaaatacttcaaggctgctacggcttggttgcaagcacaccgactcgcacgagcaagaaacaatcaaatttggagcgaaagacgctctgatttttgtatgaagcaacttaaacgtgaaatgtacaaaggtacaagtaatgagcaaagtacgtga

SEQ ID NO: 304505 - DNA, 273 bp, Proteus mirabilis
atgagcaaagtacgtgaagatgtaatcgaaaggcacttggtcaaagaagtgaaaaaagcgggtggtatcgcttataaatttacttcaccgggtcgtcgaggtgtgccagataggatcgtacttttgccacatgacaaaatcatttttgttgaatgtaaagccaccagtgaaaagccacgccccgatcagttacgggaacacgcgaagctttttgctttagagtttcatgttgttgttttggatagtaaggatttaggaaacgtattaaattaa

SEQ ID NO: 304506 - DNA, 315 bp, Proteus mirabilis
atgaagttaatcactcagaattttacggttgcgaattttttcaaaaatggtggagtacttgagtatgaggttgaggccagcgaagttgatgaaagtaatccaaatttctatacgttaccttcaattcaatctaagttatctacgggttttgaactccgaccttctgagattatttatgatccgaaagaagtagctaaaattacggtgtatggaaatgattggactagatttattatccgagtatatttagctggtgggcatattatgtataaacaaataagtcccaatatttaccgtgccgaatgtacaatctag

SEQ ID NO: 304507 - DNA, 795 bp, Proteus mirabilis
gtgctttatactattggtatgcctcgagtattaaccctttctattacagagcaattgggagatattattcaccatcgtcatgtcaatgaagacgatccagtaccagcccttccttttgaaaaagatatgaataatatcgcttttataagtgatcatgattggttagggtattctatagaaattgcaataacatatatagacttgaaacatcaaggtatggcgagtaaagctattgatcaattgaaaacaaatttcaatataaaaagtgatacatttattcaccatggtgatgctgtgcatttttacaaaccaacatcaaaaacatctatgtataaatacgtgttggcaagtgttggatatgcaccaagtcttttggtaaatatggaaatagataaaaaacgttatctcgtctctgatactgatgaaaagctctatctcgtttctgaattactacccgatcatcggcttaaacaagaattttttgaactttataaattacccaaaacagcatcacctggtgtaactggtggtggagaccactcaagtggtaaatatacaaactttattatttctaaaataattagtttagttaaatataaaggattaacagaatctgcatataatattagagcagaattgatcaatcaaaaaagactatcacaagccaaatacgacgaaagcagctatttgctagacttagatcttatggtcgcagatacattattacccacattacttatgccagaaggtataacggcgctgaaaaggttcaaatatgctaatgacaataattaa

SEQ ID NO: 304508 - DNA, 1344 bp, Proteus mirabilis
atgttgtattttcaccgaatgttactattagttatttgtttcattagtctgatctttagcgttgtaagcaaagcggtatgtattaaggtaacagataatagttttctatccgatagtgcaattaaggcaggctatactgctcgtaactggtatggtgcctttgatgataatattgggcatttaggcttaccatctgtaattagtgtgagtaccagtaataaatttcaacctgctggtactgtactagcgagctctattgctaattttcttacatcagcaactcgaacaccatatagtgcgaaacagatcctttttcgttgtgagctaaaggatgcagggcaactttatgaattgtattccaccaatggtgataacatatttgtgggagggcgtccggcgaaagaattggaaggagcctattatgatgtagaacgtaatgtcgctgtacgtatgactaatcttagtacaggagagtattatagtcgttattggaaacagcgccaacttacggcagatagttggtttcaagatgatcacgcgatttatattcctgctagcgcatttagcaatatattgtatgagatgataaaaatctcagcctcagatcagtttatttatgcgggtagaattaataaagatacttataaccaacctcgaggttatattgcttttaaagggcctggcttagatacttttgctatccaagaaggagatgatcatgccaataaatatttgggatggccatatgtatggccgggcgcatggggaacttataatcaagttacttatattcgaggtgcaacttgtacaatagaggattatccctcaatagttatcttgcctcaaattactgttagggcactctcttcagggcaaagcagtcaagcaacatttagtcttacacttaattgcgaatcaggagcaatgtcttcaactcaccctacaactaatattgcgaatgtagcaatgggctttttagttaatcaacctacggcggttgcggccgcccgtcgtttaggtctaacaacatctggtggtggattaacatggctattggatacacattatggtgaaaaaggcgttgcttctggggttgggatcaaaatctatgataaacaaggtgctgcaattaatttgctaccggacaggatggtgacgggaagtggaagtactcgagggtggtatgcgtataaagatcttactacgttttctggtacaaaagaaaatggttctatagaaacttggcatggtgattttactgcttctttagaagctcttagtggacaaaccgtaaccgtggggagtgttaatgcacaattacaagccgtggttagttttcaataa

SEQ ID NO: 304509 - DNA, 369 bp, Proteus mirabilis
atgtttagtataaacaatgaaataaataatataaagttttctattattgatataacccttaaaaacggtttttttaatgtttttaattgtgaattttattattttgaattaagtgattttgtcgataatattttagatattataaacaacgttagtcataaatgtttattcacagatgagagaaacataattaacatttcctttaaaaaaataaaaaactctagcgacatttcagttcactacaagttatttgaatacttcgatagtgactgctatataactggaatatttattatttctaaagaaaaactatatgacattataaatgatataaaaccttatctattagagaagaaagcatctacttag

SEQ ID NO: 304510 - DNA, 210 bp, Proteus mirabilis; identical to SEQ ID NO: 299942

SEQ ID NO: 304511 - DNA, 168 bp, Proteus mirabilis
gtgatttctgagaacaatgcgtggtgtgtgaatttaattgatactattcaaggtaattcagcagaatataagctctatgtatttgtgaagtattcttatcatatttcacttcatcctcaaaaatggggaattcaaatttatcataaagatgttattacacacgcttga

SEQ ID NO: 304512 - DNA, 294 bp, Proteus mirabilis; identical to SEQ ID NO: 297475

SEQ ID NO: 304513 - DNA, 597 bp, Proteus mirabilis
atgacaagcaaagttaaattaccaggtcttgaaatattcatgaccaagaaagatgaagaatgtttttcgaaagctttgaaagagtattctgatagcattgagtttattgacaactacatttggcttaccgctgaaccaccactgaaagaactcatttcactatgctacgacgctatcaattcaaatgttacaattatcaatggcaacatcactagtttcagtgaatacaaaaatcatttcgtatttccacggccaaataatgcaggtttttcaggtagttttgtaggaaaaggtttgattcaatttatccattcaagggaagctgattttgcagaaggatgtttgcgcaacggcactatatctgcatcttacaaaccagcagaagatcctgaaacagaggcttttgtaaaggccgtttggaaaattttcaaaaaaggtgctaaaaaggtttaccttattgaccgagaaacgggtgaagttaatattaaaccggaaacaaactttttcgcttggcctgatgctgcaaagacttatgacggaatagatggtcgatatttaacaaatcatgcctttgcttattttgtcgctaaaccttag

SEQ ID NO: 304514 - DNA, 663 bp, Proteus mirabilis; identical to SEQ ID NO: 190890

SEQ ID NO: 304515 - DNA, 741 bp, Proteus mirabilis
atgactcattctgaagaattgtccgtaaccccattacataaaaaaatttaccggggggggattgtgacgggcgtggtcgcctgtgctctggtggccggtatcccgctgtttatccacagtaatgttatcagttcacactcagaggctctgtcacaactcggacaacgattacaggcgattgagatgaagatggctgactctgtcacggatgaccggatgaatgcgcaactggacgtgctccgtcaggggctgacgacgctaaaacaggatgtggcatcacagcgcgacaccctcagaacggtgacagcacagctggcggtggccggcaaaccggatgaacagatcgccgtactgtctgacgggctggaaaaacggctggcacaactggaaacccgccaggcacagtgggcactggcgttacatcagttgcaggaacagcgtcagccggaacaaaaaacggtcaatcccccggttgtcagggcaaaacccgccacgccggaaacttcccgtctcggggcttctgtccgtccatcccggaccgtgccgtttcagttaaccgcgattgaacagcggggcggtcgtcttcttgccgcactggctcctgcggatattcgtcagctggggcaggtacagttactgccggtaggcggacgttatcagggctgggaaatgaccgacattcagactgatcgtgtgacattacgttatcaggggcgcacagtgacgttgcgcctgccataa

SEQ ID NO: 304516 - DNA, 306 bp, Proteus mirabilis
gtggcattaaacaaagccgttcctctgctgtataacgcactggcttccggcgaaatgctgccaaaagttgagttaaaatggtatcgcacgtctgttgaaggtaaacaagagcacttctttaccaccacactgactgacgcgacgatcgtgaacatcgattgccaaatgcctcattgtcaagatccggctaaagccgacttcacgcaacttatcgaagtctccctctcttaccgcaaaattgactgggagcacactgttgctggaacgtctggtgcggatgactggcgtgcgcctctcgaagcgtaa

SEQ ID NO: 304517 - DNA, 750 bp, Proteus mirabilis
atgctaatgacaatgattaaattatttgttcttattccttatctattgttaggtggttgtagtgggcttatcaatatatatcttgataataaattccccgtcaatatgaataatgatggcaataaaatcacggtttattcaactatttaccctgaaatggtagtgcaagtccgaggtacttatacatctaataagtgtgaacgttctcattttaattctgattataccgaagtctcttactcctctttaacacaaaaagtagaggtagagcgtaaaatagcagaggataataaaaccgcgacctatatcgtgcctattgatggagggggatggtgtaattggaagttagtaaaaatagaattatcaccagtttctaccattcacaaaagatatatgcgaattagtgaagttattccaatcaccgatgataagcattcaaaaatagaactatttaccacattagcccctattatagtagaaggcaagaatgagcaatccatctattattcaccatcaagcacggaaggtgaacgaaagttatccaataaatcagatggagaaatctattttaattataaagttgaacctaaactaaccacgactatctcaaaagatgaaaaagttatttttcctaatgggagcattaaagatccaaccttttctatttatactggaatgattagttttaatgaaataatcgagaatagtgatgaaaaggcgtttgcttcttttgttagatatattgattaa

SEQ ID NO: 304518 - DNA, 912 bp, Proteus mirabilis
atgcctgacccaattggattattgggtgggattaatctgtatcaatatgcgccgaatccgttgggatggattgatccgtgggggttgtcatctcaggaaatggttagagtaaggcaccatacctcagttgaaggcctagaagggataaaaaacacacagtcaatcaaccctgcaagaggaacaccaataggagtgcatatcgagattgctccgtttggagatcccaaaacggcaggtgcagacataggatcttggaaaagtggttcatatgttgagtttgaggttccgaaggaaatgatagttgaaactaacgttgggccaagaaaaacaggggtcataccaactgaacagccattatctctacataataagaatactgtgtttaaaaaaacaatcttggtggtctcgtttaacagaaaaaggttgtcgataatgaatatttactatgataataaacttttattagccttgtattcatatttacggcaaactgagttatccatagatagagggttaaatgaatggaagaatgctagatcttacttaaaacatcgctatttagctgataaactaatcatggcattggctataaataaaacactacatcagaagaacacctttagtaaggtatattgctatgcatacctaaagttacgacataaacaatatttgacacgacaagagtctgatacaatatgttgtttattaagaactattggaagttatctttctgaagattcacctgatagatctaatttaattaaactaagaatagaactgtataatgctgcaaaattagttagaaaaaggattaccaataataatcgaataatattagctgatagagtagagcattataatcagcatttgcatggtactttttattctatagaagaaataactagtttatag

SEQ ID NO: 304519 - DNA, 267 bp, Proteus mirabilis
atgagtattaacgtagaggtagataataaccataaagaaacaaataaaattaatgacatggtaatattatcttctatctttggtacaaaaaaaataacagaaaaacagctatattttgtattgagatgtgagaataaattaggaaccttaacggcgttaatttcagttagtcaagtcatggataacttatatcctgaaaaaaaaattgattgggaattagctgtctcttatacacatctgacgctgccgacgaatagagaggtgtag

SEQ ID NO: 304520 - DNA, 699 bp, Proteus mirabilis
gtgattgctgctggaaatgaagaatactttcctgccaccaatgcgcttgttaagcagaaaagccgtgttgaatcactacaaaatgttattttacaacatcaatttgttggtgaaagaacaattgtttttgccaataaggagactttatttagttatcaaagtggtcatttatttattgaagggattgctcagcggctaaatatgcctatttatactgtgacggataacagtgttatacttgaaaatgaatacattatggtaaaaccgacgactgaaagtcagtttattggtcaccctttacttgctgatacaggtgcatctaatacgctacttactgaaacagtacctaatgagcctaatacaatgtctaataggcaaagagtagatattgaaaataaaaactatgctgcagaaatctatcaattcgtctcacacaattacactaattatagagataatcaagagtttaagttaggttatcagaatgagattagcactatttttcctgactattctgacaatatgaccattgctgatattttaaattacattcagttaaatcgctatcagatcaattatgctcaattaggtgcaattattaggaaagtcgatcaaattaaccttaaatatcataaagaaaaacttgcagagttcagtgataaaataataaatcacgactttcctaataattgcacctaa

SEQ ID NO: 304521 - DNA, 252 bp, Proteus mirabilis
atgaaaattaaagaaccagatgagcttatagcggatgcggataaatatgagtcaaaagtaatgtttaaatcaatgagaatagcttggttgatatttaccattgtactacttaatttaataccaatgcttattcatggtggagtattgtcattatctaactttttgattttcaatgtgtttgttatttgtattatgttatggatatatatcagaaaaatattttatatatattccaagagaaattcacattaa

SEQ ID NO: 304522 - DNA, 378 bp, Proteus mirabilis
atgttatatacaaatcctcgtaataaatcaggtttctatgggcggcatcaaattagcaaaccttcccatcatacgtggaaatcttatgctcactttttattagccagtttaccagagaaaacagcagaacattatcgtaataaaatagcggtctatcttcgctggtatgccgaacgagattacccaaatggcatacctgatgcacaagaaggtgatactagcactaaacaaataccttcttggcgacgaatttgtaagaccatcttgcgtaacgatttttggtgtagaacattagcatttagtcctactaaatcacactgttatgatcgatatttcaaacggatacaaggaaaacgaaaagactggcaacttatttag

SEQ ID NO: 304523 - DNA, 477 bp, Proteus mirabilis
gtgtataagagacaggatgagggtaataaaggtattttatcacgagtattattgaacataatttcaagctttgaactctataaagagaccataaataatttaaaaaaactcgctgttatcagtcagtctgatgaagagattagcgctttatcgccgacagaagcattaaataaactcaatgaatttaaaggcgaagttaacttagccacaagtgaagatagctctaccatttcttctaaagtagaaattaataatcttgtcattgacaaaagattactctgttatttaggtgcaaagataaatggtgaaagtatcgatgcgatagatcttaatcagatagagaactgggataaaaaaattacttttgatcctcagcatcttaatgattattttttatctgtgacgggcaatgaaaaagataaagaagttattgcattattacgttatctattaaatctgtctcttatacacatctga

SEQ ID NO: 304524 - DNA, 279 bp, Proteus mirabilis
atgcgccgtcagcttgagtacaagcagctctggcgaggtggtcaggtactggcaataccccctgcctacaccagtcagaagtgcgcttgctgtggtcatacagcaaaggaaaaccgccagtcacaaagtcaattcgagtgccttgaatgtggatatacagcgaatgctgatatcaacggggcacgtaacattttagcggcaggacatgccgtgcttgcctgtggaggagaccgcccgtcgaagcaggaacccgccgaggtgattcagacatcagtctga

SEQ ID NO: 304525 - DNA, 540 bp, Proteus mirabilis
atggtagaagatgattattttattatattaaatcctgatgtaatagttaattacaatgctataaatgcattaatcgaagagatgatcagggataaagttctaatagctacaattaatttgtttaaagataaaaaaaatagtatttatgattgttctataagaatgttcccatctttaaaacattttattaaatcttttttagggctaggtaattcttctattgttgataaaagtaaaataattgaaccttgccatattgattgggcggcgggttcttttcttgcaatccaatcttgtcattatcttaaactaggtggatttgatgagaaatattttatgtactgtgaagatattgatatttgttatagaagctttttaatgaacatacctgttaaatattaccctgctattcatgcaatacacttagctaaacatgccaatagaaaaattttttcaaaacatttctattggcatttttctagtgctattcgatttttattgacaaaaaaaaatctaacaaaaatgaaatcaagtatttaa

SEQ ID NO: 304526 - DNA, 222 bp, Proteus mirabilis
atgaatccttaccatgaacttgacgcaagggaagaacgcgaacaagaagaagcatcatggattgatgcaaaggacgctgagttaagcaatgtcgcatttaatgtggttgatggattaccaaaggatattaccagtcaatggagtgacagcgttttcgatatgacaattgatggtctttacaaggagttaaagaactatcaggaacgtaggaggatgtcgtga

SEQ ID NO: 304527 - DNA, 1797 bp, Proteus mirabilis; identical to SEQ ID NO: 196150

SEQ ID NO: 304528 - DNA, 1278 bp, Proteus mirabilis; identical to SEQ ID NO: 52326

SEQ ID NO: 304529 - DNA, 1011 bp, Proteus mirabilis; identical to SEQ ID NO: 196152

SEQ ID NO: 304530 - DNA, 996 bp, Proteus mirabilis; identical to SEQ ID NO: 52327

SEQ ID NO: 304531 - DNA, 906 bp, Proteus mirabilis
atgaagaaaaatgactgtttgtgccgtcgttacacattcacggatgcgtcaacgtcggaaacattcgaggtatttattggctacaaagttctccgagaacccagcccctcggggccaggccaattcacgatggtgaagctaaaccgaaccgtcacggatgggaaagctgaaaactggtctgagacaaagctcgaagtaccatttgaagcaaacggcccggacacgatcccaatgtcctacaaggacaaagaaagccagtatgtgtcacagtttctcagccaggggtacacctttctggatgaggtgctggtaaacgcagagacacagactgtgctagaaggggggggtgtttcagccggacaagcagccagcttggggtctatcaactggctgttatctccgccttctgagttacctccaggtgacataaacctcttcaaaggttttgttactggggtttttgccaaaggagccagtttaatcggctttgaggttgctcggaacgaaagctcaaacgacttgctacccagtgtgctgatgcgtactgacagcggttatgagcttggggttagcactgggctaggcgagaacactatccatccagccacgctggaaggcgctggtgaactccgcccggaacatggtcacaaacccctgctgatgctggtttacctgcaacaacgtttcgcggatgacttttcaaacgtagagaagccgctggtggcattctgtgatgaacagggtgataccttcgactacgagcgttttgattcactaaaacccctcattgaacggtttggtttcagctatgacgaagtaagagcagatgctgaaaggcttggccttgtatctgagctgattcgcctagcagagatcgacgccgaacaagaggatctctttttttaa

SEQ ID NO: 304532 - DNA, 969 bp, Proteus mirabilis; identical to SEQ ID NO: 196155

SEQ ID NO: 304533 - DNA, 186 bp, Proteus mirabilis; identical to SEQ ID NO: 52328

SEQ ID NO: 304534 - DNA, 321 bp, Proteus mirabilis; identical to SEQ ID NO: 196157

SEQ ID NO: 304535 - DNA, 651 bp, Proteus mirabilis; identical to SEQ ID NO: 196158

SEQ ID NO: 304536 - DNA, 1203 bp, Proteus mirabilis
gtgcatcatattgatattgcctccttctggccaggttataccgtcatcgcccaagcgctttctgccaaccatcacaccctgtttacccttgagcctcgcgccgacttcttgccccgttgtcgccgatgcctgcaacccacgccattgatccacgaccaacgtatccgccgggtgcgtgagcgagacctatttgaccgacaagtctggttacaactgcctgttcgccgcgtcgactgtctgcgctgtggtcgcgtcagtgaacatatcgactggctcccctctggctcccgcctcacccggcgcatgcagtgctggattgaagcgctcgttcagtacctccccatccgccatgtcagccagctcaccggggtcggttggcacaccatcaaggagatcgacaagcgccgtttgcagaccagtgtgggcaccatcgaacttggggaggtgcggcggctggtgatggatgagtttgccctgcacaagggacaccgctatgccaccgtgatcatggatgccgagcgaacccgcgtcctgtgggtggggcacggcaacagccgggccgctatccgtcccttcttcgagcagctcggcgagcgatgccagcagattgaagcggtggcgatggacatgaacacggcgttcgacctggaggtgaagcaacactgcccgcaggcggaggtggtctacgacctgttccacgtggtggctcgctatggccgagaggtggtggaccgggtgcgagtggagcaggcgaatgcactgaaaagcgataaaccggcgcgaaaagtggtcaaaagtgcgcgttggttgctgctacgtaatcgggcgaagttgagtgaaaaacaggatgtgaagttgcaggagctgttggcggcgaatcaaccgctggcgatggtgtacgtgctgaaagaggggttgaagggcatctggtatgcgccgagcgtgtgggaaggatggcgacgatggcggagctggatgcggcaggtgaaggaaagcgggctagcgccgctgcaacgatttggtcgaaatttatcgaaatatatgcgggggatcctggcgagtgcaaactacccgatgcacacgagtgtgctggaaggggtgaacaacaagatcaaagtgataaagcgtatggcatatggatttagggactcagaatacttttttctgaaaatcaaggcggccttccccggaaagccgcgatga

SEQ ID NO: 304537 - DNA, 861 bp, Proteus mirabilis; identical to SEQ ID NO: 196159

SEQ ID NO: 304538 - DNA, 2739 bp, Proteus mirabilis; identical to SEQ ID NO: 52329

SEQ ID NO: 304539 - DNA, 1005 bp, Proteus mirabilis; identical to SEQ ID NO: 52330

SEQ ID NO: 304540 - DNA, 678 bp, Proteus mirabilis; identical to SEQ ID NO: 52331

SEQ ID NO: 304541 - DNA, 1269 bp, Proteus mirabilis; identical to SEQ ID NO: 196021

SEQ ID NO: 304542 - DNA, 531 bp, Proteus mirabilis; identical to SEQ ID NO: 196022

SEQ ID NO: 304543 - DNA, 318 bp, Proteus mirabilis; identical to SEQ ID NO: 196023

SEQ ID NO: 304544 - DNA, 384 bp, Proteus mirabilis; identical to SEQ ID NO: 196027

SEQ ID NO: 304545 - DNA, 579 bp, Proteus mirabilis; identical to SEQ ID NO: 196028

SEQ ID NO: 304546 - DNA, 1317 bp, Proteus mirabilis; identical to SEQ ID NO: 196029

SEQ ID NO: 304547 - DNA, 918 bp, Proteus mirabilis; identical to SEQ ID NO: 52332

SEQ ID NO: 304548 - DNA, 627 bp, Proteus mirabilis; identical to SEQ ID NO: 196031

SEQ ID NO: 304549 - DNA, 348 bp, Proteus mirabilis; identical to SEQ ID NO: 52333

SEQ ID NO: 304550 - DNA, 144 bp, Proteus mirabilis; identical to SEQ ID NO: 102548

SEQ ID NO: 304551 - DNA, 663 bp, Proteus mirabilis; identical to SEQ ID NO: 52334

SEQ ID NO: 304552 - DNA, 378 bp, Proteus mirabilis; identical to SEQ ID NO: 52335

SEQ ID NO: 304553 - DNA, 447 bp, Proteus mirabilis; identical to SEQ ID NO: 52336

SEQ ID NO: 304554 - DNA, 630 bp, Proteus mirabilis; identical to SEQ ID NO: 196038

SEQ ID NO: 304555 - DNA, 546 bp, Proteus mirabilis; identical to SEQ ID NO: 196039

SEQ ID NO: 304556 - DNA, 1866 bp, Proteus mirabilis; identical to SEQ ID NO: 196040

SEQ ID NO: 304557 - DNA, 2964 bp, Proteus mirabilis; identical to SEQ ID NO: 52337

SEQ ID NO: 304558 - DNA, 618 bp, Proteus mirabilis; identical to SEQ ID NO: 52338

SEQ ID NO: 304559 - DNA, 2190 bp, Proteus mirabilis; identical to SEQ ID NO: 196043

SEQ ID NO: 304560 - DNA, 402 bp, Proteus mirabilis; identical to SEQ ID NO: 52339

SEQ ID NO: 304561 - DNA, 417 bp, Proteus mirabilis; identical to SEQ ID NO: 52340

SEQ ID NO: 304562 - DNA, 291 bp, Proteus mirabilis; identical to SEQ ID NO: 52341

SEQ ID NO: 304563 - DNA, 234 bp, Proteus mirabilis; identical to SEQ ID NO: 52342

SEQ ID NO: 304564 - DNA, 252 bp, Proteus mirabilis; identical to SEQ ID NO: 52343

SEQ ID NO: 304565 - DNA, 279 bp, Proteus mirabilis; identical to SEQ ID NO: 52344

SEQ ID NO: 304566 - DNA, 618 bp, Proteus mirabilis; identical to SEQ ID NO: 52345

SEQ ID NO: 304567 - DNA, 1434 bp, Proteus mirabilis; identical to SEQ ID NO: 196050

SEQ ID NO: 304568 - DNA, 318 bp, Proteus mirabilis; identical to SEQ ID NO: 52346

SEQ ID NO: 304569 - DNA, 879 bp, Proteus mirabilis; identical to SEQ ID NO: 52347

SEQ ID NO: 304570 - DNA, 399 bp, Proteus mirabilis
atgaaaaataagaagttgatagctttgataatatccgctgccacatcatgctcgtcagtttacgcagctacattaccggccaatgaggtgggctcatatatacttgcaatgaacactatgtcaccgatcactgcaaagtacaccatccagtacaagcaagcagttgagcagaaatgcaatacggttcttggtgttgaacaactcaactcgacggcattcaccaatgttgttcaggcaatggtgagtagtgagactgtcgatagaatggggctggatgctgctggtggctctctccaagatactttgtctatgatcgggaaaaacgtcacttgtaggggtcgtttgcgggagagggcgaaatcctacgctaaggctttggccaacgatattctccggtaa

SEQ ID NO: 304571 - DNA, 726 bp, Proteus mirabilis; identical to SEQ ID NO: 196075

SEQ ID NO: 304572 - DNA, 240 bp, Proteus mirabilis; identical to SEQ ID NO: 196076

SEQ ID NO: 304573 - DNA, 279 bp, Proteus mirabilis; identical to SEQ ID NO: 196077

SEQ ID NO: 304574 - DNA, 1728 bp, Proteus mirabilis; identical to SEQ ID NO: 196078

SEQ ID NO: 304575 - DNA, 387 bp, Proteus mirabilis; identical to SEQ ID NO: 196079

SEQ ID NO: 304576 - DNA, 861 bp, Proteus mirabilis; identical to SEQ ID NO: 196080

SEQ ID NO: 304577 - DNA, 273 bp, Proteus mirabilis; identical to SEQ ID NO: 196081

SEQ ID NO: 304578 - DNA, 606 bp, Proteus mirabilis; identical to SEQ ID NO: 196082

SEQ ID NO: 304579 - DNA, 2454 bp, Proteus mirabilis; identical to SEQ ID NO: 196084

SEQ ID NO: 304580 - DNA, 387 bp, Proteus mirabilis
atgtctaaaaacgtcaatgatgttttttcaaaccgatcttccttggagtgtactgtgaatgcagcgctggaccgtcgtattggtctgcgtgtcgggttccctcattaccgagaaggagcaaacggtgtggtttgtgagatcgaagcagagtacccattgctgaacactcattcgggtgttgtatggactcagctcgatgaactcaacagttacaccatcaaaaaaaaccaatcactcattgatcacattgataatgcgatcgctgaactgttgaaacacaagactcgtctacagcttgatattcaaaagctgcgagacggtgacattgatctggtgaaacaggccaagcagcaatacgaagacaaccagatgtcgagtacccgctag

SEQ ID NO: 304581 - DNA, 894 bp, Proteus mirabilis
atgaaaataattttatttggaaaaaacgggcaagtcggttgggaattacagcgttctctagcaccattaggaactgttattgctttagattctaaatcaacagaatataaagctgattttttatttcctgcagaactagagaaaactattttatctattaaaccagatattatcgtcaatgcagcagcctatacaaatgtagatcatgctgaaactgatcgtattaacgcatttaaagtaaattttgaaagtgttgaagtaattgcaaaaacagctgaaaaaattggggctttattaatacattattcaacagactatgtatttgatggtactaatgatactccttggttagaaacagatgttccagcacctttaaatatttacggaaaaagcaaactagcgggcgaacaagctattattaatagctgtaaaaaatatctaatttttagaactagctgggtatatgcaagtagaggtaataactttgcaaagaccatgctaagattaggaaagaaacatgattcactatcagtgattaatgaccagcatggggcccccacaagtgctgaattattagcagattgtactgctcatgcaataaaaagtgtattagataatgtatcgctttatgggttataccatttaacagcaaaaggaacaacaacatggtttgaatatgcatcattactatttgaatatgcaaaagaatattctttaccattatcagttaaaaacttaactccaatccctgcagaagaatatcctttacccgcagctagaccacataattcacgtttaaatatacaaaagttcgaaaaaaactttaaactagaattacctcactggaaatttggcatatacagaatgttaaatgaaattttagataacaaataa

SEQ ID NO: 304582 - DNA, 879 bp, Proteus mirabilis
atgaaaaaatataaaggtattattcttgctggtggttcaggaactcggctttatccggtaacaatggctgtaagtaaacaattgttgccaatttatgataaaccaatgatttattatcctcttagtaccctgatgctcgcaggaataagagatatattaattattagcacccctcaagatacaccaagatttcaacaactattaggaaatggtagccaatggggtattcatcttcaatataaagtccaacctacccctgacggcttagcacaagcatttattattggtgaagattttattggctcagataattgtgctctaattttaggtgataatattttttatggccatgatttacctaaacaattagaacaagcgatacaaagagaacaaggtgctacagtattcgcctatcatgttaatgatcctgaaagatatggtgttattgaatttgataaaaataagattgctatttcattagaagaaaaaccattacaccctaaaagtaattatgctgttactggtttatacttctatgataacagtgttattgatattgcaaaaaacttaaaaccttcagctcgtggtgagttagaaatcactgatttaaataaagtatatttaaaacaaaataatctctcagttgctatgatgggacgtggatatgcttggctagatacaggaacacataaaagccttattgaagcgagtaatttcattcaaactttagaagaaagacaaggattaaaagtttcttgtccagaagaaattgcttatagaaaaggttttattaataaagagcaagtagaagtacttgctaagcctctatctaaaaatggttatggtaaatatttattaaaaataattcaggacgattaa

SEQ ID NO: 304583 - DNA, 1137 bp, Proteus mirabilis
gtgaccgattttaaccaatactatactagtaaaagcattagtgatctactctcaagatttatcacgctatcggagcctaggacttgcttagagcttagtgcaggagaaggagctctactggttgcactaaaagcgagatggccttcgattctctgtacaactatagatattgatcctacaaatcattcattactaaaaaaaaattttcctcaagacaagcattattgtatagatgctacaagtcaagagtgtagcaatcttctgaatggtcagaagttcgatttagctgtatgcaatccaccatttcagataatcaaaacaactaaaaatattaataactatatttctaatatatttggaaaggaattttcaactaaagaaaaaattcgtgcagagttgttttttttagccattaatatgtttcatataaaaaatgatggtattttagctattattgttcctgagcttattgtaaaaggaattagatatcaaaaaataagaaagtctttgtttcataattttaaacttcaatatttgattgaatgtaaacataagtcgttcagacaaactgaggcaaaagcttttattcttattttaaagaaggaagctgttaatgaagtatataagtattaccatgtgaaaattgattcacaatcaataattgattcggaatactttagtaatatcgataatttatatgaaaataaaaaaaaatcatataataaaaaaattattaatagttttgaaattattagaggaaatttgtctggaaagttgtgtagaagcttaagttgtaattatattcatactacaaatatgaattctgatatgaataagataactttcgatgagtcagaaatttcgaaaaattaccgttttggaatagctggtgatattatcatatctcgagtaggcacacgagttttaggaaaaacaaactatctctttcaggggagtgctgttatttcggattgtgtttttgctattagatttaaaagaaaaaatgatagagaaaaatttattaaatattggtcaaaacaccgtagtgactggataaatgaaaatgctacagggacatgtgcaaaacatattactaagtctagtttagttgatctaattatttctattatttgttga

SEQ ID NO: 304584 - DNA, 1692 bp, Proteus mirabilis
atgtctgatactttaaatctaagcctttttgatgaagctgaatatgaggaacgagcagattatattgaaaaagataatcttattaaatggacggcaacaagtaagcattttgacaatatacaaaaaaaattaattcaagttggagccaagctaattgtggggcctagaggagcaggcaaaacccaccaaatgagatgtgcttattttaaatgcagaaaagattcctctcgcccactacctttatatgtatcattcaatcattacttaagattagaaacatatctacatgataactcgaatgccattgatatttttcattcttgggttttagcaaaaataatagtatcctgttctaaagagtataatatacatataaataacatatcttttgatttggattttttagaaagattcatttctgatgtagaaaaacagaaatataatgagtcatactcagttatcttatctgaattaagtatcactttagtgcaagaactgattgaaagtgcaattgaagaaaatgacagaaaaagggctgttgtttttttagatgatgccgctttaacatttacaaatgactatatgatagaattctttgacatatttagaagtctaaaaactataaaaatatcacctaaagcatctgtatatccaggaacaacacaatatggtcctcgttttcatgttgggcaagacgcggaacgagttgatatttggatgaatgttgaagatcaagattatttacagtttatggatgcaattgttgcaactagatttggtaatagcttagatattgacaaggatattagagagttgcttatgtatgcagcttttggtatacctcgtacatatatcatgtacttaaggtcatatatcgattctgatagaaaaagcctacaatcaaagtttaactctattctttcagagaagtgcaccaatatactaaatgaatatcgctctattgcaaaaaaaatgcctcagtacaatagaattattgaaactggcgatgaaatgatttctgaaattgtaaagacaattaaattatttaatcataaaaaaattgatgaatcccctaataattataaaaaaaatatagttattggaatcgaagatattgatataaaagcagagcgcatgattaaatttcttattgaagcaggtattctttactctgaagaagatatttctcatggtacagatcgaaaaattaagcgatttatccctcatcttgcgttactaataaaagagagggtatttaccaaaagcaaaggatttaatgccagtacattactaaatatattaaaaggcccatcagaaaaacatcctgtcaggaaaaaatttactaaacttctaaatgaaaataaaataaataatatttctttagacttacctccttgcgataactgtaaagccccaagaattgcagaagggcaaagatactgccatatctgtggaatgcaattggttgaaagttccacattcaaaaattgtatgtcaactaaacttattgaattaccattcactgatttccaaaaacgagttataggaaaaacaagataccaaacaattgaagatgttttaacatccgataattctgctgttgaattaagaaaggttaaaggtgtaggtgacaaatacgcagctaaaattattatgaagatcaatgaatggacaaatgagtttctatactaa

SEQ ID NO: 304585 - DNA, 894 bp, Proteus mirabilis
atgactaagaaaataaaaaaaatttttaaatttaatatctctggtgttagagctacatcaagtattaagtcattaactttttttgatgactcttattcagaaccagaaaaatcaccaattgatatattccatgataagaaaactagtaatataaaattactgggggcagggttattttctactgaaacacaacaattttttccactcgcaacatcgttaaatagtgaatggtaccaactagcaaacttagtcatcttagggctagtatcgagcgtggaaacatactttagaagtgttattagaaaattactcatcatagatgagcattctaaacgacatagctattcatcaactgtaacttatggtgcagcactacatcaccaaaaaactcttcttccagaagctttactagagaatgcatcattcacatcatcaactaatatagtaaaaagcctaaatacctttttagatattaatttaggggggtatagcaaaataccttctcttaattcagctttcattgattatgacacagtctgcaatctacgtcattgtgttgtccatcgttctgggcatttagggtctaataatgctctttctctaggattagatgaatattgtaaatttttggagaaaccaatatctgttgattttcatggcattcaagagattgcggtggtatgtgatacattagtgaaagaaattaatgacaagctgtttctagagattatatcgagaacggtaaaaaaatttgattggagcggtgacttaaggaaagataaaaacctatttaaaccatattttgatttattctccccctccttaactaacacacccaacattcttcgctcatgctattatgactttatctcttgccatgatataaaagtatga

SEQ ID NO: 304586 - DNA, 1176 bp, Proteus mirabilis
atggcattaagcgacaccaaactaagaagccttttcaataaaccatactcaggaaaaccagagttaaccgatggtgacggccttagcgctcgcatatcccctaacggaacaatagcatttcaatatagatatcgctggaatggtaaggctgtcaggttgactgtcggccactatccagcaatatccctaaaagaggctagggtcattattggagatatgcgtgaattgtacactaaagggattgaccccaaaatatatttttcaaaaggtgagaccgaggcgtcattaaaagattgtctagattactggtgggataaatatgcgtcacagctaaaaccgaacaccaagacattatataagtcgatcgtgtacaacacgatgtacacacaattttcaaatactcctgttgctgatgtacccatttcatcgtgggttaaatttttcgacaggcaagaaaaggtaaacccaaagaaagctagggtacttttgatgcaactcagatctgttattaactggtgtattagtcgtcagtttatttcatcttgtgaagtgcttaagctaagccctaaaactattggtaagcgtcccgatattggcgatcgagttcttacgtacacagaactcgccaaaatctggcttgctttggaaaactgtaaaattgtcacttccaataaactgcttcatcagatgctaatgctgtatggctctcgtctttctgagatgaggctggcaaacgcctctgaattcaatatggaagatatgatctggacaacgccaagagagcactcaaaaatgggtaatattattaggcgtccaatattcaaacaggtcgagccatatatagtaagattactaaataacggtaatgagattttatttgccggtcaggagatagataaagcgatagataggtcgtcagctaataaattcatgaataagcttagaaaatcaattgatattcctgaatggcgtacacatgactttagacgttctattgtgactaacctatctagtgaaggcgtgatgccccatgtgacagaaaagatgctggggcacgagcttggcggggtaatggctgtttataacaaacatgattggattgatgatcagcgcgaagcttatgagatgtatgcagataaaatattctggcatgttaagaagctggcttctggttaa

SEQ ID NO: 304587 - DNA, 192 bp, Proteus mirabilis
atgactaactcggatttaattgtagaaaaggatgtttacgaatggatcggcgttaagcgaactgcattgtggcgcttaaagaaagagtgtggatttcctaagccagtcctgtctcgaccagcaaaatataaaaaatcagcgatacagcaatggatagataacggtggaattaaccagaagccagcttcttaa

SEQ ID NO: 304588 - DNA, 546 bp, Proteus mirabilis
atgaaagctgattatggaggtagtcatacaccaaaggaactgcgtgatagatggcaaactcccctacctttgtttgcgccattggacgctgaatttggtttttatttagatgccgctgccgataaaaataatgctctctgttctcattacctcaccgaaaaagacaactcgttaaattgcgattgggaaagttatggctctatttgggtgaatccgccctattcagatattcagccatgggtaaataaagccgctgagcaatgtaaaaagcaattacagcctgttgttatgttagttccttctgatacttctgtgggttggtatgaatcagcattagaaacagttgatgaagtaagattaattacgggaggtcgaatatcttttattaatgcagaaacaaaaaagccagttagcggaaataataaaggttctatgtttttaatatggcgaccttatataactcctcgcagaataatcaatactgtaaatagaaattatttattaaatattggaagtaaaatattaaatgaatggaaaatagcatag

SEQ ID NO: 304589 - DNA, 228 bp, Proteus mirabilis
atggataaatcaagacagcaatttgaagaatggcgcagtaagaataaatcatcaacgataaatctattcgatgtatggcaagcatcacgcgactcactcgtattagacctaccagaaagagaaaagaataaaggaaattatgattttttcactgatggatataatagtggaatatcagcatgtgaaatttcattattagataacggagtgaaaataaaaaatgaataa

SEQ ID NO: 304590 - DNA, 174 bp, Proteus mirabilis
atgagtaagcagatggttttagttgcaagaacaaacaaggttggctctgactctgaatgtgggctgggtattactgaggacgaatgggataaattaaccgaagaagagcaatcaggatatatcaatactgcaattgataatcttgttgattggtatgtgaagacagaagattaa

SEQ ID NO: 304591 - DNA, 273 bp, Proteus mirabilis
atgaaaaaactatattgtccagagtgctctgcttatttggagggtggcgatggtgaatgcaaggattgccactgcggatggaagcaaccaatggaagaagaaaatcaatcaacgcttgagcagttacaagaagaaaataagaagttgagacaggcgattattgctatacacagtaattgcgaggaatgcgaataccaaggatatggaacattttacgccgtagagcaagactacgttaatgatgcgtatgaattagtggaaccagcggaataa

SEQ ID NO: 304592 - DNA, 855 bp, Proteus mirabilis
atgattcatgttgtcagtttttctggcggcagaacctcggcttatctcgtgtatttaatggagcagaagcgaataaatgaaggttgggatgttaggtatgtatttatggacaccggagctgaacaccctctgacatatagatttatcagagaaattgttaagttctggaatattccactaattattctgcaagctgaaataaatccaatacttggtgagccaagtggatacaaggtatggaaatctgaagatatccaaacaaatatgccagcaataaaacctttcaaagacatggttgataaatatggaacaccctacatcggcggcgcgttctgcactgacagattgaagttacagctatttaataaatattgcctagaccattttggtaaaaataattatcaaacatggattggaataagagcggatgaaaataggagattgaaagataaaaaaggaattagttatttggctgaaatttctgactttgataaacaggatgttattgattggtggaaaactcagctgtttgacttattaattcctgaacatttagggaactgtgttttttgtattaaaaaaagcaataagaaaattggattagcttgcagtgaagaaagcggtctaaaaaatgttttcactcacgaatgcattgaatcaaatagtgttagggacggacacagaaaaacaccaaaacatataatgtatcgcgggaatctttcgttggatggaatcgctaagatgtatctaaatagcgattacgagagtctttattcagaaatgattgcagcaaaacaattcgacacgaactcgtgttctgaatcatgtgaattatttcagatggatctgttttaa

SEQ ID NO: 304593 - DNA, 540 bp, Proteus mirabilis
atggctagtaaaggcgtaaacaaagtaattctcatcggccacttggggcaagaccctgaaatccgctatatgccatcaggtggcgcagtagcaaatctcacactagccacatcggaatcgtggcgtgataagcagactggtgagatgaaagaaaaaaccgagtggcatcgagtgtgcatcttcggcaaattagccgaaattgcaggtgaatatctgagaaaaggatcacaggtatacatagaaggttctctgcaaaccagaaaatggacagaccaaagcgggcaagaccgatacacaacggaagtagttgtgaatatcggtggaacaatgcagatgctaggcggtaacggtggtaatcaggcaggaagccagaagccacaacaacctcaaggacggggtcagccacagcaaccgcaagcaccaaaacaagcatcgagtaatcaaacaccacaaagtgagccgccgatggattttgatgacgatatccccttcgcccctatcggactaccctacccacgccacgctatttatgtgatttaa

SEQ ID NO: 304594 - DNA, 615 bp, Proteus mirabilis
atgactgctgtatataaagcgattagcaatgtagccaaggaaatggctgaaacaggaataaagaaaggaagtaaaaaccaacagcaagggtttatgttcagaggaattgatgcggtatataacgctcttgcaccggctttggttaagcatggattgcttattcttccacggatcattgaacgctcagtcacggaaagacaaacgcaaagaggaggtcaattattctacgttgtggttaaggctgaatttgattttgttgccacggaagatggtagtaagcacacggtagttacttatggcgaggctatggatagcggagataaagccacaaataaagccatgtcgattgcatataaatatgcggcatttcaagcgttctgtattccaacagaagaaacagcaattgatgcagatgcggaaattcataacgtagcaccacgggcggcagatcagatattggctgattacactaactttcttggtacagctacgaaccaatcacaaatcatggatgagtacaaaaaagcatggaatgcattggctggcactgaatcacaaaaggaatgtgagcgtttaacaggaattcggattaaagaacttaaggaagctgcataa

SEQ ID NO: 304595 - DNA, 153 bp, Proteus mirabilis
gtgacacaacatcaacaatggctagaagaattacgcaggaagcgtaaagaatcgcaggaacgcgaacacgatgaatttatgtatcaaacggaagtgttaggacgacaaggactgtcgataccaacaaaggactttgcaggagattttcaatga

SEQ ID NO: 304596 - DNA, 156 bp, Proteus mirabilis
atgaaaactaactattacatcactatgcgtgattgcatggcggtgcgtatcactacgcctcaagcacgtaaaaataaacgtacaagcccatggttattcagtttagctgtggtcattgtaacaactgttggtgtaataccgacatttgtgagttga

SEQ ID NO: 304597 - DNA, 273 bp, Proteus mirabilis
atgacaatagatgatttccataatggaaagctacccatgccgaagttatttagacctattcgagtcaaatttgattcactggttccaaatggccctaacgatgaatattgggttacaacaatcaggtatgtaagacgagttagacatgctgatggttggcgctggcaattggtcaggacgcatcataagggtttggatagatgggatccatacttagagttagatagggaaggacttaacgacattaatcatgtgtacggactaattaaatag

SEQ ID NO: 304598 - DNA, 153 bp, Proteus mirabilis
atgaaaggaacaacgttaacggagctaatgcggaaacaaaaagttctatctccgcatttgttgctattcaacctatcaagactcagatcgccttttttcaatcatcgctggcaaggtgaaggagtacatcagaaatacctcggtaaagcctag

SEQ ID NO: 304599 - DNA, 657 bp, Proteus mirabilis
atgggtatgctctcatttgatgtaacttgtcctttttgtttacgtgaaaacgcagttcttcaggcttttagcgaacatatgcgcggtaatgacgtgccaatagttgatgttgcttttaagtgcaggagttgccaaaaagttggggttgtggttgtggatattagttactaccaagtaccgcccctcaaatatagccaacaatatcaaagtaatatagttatcccttctgatttaaatgaatatgaaattttagaagtaatccctgagataaagagtgtttcggcaccagaaaacaccccaagtcgagctgctaaattcttcattgaatcaaaagatgactttcaacgtggtagatatgaaacttgtgtaatgaattgcagaaaggtcatggatattgcaaccaaaatactcatgggtgatgaagctaaggatgaaaaattatccaagcgtatcaccatgctattttctaagggaaaaataactgaacagatgaaagattgggctcacatcgtaagaattgattcaaacggtgcgattcactctgacgaagaatttacgaaagaggaagcgaaacagatactaggctttaccgaggtatttctgatgtactccttcaccttgccagcgatgattgaaaaaaggcgatctgagtcttga

SEQ ID NO: 304600 - DNA, 192 bp, Proteus mirabilis
atgccgtcagcccacgaaacgggcatcaatttcaactatccggaaattccggatagttcacatgttcggttattccgaacagctcatttagaagatcgcttaggcggtcttttttcgtatatgccgaccacagaatcaatcacaacacctcacattcacacaagagctgtgagttggcgttctattaactaa

SEQ ID NO: 304601 - DNA, 384 bp, Proteus mirabilis
atgacagataaagatattgagaaagagattcaagctaaaggtaaaactgccgcgcgtatcacgccagaccacattgaaggcgtaattgctagtgaatattactttaccgctgacgatgggtttgctggtgcgttatcggtaagtgatgaattcaataaattaagcgagtcagatcgcgtcattaacccgccatctcaactggatgtattaacgttctgcgttctaatcctgaagaatggtttcactgttactggtgagtcagcttgtgcaagtcctgaaaacttcgatgcagaaattggccgcaaaattgcacgcgaaaatgcagttaacaaaatctggatgcttgaaggttatttgttaaagcaaaagttatctgaagaataa

SEQ ID NO: 304602 - DNA, 2379 bp, Proteus mirabilis
atggcaaaaccgtggaaagaggttatttcatcacctcagtaccaatcactatctagcgaacaaaaagcagaagcacaagagcagtatttcaatgatgtagtagcgcctaaagctggtaaagatgcagaagcagcgagggcgcaattctattcagcttatccgttaagtacaagcaaagaaacgacaagtaattcttcaaatatagatttagccaattcagacattccaaccgatgaagttctcgcataccacgctcagcaacaggcgaataacccacgtagagatccgacctattgggagcaacttgtagaaggaactaaagagggtggtcgtatggttgctcaggctggcgctaacacaataaatattgttcctgagttggcagatgccttgaatagcggtgcgatttgggctgctaatcaagttggcattggtgacggtaaatatgaaacacgagcacctagactacagctccctgatgaggcgcaaccaaagaccgatctaggcaagattggtgctgaagtattgccatatctaattccattagttgggcctgaaaaagcagctagcattatcgccacttcatcaactaaaggggaaaggctagcgactcgatttgctgatatggcacaggagaacgtagttggatcattagctcagaattcaagtaaagatccgcagtctcaaacactaaatgaagacttcggattaggtgttgctggcagtggtgctgctagagttgccatgccattactagggaaagcttatagtgctgtaactggtaaatttggcaataatactgctgagacggcaagcaaaacaactgcaaacggagctaattcagagcaggttgccaccgaagaagcattgcgtaagttagcagtacaaaagaatccggatttagctagttcgcttgatagtcttaatgtaaacgtatcaccagaagttaaagcatcatcggatagactaggtttaactgatgacttgttaccttctcatttatcaggaaatcagcaatatcaagctgttgagcaagccattaagtctcgcgccggttctgcattaaaagttcaagaagataacgccattttgaggttatcagaacaagctggaaaattaattgatgacgttgccaatgttcctgatgctttatcactaaaccaacgtgtaattaatcagtttgataaccgaatgaatgccttagaaagaaggagcgatcagctttataaagttgtagataatgcattacccccccaaacgagagtaagtgcaaataatacagctcaaacccttgagaaaaaggcggacgagttaggaggatgggaaaacttagataccgttgaaaagaatgtgtttaaggctgtaaatccaactaacgatggggtactgacgtatgcaaacctcaataaacaacgtagattggttggccaggctctctataaaaaccgtgggccatataaagatgctgatgagagcgcattaaaatatttatatcgccaattatctgaggatcagcgttcggcattaggtaatgttggggttcgtggtgattttgaagtagctcaacgtttggttcaaatgcgtaaaaatatggaagatcagatgttagggctgcgaggtaagaacctaactggagatattgcaaatcgaggttcacttgccgtctcatctctcgcaaagggaaactcaaagcagtttattgaattaatggaaaatcttccaactagacaaatgaggcaggaagtagctgcggcatctattcgagatatgctatcaacaggcaagcgaggagcagattttaaccctgcaggctttgctgattggtatcagaatttgagttcatcaggaaacctaagagttctatctagacatatgcctagagagttcatgagtgggttgcacgatatttacgtggttgcaaacgccattcgtaaagctaaatcatttgagataacaacgggtcgcttagctgagtttaccaagcgttttgatgccgttaccgctaaaagcgaattagccgcaaaatatgcaagacaatttggaacaatggcaggcactaaatttggcccatttggcgcagttgcaggtggagcgctgggagagaaaattgcaaatagggcaagaaagttagggggtgcgggttcttctgcggcggcagataaactcatatcctcaccagagtttcaggaagtaattaagaattcaactcaaaaaactagtgtcaaaagcaacccacctagcggcttaattgatgaaacaaaaataaggagttctcctgcatggaaagagttttacaactcgcttccagacagtgaaaaaaggttgatggcaaggatgggtattctttggtgggcaaatcaggatgaagaagggcagtag

SEQ ID NO: 304603 - DNA, 255 bp, Proteus mirabilis
atgtcagagagaaaatataaacatcctcaagtaaatttgaggttgccagtagagcttaaagatagaattgcagagttggcagaagctaacggacgatcttcaaaccaagaaatgaccgcagcaatagaggcttgggttcaaaggaatgaacacattcatgtgttaactatctctgatttagcggataaaattaagacccttgagtacgaaatatgtagaataaaagaagtaataaatattaatgataaaaaataa

SEQ ID NO: 304604 - DNA, 150 bp, Proteus mirabilis
atgaaaaagtcaaagccatcaactgttagattcccagaagagattcgagagttactagaatttttagcgaaaaaaaatgatagaactttcagcaaagagatagttagccgaattcgtagaaccttagaagaggacggattagcttgctag

SEQ ID NO: 304605 - DNA, 723 bp, Proteus mirabilis
atgccattatcacattcatttgaagacttaactcaaacatttcgagtattagttgaagccaactttaagtttcatcaactaatatctattgatagagccgaagctgttggtaatatcgaaacatcattgaatgccatgttaaattcatttcataatttatatgacttaatgcaacaagaattacactcaccaattgattggtatgcaactcctgaactttgcattattttatgtattcgaaatgctcgccatcataataaagcaaatcgcattagaagcatttataattatcatgtgcagaatactgactccccccaaactcctcatacatatctatatgctaattttttagctaatcctgaagaaaaaggaggaggtttttttgatgttcctatttcatggggagatattttagacctattatcattacctagaagagaatcccgtcttcgagaatcaactgaagaaattattaggaattacataaatgctaatttaattgaagcttcagctgcagaagaaaatattgatataagagatatatttatcaattttgttcctttagcaatgaatgcaggcataaaattatttccttttattaaggaccatgtgacaacaaactcaattgaggcccaatctttttatagtctttttgaaactgttaaaccatcaataacttgtgagccatgttgtcagccattgctatttaaactccctaattaa

SEQ ID NO: 304606 - DNA, 588 bp, Proteus mirabilis
atgactttagtagataagctgtctatttttggaaatttagcgtcagtagctgcaatagctgttgcttttgcggtattttcgattcaacgccaagatgagtttactagagctgaaaatgataggaaaaatgagctattagctttaaaaaaaataatagtacttaattgcgaatcaattaagaatgcattacttgaaaatcaaaaaattcttgatgtaattatttcgaagaagtatacaggaacatctattcaaaaagctggagagtatttttatattgtatttaaagatgggtttgataaagaaaaaaatgagtatttttggagcacaaaccaaagattttattttgcaaacaaatttctagatagagagctgttgactttagcaaaacataatcaaaatataataacttcatttatggatgtcaccaagtctattgatgagactaataatgcgctattatctcttattaatgattttgttaatcataactattcaatgattaaaattagaacaaacactgtggataattactcaaaagccttaaatctgaaaatcgataacttgatgcatgaattatcattaatttag

SEQ ID NO: 304607 - DNA, 198 bp, Proteus mirabilis
atgaaattattaacaccttggaaaccagggaaccaattattaacaagttttgatattaaattaggtcggttagcgttcagtgtaagaaatagaccatgcactgatgctgaaatcaaacactcctgtgatacagcagaccgacttattttattgatgatgaggcaagaccaaaatgagcggaaaactgatgaaagctag

SEQ ID NO: 304608 - DNA, 660 bp, Proteus mirabilis
atgacaaagaaaatgcaacaacaatttaatgaattaaaagaacttgctgataaagtcagtggcactaaatataacaaggtctcagaatttacaggaagtatgtcttatgtcgatgcgaaatatttacttcaatggataacaaaaactgataatttaattgctaatgtttgcggtaaagactcatcttattttgactcatttacaaaagcaaaaaaaccacaaggcttagagacaaacctagatatttttaacagacttgaagctattttcattgcgataaaagaagattatgagaaaggttatattacatcatataaggcattaattcaggcagaattatttgaaaatgaattagaacaagctaaagagctactctcctctgggtatataaccgcatcagcagttatagctggaacagtattagaaacaagcctcagagaactttgcaaaaacaaatctattcctaatggtaaattagataaaatgaatgctgacttagctaaacagggtgtatataacttaattcagcaaaaagctatcacggctatagctggaattagaaatagtgctgctcatggaaaagttaatgattttgacaaagatgatgtgaaaaatatgattagtagtattgaatcttttctaataaaacatttaaactaa

SEQ ID NO: 304609 - DNA, 291 bp, Proteus mirabilis
atgtatttaattacttggcttaaaaagaacgggtttgaagttgaagaggaaattattcagaaatcggatgtaaatcaaattgatattatcaatgaaagctatttgggtaattctaaattttgtctttatgaaaaagacaatgactgtgagcctatttttattctgtatttacaatcgttagtaacgaaagtgtggactgttggaaaggtctataatgaccctgaatataacaatggtgacaatctaagcgaaaaagaaattaaaaaaattttaaaaaaatatatacaataa

SEQ ID NO: 304610 - DNA, 159 bp, Proteus mirabilis; identical to SEQ ID NO: 298616

SEQ ID NO: 304611 - DNA, 162 bp, Proteus mirabilis
atgaagaaattaattatttttatactatcaagtttattcgctttttatgctagcgcttatacttgggataataaaatcaaagataccagcactgttaatcagtattgtcaacataatagcaatacccaaccaatctactcgctgtgtttggcccccttgtga

SEQ ID NO: 304612 - DNA, 648 bp, Proteus mirabilis
atgaaagaaatgagcgaacgaattaaacaaagacgccttgagctgaaaatgacacaacaggctctagctaaaaaagctggagtcaatcgtgtaactgttactggttgggaaaaaggtgactatcaacccaatggcgctaatcttcaagcattagcgagtgctcttgaaacaagccctatttggcttgttgatggaaaagaagatcctatttctaatgtttcgtttttaaaatttaatagatctagtggtgaataccctttaattagctgggtaagcgctgggaattggtctgaggccgtagagccatatcatagaaaatcaatcgatacatggtatgaaacaactgtgcattgttccgaagaatcattttggctagaagtaaaaggagattctatgacctctccttctggactaagtattcctgaagggatgattatattagtagatcccgcagtagaggttgttagtggcaagctagttgtcgctaaattagaatctgaaaatgaagttacatttaagcagtacattgtagatgcaggcaaccattacttaaaaccattaaaccctcaataccgcttaataccaatcaatggaaattgtaaaattgtgggtgttgttgtggatgccaaaatagctcatttaccataa

SEQ ID NO: 304613 - DNA, 195 bp, Proteus mirabilis
atgaagaaaaaagatgtaatcacgttttttggtggtacgtgtaaaacagcaaaagccctcggtattaaacatccttcggtgtgtggttggggatatatcattcctaaagtaagggcatatgaaatagaaaaaatcaccaagggaaaacttaaatataaccctgaactttatagaaaaaataccaaaacagcataa

SEQ ID NO: 304614 - DNA, 1896 bp, Proteus mirabilis
atgattactgagttaattcgagaaataaacaatgtattgaaggtgttcccaaaattctgggagggtgaagaattgcaccgttctatggtgattgatgcaatcaaccgaaaacaaccggatgttattaaagcgctagttgctaatgaaaaaatcaaatccgtttacggcacggatattgacggtatctttatttttgattttgaaaaattatgtagtctgcttaaatacaaagaatattgggcaaacagttttactaaatatcgcaataaagtgggattaaccagtgaaggaaaataccttgattacagctcagatgtggtgctggattttccgtttaaagattgtgtgcttgaaggcggcatgaccaaagaagatcaaggtaaagaggaaatctattataatgaaatcatcgcgcgtgacgaaatagatcgcctgttttcaccaaaggtattcactaatgctaaacgctatacaaaagatggggtaaaaaagaatataacttcctttgaccagaatgataatttaattatcaaagggaataacctgattgccctacactcattaaaagaacgttacgcaggacaaataaaacttatctatatagatcctccttataatactggtggggatagcttcaagtataatgataagtttattcattctacttggctttcttttatgaaaaataggctgactgttgctaaagagttattaagtgaaagtggatgtattttcataagctgcgatgatcatgagtctcattacttaaaagtgttgttggatgaaattttctgtattaataattttgtttgtaatgttatatggcaaaaaaaatacaccatatctaacgatgcaaaatatttttctgacaaccatgaccacatattgatctattcaaaaaataaagaaaagtggtctcttaataaattagcccgaacagaagaaatgaatcaacgttatgctaatccagataaccatcctaaaggtaaatggaaagcaaccccattgcatgccaaaagcgggaataataacaatttcagtcatacatttaaaaatggagtagtatggactccaccgcaaggaactttccctaggttttctaacgatacactaaaaaaactagatgaaaataatgagatatggtttggcgtaaatggaacgtctatgccatctagaaaaaccttcctatcagaattatctaacaatggaataccccctgcaaccatctggatgcactctgatgtaggcaataatcatgatgcaaaaaatgaattaaaattattgaataataaaaatattttttcgacaccaaaaccagaaaagttaattcaacggataatacacataggctctaatgaaggagatcttgtattggatttccatctaggtagcggaacaacagccgctgtcgcccataaaatgggacgccggtatatcggcatcgaacaaatggattacatcaatgatatcaccgtgcctcgcctgcaaaaagtccttgagggtgagcaaggtggcatctccaaaaacgtgagctggcaggggggcggcagttttgtctacgctgaactgatggagctgaattcctattttgtgaatgaaatccagaaagcacagtccacgggagaactcaaagaactctttgatgagatgaaaacggaagctcatctcaattatcaggtggcactggaaaacgtcttatctgctgaatacgaaatagacggtatttcgcgtaaagttgcattcagtgagctggagctgtatgagcagaagcagctcctaatagagatccttgataaaaatcagctctacgtgaacgcctctgagatggaagataacgacctgaaaatctcagagagcgataaaacctttactggtagcttttacgggctggagtga

SEQ ID NO: 304615 - DNA, 750 bp, Proteus mirabilis
atggcacaattaaaactatataaattagctgtcaataaaagactatatggtattactgaacaagttaatgatggcgaacgcattcatttaattggcgcgaatggggcgggtaaaagtacgttgttaatggccattgctggtgaagtttcatacgttggaaatatatttttaaacgaaacttcaatgagagattataaaattgccgaactttctagaatacaaagcgttgttagacaacaatcgttagctttgccatttatgccagtgtttcattatctttctttatcctatcagttatcaaaaatggatattcaagaattgaatgcactattaagcgattttcaaatcaataaattattgtcaaaaaatattcatcatttatctggtggggaatggcaacgcgttcggattgttgccacttttatacaattatggtcaagcgatgatttaacaggaaaattaatgatgcttgatgagccgacaaataatttagatattgtacaacttactttattggataaatggctagataaattttgtctacaaggtggcagtattattatgagtactcatgatttgaatcattcttatctaaaagcagataagttatggtttatgttagagggaaaaataatcaactcaggtgactcagcacttttgttggatgaaaatttattatctactacatttaatactaagattagatgtaatagatcagcaaatagtgtaatttggcaagtaatagagtga

SEQ ID NO: 304616 - DNA, 1743 bp, Proteus mirabilis
ttgaaaaacaacgaattagaatggcaggcgttacgcccagattacgcctcctaccagactttctttcaaacagcatcgcaattgcctgcatcttcacttcgtgaggttcaacctcgcttatatgaaagcttacagtggctaaataatgcagaagcaggccaatttatgctgttaaaagcagaagattctactgcttatttcgaaacactcgctgatacattacaacaagcagagataaaaacttatcctgttgtaggtgcctatcaagctgaatctaatcaaatttattggcaagaaaatgtagaaggctcattttcatcatcagaatctattgcttgttgccaatggatagagccagaacaactttttggttcattttattatcataaagataagctcctcgttaacccaggactgttgcataaagtcaatggtggtattttagtcttatccattaaaacgctcttagcacaacctttaatgtggttccgactgaaaaagatggttgaagagcaacgctttgaatggttagtgtggaatgaccatcaagcacttcctttgcctattgaagccatgccccttcacttgcgtgttattttagtgggcgatcgcctaagcttagaagagcttgagtttatggagcctaatatcagcagtacggcactatatggcgaatatgaatacgatatgtatttagaagatgaaaccgccctgagccaatggtgtggttttgttaatggactttgccaaaaatatcgtcttccttcattatctgctgatgcttggcaagtattactgactcagggcgcaagagagcatgaagatcagcttatcttatctctcgatcttgaattcatattacgccaattgcgttatgccatgcgttttaatcatgacgcttatcttgatgctgaggcgcttaaaaaagcgcaagaaaatcgtttatggcgacatagctacttattagaacgaagccgtgatgaaatattacaaggccaagtcactattcacactgaaggtgaaatggtaggccaaataaacggtctttctgtcttagattatcccggttatcccgatctaattggcgagccaactcgtattacctgtgtggctcatattggtgatggcgaactggtcgatattgaacgaaaagcagaattaggtggcaatatccatgcaaaaggcatgatgattatgcaagcctacttaaattctgaattacgattagatcagccacaaccttttagtgcttccgtcgtttttgaacaatcttacggtgaagtagatggtgatagtgcctcactagcagaattatgtgcgctaattagtacattgtcacaacacccaattgatcaacaaatcgccgtaaccggtgccgtagatcaatttggtcaggtacaacctattggtggtgttaatcaaaaaattgaaggcttttttgatatctgtcagcaaagaggattaacaggctcacaaggggttattataccgctggcgaacgtgcgacatctggttttaaacgagagcgtgatacaagccgtcaaagaaaataaattccatatttggccagttgtccatgttgcagaagcaattactttgctaacacatcagccttattacgaagaacaatgtgaaaatccacaatcaaatgaacacttgttagctattattcatgatcgaataacacaagcgaataatcaggataggcctaagttaccttggttcctacgcttattcagataa

SEQ ID NO: 304617 - DNA, 1425 bp, Proteus mirabilis
atgaatattcagtacataaaggttggtagtgtacccgaaattattagactgttaccaaactctagcgagcaagctgattcctactcttatccttttaccctatcggcaaactgtgcatggggaaaacaggaagcagaaatatcaatagagaatttacgccaaaatatcgagccttggctaaccgcactcttccaatccgaacatttaaacttattgatcggtgcaggtttaagcacatctattcaaatgtctgctacaggtttacctccagcaggaatgggctggataagcgacctagcagtatgtcaaagtgaaatagatacatttgctacccaagccgcccaagctgctggccgcgataagggaaatatagaagatcaaattagagctattaatgaacttattaaagggcttgaaattctgacagtgctgaatacccctcaacctgaaaaccctccagctcctcatgttgcttatagaaatctaaaagctgatttgaaagcacttaggggagagctttctcgatgcctaggtgagttttcaagatctgtaagtactggagaatacttgattaaaaatgctgaccctaagcgaaaagaggaaacattcaattatctggtgagcttcttgatgagctttgcaagtagaactgccactcgcgataggttacatattttcacaacaaactacgaccgtattatcgaagtaggtgcggagcttgctggcttgagacttatagatcgctttgtaggaagtatcgctccagtgtttcgttcttcaagattagaagttgattatcactataatcctcctggaatccgtggcgaaccaagatatttagaaggagttgcgcgttttactaagcttcatggttcccttgattggcatgaacaaaatagtgcaattcggcgctttggtttaccttttggggcacgctctgttgatccgtttttagaagccgaaggtcatgaaagcaatagctatgaacagctcatgatttatcctaattcagtaaaagatagagaaactgccgagtacccttatgttgagctatttcgagattttgcagcagcaactagccgtccaaatagcacattagtcacctatggctatagctttggtgatgagcatatcaatagggtaattgaagacatgcttacagttccttcgactcatatagtcataatagccttcggagatccacttggaagaattatgaatttcattactaagagtggaagaaaagctcagatcactctgttaatgggagatcatttaggagatcttaaaactttagttgataactatctacctaaacctgctattgataaagcatcaataaagatggctgaattgctcaagcaaaggggattcatgcagccaaaagaattaggtaattcaactgactccgaggtatcactatga

SEQ ID NO: 304618 - DNA, 2034 bp, Proteus mirabilis
atgagctacttaccaattgaaaggttagagcaattaagaattggaactgttggttttgtatcgcctagtgaaatcagagtttctttagagattgactctccagattccgtatcgcttcaaggtggctcacctcgtaattttcctcgaataaatagttatgtacttataagtagtgatgatggatttcttgttgggcaggttgagtggattgccgtagaacattcaccataccctaaaagaaggggattgcaagattttggcttgatagaccttccttttccacttaaaaagctcagcatcaatcctgttggcacgttaagagttgatagaaaaaacgaaggtttcaagttcacaagaggaacagatgcttttccctcggtaggtgactcagtgctcctgcccactgacgagcaattaaaatcaataatcgagtcaggtgacaatagaagagtaaaaataggggatagccccctagctaacaatgcagaaataaaagtggaccctgataggctttttggacgacatatagctgtcttgggtaatacaggtagtggtaaatcatgctcagtggcggggttaattcaatggtctttagatgcagttttgcaacaggaacaaactcctaatgctcggttcataatacttgatccaaatggagaatacagtagagcattcggaccaaaatcaaaatacaagggtaagctattacgtgtagaagctaacacggatgctgaagaaattgaacttaaagtgccgtcatggttatggaatagttctgaatgggctgcttttactcaagcaagttcaaaagttcaacttcccttattgcgccgagctctgagggctatgagaaatgctgttttgtcagaagataatgtgacaattcaagcgaaacacttttgcggtatccttctcgtgtcaatgagacaattagcaagccaaggccagatatatgtaaatggcggtcatgcgaaaggtttcgttgaaagtttaacctcatgggctaatagtctctccacgttgaatgaaaaaatcgataaaaaaccttttgataacctaataaacacgattaatgtgtatctctccactcgaacaggtgtacagtggccgtcaaaacctgaagtttccgacactgatcagttgattagcgaattaaaaaatgcgcatgctacgcttggtggggacgagcaagaacttcttccgaaaagtgaagatgcgcctattcgttttaaaggtgacgattttgtagcgtatctcgaagccttagcccaagaaacaggtacagagcagttcgtggagtttcttctgactcgtattcggacaatgttaggtgacacccgaataagtgtagtaacaaatgattctgaagagcctatcagtttaactaattggttaaacacttttctagggatagatgggcaaagttctataaccgtaatcgatttatcactggtaccaaatgaaataatacatttggtaactgctgtaatttccagggttacttttgaagcactacaacgttatcgaaggctaaatggaaaaccactgccaacagttatggttgcagaggaagctcatacatttattaaacgctacaaagaggatagtgagggtcagtcagtctccgacatatgctgcaaagtatttgaaaaaatagttcgagaaggacgaaaatttggattaggtcttgtggtttcgtcccaacggccgtcagagttatctccaacagtgttgtctcaatgtaatacttttttgttgcaccggattagtaatgatagagaccaagagcaagtccataggcttgttcccgataatatgaggggattattgagggagttgccatctctaccatctcggcatgctattttactaggatgggcttctgaacttccggttttagttagaatgagagagcttactgaaacacaaagacctcaatctgacgatcctgatttttgggacgtatggtctaatactggtgaaaatcctcgcaaagttgattggcaactgatagctgatgattggcaacgttaa

SEQ ID NO: 304619 - DNA, 1122 bp, Proteus mirabilis
atggaactagatttagtcagcgttatcaaactagctctcgagggtaaggataaagacttaaggctttacttagccaaacatattcgctcactcagaaagagtaaccctttactagctaaacaaattgaagagttactaaaaactcagccagttaggtctcatcaaataatgagaaaagagacccactcattcgatcttccgataaatgaaactgatgataaacccgccattcctttgaatctccttaaagaacaggtagacatcaacaatcgcgacgaaccccttttacaagaatcggtaaaaaagcaactagaacaagttcttctcgaaagaaaaaaaattgacttacttactagaaatggtttaacgcccacaaaatcacttatttttagtggtcctccgggagttggaaaaacaatgactgcgcaatggttatcatcaagactaaatattcctttatatacacttgatttaacaacagtaatgagtagttttttgggtaaaacaggaaacaaccttaggaatgtaattgattatgctaaatctcacccatcgatacttttacttgatgaaatagacgctattgcaaaaaaacgtacagatgaatctgatgttggcgaactaaaaagacttgtaaccattatgcttcaagaactcgaagactggcctgctacagggttactcgtcgcagctacaaattatccagagctaatagatcctgccttatggcgtcgttttgactgtgaaattacgttttcattacccaataataagcaagttagtgaagctatccgtttatattccggtaaagattttaaagtattagagccatggttagagttattaaaagaaaatttttacgggcaatcctacagtaatataaagcgtgagatacttcatttacgtagactatatttacttcaaccggatgattttgattccaactttatttctcagattaattttgatttaaatgcaaaaactaaaactgaaaaaattaatttcgcggtaaaactagtaagtcaatttggatttacgcagcaaaaagcatcaaaagttaccaatgtaagtagagatactattcgcaagagactcatgggtaaggagaatcaaagtgagtga

SEQ ID NO: 304620 - DNA, 2202 bp, Proteus mirabilis
gtgagtgagaaaaaaaattatattatcggtaaagcagaagagttaacatcattaaaaccaccaccaaggataaatcctagtgtagaccctatttatacatttgaggaggtcattgctcggctgaaaccacaattcgaaaaaacagctaaagagttaagtacactaggtactgatatatgcccgaaagactttgcagtgagcgcaattacgttacatccctcatacattgcaaaaggacatttcccaagggcattatttaaagagatgggagttcgttcggttggtagcaaaagtacaaatgtattaccagatcggtggactagagtcggaaaaccaaaagaatcccctacaactcaaatatttgttgcaggaaaacgggagcgactagctgaatttaccaaaagtatatctttatcttcagaagatagccctggcgcatcagatctttttcgtatttggagtatagcaacagttgatgaacgcgaaaagataaaagcgaatcctgctgcctatgatggatattgggaagttggcctacaactaattcctggtgggaactcagagtttataaaaaatgcgttcatcaattatgcaatagaattgggctttcaacctaaagaaaacctagctattgaagtttccaatctttggtttgttcctatggctggagatgataataaattgataactcttgcagccttttcatttgtaagagttatccgtccattaccttcaatgcgatcttttagacctttaactagaggtatgagtataggagctgatgtaaatctaccaaacgtacatccctacgcttctgatattcgagtagccattcttgatggtggacttcctgatagacatgtattagagccatgggtatcaaactataatctttctgatccatcagcaaatgatttgcctgatggaccatcacacggtttaggtgtaacttcagcttttctttttggtcctctttggcctgatgaagaagcacccagaccattttcatatgtcgatcactatagggttttagacgaaaaaactgcagaagaagacccatatgaactttatagaacactttcacacctagaagacatattattatctagacaatatgaattcatgaatctaagtttagggcctgatctacctattgatgatgatgaaattcatccatggacctcattaattgatacttatttatctgatggtgaaacgtttctgacaatcgcagcaggaaataatggtaacagtaacaattcattaggcttagatcgggttcaggttccgtctgactgtgtaaatgctctttccgtaggagccattgatcaagttgattcaggatggaaacgagcatcttatagcgcagttggtcctggtcgatctcctggtttagtaaaacctgatctagttacttttggtgggacaccaaaacaatatttccatataccaagctctattgattttggaaagttaacacctatttgtggaacaagtttttcagcaccttatctcctacgatatgctgttggtatacgtgcaattttagggtatgaaatatcgacactagcaattaaagctctactgattaattcagcagatcaatcaacgcatgaaaaaacagaagttggttgggggaaaatacccaattcaattagtcaaattgtcgagtctccagatggtaccgctaaaattctatatcaaggcgaactctaccctggcaaatatcttagggttccattaccaataccgaaaaatggaataactggaaaggtaaaaattaaggcaacctgctgtttttctagtccagttgatcctcaagacacatctatgtatacaaaagcaggtatagaaattacatggcgaccaacacctgataaaacagatacattttttaaacagaaaacagttgcgactgaagctgaattacgttcggatgctggaaaatgggagtctgttttgcatgaagaaaaaggaaagttaggaagtagtctcaatgatccgtgttttgaaatccattacatggcaagagatggaggtgatcagatatctggttctaaagcagcaattattaaatatgcttttatagtatctctcgaagcacctaaaacaccagatatttttaatgatatccttaaatccaatacaaaattaatcgaaatacagccacgactgcctattcccattcctatttcaatctaa

SEQ ID NO: 304621 - DNA, 1263 bp, Proteus mirabilis
atggataagaaaattaaaggatcgtggttgatacatcatactaataaattacaaggtgttaccaaccaatttggttatgataatacatatttggcagggaaagcaggaatattattatctgcaatttctgcaaataaagatacaaccttagataacaataagttatccgtgttagctacggctgcaaacatcaatttatcatttgaacttcccaaacttattgatgtattaaagaaacaacaacttatagatacagctactggtggtattgctgtattaggtgtaacaactacatctgcacttcaacacacatctgacctttttgatagcttaaaaccaaaagcaagcgaaatagcatctatttcgcttgcagaaagagcttcaatgtcacctatttttataaaggatgttgctacggaattagcagatacatataaactagcatcggaggaattaaaccaactatttacaaatgccgaacaaattggttttgttgattctgaaaagctagataataacaacaccttgctattcaatggtaatctatttcgccgagattcaacaaaaaaaataaaggctgtccttgactcacttaaaccagatgagcaaataaaattaaatgaactccaagatacattaaaaaagcaagcatgtctcaatgttgagcaagctgagaattttcttggcactcaattatttcaaaaagttactgctatcggtttgtttgatataagtgttgtcagtaattcaactgaaaatataggatttattacgctaccttctgcattttctaaatatagtaactctatggttgatgatgcatttgatcttgctaaagcatttgttagctcaataacatatggtatgactaaaagttcttatacccgtggaaaaattcaaatggttgatgctttattaagtgctttagtacgaggtgaaagtgttggccccgttcaagcaatttcagaggactataagcttcttgaattaaaaggtgtagttaaagttagtcaaggatcaaaaaaaggacgtacaggccctatgcttgagctccttaaaattgaggttggagagttagcccttcaagtaataaggcaaggtgatgtaagtgaacattcattaaaaaactttcccaccgcagcagtaacatctttcaatgggcctgaacaaaatagagaattaacccgaagaactcaaagaagattaagccctaaagcgaccaatgatatgctatctgtccttcggactggaggtggcttatga

SEQ ID NO: 304622 - DNA, 1044 bp, Proteus mirabilis
atgagtaaatataaacacacattaccaaaaggattcatgatggaagaactacttcgtagttatttcattaaagctgggtactacgttattcgcggtgtaccattcagctatgaagggtttgatgttacagacatcgatttatggctgtatagcaggacgtcctctgtttctcgagaaattactttagttgatgcaaaaaataaaaaaacacctcaagcaattgaacgaattttttgggttcagggattacgtattgcaacaaaagctacaaatgcaattgtagcaacaacagatagacgtcaagaagtaaaagattttggtaggaaacttgatgtgctagttcttgatggtaattttttaacaaaacttgctaattcagatagtccaaatattaatagactttcagatgaagaattttttacaaaaatagatgattattcgttaagtaaattagatggaaactggcgagggcgaattttatcttcaaagggcctattagcaaaaccactatcttttgatagctgtaatgaatggatttcccacggaaaattttttgcagaacaatctataactcaagaaatacaacacgaaacagcgctgcgatgcctttacttgatctgctctttcatctctatttcaatagattattgtatgaaagaattatctttcctagatcaacctgaacgtaatattttgatcaaagatggatttacttatggttctagaggaagttctggtatgaaaaaaatactagatatttcaatgcgacttgtagaagaacatgccaacgatggcttagccatatcccagcaagtaagactcaatgttgaaaatcaattatctcaattgaatacaactatactaggtgatttcttttcgaaaaatgatgtagctatgacattattttctgtggctaaagagtttgagcacttagcaatgtctcgtgatttcctatcacataaaacagctagttctaatcttcgaagtattctcttttgccttcttgactactgggaaattgatagagttatgttctcaaaataa

SEQ ID NO: 304623 - DNA, 786 bp, Proteus mirabilis
atgatacctaaaaaaatacactatgtttggattggtgataagcctaaacctaaatttgttctagagtgcattgatacttggaagaaatatcttcctgactatcagctcatagaatggaataacgaaagtataaaaaagattaaaaacaattatatggaagaagcgataaaaaataaaaaatgggcttttgcttctgattacataagactttatgcgctttatcatgaaggtgggctatacttggatacagatgttgaggttacccaaaatttagatcaattcttagttttagacttttttagctgttatgaaaaaggagatagcttttatcctataacatcagccgttatgggctccatgcaacaatctgatttaattaaggaattactagataaatataatattcacttcgaaactgcagaaggtttaaacctagaaaccaatataatcaagataacaaattatttccaagaaaaattcgatttaaatccaccttatgatggttcccaaaagacaacattaatggaaaatgttgtaatctttccatccaattatttttgtactcctgagttaggagctgaaaattttgcaatacaccactttaatggttcttggttaccgtcttactcaagaaaagataaaataaatattttaaataaatttattttttcaagattcattaaagtaagagacgatgaggatttaccaatagccaagaatgaaaaaatactattatcaataccactatcaaacaataaaaaatatttattaatcttaaaaaaataa

SEQ ID NO: 304624 - DNA, 246 bp, Proteus mirabilis; identical to SEQ ID NO: 196088

SEQ ID NO: 304625 - DNA, 300 bp, Proteus mirabilis; identical to SEQ ID NO: 196089

SEQ ID NO: 304626 - DNA, 1626 bp, Proteus mirabilis; identical to SEQ ID NO: 196090

SEQ ID NO: 304627 - DNA, 303 bp, Proteus mirabilis; identical to SEQ ID NO: 196091

SEQ ID NO: 304628 - DNA, 345 bp, Proteus mirabilis; identical to SEQ ID NO: 196092

SEQ ID NO: 304629 - DNA, 393 bp, Proteus mirabilis
atgccccagtgggggcatggtgcccgtaaaggagccgccatgaacgcagtgaagatgattcagaagggaaaccagctagagctgccacttttcttcttggatgaagagccgaaaaccgcagaagtaattccatttgagccaaagcccgcatggaatgatgatgaggtaaggttgttacgtgatgggcttttatggcatagccttagagtccttgctgatggacgagctgggagtgaaatcaagcaggaaactatgacttgggtgatgtccgatgaggtgcatccattctcatttgtggtctgctgcgatgaagccggttacgatccatctggagtcagggaaggcgtaaagtctatcctaaaacgcttagcgcggattaaagcggggggttaa

SEQ ID NO: 304630 - DNA, 192 bp, Proteus mirabilis; identical to SEQ ID NO: 148290

SEQ ID NO: 304631 - DNA, 276 bp, Proteus mirabilis
atggccgctgtagcgcatatagcagcagataaccttgtaccggcatgtggaggggcagagaagccgtttaccgtcaatgacaggcaatggctttactgttatcacccggctagtggaaagcactgctacttagacctcgataacgaccgcccagtttggcatcgaggattccatcctgcttttcatcctgagcttgagttcgttgatgaagctgaattgtttcggccagtcgagcaaaagcctgaccatgaagatctggaggatttttatttttaa

SEQ ID NO: 304632 - DNA, 453 bp, Proteus mirabilis; identical to SEQ ID NO: 196095

SEQ ID NO: 304633 - DNA, 390 bp, Proteus mirabilis; identical to SEQ ID NO: 196096

SEQ ID NO: 304634 - DNA, 225 bp, Proteus mirabilis; identical to SEQ ID NO: 196097

SEQ ID NO: 304635 - DNA, 885 bp, Proteus mirabilis
atgttcaaatcatcagtatgctcctacgaaaatagggggccttacggaaacaacaagtaccgaggcaattgctctggtttcatcataaaagactttattgagtcctatatgaggaggccgaatgggctggtggcagaccccagtgttgggggcggctcaagcatcgacgttgccaatgaacttggaatccgtttcaaagggacagacttgcatcagggtttcaatctgttgcgggatgacttcctttcgttcctcggagagcctgcacaccttatctggtggcaccctccttactgggacatgatccagtattcaggtaaacagtggggcgaacccaacaaatgggacatgagccgcatgagtttgcctgagttcgttgaagcccttgagttggctgttatgaacattcatgacgcttgtgagcaagggggacattacggaatcctcatggggaacctgaggcgcgatggggattacttcaacctgtccagccttgtggaacgtatcgcacctggaaagctggtggatgaaatcatcaaaacacagcacaactgtgtgagtgatcgaactcagtattccgggaagctagtgcgcatcgcccatgagaagctgttggtgtttcgtcgtaacgacgttgcctcatcgctctgtcttcttgctgccgtacaccgccgatcaaccaacatggtttcgactacgtggaaagctgcaatacgccgaaccctacaggggaaaacgttgaagctggagcagatttacaaagagattgaaccctacgcaaagcatcgagagaacaaccactggcaagcaaaggtcaggcaagttcttcaagatgccaggttctttagtcgcatcgaggtaggtgcctatgcacttgctgagtag

SEQ ID NO: 304636 - DNA, 501 bp, Proteus mirabilis; identical to SEQ ID NO: 198603

SEQ ID NO: 304637 - DNA, 540 bp, Proteus mirabilis; identical to SEQ ID NO: 102627

SEQ ID NO: 304638 - DNA, 333 bp, Proteus mirabilis
atgaaccaattccatcggttggatttgtatcatcagaacaagggtagaagagcatctgagcctgatacacctttcttactgcttgccaaacgcatccctccaatgtactggagactgttccagggtgtcacactggatagtcgtatggggtacaccggcaagcggcagttccacggtcttgggcaagcaatcaactgggcaaaatcatcagttggttattcctggtcaaacaagcactttcataagcccgtagacctcgatcttttgctggcctgtactgcgagtcagttgcctgaacatctggtcgaagatctgaaaagacggggcaattga

SEQ ID NO: 304639 - DNA, 489 bp, Proteus mirabilis; identical to SEQ ID NO: 102629

SEQ ID NO: 304640 - DNA, 2916 bp, Proteus mirabilis
atgaaaaatatcgtaatacctacctcgttaagctgcttttttttacttttttcccattcaacatggtctgaaaccaatatttcacaaaccaaacaacgaattatcgaccaacgtaattattggttagatgagatcaaaaatggtgttatcacaactagccctcaaaaaggatcgagaaccgccgaattagatagaataatcagcaataattatcaagccattaccggcgaacgtagagaacttgccgaagcggataagtcacagtctcatacttatgtgtttaatacctatgctaatattttatttggtgataaggctaaatcgatcaactttagcgatattcaagcttatcaagatctcaataaattacatagcacaggcacctatgcttatgatacaaacaaaaaaagagtacgctcgatagattttatcttaaaagaactttttttacgtggccgaccttatcaagcacttgataaagaaggtcattatcttgataactacaccactataacaggctcatcttatcccagtggtcatacgtggaacggatacaaacaagctgcagtgttatccatcttattccctgaaaagggcagtgaaatgtttgccagagcaatagaatatggtgaaagtcgagttattgtcggggcacacttcgcaacagataccatcgcatccagaataggcaattattacctgctgtcacaaatgcttgcagatgatgacaccacccgcacttttgtagagcttgccaaagaagtccgccaaaatgttgctaaccaatgcaaaaatccacattgcttaacgacctcgacaacaatcactaaagatgaaacaggttattacgcaaccaaagatccagagcctgcgccacgcattacccctaatgaaataccaacatctgccaacgctttactgcgtttacgctttgcctatttaaccaaagagcaacgacaatctatcttagcgagtaccgcctacccgagtaattcattggctggctgggctgcaaacaaagatgatccaaacgccaattggggattaattaatctcccgaaagcctataatggccctacttatttctacaatcattttattgttaatcaaataactaatgaatttgactttgctgaatttggtcaacttgatgaatggaaaaatgatattagtgggcctggcaaattaatcaaacaaggtaatggcaccttgatcttatcaggcaataaccattttgctggcgttgaagttaatcagggtcatttactgctcactggtgaaaaccactatgcaaaaaattcttccattaatggtggtacattgcttcttgaaggaacactaaacactttactagatgtcaacaaaggagcattgctattaaatggtgggagcgttgattctcaagtcaatatcaaagggatactttctggtaaaggaaaaattaataagctggccgtttattcaggaggcatcgtatcaccgggtcattcaataggtacaattaatatagatgatactgttatttttaattctggtagcaactaccatgttgaaataaattcacaaggtgatagcgataaaataatcagtttgggtaccgcgacactgaatggtggaatggttaatgtatcgcttgaaaatagccaaaatctgctaacaaaagatgatgttcaaagtttatataacacaaaatataccattttaacggcagatcacggtgttaatggtcaatttactgatgtaaatccaaactatctttttttaggtaccacactgtcctacgataaaaattcagtaatactaaatgtcggaagaaataacaccgccttttcaagtgtggctaaaacaaaaaaccaactatcaatcgccaatgcgatagacgcattacccttgggacatcctatttatgaaagcattataagaatggatacagggaatgatgcccgctctgcctataatcaattaacaggtcaaattcatgcggatatcctatctaaccaactcaacaatagccggcaaataaaagaaatactcctctctcagattaaaaatgcagaaataattaatagagagaaagaaagtgcaggtaacaaaggtcatgtttgggctaaaattctctctaattgggaaaagacttccaatgatggcaatgcaaatagctatgatgcttccacctatggcgtactattaggtgcagatcagcgggttagtcacgataaaatgctgcttggtattgcaacaggggtcaccaaaacctcactatctggtgataacagtcacgcaaatagcgaaaattaccacttatcactctatggtggctatgattttgacacaatcgcgttacgtgctggtgcatctaatacctttcatcgtatccatacaacaaaatcggtcaactatggtgtacagtcagataaaaataaggcgaattacaatgggaacactagccaaatttttattgaagcagcttatcccatcaccctctctgatacacaattagagccttttgttaattttgaatatgccaaaacaaaaaacgccaccattaacgagcaaggtggacgagcagccttacaagcccattcgcaaactctagagtcaaccacctccactacagggctacgtttaaataaccaatggaaatttaacagtaaatcaacgggttctctctatggtgagctaggctggagacaccaatataacgatgtagaacgagggatccatttacgcttcacacaaacccagcctacatttatagcaaatagtgttgatgctgctcgagatgcactggtggtaaaagctggaacgactatccaaattaatgagacatcaaaagtctcaattggatacagcggactagcggcaagaaatcagcacgataatggtattgatatgaaactctctatcgcgttctaa

SEQ ID NO: 304641 - DNA, 1380 bp, Proteus mirabilis
atgtcagataatgtcatctcctctatcggcaccaatcaaactggtgttaataaccgtgttcaattacgcaaaacattgacgctaatgcaagtcgtcatgatggggttggcatttttacaacctatgacgatttttgatactttcggtattgtatcaggcataaccaatggtcatgtggcaacatcatatgctattgcgttaaccgctattttatttaccgcagtgagctacgggaaattagtcaagcgtttcccttcagcaggctctgcttatacttatgcacaaaaatccatgagtccacatgttggttttatggttgggtggtcttcattattagactacttatttatgccaatgataaatatcttattggctaaaatttatttacaagccatattcccaggcgttgatccgtggatctttgttgttgcgttagtcgcgttaatgacattttttaatctacgcggaattaacgttgtggctaacttaaataccgttattgttgttattcaagtagctgtaatggtggtatttgttggtttattaattcatggcgtatataacggcgaaggtacaggggagttatggactttccgcccatttgcgtcagtggatgctgaattaatcccaatgataaccggcgcgacaattttgtgcttctcgttcttagggtttgatggcattagtaccttatctgaagaaacacccaatgccggtaatgtgataccaaaagcgattttcttaactgcgttaatcggtggtttaatttttatcgctgtttcttattttttacaattatatttcccagatatttcacgttttaaaaatccagaagagtcacaacctgagattatgctgtatgtagcaggggccttgttccagtctattatcttagtgttttcttgtgtgacggtattagcatcgggtatggcggctcacgcaggtgttgcgcgtctgctgtatgtgatgggacgtgatggtgtattccctgagaaagcgtttggttatgttcatcccaaatggcgtacaccggcatttaacgtactgttagttggctttttagcgctaggggcgatcttttttgatttagtcactgctacagcgttaattaactttggtgcgttagtggcatttacctttgtcaatttatctgttatttcgcagttctacattcgtgagcgtcgtaataaagggttaatggatcatattaactatcttatattaccgattattggtgccgcgacaatgggggtactgtgggtaaaccttgaaccaggctctatggaattaggactgatttggggggcaattggtatactttatatggtgtggatcactcgtcgattccgtcgacctatgcctcaaatgccagagaaataa

SEQ ID NO: 304642 - DNA, 2097 bp, Proteus mirabilis
atgttcggtcgctcaccgggtcgagaaggtcataatggcgtcccccatttgcgcttattaaatgggatccaaaaatttattgccatcctctggctaggtcgagatagttttgtccgtttctcgccgaccgtatccatgcgccaaatggcgaatgaacatggaaccgataccagcattgctcgaaaacttgcgcgtgtggcacgtattcacttttcacgtcagcgtttagcagcagttggcccaaaactgcctgcacgccaagatctcttcaataaactattggcatccaaagccattgaaaaagccattgaagatgaagcaaaagcgaaaaaaattacgcttgataaagcacgtaaaaatgccactgatatcatggaagagatcgccgctaatttctcttatgaagcggtacgaatgactgatcgtgtattaagctggacatggaataagctctatcaaggtatcaacgtttttaatgcagaacgtgtgcgccaacttgcgcaagatggacatgaaattgtctacgtaccttgtcaccgtagtcatatggactacttattgctttcctatgtactttatcatcaaggattggttcccccacatattgctgcgggtattaaccttaatttctggccagcaggaccgattttccgtcatttaggggctttctttattcgtcgaacctttaaaggaaataaactttattcaaccatcttccgggaatatttaggtgaattattctctcgaggctactctattgaatattttgttgaaggtggacgctcccgtacaggtcgactgttagatcctaaaacagggacgctgtcaatgaccgtgcaagccatgttacgtggtgagacacgccctatttccatcgttcccatttatattggctatgagcatgtcatggaagttgccacttatgccaaagagttgcgtggtgcgacaaaagagaaagaaggttttatgcagatgatcagaggattgcgtaaactacgtaaccttggtcaaggctatgtcaattttggtgaacctatttcgctatcacaatatcttaatcaggccgtgcctgactggcgcgatgatattgatcccattgagccacaacgtccaagctggttaaatcctgcagttagtgcgttagcggataatattatggtcaatattaataatgccgcttcgattaatgcgattaaccttgtctctacggcgttgctagcgtcccgtcagcgagcactaactaaagaacaattattagagcaaatagattgttatctacagttactgcgtaatgtgccttactcatcagatatggttgtccccgataaaagctcagagacattattagcacacgccttgcaaacagataaattccaagttgagcaggatagtcttggtgatattattatattgcctcgtgaaagtgccgtattgatgacttattatcgcaataacaccattcacttaatggttacaccatcattaattgcgagcattgtcttgcatcacgagcgtattcaccgtgatgacttaatgaaacaggtagaattaattttccctcttatcaaagctgagttgtttattcgctatgaaaaagaggagttacctgatgtggttaatacactgattagtgagctttgtcgccagcgtctaatttgctgtgctgatgatggcatattacggatcaatccagcacgtattcgcccattacagcttttagcagcaagtgttagagaaacgctacagcgttatggtattacgctctctctactcaattttgctcctgaaattagccgtgcactattagaaagagaaagccgcattttggcgcaacgactttctgtattgcatggtattaacgcacctgagttctttgataaagcggttttctccactttagtttctacactgcgtgaagaaggttatctcaaagataatgaagatatcctcaaagcagatgcctctgcactttaccaagttattgcgaaattaatgtcaccagaaattcgtttaaccattgagagtgtaggcgttactgaagataacaattcagcacaagcgattgaggaaaaccctgaatccaacatggataagtag

SEQ ID NO: 304643 - DNA, 462 bp, Proteus mirabilis
ttggcaggggggataaacttatatgcttatgcgccaaatcctttaagttatattgaccccctcggattaaaaccatgcgcgcctactagtgaatttgaccgtataactactgggaaagtttatagagtcattaggcccgatgaagatcctttatccgggttattttcccttaatccaaataatataaaaactgttgctgggcatgtaacatcaggcagtcgctctccatctcagtttatatcagcaacaaaagatttaagcattgctgaaagatgggctgcgaaatcagggaatcgtattgttgaaatagacttgcgtaaaatttctggtggcgcaattgacatatcatcccctaaaggactagatctcttaggtaatcaatttgcaaggcggctggcgaaaggttcttcagaagtgttgtttgacggccccattccagcgggtgcgattaatcctctttaa

SEQ ID NO: 304644 - DNA, 1704 bp, Proteus mirabilis
atgtacgaatttgatttaattttgctgttattacagcaaatgtgcgtttatctcattattgcgtggtttctcagcaaaacgccgctatttacgcctcttttacaagtgactatcaaacttccacataaattaatgtgctatgtgattttctccattttctgcattatgggcacctattttggattgcatattaatgactctattgctaatacccgtgctattggctccgtattaggcggattattaggtggcccgtatgtaggctttctcgttggcttcacgggtggcttacaccgctattccctcggcgggatgacagcgttaagttgtatggtatccactatcgcagaaggattaattggtggattagttcatcgttattatgtaaaacatggacaaatgcaccgcatatttaatccttggacagcggctaccgtcaccttttttgccgaaataatacagatgagtattattttattactcgctcgtccttttgatgaagcactttctttagtaaaaaatattgccgctcctatgattgtagcaaatacaataggtgctgcgatgtttattaggatattacaagatagacgtgccatttttgaaaaatatactagtgctttctccgctcaagcattaaaaattgcggtttgcactgaaggtattttacgtaaaggctttaaccaagataatagtactcgtgttgcaaaagttatctaccaagaattaaaagtcagtgctgtcgccattacggatagagataaactactcgcttttattggtattggcgctgatcatcatttgccgggtacaccgatttcctcagaacaatctaaacaagccattaataataacgaagtcgtgtatgcggacggcaatgagacaccttatcgatgtaccctttctccacattgtaaattaggctcgacactggttattcctttacgaggagaaaataatcgcgttattggcaccataaagctctatgaagcaaagaatcgcttatttagctccattaatagaaccttaggagaagggatcgccagtctattatcagcacaaattcttgccggacaatacgaaagaaataaacaatcactattagaatcagaaattaaattactacacgcacaagtcaatccccactttttatttaatgcattaaatacattacaagccgttattcgtcgtgatagtgatcaagcaaaacagttagtgcaatttctgtcggcttttttccgtaagaatttaaaaagacccgaagcgatagtgacactcagtgatgaaattgaacacgtcacggcttatttacaaattgaaaaagcgcgctttcaagaaagtttacagatagatattcagatacctgaacatttagccactgcgcgccttcctgcattttcgcttcagcctatggttgagaatgcaattaaacatggaacatcacagttattaggcatcggaaagattacaattagagcgcatcaagaagaccacttaatagtgatcgaaattagtgataatgcagggctttatcattcgcaaggcgcatcacatcagctcggtttaggaatgagacttgtcgataagcggattaaattacgctatggtgatctatatggtgtacttgtggagtgtcagcctgataactataccaaaataaaaatctgtttacccttagaaaaaaatatggataacgcagcataa

SEQ ID NO: 304645 - DNA, 570 bp, Proteus mirabilis
gtgcctcaatctgggtattatgagttcaccccctcaaatacacttattctgaaaccgagagattatggcataagcattattcctgctgattttaaccctcatcaatctaaaacgggaaaagtgggtaatgaagagccacccattgagtttaattatattgttaccaccagtggccctagacaagcagactctattactgcatctgtagaaggaccacaaacaacattaaaagggcaatcctattgtttattctcctccagtgataaccgacttaatgtgccttttccggcttatctctcatttaaaaatagtgatggcacggatgcaaaatatagagcgagttgtgatagtcatgaaatttcattaaaaaatgcgttatggacagaaacaccatgggatagacctgatgaagacttaggctctttttatagaacgaacctagatttatcttttccaatgaatgatgctaactcatttttcactttggatggtattgattggctaggaacagtctcagccagtggaacggtaacggttaaggctatatggactgggcctgatattaactaa

SEQ ID NO: 304646 - DNA, 1620 bp, Proteus mirabilis; identical to SEQ ID NO: 295097

SEQ ID NO: 304647 - DNA, 3261 bp, Proteus mirabilis
gtgtctgaaaaaatagacttttattcaggtaaaaacatttacatttcaaatgtaataattaatgaatcaaatgaaaaaagtttatcagcattagagaatattaaaataaaacgcgatgagtctttatttttcaacctaatgccaaattttagagatgaacaatatatttcagcgtttttatttaatatggggctttggaaaagtaagaataatataagcttgatggctggtaaagatattgttagtcagggaataaaatattatagtaacaaagaaataacttttaatgcaggacaagatatttttcttgcctccaaattaataaaagaagccgctccttttttcagtgatatttattacccccaactacaatctaaattattttcagataataaccttattttaaatgccgcgcgtgatattgatttaagttcaacagtattaaattcaaaagataaaatcattgtattagcgggtagaaatataaaactgggtgcaaatgcttattccgccatcaaagatccccacgaagatgcgcaagacattcaatatgccaccacatccattatgggaaataaaggtatttctattgcatcatcaggctcactcacaacagaaggaagttcacttaaatcagagggggatattgctatttccagtggtggcaatatccaattgggatcagtaagaacacattttcgtaaagagtcggactcagagttagaagaacttcgtaaacaagtcagtactgaaattaatagcggtaatcatctaacactattatctgagggcagtattttatttcaggcctctcaattggctgctaataaaaagatggatattgctgctaaaggtggatttctttatgcacaggcaatggaagaatccagttactatgaagaagaaaagaaaaaatgtaattggtggacactgtgtgcgactaaaaagaaatataccaaaacatttaataacacaacgaataaagttaccgagtttattgctaatgacgatattaatttaattgctaaagatgatatcactttagaagcaagcaaattagagacagcaaagaatgccaaattaaccagtaaaacaggaggcattaattttaaagcggtgaaagatactgcttttaaacaagttattactcgttcaaaagatatatatatcactcaacgtaatcagggatacaccaagggaacatggctattacctgaactctatattggcggaaagctgactatcgatgcgccaaaaggcatatctgcagatattaaagccaaaaaagagcaatctttagagcaggcattaactgccttaagtaacacaccagaatatgcttggcttaatgcgctccaaggtcaagaaaatattaattggaatttagtgaaagacacttattccagttgggatgataaaacccagcagttaaatccagttgttggtgcggttattgccatcgcggtaggggttgcaacttatggtacggcaacagctgcctcaataggaggaatggcaagtaatgccactattgctgcaggagcctctgcgggggttgcgtcaacggcatcagttgcggcacaagccggttttgcttctttagtttcgcaagctgcggtctctttagccgaaaatcaaggcaatatttctaaaacatttggcgccttaagtcgcagtgatacggtgaaatccattgtcaccagtatgaccgttgcaggcgccttgcaaggtcttgaccaatttatgggttgggatcaagcaatacaggggggaacattaccgacaacaggcaagttgcttgcgacggataatgccacatggactcaagttgctcaacgcgttgcctcacagtcagtagtgagttctacactgggcacagccattcaaggtggcagttttattgataattttaaaactgcgctattaagccatatcggcagtcaatttcacgctgaaggtgccaatctcattggtgataacggtgcgatattagggcatgcaggaaaggttttaagccattctgttgttgcaggagtgagtgctgaaattgcaggaggcagtgtaacaggtgcagtagccggcgccttggcagcagaaatagcggcaatatcgctacaaagtaaattatttgagcctagttatttaaatgaaactgacagacaagttgcattaattcaagaggcactacatggcaatgaaggaaaaacacagctcactaaattaattggtgcactgacaggcgctattgtgactcgtaagcctgagggcgtattttctgcggctaattctgcggagttagtttatcgacataattacagcgaacatatgctttcaaagctagcactagaaaataataaggacataattgcagcgtcaaaaggtgatgttgcagcagcagaaagagttgtaaatcgacaaaatgcagggatgattgcgattgctcttggtttaggaggaagtgcgagcattattggtggtcacactgttattgcagcaacaccagaacttattgctattacgcaagctgcatttagtacatgtaaagctaattgggtttattgtgctaatcagctaggtattaatatcgctgggatatcagctccagaagctgcaatcgctggtgtcaccgttggtactggttataaagtattagctagttcagaagaaagtgctaaagctttctctagcatgttagctaatagttcaaagtctttaatgacttcaggaaaattaaatataactgctataaaaccgatagtagaacaagaaaaattattaataactaccaacaaaaaagctattgaaataatcaataacggggagtttataatatattcaggagtaactacgaatggatataaagtatctaatggagccaaaaccgtagtttttaaaaatgaattagaacatcctattgttcaatctaggattaatattaaagtgggagatgttgaatcaggttggttgcatgtacaaaaacgtcatttttcaggagcgcaaaatgctagccaatttacgcttagtgaacaggaaattaaagatatattattaagtcctgctgtcattaagattcctattaataaaacgagagaatcatataataaaaacaccaatagtattgatattttgtatgaaagagtgattcagcttgataaaaatataggaattgataaatttagtaaacagccaactaacataattactatgctcacagataaaaatggaaatttaataactactacccctggggaaataaagtga

SEQ ID NO: 304648 - DNA, 198 bp, Proteus mirabilis
atgacagcaaaaaaatcaaagaaaatccaacgcaatattctctctgcaatcctagatttatcactaaacagtaaaattcacctaaaagaattatttttacgcttttattctacgcttatttttattttttatgactattttttgtactttttttacaaatttattcagttcgcgtcaaaaaaagcagaaaaaaagtaa

SEQ ID NO: 304649 - DNA, 1182 bp, Proteus mirabilis
gtgaccaattgtacgtggatcattcgtgataaaaccctatctgtttttcgcttgccctgctctcaggcaagacaagagcaagaagcacaagatatcagtgcgcaacatcgttgtgatgcacaacaaaaagagatagatcgtattgcacaaagtgcgaagcaattggccatctggggaaaagtgtatgataacgaaagtttgtcacgtaaagccaaacaaatggaaaaacaaattgttcgtttaaaagacgaacaagccgatgtaacagaaggcaatcaatggacgttacagttatcaggaacaatattacgggcagatagattgcttgagctgcatcagctttcagtgatccctgcgccagatgcaccgattttatataccatcgataatcaacggatcaaaagtggtgatcgagtcgctattgttggtgctaatgggacaggtaagtcatcattattaaaaatgatttggtcatcatttcatggttcaaccacatcaacagaaaatgtgatcaggcttcatcccagagttgagttaggttattacgatcaaagtctcgcacaacttaatgataatgatactcttgccgatgcactaaagccctttgcaccgctattagatgaacaaaggaaaatggcattaataaatgcaggttttgtttattctcgccataatcagcaagtaaagtcattaagtggtggtgaacgagctcgtttactttttattggtctcagtttggcaaaatattcattattaatgctagatgaaccaacaaatcatcttgatatggaaggtaaacaggcattagctgagcaaattcaacaattttcagggggaattttactcgtcagccatgatagagaattgatagagaaaagctgtaatcgtttttggtatattcacaatggtattcttagcgaacatcatgatattgaaacaatttatcagcttatttctcaacaagatatgtcatcggtctctaatgagcaaaatggccatcatgctccatctgttgaaatagtaaaacatcataatgaagatgaattgctaatgaaattgatagcacttgaagataaattgaatgctgatttagcaagaaaatctgctcatcaaaagcctatgttacaggctcaatggcaagcagaaatagagatcttaaagcagcaacttgatttagcttaa

SEQ ID NO: 304650 - DNA, 1419 bp, Proteus mirabilis
atggctggtattagtgcactaggaataggctcaaagctgccgcttggcgagacattaatgcaattagaagcagcagaaaataagcgccttgaacctttagacaaacagatgaaaagctacgatgcacaaattactgcatatggaaaaattcgtagccaattagataaattacagaaagcatctgaagaattaaaaaaattcgataaaatcgtcgccaccaaagttgatgatgagtttgatgcctttaaagtaaccactgatggtaaagcaagcattggtaattatacggtctctgtaacggagcttgcccatgctcaaacactgaaatcaaaagccgtcagtgatatcaaagatcctattggtgaaacattaggtgaaggcaaaactcggactttagtgatcacccaaaaaggtgaaaaagagcctttaaaaatagagttaacagacagccaaacttctattattgaattacgtgatgctatcaataaaaaagaaggcaacgtttctgccactattgtaaaagcccaagatggcgttaaccatttagttctgacttctcgtaaagaaggtacagattctcagatggaaatcactgttgaaggtgatagtaagcttaacgattttattagctactccactgaaaaaaccagtggcgcaatgacagagatcgttaaagcaaataatgcaaagttaacgattaatgggattgaaattgaacgtcaaactaatgaaattaaagatgcgcctgaagggatcacgttaaatcttaagaaaaaaaccaatgataataaagatggcgtagataaacctgaaattattacggttgcgcgtgatattgagccaatgaaaaaggccataaaagcctggacagacgcttataatgaattaaataaaacctataaagatttcaccaagtacacccaagttgaaaaaggtgaagatgcctctaaagacaatggtgtgttattaggtgataccactagccggatgattatgtctgagctaaaaagctttatcactcgttctcaatcttcatctgagattgatacccttaataaaatgggcattaaatttaaagttgatggcacattagaagttgatgataaaaaactcgataaagcattaaaagaaaaacccgctaacgtcaaagagttttttatgggggatggtaaagaaacaggttttggtactcaaacctataattacctgaaaaaaacactgcaatcaaacgacggaacacttgatattgccactgatggtgttaaaaaacgtaaaaaatcgttagataaccaaattaaaaatactaaacgtactattgaagcgacgatggaacgttataaaaaacagtttcaattattagataaaatggtcaactccatgactaactcaagtgcatcaattgaacgtttgttacgttaa

SEQ ID NO: 304651 - DNA, 492 bp, Proteus mirabilis; identical to SEQ ID NO: 303115

SEQ ID NO: 304652 - DNA, 669 bp, Proteus mirabilis; identical to SEQ ID NO: 295338

SEQ ID NO: 304653 - DNA, 267 bp, Proteus mirabilis
atgacccgacaatcacatcgccggcgtttggcgggggctttgttactcggttgttcactggtgccggtggcggaagccagtctgagtaccgccactctggtcgcttctgcggcctcaccgtcgtgtatcagctggcgtatcagcgggatttgctactggctgaagtgtggctggggcggctgccgtatccggacatctgtccgggtgtcacattttattccgcaggcggtggtctcggcctaccatgccccgggtgaaaacccgtga

SEQ ID NO: 304654 - DNA, 1194 bp, Proteus mirabilis
ttgttattaagcgattacaatattgattttaaatataatttctcctcgcaatcattatatttaactattccacaaaaagccttagataataaaaaaaatatgcttgctagccaagttttatgggatgatggtgtccctgctttgtttagctcatattcttattttggcaaatataacaatcaaaataagatagaacacaaaatcagttttaactcaggtgctaacttaggtgcttggcgagtacgtagtaaaagttattatcatcatacgcataagcaacagcaatttaagctatactcattatatgcttatcatcaattaaatacgctgttggcaacgcttaatgtgggggaatttcgaccaaccagtagaatgttatcaacagataaattaattggatttcaacttatatctagtaatttgctctctggtaatgatctctatatgaatagtcctatcatagaagagattgcagaatctcatgctgaaattaaagtgaaacaacaaggaagaaccatttatgaaactattgttcctcctgggccttttattttaaacgatctacctgttataggtagcaatgaattggtattagaaataaaagaagcagatggacgtataaaaaaaagtactcattactttactacaatgccaaaccaattaaaaaaaggtcgttatcaatataattttatttctggatattcttatgatagatataaccagtttaataatcaaaataataaccctatttttttactgggtgagttctcctatggtattaatcaaaaaataaccgcttatggtgcaattagaaagaagctgaatagcaatactttcttttcaggattatcattagatttaggacgctgggggggagtagccagtgatattagttattttgaacacaataatctattaaaataccagttgcgctataataaacgatggagcaatattggtacttctttaaatatatcttctagccattatcaatcaataaaatctgatagtgttagcattagaaaaagtcaaacagacaacataaaaaatagctatacaatttctctctttcaaccgattaaatctttcgggacattttctattggttatcatcaaaattcttatgccaaaagaaaaaatgactttacaatcaatacttctctatcatcttctataaaaaaaaatgaattatag

SEQ ID NO: 304655 - DNA, 273 bp, Proteus mirabilis
atgaaaaaacacacaaacagagtttatactactgagtttaagcaagaagcggtcgcattagttatcgaacaaggttatagcgtctcaaaagcggcagctgctttagggatcaccaataaattactttataactggaaagcaaaattcgacgctgaacaatcaggtagcagcttgaatgctgatgagagagccgagctattaaggcttcgaaaagaaaataaagaaattaggatggagaaagagatcctaaaaaagccagcgtccccctgctaa

SEQ ID NO: 304656 - DNA, 1338 bp, Proteus mirabilis; identical to SEQ ID NO: 196087

SEQ ID NO: 304657 - DNA, 963 bp, Proteus mirabilis
atgattaaattggcaagtaacagtcctattgcattaaatccagtgaaaggtacagatggtaaaaactattataaagttggtaatacgattgtgatcaataatacaccatctagtgtaagtgtatcggggattgttcagtgcatcgggcttacttggggacatgcttcaacaaatatttcttggaataatgcatatcatcgcttgtttacatatgtacctatggctggtaccaatatagaaggccatatggcatatcgtattaatagtaatttggtaatgaccattgatactcaaatgttgaattgggtaaatataagaggatctgtttgtgaacaggctacaccaacattaactgctcatgccagtgaatttactgtacaatttccaatcagtgtgacattttatataaatgatatggttattgattctcagctacctatacctgaaatggatctaggaggttatgttcgtgcatttacacgatcaggaacgagtcctcctcaaaattcttgggcattgaatgatgtcactgttcctatgcgattagcagcatcacaattaaacgtaacttcttcttgtaaaacagtaacaagtacaggacaagtaagtactttaaatttaaagcatgggcaactcaatacattaaattatgacagcttagttacagaaagtgtaacttataattgtgttttttcaaaagcaacaaaagtgagattacgtctcgattatataactgataacgatcctcaaaaaagattaccgatggtgagtacccaaaacagcaataataaaatttatagtgaattgaccatgacagatgaaataaccgggcaaaaaggtaaagattttaaaattgacattaatgatttgagaacaattaagataaccagccatcttcaaggaacaaatgcgatagctggagattataaaggttcagcttggctaatcgctacgtttgattga

SEQ ID NO: 304658 - DNA, 231 bp, Proteus mirabilis
atggaattaaatttatgctggtggaatataggaatatctccaccgacaaaatcaaaacagaacgtcaagactgaaaaagttggcttagcgaaaaaatatcttgaagaacttatcattaaaaaaacgcttgatatcattgtgttgagtgaggtttctgaaaacgagagctacgcttttaagcagttggcgactcaattaaaaatgggtatatcgatctctcaggaaaaatag

SEQ ID NO: 304659 - DNA, 618 bp, Proteus mirabilis; identical to SEQ ID NO: 301266

SEQ ID NO: 304660 - DNA, 612 bp, Proteus mirabilis
atgacatcaaccattctaaattataaaagcgtttttattttaatcggtagtttattacttacagcatgtgataacgaatcaactcacaataagagtgaagagataataaattatcctgtacgtactatgtcggggtttaatatcgcgtatccaacttcattctcattaaatagagatgatacagaacactattttcaattattacctgatcatgtccaagatgtcacatcacagatgttagtttatcaagccaaaccagtatgccagttatcagaagttcgtttagtttattttaaacttgacgatatgatgagttatgatattgatactggagcacagggtatcgttgataatatttccactattgatggcatgaaagaaacttcaacaacaataaagcctttcacagtgtcagaaatgccagctcgacaaattttctttgaaggaaagttgtctaatcagaaagtgagctatgaaggggtattaattgcggatactaacacaaatcgtgtatggcaattacaatttattgctgaaaataaaagtaataataatcaagaagttattgattgcactaataggtatgtgaattcaattagtatcaatcaataa

SEQ ID NO: 304661 - DNA, 696 bp, Proteus mirabilis
atgaaaaaagtattactcagtcttgctatgctgagtgtaatatcaacgccggtattggctaaagctcctgtagctaacttaaaaatcaatggtgatattaagccaccaacttgtactattaatggggcgacacagcgtgatgttatttttgattacggagtcataagcccaacacttatccctcaatcgactgtctactcttattctgacattggagttcaaaatacagttacgattgaatgtgatgcaaaaacatatttaacatttactgcatctgacacttatgctgatacagaattaagtgttaataatacatcaggctggtttcatttagttgataaagcaaatcctgaaaccgcggttggtgcggcattcttcgcatgggataatgtgactgtcgatagcaaacctgcgtatatttcacgagcaaacgatgtgtctattacaggaaccagctacaataacgccctatacaaagggccaaccaatggttggacatcagaaaaacaaacaagcgttgataaaaacgccctggctctaatttcaggtgaaattttccaagcaagttttagacaaggaatgacaatgagtacttttattttatctagagatgaattaagtaaaaaaggaatagatttatctaatggtttagattttatgggagaagctgttctcacttttaactttggtgtctaa

SEQ ID NO: 304662 - DNA, 624 bp, Proteus mirabilis; identical to SEQ ID NO: 296788

SEQ ID NO: 304663 - DNA, 567 bp, Proteus mirabilis
atggataattacctctctcaaataaaatctaaacattgtaattatatattacttggagcatgtgcaaatgtagtcaaaagaaagggttttgaccaaataatgactctaatgagtagaaatgatggtaaacaatacttatttgcattagttggtaatggtcctgaattagataatttaaagcaatatgctattgatttaaagatacaatcacgatgtatttttattgataagacattagatgtacagaaatatttaatgttatttgatatttttattatgacttctcattcagaaggtatgcctttagcattattagaagcagctgcatgtggactaccgattgtatgctcttctttacctgtaatacaagaaatatttaattccgatgaagtttctttttatgaatgcaacaacatagactctctatctgaggctataaattatgctatagataactcattattattgtcaagcaatgttaaaagaaaatttttagaaaaatatacagacaacataatgtctaaaaaatatctagatttatatatttctctacttaaagaaaattaa

SEQ ID NO: 304664 - DNA, 390 bp, Proteus mirabilis; identical to SEQ ID NO: 302873

SEQ ID NO: 304665 - DNA, 462 bp, Proteus mirabilis
atgaaaaagccactttctttatggataactcaatttttgattgtctgctgtattatactgatattatatttttttataaccaatgcatcactgttattaaatttgtatagttttgatatgcccgctgagataaagatagaaatttatttatggagttttattcgtttgttagttttaattatacaaatatcagcgctttacttttcctttaggtgcgataaaagggcgcgggtattgactatcttagcttggctaccaatcattatcgtcatgttatggagcaatttccatgatgggttaacttctttgaacgaaagtggtataagctatgataatgatgctcaaagatctggagggattataggtaaacttattctggctggattatccctttggttgacatctattatattattttcaaaaaaattaaagcgttattttctatttgagaaaagtgaatga

SEQ ID NO: 304666 - DNA, 390 bp, Proteus mirabilis
atgtctaaatcggcaaagggtacgacagaacggcatggacggaacgtaaaagctaaatctggtttaaaccgctcaatactggagcagggctggtatgaaatgcgccgtcagcttgagtacaagcagctctggcgaggtggtcaggtactggcaataccaccggcctacaccagtcagaagtgcgcttgctgtggtcatacagcaaaggaaaaccgccattcacaaagtcaattcgagtgccttgaatgtggatatacagcgaatgctgatatcaacggggcacgtaacattttagcggcaggacatgccgtgcttgcctgtggagggagggtgcagtcagaccgcccgtcgaagcaggaacccgccgaggtgattcagacatcagtctga

SEQ ID NO: 304667 - DNA, 390 bp, Proteus mirabilis; identical to SEQ ID NO: 297871

SEQ ID NO: 304668 - DNA, 330 bp, Proteus mirabilis
atgaaaaataaaactaatattcgccgtggcagacattgtgtattcctgatgcacgtccatttggtctttgtcacaaaataccggcgaaaaatatttgatcaggatgcaattgaaaaattgcgaggctactttgccagtgtttgtgctgattttgatgttgaactggttgaaatggatggggaacgggatcacgttcatttactgattaattacctgccaaaactggcgatatctaatctggttaacagccttaaaggggtatcgagtcgattacttcgacgtgatcgtcctgatattgcccaacgtgattactacaagggggttctttga

SEQ ID NO: 304669 - DNA, 291 bp, Proteus mirabilis
atgcgccgtcagtttgagtacaagcagctctggcgaggtggtcaggtactggcaataccccctgcctacaccagtcagaagtgcgcttgctgtggtcatacagcaaaggaaaaccgccagtcacaaagtcaattcgagtgccttgaatgtggatatacagcgaatgctgatatcaacggggcacgtaacattttagcggcaggacatgccgtgcttgcctgtggagggagggtgcagtcagaccgcccgtcgaagcaggaacccgccgaggtgattcagacatcagtctga

SEQ ID NO: 304670 - DNA, 978 bp, Proteus mirabilis
atggcttatgatttgactaatacactggtcattggtattagctcaacagcactttttgatatgcagaaatcagataatctttttaaggaattctgttccagcattccggaaaaagcaattgagcaatatagaaattacatgcttttgcatgaggaggatgagttacttcctggaactggatttcctttggtagaggctttgctgggactaaacaagtataaaaaagaagctgataaatctcctcttgttgaagtagtggtcatgtcaagaaatagccctgatacaggacttatgatactgaacaatataaggaaaaaaggagtagatataacaaggtcagtattcacaggtggggaaacggtggttgattatcttgaggctttcaatgtggatctttttcttacaaccagtattgatgatgcacagcgtgttatcgactctaatgcctgtgcagtagctattttaaaggaacctccaaaagaatctataaaatatcctcaagatcaggtaagaattgcctttgatggtgatgctgttttattcgatgagtccagtgaaattgtctataaaacgaaaggaataaacagtttccatgcacaagaaaatgctaagcaaaatgaaccattggcggaaggcccttatgcaatgttgctaaaaaaaatagcgagattacaagaccgattacctgcaagagttgattattcaccgataagaattgctcttgttacagcaaggaatagtccatctgaactacgagttataaaaacattaagagcttgggggataaatgttgatgaggcattctttttaggtggggtcgagaaaacaaaaatacttaaagctttcaatcctcatatattttttgatgatcaagatgttcatcttgagccagcatcagtatatgtcccttcaggccgagtaccttatgcttctcgctcgccattatatcagcaaatactgtcaatcaagccagcttaa

SEQ ID NO: 304671 - DNA, 210 bp, Proteus mirabilis
atgaaatctcgtgctgcggtcgcctttggaccaggagagcctttaaaaattgttgaagttgatgtgatgccacctcaagcaggtgaggtattgattaaaattagtcacactggcgtatgccatactgatgcctttaccctttcaggtgatgatcctgagggtgttttcccagccattttaggtcatgaaggcgcgggggggggtggttga

SEQ ID NO: 304672 - DNA, 912 bp, Proteus mirabilis
gtggttgaagtaggtgaaggcgtcaccagtgtcaaaccgggtgatcacgtgatccctctctatacagcagaatgtggcgaatgcctattttgtaaatcaggcaaaacgaatctctgtgtagcagtaagagcaacccaaggtaaaggcttaatgcctgatggcacaacgcgcttttcctataatggacaacctatttatcactatatgggttgctctacctttagtgagtatacggtagtagctgaagtatcactcgctaaaatcaatccacaagccaaccatgaagaagtctgcttacttggttgtggcgtgacaacaggtattggtgctgtacataatacggcaaaagtacaagaaggtgactcggtggctgtatttggtttaggtggcattggtcttgctgtactgcaaggcgctagacaagccaaagcaggccgtatttttgcgattgatactaatcctgaaaaatttgcattagcacgccaatttggtgccacagactgtttaaatcccaatgattatgacaaacctattcaagaagtactggttgaaatgactcagtggggcgttgatcatacttttgagtgtattggtaacgtcaatgtgatgagagccgctctagagagtgctcaccgtggttgggggcaatctatcattattggtgttgcgggggcaggacaagagatctcaacacgccctttccaactcgtcacaggtcgttcatggaaagggactgcatttggcggagtaaaaggtcgtagccaactacccaatatggttgaagatgcaatgaatgggaaaatcgaactcaaaccttttgtgacccacactttacctcttgaaaaaataaatgaagcctttgatttaatgcatgaaggtaaatcaattagaactgttattcatttcgattaa

SEQ ID NO: 304673 - DNA, 1494 bp, Proteus mirabilis
  misc_feature (1478)..(1487): n is a, c, g, or t
atgaaaattagaacttatggttggattcaaaatccatcatcgtttcaatcattaaagaaagtagtgcaaatatttgatgttaattcattacattatcaaaatttaaaggataacttaattgagactatttataatgaaaatgttaaatccgaacttaaaggtaaactactgaataatatagataagtttaattacctggaattggtcggaacttctaaaaataaagaaggtaaggcagctaaatcaagaaaaactgcggttgccgatgcgctaattcaaataagtattgaacctcaacaaatgggagcaactggtaaaacatggacagataactggactgcagatggttttcttagatgggcagttagctttaattttgttaaagtgaatagaaaaaccgatacttttagtatcacagaaaaaggtttagcattttcacaagcaaaagatgaagaacaggaacttgaaatactaagagcagctctgttggcatatcctccagcaactcaaattttatctctattagaaaaaagtgaaacttactgtactaagtattacctaggctctaaactaggttttcgaggtgaaaaagggtttacttcatataatgaagatataatgtataattggttgtcatcagctactccagaagagaaacagaaaattaagtctaatattgagggaaccagtgataagtatgctcgaggcatttgtaattggttgaaaaatgttggttttattgaaactaaacaagtaaaaagaaccttctcaaatgggagaaatgaagggtttcaggggtacaaaattactgctagaggaattgcagctttacaccgttctaaaggatattctagtaataaacgtattgaaaaatttgtaatgtgggaatttttcgctacagatggacataatagagattatgtacgaactcggcgtgcatttattgtaaaattgctacactcacccatttcattgaataagttagtttctgaaatgagaaataaagggtttcaggattccaaagaaatatttcagtcagatattgagggattaaaattatttggtttgcgtataaatcatcaaaataataaatttaaactattagataaagtctcagatttttctattcctcaactaaatcttaccactgagttgcgtgatgagttgatagaacagcaaaaagctatatttttgcaaaagacaaaactgccaatagaatatatagaattactcgaaattgcacgagatggtaatcgcagtagagattttgaaattgttacaatggggctatttagggatatatacaaaataaattctacggtattggggggctctcgtaaacctgatggcttattacatatgtctgattttggtgtgattgtagatacgaaagcctatgcagatggatactcgaaaaatatcgctcaagcagatgagatgattcgctatatcgaagacaataaacgtagagattctannnnnnnnnnattctaa

SEQ ID NO: 304674 - DNA, 696 bp, Proteus mirabilis
atgtcaaacaataacgacctcatcaccattcaaaaaaaagaaataatgagtttatatagtcaatactgttgctgtttagaagattataataataatctttgttctattgaggacgttcataataaagccactgatttctttaattatgtggaacaaagcgtttcacataataactcaatcgaagaaataaaggaaagtgattggaatcaatggattgcggaaacctgcattgaagttctagagcttatagtaactcattacaaatgctatagaaatgaaatgaataatgatttattgaaacccggtccaacagcatttgctggtatacaaagaatggtgatggattttgataaagataaagcaaaagagataaaagagttatttaaaaataacaacttaccgacttatggatttgataaaaaacggaaatttcacatgactaaaacacatgaaaaaatagcagcattttcatttggaattatatttatagtaacaatattaataatcgcattattcactccctatccaactagttttcaatacactatatttagaataatattgtctggtgcaatggcaggatttgtttcatttataccgggatttatagaattaagaatatcaaattggttaagagcaggaggtgctattgctgtatttattttcgtgtattattttgctcctgcggcattgtag

SEQ ID NO: 304675 - DNA, 276 bp, Proteus mirabilis
atgaatagtacaaatgacctgattctatttaaagacattttagaaaaacaatttcacataatcaaatggcatcctagccttgaacaaatacaacttattttaaataaagttaatgaattagatgaaagcgcacctatttcagaagttctaaaaataattcatcaggtatatcaaaaaccaatcgaagcatttatcatggaagggttagatacttcaaaagctcgctatttattatctaaactagactctgcaaaaaaagaagaaagtaaaaaataa

SEQ ID NO: 304676 - DNA, 153 bp, Proteus mirabilis
atggaaaaagaaaaaaagaaacaaataccgccacaacttgtccgtactacaacagtctttgcacaagatggccttgacacatctaaagcgaaaagattactacaagaaatggctaagcaagaagctcaacaaaacaaaggaaacaaaaaatga

SEQ ID NO: 304677 - DNA, 153 bp, Proteus mirabilis
gtggcggagaagaaattctgtactgaggatttaaaagaagctggtttatcagtcattaaaccttgtaaattaacattattatttcgagcaacattttatcgtcgacagctaaattggcgtgaaagagatcgtgctgtgattgatgcagtgtaa

SEQ ID NO: 304678 - DNA, 1050 bp, Proteus mirabilis
gtgactaaacctctttatgagagctacctgcaagcaaaaaatgaaaaaaaagcatcttatgcgcgtgatttagcaacttaccttaatgtaagtgaagctgagcttactcacgcgcgtgttgggcacgatgctaaacgcttacatggtgatgttcgtgatattttaaccgctctcgcaaccgtaggcgaagtgaaagccattactcgtaatgaaattgcggttcatgaacatcttggtgaatataccaatgctcgttttaacgatcatgcaggattgatcttaaaccctcgagccctcgatttacgctttttcttctctcattgggcaagtatctttgcattaaccgaagagacggctcgtggcattcgtcatagtattcaattctttgatcttcatggtgattctctccataaagtgtataccactgataatactcatatggacgcatggaataccttaatcgatacttatttatcaccagaaaatcccgtattagagattacccccgctaaatcttttactgatgcaccggtaacaacggcattagcacaacagttagaacagcaatggcgctcgatgactgacgttcatcaattctttaaaatcctgcaagaaaataatctcagtcgccagcaagcgttcaaagcggtcagtgatgatttagcttatcaagtagataatagtgccttaaaaacattattagcactggcgaaagaagtacaaaatgaaattatgattttcgtgggaaatcgaggttgtgtacagatctttaccggtaaaattgatcgtttagtacctcatcaatttgaaaatagtgaacaagtatggattaacatttttaatcctgcatttacactgcatttaattgagagtgaaattgtggaaagctggatcactcgtaagccaacccaagatggttttgtcacaagtcttgaactatttgatagcaaaggtcaacagattgctcagctctatggacaacgcactgagggaacaaaagaacaacaacaatggcgtgagcaactcaacgctcttgctaaaatagcttaa

SEQ ID NO: 304679 - DNA, 3372 bp, Proteus mirabilis
atgaaaatcaataataagctttcttcaacccgaaatttatttattatttatgcaattattcttacgagctccttacttttattaagtattctttattatctttttggtaatgaaattttagaaactaattacgcccctaaagaaattgtattttttactttttctagttggatagctttattattgatttttccattttttatttatggttggaaaaaagtcattccattactcagtaaaccttttctacataatacaaaaacattaccagaaataaacaaaaaaaataattcatttattgatgatatatttaaacaatacggtcaacataattcaaaaaaattattacgtttacttattgtcggtacatcttcttgtattgataaattagcaccaaacttaacttctgatatctggcaagaaaacaacggaaccttactcatttatgggggcgatattcatcaacctattgatgaaaatttaattcaaaacttaaaacaattgcgtcgccgccgtccattggatggggtcatttgggtcactgaaaatagcttatcgcaacagcctctcgccccttctttatttgatcacctaaattccaccgacaccgatatcgccagtcgttattttcatcagctctttcgccaattacgttggcaagctcccatttggctctggaatatctgtcataacggcgatatgaacgcagaagaagtgccaactgtactttattcagcaccattaaacgcctcttcagaagtcctctcaaatgatataagtaagctcttacccgctcttattgaacagggtacacaagctctactgcataacccaacccacacttatttactggccttagcccgttttttacaacacagtggcagcgaaaaactcgcaaatcacgtggcaccactgttatcgggctatcgttcattgccgtttgcggggatgctttttagtcccccagttcgcaataatcgcgctttatcgtcaatgtcatctacattaccgccgaataatcaatggacaacgaatgcccattggaaaaccctcctttctgccaatgcacaactcgcatcccccttaaaagctgctcctttaggtctcaattcaaaacgggttttacaatatactgtggcgaccgccatgacactgtggggaattggtatggtggtctcgtactttatgaatcgccaattaattacgcaaagtcagcagcaagcgcagttagccatagataatcaccaaactgaattagctcgtttacaagcccaatatggcttacaacaaaccttaggtttattaagttatcgggaacaaacatcagagcctttctggttacgttttggcttaagccaaaacaaccaattactccaccatttatggcctgtgtatactcaatccatgttgcccttactacgcgatgccacacaacaacaccttgagcattttttacaaaactttatgcaactccctcctgacagccctgagcggattgaaaaagcacaaccagcctatcaggccctcaaggcctatttaatgatgagcgaccccacacgtatcgatgcagctttttttacagaaacggtgttgatgctgtggcctgaatataaccaattaaaagaaggggaatggcaaaccttaggaacagagctatttactttctatgcctctcaattgccttatcatgacgaatggcgcattaaacctgatcgtaccttagtatcaggcagtcgcactattcttattcgccaaattggccaacgtaatggcgaattagcgctttaccaaaaaatattacaacaagcacagcataactttgcggatatgacgctagaagatatgaccggagaaaacgatgtcaactttttattaagttcaaccgaaacggtgccgggtattttcacacgtaaagcctgggaagagtctattgagcctgcgattaaaaaagccgtgcaagaaaggcgagaagaaatcgattgggtattaagtgacacacaaaaaaatgcagacagtgatatctcaccagaaaaactgcaacaaaatctgacagagcgctattttaatgatttttctggcagttggttaagctttctcaatggcttacagtggcgagaaacacaaagtctctcagacacgattgatcaactcaccttaatgagtgatatccgacaatcgcccattattgcgctgatgaattcactctcctatcaaggcaaaacaggacgtcagcaggaaaaattagcggactcttttgttaactcagccaaggatttattaaataaagagcaacaaccggtcattagccaaaaagcgacgtttacagggccactcgagcctgtttttgcgccgatattggcttttactgatccacaatcatcggcacaaaacggtgatacattaagcctacaagcttatctaacacgtgtaacccgagtgcgtttaaaactgcaacaagtggtgaatgcccctgatccacaagcgatgtctcaagccttagcccgtagtgtatttgaaggaaaaacagtcgatttatcagaaacacgcgattatgggagtttaattgccgccagttttgggcaagagtggcagggttttggtcaaaccctattggtacaaccaatgtcacaagcgtggcaacagctattagcaccaacatcccaaggtattaatacacagtggcgcaatgcagtagtgaacgattggaacagtgcattcggtggacgttatcctttaaagaatacccaaagtgaagtttctttgccgttaatggcacaatatttacgcccggataatggccgcatacaacgctttctcgaaacccacctaaatggtgtgcttcgtaaagaaggaagtcattgggtaccagatgccaccaatgcgcagggattaaactttaatcctgaatttttaaaggcactagatacgcttagctatcttggcgatgttgcgtttgccaacggagaagcgcgtctgtactttgaattacgtccaggtacttcacccgaaattatgcaaacgcgcctgatgatagataaacaatcgcttatctacaataaccaacaacctcagtggcaacgctttgtttggccggcagatactgtggcatcgggtgcctcattaagttggctcaccactcaaacagggactcgtatctatgcggattattcgggtgtctggggggcgatccgtttactggaagatgcgcaaattacgccttatgcagggagtaccagcagttattcagtgagttggaaaaccttaaatggacaatctcttaactacaccttaagaacagaaatgggtgaaggtcctattgcactgttgcaacttcgtcattttgtgttacctgaaaagatttttttggattag

SEQ ID NO: 304680 - DNA, 1134 bp, Proteus mirabilis
gtgcgatatccacctcgttatcctgaaattccagaagataagcctataaattataaaaaaatattaaagtggttatttatatttattggctcttcacttttcttaactaatattatcgtatcaaatattaaaattgaaaataaagtatcattattaatgatgagtgtaataattcctgttgttgtattatcgataatattcttaatttttttatttttaaaagaattaaataatcataataatgaattatttaaaaaacaatttaataccgacaatgaaaaatggtggttatatcatagtgcctcaatcccaataaaaacatcgattattataggttcaataggtgaaaaccaacaggaatggaaacagattattgataatagaccaacaccacctcaacctatttcaaataatcatgagcaacgtatttattgttcggctcttgtgggaaataagcataatcgagaaaaaatgttagctaagttattagcaaatcaatttataatggcagaagaggataataaagataagattaaaattgataatatttactggaaagggacacctgagagtttaactcagtttatcgaatatttacaaaaatatgatattcctttaccgttaaaaaccatatttataaactcaattggctctttagatacaataatagataactattatttttatcataaagctgattactatagtattgttgcaggctctaatatttctgatcatttagataatggagttctagctgagaccggtttcttatgggttatttcccctcaagaaaaagtataccagttacatcgttgtgaatgtttaaatcatgacgatgctaatgaattggcgtctcaagtgatcaaatattcaaaaatacccgatatacctgataacaatatttccattgataaagatgcttctcatctatttctaacaacaccactttattcatccgataatattgtacaagattatttcggtgatagtacttatacatcaccatttttagctatctcattttctattttgtactgtataaataatgatattaatagctgtggatggatttcaggatatgataacggtcaatatatagcaggggttattaaaaaatatgaaaatcaataa

SEQ ID NO: 304681 - DNA, 2349 bp, Proteus mirabilis
atgtccgataaaataatacttgaacctgtttgggtaccaaaccattttcctaataaagggagactgaaattaactccacaacaaattgaaaaaaattataaacagcgacaaaaggaaaaaagagcgcaccgtgcaagtcttgaggctgtcacgaacaattgttgccgaacattgcatatcagtttcttttttgatggtactaataataatcgtaaagaagatatggaagcaaagccagaaacagccactaatattacccgcttatttgaagcgacccgtgaagacgctgaagataaaggtaaaaaagaaagagagtactttagatattatatgcccggtgttggtaccgccttccctgaaattggtgaatataatttcaccaccacaggtctaatgtatgcaaccggtggcgaaaatcgccttaattgggcattattaatgcttgccaatacgttaattaccgccgcaaatcaaaaagaattagatacagctaaattacgcatatatttaaaagatatggcaaccccgacctacctacccattgaaggaaaagcgcgtcgccgtgcagttattcattctttaattaataaaaaagaaattattgaaggattacaatctgcccctaaaacactcgcgattaagttatatgtgtatggtttttctcgcggtgccgcagaagctcgagcgtttattaattgggtaacacaattatttgataccccagaaggggctgataaacccgttcaacaactatgtggtattgacgtaaaagttgagtttatcggtattttagatactgtaccctcggtggggatagtgcatttagctccgttcttctcagggcatatggattgggctaatggcactcaacagctacccgacgaaaagatatttccaaattttataaggtgttgccgccattttattgcagcccatgaacagcgttattgttttccacttgataccgtaaggcgtcctaccagctggaataaaaataacaaaggggaataccccaaaatatcagatattgaagaagtggtttatccaggtgttcactcagatatcggtggtggctatgtcgtcggtgaccaaggcaaggcctttaatgaccccacgatgctatcatcacatattgtgttgcatgatctttatctgtcagcttttcaggctggagcgccattaaatataaatggagaatccccaaaggatcataaagggcatttaatgagtgatactataacaagagaaatttatgagctttttctaataaaccccactgtaattcaacgttttaatgcttggcgaaatatcacattaggtttgtcatcattatcaccttgccaatcttctgaaattttcaatgcctgtcgctctaatatgtcattagaagaaatggtcgaaaaacagatggcttggatgaccgcttggcgcattgatcgatatgcaaaaatgagctatgcaaataaagatttttataaaaatgcagtagaagaggatgcggatacaatagaaaagagaaagaaagagtcgaaagaggaggaagatgccataaaaacattacaaaaggaaaaaattaaagctaaaacagatgctcttgaagcagattcacttaccggatctcggccttacgaaccaacgttatgtaaaacacaattaaaagaagctgccgaagaatttagggctgattattatgaacaacgcagaacagtacgaaactggaagcaattttctgttgataatttattatctaatatgatgtgtttattgaataccgatgatgagaaaatagaatatctgcgaatgaaaaaaagtggtgatgatatttatcggcaaggaaaaggcttccctttatttttagaaaaagaccatttagaacccgatggtcaattaacagctgaactttttgatgaacagctacacgattctcgtgcttggtttatgcatgatacattacaatcccgtgagccgtgggcaagttattttagctatagaatgatttatgcgggaagtgagaccaataaatcgctatctgtggtagcagccgcagggcaactgatcggtattgccacttttatcggcggtatgggttatgttattaaacaaaaaaacattaaaaatgcattaggcgctttagcaggaacaataggtgcgatgtcaattggatacgaaatcgtcaatgcaacaaccggcctcacattacccatagatccaaccgatgtacaaccaaccaaagatacaggccccattcaggaaatggccaaagcacaagcgatgattaaccaaacccaaggtgtgattgagagtttatctcagataattgaaccacaaaaaatactacaactttcttaa

SEQ ID NO: 304682 - DNA, 540 bp, Proteus mirabilis
atgtccgataaaataaaacgacgcgtcgcccacggggtacttactgggggacttagtatcacgctactgcttacgggctgtgtcgacgcttttagtctggcacccaaacctcaaccccttgccgccggtattcaaggatttaaccacactctctttgaaatttccggttttacgattaacgaaggctacggcagtatcgggggcaccgtctgttgtgtactgcttcccgaacaatggcgacctgatttagtcgcccatatcgaatggagaaaagtcgatgcgagtaaacttccccctacgcctgatatggaccaagtcgaagccatcaagaaatggaagcaacaacttcgtgacaacacctcgcgccatgaagcttgggtaccgatcccgcaatatgatgaaccttgtagcgttaaagtccattttctgccttgtaatgaagtgaaaatcaccacctcttgttatagctattatgaccccgagtatcccatcactgagcccatgaaaatgaaggagccggcagtatgtccgataaaataa

SEQ ID NO: 304683 - DNA, 543 bp, Proteus mirabilis
atgtccaataaaataaaacgacgcgtcgcccacggggtacttgctggaggacttagtatcacgctactgcttacgggctgtgtcggggcttttagtctgacacccaaacctcaaccctttgccgccggcattcaaggatttaaccacacccaatacagtattaccggttttacgattaacgaaggctacggcagtatcgggggcaccgtttgttgtgtactgcttcccgaacaatggcgaccagatttagtcgcccatattaagtgggataaattagataaaagtaaactctctccccgccctaaatttagccaagtagaagcctataaccgctgggaaaaagaactagaccgatatacgacttatcatgaagcttgggtaccgatcccgcaatatgatgaagaagtttgcggtgttgatgtccattttctgccttgtaatgaagtgaaaatcaccacctcttgttatagatacggtgatcctgagtacccgattaatgaaccgcataatatgaaggagcgggctgtatgtccgataaaataa

SEQ ID NO: 304684 - DNA, 540 bp, Proteus mirabilis
atgtccgataaaataaaacgacgcgttgcccacggggtacttgctgggggacttagtatcacgctactgcttacgggctgtgtcggggcttttagtctggcccccaaacctcaaccccttgccgccggtattcaaggatttaaccacacccaatacagtattaccggttttacgattaacgaaggctacggcagtatcgggggcaccgtctgttgtgtactgcttcccgaacaatggcgacctgatttagtcgcccatatcgaatggaaaaaagtggataaaagtaaacttccccctccgcctgatatggaccaagtcgaagccatcaagaaatggaagcaacaacttcgcgacaacacctcgcgccatgaagcttgggtaccgatcccgcaatatgatgaaccttgtagcgttaaagtccattttctgccttgtaatgaagtgaaaatcaccacctcttgttatagctattatgaccccgagtatcccatcactgagcccatgaaaatgaaggagccggcagtatgtccaataaaataa

SEQ ID NO: 304685 - DNA, 258 bp, Proteus mirabilis
atgaaaaagattattagagtaggtgataccttaaaaccctatgggggctgtgtactcactggtaaatattctgcttatggtaaacctgtcgcctgcgttggtgaccaagtaaaatgtaataaacatggtgatggctatattattgaaggagcttcaaattcaacgattaatggtaaacccgttgcattagatgagcatcattgttcttgtggttgtaccttagtgagttctctttttcaaatggatattaaaccttaa

SEQ ID NO: 304686 - DNA, 777 bp, Proteus mirabilis
gtgaataaaatctcgccatccaaagacattacaatgcaatggataaaacagttaaaactcattactgaaaaaacacaccttgattatatagacattattgttgaccaatcgggattagagacccctatcgtcccagcgttaatcaaaatggataatgagatcagatggttttcccttttcactaatatgcctgaagaaggctttttagaacaagcacctctgcttattcgtatagaatggaataagagtacacatttaattttattagaggagctatttgaattactttactcagagcctcgattattaataacatccaccccccttccatttaatatgttatctacttttttactttctctttcagaagtcgaatggggatttaagtcttgtttacttcgtttttatgatacgagagtattcccaacattaataaaaaatattctgaccacagaacaacaaaaaagatttactgatattacgtttatttggggttggttagatagagacaatgagatgagttggttattaggcagttatcagcctgatattgaagaacaatcatttccaataatgcagtttaatgatgaacaaattaataaaattgggtgtataagtgatgcagaagaactaatggcttataccgagtttgcagatctatcgataactaaagaaaaaaacttcactcaattataccaatgggctattcaagcagataatagtgattttataggaacattagaagagtatattcgaaatcacactgctaaagtttaa

SEQ ID NO: 304687 - DNA, 2400 bp, Proteus mirabilis
atgaatttaaaaaaaacaactcaggctctacttaatggacaaaatcgctatcatcttaatgtgcaaggatgtgatgttttatttgatgtagaacattttaccggacgtgaggcaataagtgatacctatcattatcaagttacctttacttgccaagctcaagatttgcaacctcaacaactgttgcgccgcagtgccactctctcctttacccctcctatcaatagtatggccgacttagtcactcaagagccgattaccaagcaggttcatggtgttatcacgcaatttcgccgtctatctggctctgtggatgaagcgcgttatcaattagtgattgagcctacctttgccttattgcgacatcaaattcgtacccaccgattttttcttaatcaatcggtacccgatgtcgtcagccaaattttacgtgagcataattttaaagattgggaatttgagtttatcttaaaacatgaatatcccaaacgtgaacaaatcaaccaatataacgaaagtgatcgccaatttattgaacggctattaagtgaagtagggattttttactctttttatttgcaagagcaaactcaaacggaagtgatccgctttgccgatcgacaaagtgcttatatttttgataaaaacttaccactcaatagcccctcaggcatgagtgatagccatcaagaaagcgtatggggattatcgctacatcatcaagttgttgagcaaaatgtctttacaaaagattataaccaccgcctggcacaagacacgctaatttctgctgtagcggatatgacccgcggtgaaggagaggatattcattatggtgaagtttatcattataaagctagacatcttactcgtggtgataaactgacccctgaagccgaaacagccaacttctgggcaagacttgatcatgagcgttttcttactcatcaaacgcgcttaaaaggcgagagtaatgcggatttcttatcaccattacaagtgctcaccattacggataacagtttaacttcctcattacctaccgtatttcaatcacccattttaatcacacggttacgctttagtggcggacgagaaaaagcactacaagtacgatttaacgcggttccttacagtgaaacactgtgctggcgaccagcgcttaagcctcgtccagtcattaccggaacacttactgcacgcattaccagtgctaaagataacgatatctacgctcatcaaaacgaagatgggttttattgggtaaaatttgatgcagatcgtgatgaaaaaccgatgggctatgagagcatgccagtgcggcttgcaaaaccttatgctggcgatacttacggtatgcactttccgttaattcaaggcacggaagtcgccattgccttccatgaaggcgatcctgaccgcccttatattgcccatgcattgcatgattctcgtcatcctgaccatatcaccgataaaaataacacccgcaatgttattcgtactccagcaaacaacaaactgcgaatggaagataaacgcggtgaagagcatatcaagcttagtagcgaatatggcggtaaatctcaattaaatttaggacatattgtcgatgccaatcgtgataaacgtggcgaaggtttcgagttacgtacagacagttggggagcaataagagcaggtaaaggattatttattagtgctgataatcaagccaaagcaggtggtgaagtactaggaatggagccagcaatatctctggttaaaggtgcaattaaccaattagatgattgcagagaaatcactcaagcacatcacaatctccagccagaaaaagaaggattagataatcttttaaaaaatactgataaattagcctcaccctctattcttatgcatgggcctgaagggataggtattgttactgatgaaacacttcttatgcaaagtgttgaagcgctttatgcgcaaactaaaggtgaaatgcatctatcaagcactcaaaaaatagccattaatgcatatcaacaaatctcaatgttgtctcaaaaagagggtgtccgcattgtctcaggcaaaggacctttcgaactagaatcacacggcgatatctttgaagcaacagcgcttaaagatattacagtgcaatccacccaaggtcatattcagctaactgccaaaaatggaattactttaggctgtggtggtggatatataaaaattatgcctgatggacaaatcgaaattcacactcctagccgtttaagcttaaaaggacaacatgtttggagtgagccggctagtgaagattttcctttacccgatcttcctcaatctgtttgtaaagagtgtttaaaaaaagcacaagaaaacgctatgggagttgttatccgtgaataa

SEQ ID NO: 304688 - DNA, 2523 bp, Proteus mirabilis
atgtccataaatatactcactaataaacaacttcatttcgcacttatccataccattaaagctagtttaaacaatcagcatgtaactaaaggtgctccttgctgggctcccccccattttcctaatcaagggcgtttggcactaactgctcaacaaataaaagagaatattaaaaagattgaggcggaagaaattaagcatagacaaaacatcacaaaaaaagaagccattcaatgttgcaaaagcctacatgctagctttttttttgatggcaccaataacaataacaaaaatgatacagataaagcagatccaccacaccctacaaatgtggcaaaactttatcacgccagttctccagatataaaagaagtaatggataaagggttttatgcttattatatgccgggagtaggtaccccctttcctgaaattaaaacttacgaatattacagttcagggttaacctatgcaacggggggccaagcccgtatacactgggcacttattcaaatatacaatacgctatatcatgctgtaataggtcatgaacttactttagctgaaatgcgttcattactgttaaaaatgaatgatgcgaatagctataatccagctaatattttattagaaccatttagagccatcagaaataaaattataaaaaataagcctaaactggttgctctaaaattatatatttatggcttttctcgaggtgcagcagaagccagaacatttgtctattggttagataagtttcttacttatttatatacacaagctccttcattaagacctttaatgtttcccaaaggaactatctatggcattcctgtttctgttgaatttttaggtgtatttgataccgtacccgctgttggaatagctaatgttatacctatgtttactggtcataatggctgggcaaatggcacccaacagttacccaaatcagatttaattaaaaactgttatcattttatggcagctcatgaacaacgccaatcctttgctgtcgattcaatccgtacccccgaaggaaattacccccctaataccatagaggtgatttacccaggaatgcactctgatgtgggcggtggttatcctcctggagatcaaggtaaagctttagctggtcatggtgagcttatctctcaaattacattacatgatatgtatgcagcagcaatagatgctggagcacctttagcattaagcaaagagtcttttttattattatcgcaacaacaacaacatttttataatttcagattgatggaacaatttatattagatgaatttaaaatatcaaattctataattaataaattcaatgcatggcgagaacaaacactatcggaaataacacaagaacaacaaagtgataatataaaatcttatcttcctaaccgttttattagtactgatatcgaaagtattattgaataccaacttattttaattactgcatggcgtattgggcgttatgcctcacctcgagattcagcaatgaatcttacacagcaagatttctttaaaaatgcgtcacagcatgcagatataaaagtacaaccgtatgagccaggatttagccagcaagccagcactgttctagcaaaagaatattcgcaaatagaaaatcaaatagccgaaactcgcaaaaaaagagaggatgagcaaaaaaaatatagtgatctcagtaattggctcccccccacagaacatataggtcgacctttgtttgatgcaaccaatgcaagaggtcaattttgggaggcgtctttagaatttaaagccgactttaatgacttacctcgccctttacctttaattcaaatgacacttaatacaaaaaaaacttgtcaggcaattgattattatcactctatagataatccttattatcagccagatactacttgtgattcgctacctgataataactttcctgttgatgttgtaggaactgcaattgttttaaggaatttagatggtacggcaaaagaatatgttcatgtaactacttatcaagatgaacgttatgaatatttaagtttaatagaaaaaagtaaagaaatatattcaattttagagcctattttaattaaaaatgataacgatactgaattagggaagatagtagatctttttgataatcatatacatgattcccgcgcttggtttatgcattctgagagtggacttcgagagccttttggtagttattttttatctcgtatgatctattttggtgacaagtggagtaaatccatgaagattttatctatcgatgaatttatccatcgagatgaaaataataaaaaatatataaagcttaattatttgcctacttatggtttagaacttatcagtaaaaataatggtagtgagcttaaaaacaaacagttatttcaaaccaatgaggttacaaaagtaataaataaacttaatgaggttaaaaagcaccaaaatacacaaaacatatcatcttcattaaatagttatattaatacttaa

SEQ ID NO: 304689 - DNA, 519 bp, Proteus mirabilis
atgtccgcaaaattaacccgcaaaaaacttgcatttatcggggtaattattgcccttattgccgtctattttctctttattcaaaaacccaaagtggaatatctccccggtaatttacatggttttaatcatgtgaagggaacttcggttaattggtttaaagttaatggtaattatggcagaggggctatgggaacttgttgcattatggtgccaagaaaatggacaccgaatcaaaccgtattagtggaatgggaagtcgaccctaatgcctatcccacagattcgcccagtgtaaccgatcctaaatttgatgcctatatggaaaaacacaaagccaattatcgccattacagtaaagttgttgaaattccccaatatgacgaaccttgtagcgtaaaggtccactttctgccttgccaagaagtgaaaattactctttcttgttatgcaaccaatcaccctgattaccctattaaagagccaagttttatggaggagcctgcaatatgtccataa

SEQ ID NO: 304690 - DNA, 525 bp, Proteus mirabilis
atgtccgcaaaattaacccgcaaaaaacttgcatttatcggggtaattattgcccttattgccgtctattttctctttattcaaaaacccaaagtggaatatcttcccggtaatttacatggttttaatcatgtgaagggaacttcggttaattggtttaaagttaatggtaattatggcagaggggctatgggaacttgttgcattatggtgccaagaaaatggacaccgaatcaaaccgtattagtggaatgggaagtcgaccctaatgcctatcccacagattcgcccggtgtaaccgatcctaaatttgatgcctatatggaaaaacacaaagccaattatcgccattacagtaaagttgttgaaattccccaatatgacgagccttgtagtgttgatgtccactttctaccttgccaagaagtgaaaattactctttcttgttatgcaaccaatcaccctgattaccctattaaagagccaagttttatggaggagcctgccatatgtccgcaaaattaa

SEQ ID NO: 304691 - DNA, 2670 bp, Proteus mirabilis
atggaaaatcaatctgtcatgctattacgtcgcttaaatccttattgtgcaaaagcgcttgaagctgcggcctctctatgccaaacacgagcccacgctgaagtcactattgaacactggttattaaaaattttagaacaaggtgaaagtgatatcactgttttagcccgtcgttatgaatgggatttatcggcactttggcaggatcttcttgatacgattgatcaatttcctcattctgttcgaagccgaccacaattatcaaagccattattagaactcataaaaaatgcttgggttattgcttccttagatgaagatgtggaacatattcgcagtgtacatttgctaaacgcgatagcaaaaaaaccttctcttgtgcaattagatgcgctttggccgttaatgacattgggtgaaacacaactacaacgattaagaccattgttagatgctcaatccgatgaaagaccagaaattcaacaaattgacttgcacaaccatctacctgaaacatctatcacctccgaggctaacgccgagaaaaaggctacagacaactctcctattattggtgatacattaaatgatgcgctccttgctgtcttaaataagttcactattgatgtgacagaaaaagcacgtcttggcgagatagatcccgtttttggccgtgatgatgaaatacgccaaatggtcgatattctttctcgtcgtcgtaaaaataatcctattttggttggtgaaccgggggtaggtaaaacagcattagttgaagggttagcactacgtattgcagagaaaaatgttccaataagtttgcaaactacatcattgcgtactcttgacttaggtttattacaagccggagccggtgtaaaaggagaatttgaacagcgcttaaaaaatgttatagatgctgttcagcaatcgccaacgcctattttgctttttattgatgaagcacacactattattggtgcaggcaatcaagcgggtggcgctgatgctgctaacttattaaaaccagctttagcccgcggggaattgcgcacaatagccgcgacgacttggtctgaatataaacaatattttgaacgtgatgcggcattagagcgtcgttttcaaatcgttaaagtcgatgaacctgatgatgaaaaagcctttttaatgcttcgaggcctcaaatcgcgttatgcaaaatatcacggtgttcatatcactgatgaagcggtaaaagcagcagtgactttatctcgtcgctatttaacgggtcgccaacttcctgacaaagcagtagatttgcttgataccgctagtgcgcgtattcgcatgagtttagacactttaccggaagagctgactcaaattaaagctaaacgttattctcttgaattagaacaaaaagccatccttgatgacattaatattgggcattctacaaatcaaaacaaactatctgaattgtcggcacaagatgcacagttagctatccaattagagcatttcgaacaacgttttaaccaagaaaaagagattattattcagttgattgagagtagaaaaaatatagaaaatagtgaaatctcagcacaattacagcaacaactgatagatttacaacaagatgctccattactcaatcctgatgtggatgttcgtactgtcgctacagtgatcgcagactggacaggtgttcctctttcaagccttcttaaagatgaacagattggtttattagaactagagagtaacttatcaaaacatgttgtagggcaagacagtgcattaatttctttagcgcaacgtttacgtgcttcaagaacaggcttagtttctgaaaatggccctcaaggcgtttttcttctagtaggcccaagtggcgtaggtaaaaccgaaacagctctcgcattagccgaatgcttatttggtggtcaaaaatcattaattactattaatatgtcagagtaccaagaagctcatactgttagccaattaaagggttcacctcctggatatgttggctatggacaagggggggtacttactgaggcagtacggaaacgaccttatagtattgtactattagatgaagttgaaaaagcacaccgcgatgtattaaatctattctatcaagtttttgatagaggttttatgcgtgatggtgaaggtcgtgaaattgattttcgtaatacagttattttaatgactgcaaatttaggcagtgattatttaatgcaacaattagaagatgaaccattaagtagcgatagcgatttgcaagaaacgcttcgccctattttacgtgaccatttccaacctgcattactggctcgcttccaaactttaatctatcgtcctcttgatgctactgcgttacgcaccattgttgaaatgaaattaaagaacgtaattaagcgactttatactcactaccgcttaactggtattgttgaagaagccctttatgacactattgttgatgcttgtctactaccagatacaggcgctcgtaatattgatagtctgcttaatcagcaaattctaccgattcttagtcagcaactgcttttacgccaagctaatactgaaaaatcacagtatgtaattttaggttttaatgaagaggaaggtatcacattaagctttagtgatgaattacctcactga

SEQ ID NO: 304692 - DNA, 492 bp, Proteus mirabilis
atggctattcctatttacctttggctaaaagatgacggtaatgctgacatcaaaggctctgtaaatgtacaagatcgtgaaggtagcatcgaagtcgttgcccaagatcataacttatatattccaactgataacaataccggtaaattaacgggtacacgtattcacaccccgttcatttttgtcaaagaaattgatgcttctagcccttatttatacaaagcggttaccactggacaaaccttgaaaaaggctgaattcaaatggtatcgcattgatgatgcgggtcaagaagtagaatatttcaataccacacttgaaaacgtcaaagtggtaaaagtggcacctaagatgcacaacatcaaagatccactaaaagaaaaacacaaccacctcgaagaagtggaattgcgttacgaaaaaatcacttggacttacaaagacggcaatatcattcattccgattcatggaatgaacgtgccactgcgtaa

SEQ ID NO: 304693 - DNA, 1737 bp, Proteus mirabilis
atgcaaaggaatcggataaaacaatgtattacattgttttcagcaagcttattgctatggttaatatggggtttctggtcttttggtaaagagatttcctatttcttcacagcttttattgtgctgatcacaatagcgctgtgtggatggtttttccgccgttccagagaacaatcttctatagaatcaactccgttagcatctttccctccagaacattaccggggagctgttattgttgtttgtggacaagcgcaaactctttcccaaggacaaacagcacacagggaaacagcaaagggttggtatatctgtgcatcttcccctgtagatttactcaatatcattcaaaaaattattgatactttgccgtctcagttaagtcgcttatctttactttatgccgtatttcctgagcaaatgagtgtgtctgaagatatgacacaagagttacttaactggcgtagagcgattgcccaatgtaataaaaaagtcggtaaaacattgcctttttgggtttcgctctatctcaatccaccagcaatgaccgcattttctatttttaatgataatgcaaccagcccttggttaacttatcgtagcagtcaacaagagttacaggttgtctccgatgaaatttcaccacaacctttatcagcttggttatctacacagatccccaatgaagaacaccaatttgcttacagcttatggttagataacttacttgcatggctaaatagtgaatttacgcctcggttaaccgcagtagagtctggtattcctacgctatctccttctgcatgggctttacgatttacctcagtttctccggcagagaataatagttgggcacaatttattcagcacaaaaccggactgttgccaattattccgccgactctcacagttaacaataatactttaatgcttcctgatgtacttattgagcatctaactcatgatactaatttacttcaggtagagactctgcttggtatctctggtgctctatgtggcctctttctagttggggctttagcgggtagttactatcacaataaacagttagtttataatatgggcaatgatattcatcattttaatcgcctatccgccgatgctttagagcccaaaaaagtggcttatcaacaactgatgtcggatgcaacactactttcacaatggcaacgggagggaaatcccgcacgttattccttagccctttaccaaggaaacgccattttaccttatttgcatacagtactaagctcatggtcaccaccgccaccgcctccaccacccgctcctgtcattattcaaaaagggccggaaatggtgacattagatagcttagcactattcgctacaggtcaatatgaattaaaaaatgaagcaaccaaagtattagtggatgcgcttattaatatcaaagcaaagccaggatggttaattgtcatttctggttataccgacaataccggtaatcctgaatttaatcagaaactttcgctaaagcgagcagaagccgttcgtgattggatgatcaaaaccagtgatatcgcaccttcatgttttgctgtacagggatatggtcaacatcaacctgtagcagataactcaacactggatggacgggctcgtaatcgacgagttgaaattcgcttaatacctcaagctgatgcttgtcaggtattagctgatgacctaacgccactgacggatggtggcaactaa

SEQ ID NO: 304694 - DNA, 666 bp, Proteus mirabilis
atgataacgaatataaaaacagataagaataacaccattgatgtcatcttcgctgatacttggttaatggtatgccagttacgtcaaggggcagaaattcacgatggtaaaaccttttataaacgagtttgtgagcttatcgataaaactcgccaacaattgactgagcatggttattctcaacaagcgattgaaaatatgctttatggacaatgtgctttgattgatgagagtgtcatgaatagaagttcgcgtgatgatggttatatgcaatggttacaatcccccctgcaagcaaaatattttaatacgctagaagcaggcgataaattatgggatagactaaaaaatattttaaatgaacattctcctaatcaagatgttcttgtctgttttcatcgcatcattactctaggttttgttggtaaataccgccaaacagacgcgcctgagcgtgaacaaattatcgcattactcaataatcaacttccagcttatgcattatcaagccaacttccattagtcataaagccaaaacatcgaattaatcgccgtcatttgtattggttaacttgggtaggtggttttattgttattgccgccttgtggtggggcttttctgcgtcattagataatttacttcaacaatgggtaacgcaaggatag

SEQ ID NO: 304695 - DNA, 1338 bp, Proteus mirabilis
atgaaaatttatcgccccctctggagtgatggggcctttttggcccctcagcaattccaacaacaagcacgatgggataactatctaattagcaccatcgctaatatgactattgcatcaacatggggcgtgatcagtgcagaatttgatgaaagtgcacttacaatttcacgccttagcgcacaaaagttagtcgtgcgcttccctgatggtacactgatagataccacactggctgataatttaccgccagtgaacgaccttagtcattattctcaacatcaaacattagatatcgtactagcattgcctctattacaagctaatggtggtaatttaatgcaagaagggcgcacagaaaggccactgcagttctatcaagaatgggtaaaagttcaagatttaatcggtcaagaacaaaccgatatcgccgtattacgtcatgctattactttacgttatgcccatgaagaaaatagtgcttacatgacttgccctgtggcaaaacttattcgtaacggtcaaggcgcttgggaaatagataaacattttattcccccattacttagttgccatgctagtaacgaactgactacattattttcagaatttatgcaccgattagtggcaaaacgccgccgtctaatgactatgcgacgagaaaataatgagcagatggctgattttgccgttgctgacgtttctctattttggctattaaatgccattaatagtgcagagcctgtgttaactgaatttatgtcctctatgggacgccacccagaacttctttatcgagaattagttcgacttgctggtgcattacttacattttcactagaacatgaaaatagcgatattcctctttatcaacatgaatcacctgaaaaggtatttccacctttattcaatctactcaatacgcttttagaagcgagtttaccttcacgagttattactatttctcttgaaaaagaagggccattctggcgtggtgaattacatgatgctcgactccgtgaagaggctgatttctatctttctgttcgttcttcattgccagctcacctattaatcacacagttcccattattgtgtaaggctggtagtaatgatgatgttgcaagtgttgtcaacgtggctttaaacggtattccgttacaacctttaactcatgttcctgcagcgatccctttacgcttagagaatcactattttgccttagagctaaataatccggcggggcaagcgatgctcgcatctggtcattgtgctttttatgtaccgggaaccttgggtgaaattcaactcgaactttttgcggtcttacgctcatga

SEQ ID NO: 304696 - DNA, 1545 bp, Proteus mirabilis
atgtcagtcaatagcgaaaacgtgtcaacaaatagcacaacaacagtacttaatgaatccactcaaggtggagtttatgcttctttatttgaaaaaataaacctaacccctatttctgaaatgagtgatattaatgtatttcaggataatagtgcccttgcagatactacagccgatgaacgtgtaactgcagctgtgcaagtttttcttgaccgtttaaaatcatcaggtcagaaagttgagcgtttagatagaaatttgcttgatcatcatattgctgatttagataaacaaattagtcaacaactcgatgaagtcatgcatcactctgactttcaaaaaattgaatcagcttggcgcggattaaaatttttagtcgaccgcaccgatttccgacaaaatgttagaattgagctactcgatatagctaaagatgatttacgccaagattttgaggattgcccagaaacaatccaaagtggcctttatcaccatacttatatcgaagaatacgatactccaggtggcgaacctattgccgctattatttctaactatgaatttgatcgtggtcctcaagatatcgcgttactacgtaatattgcgaaagtttctgcttctgcacatatgccattcataggctctgttggtcctgccttttttggtaaagagtccatggaagaagttgctgcaattaaagatatcagcaactattttgatcgtgcagagtatattaaatggaaatctttccgtgactctgatgatgcacgctatatcggcttaacgatgcctcgtgtgttaggtcgtcttccttatggtcctgatactgtacctgtacgtagttttaattatgttgaggaagttaaaggtccagatcatgaaaaatatttatggactaatgcaaccttcgcctttgccgctaatatggtaaaaagttttatcaataatggttggtgtgtccaaattcgtgggcctcaggctggtggggcagtaaaagacttgcctattcacctttatgatttaggtactggtagccaagttaaaattccatctgaagtaatgatcccagaaacacgagagtttgaattttctaaccttggttttattcctctttcttactacaaaaaccgtgactactcatgtttcttctctgctaactcagcacagaaacccgcgctctatgatactgctgatgccactgcaaatagccgtattaatgctcgtttaccttatattttcctactttcgcgcattgcccattatttgaaattaattcaacgtgaaaatatcggtacaacaaaagatcgccgtttattagaactggaactaaataactgggttcgtggtttagttactgagatgacagaccctagtgatgatttacaagcttcacacccactgcgtgatgcaaaagttgttgtagaagatatcgatgataatcctggtttcttcagagtgaaactgtacgccgtacctcatttccaagttgaaggaatggacgtagatttatcgttagtgtctcaaatgccaaaagcaaaagcataa

SEQ ID NO: 304697 - DNA, 498 bp, Proteus mirabilis
atgtccgatagctttcaaaacgaagtaccaaaagcccgtgtcaatattaaacttgacctccatacggggggagctcaaaagaaagtggaattgccactaaaacttctcgcggtcggtgattacagcaacggaaaagataaacgggttttatcggaaagggaaaaagttaatattaacaagaataatttcaatagtgttcttgctgaattttctccttccgttaatcttacagtaaaaaacaccttagcaaatgatggcagtgaagaaagtgtgaatttgtcatttaaagatatggctgattttgaaccagaacaagttgcacgccaaattcctcaactacgagcaatgctcgcaatgcgtaatctactacgcgatttaaaatccaaccttcttgataacatcactttccgccgtgaattagaaaacatcctcaaagatcccgcgcttagtgatgaattacgtgaagagttagctcaactcgcaccgaaaaaagattaa

SEQ ID NO: 304698 - DNA, 921 bp, Proteus mirabilis
atgttaagtaaaaacggcgaagccccaactgcggtaacagtcgaggcttctaatttgccagaaactaacgaggtaactagcatgacaagtatatcaactattaatgtaccattccacggagataatctttatttagtcaattatgaagggcaaccatttgttgcaatgcaccctttcattgaaggtatgggtttagattggtcatcacaatatacaaagataaaacaaagatttagaacctgcgttgtgaatatcacaatgcagcttccatgtgataaccagcgacgtagtgtagtgtgcttggcgctaaaaaaattaactggctggcttcacactatcaacatcaataaagttagacctgagatccgagataaagtacaagcataccaagatagaagcgacgatgtactttacgaatactggactactggtgaagttaagaaaaaacacaaatcaactgttcaagaacgcaacccattaaagaatgctgttaatctattggttagcaagaaaggcattatgtatccagaagcttattctcttgttcaccagaaatttaatgttagtagcattgaagagctaacagcagatcagatacccgatgcggttgagtatattcacaagttcgttcttgagggtgaatacattcctaaacaggaagaaaatatactttttgaaccaaatcaaaactcaatcaccgtaaccataccaaaagaaggaagatggttagtttcttataaagatggaaagcaacaagtagttagcgttgatggtcataacgttgtcagtgttgaatacattcaaaaattacaacgtgactctaatgcgcttattgagttactgcaaaacttccgtctacgcacccaagttatgcaaggtgagaaaagcggagatattttaaacactccgttaattgcataa

SEQ ID NO: 304699 - DNA, 891 bp, Proteus mirabilis
atggcgctagactcacaaaacaccgtttcactatatgattttatatatctagataaaccaagaattcttactcttctcgcccagctttctagtaatggggtacagcaatccctaaaattaattaatggcgaaaaaacctcaatttctgttgagaaaaaaatgggagcaaaagctggaattctggggtcaggagtttctggggacggaggtaaaaagacacaagatgattccacagagtcaattgaatctattcatgatgtgtcttggtcatcacctatacaactgttagatttgctaagtgagttgggagtaatacacaatggaactgaaggatctagccttgggtctatcgtaattgctaaaggtggtgtgagaatatttgacgttatgagcttaaaaaaagcacttccagttattggtgcaatgtttaacgccggtcttgatcagccatcccttcctccaaaagcaaagcaaaaaaaatcaaaaaatattgaagatattgtgattgaaggtggtttaactattggcatggttggcagcatgcttgattttgttaacgattcattacagatggatttatttgaagaaaacggcaatgctacatggatgactctatccatagatggtctaacaataaattctgctgatttagctctgaaatatggctcacgaataccaggggaatggattgtaatcggaataatagactcattaccagatcattactcagagcagtacattgagataccagatgacaataaccccatgaagagtggattatctggaatgctagatgcaattagagataacatgggaaggaaaagtaccagttacagtcttaccccgttaatggtattcagaaaagcaattacctcagaaataaaaagctga

SEQ ID NO: 304700 - DNA, 192 bp, Proteus mirabilis
atgatggctaaaaacttaaaacataaaaaacaccaatgtgagacatcagacaatggtgagtatcaggtgtttatggagcaggtggaggcccagatagaaagcgctcaattatccatagctgagaaaaaagctgaattcaaaaggattaaagagaatggcgctagactcacaaaacaccgtttcactatatga

SEQ ID NO: 304701 - DNA, 159 bp, Proteus mirabilis; identical to SEQ ID NO: 302387

SEQ ID NO: 304702 - DNA, 687 bp, Proteus mirabilis
atgaaaattgtaaaacaaacgactgtcaataaaaaaataaaatataatagatatatactgagttctgggctatcaattgtattttcttctttatctattgctatttacactagaataaatcagtttatgatttcttatctagatggtgaatatagtttaggaatttattcagttgcgataatattatcaagttcatgggctttcgttttaacttctttaataagttcaacgctaccatctatatttggtgaaaaagatgacaatagagctataaaaataggtataaaattaaatattattataattgtaatatcactatttgtgctttcttttattcttttgtttggtgagtttttcatcaatttgctttttggagaaaaatatattcctgcttattccttattaaaaattttatgtatttcaacaatgtttgcaaatctaggaaccttatcagctcgatttatcatacgttcctcaggatattcttttctttcaaaaaaaatgttcatcatggttttgttgagtatacctatttcttattatcttataaaaagctatggtttaataggcgcagcatatagcgtattaataatagagtttctatcgctaacattaatgaactattttttcaaaaataagattatatggaaactccatatagcaacattaaaaatgaatttcaaatga

SEQ ID NO: 304703 - DNA, 2040 bp, Proteus mirabilis
gtgaataacactgctataaataccgcctctttaagttggaatgaacttggtactccgatttcaaaacagtttgatgatatctatttttccaaccaagatggtcttgaagaaactcgacatgtattcctacatggaaatcattttccatctcgttttggtacacatgtacgctctgagtgtgttatagcagaaaccggatttggcacaggattaaactttttaacactgtggcaagccttcgagcaatttcgtcatcactcacctgatgcgtcattaaagcgtttacattatgtcagttttgaaaaatttcctctgactaaagctgatttgcaaacagcccatagccattggccagaactagcacaatattcaacagcgctttgtgcacagtggcctttacctattgccggttgtcatcgtcttattcttgctaatggcgcgataacgcttgatttatggttcggtgatatcaatacattactgccacaaactcgccaagctttacataataaagttgatgcgtggtttcttgacggctttgcaccaagtaaaaacccacaaatgtggagtgaaacattatttcaagcaatggcagactcgatgcgtgaaaatggcacttttgccacctttaccgcagctgggatagtaaaacgaggattgcaacgtgttggttttgaaataaagaaaataaaaggctttggtcaaaaaagagaaatgttaacaggggtatttccccatcctcctgccaatgcatttgttccctactatgccagaccttgtgctacacaaacaaaagatatcgctattatcggtggggggatcgccagtgcattaactgcgctcgcctgcttaaaaagaggcgccaaagtcacgctctattgtgaagatacacatcctgcggcaaatgcctcaggcaatcggcaaggtgtgttatatccattacttaatggcaaatctgatgagttagaacactttttcactagcgcttttttatatgcccgccgttattatgatgagttaaaccataaaggcgtcaacttttcacatcaatggtctggtgttgcccaagttatctataatgaaaaagtacgcaaaaaaatagcgcgaataatcgagcattccacacctttttctcaacttgctcattatgttcatcaagatgaaatgaattcactttgtggattagccatcaaccaagatggtcttttttatcctcaagcaggttggctttctcccacagagttaaccaccaatgcattaaaatacgctcaacaacaaggtctcaagctactctttgaacatcaagtcactcaattaacctcacaacaacagcattggcagttagaggtgactcaccaagcaacaacgtataaaacacaacatgattgcgttattttagctaatgggcaccgtattactgattttatacaaagtgaaaaactgcctatcagtgcagtaaggggtcaagttagccatatttcaacgacacctgatatcgcacaattaaaagcggtgctctgctatgatggctattttacgccggttgatcctcaagataatctgcattgtgttggggcaagctttcgtcgtgatcgactagatttaaatgtttcaattgaagagcaacaaaataatcaatggcacctcacacactgtttagcacaatcaccttgggcacagcaggtagattttagtgataacgatgcgcgtgtcgggatccgctgtacaataagagatcaccttcccttattaggtgaagtgcccgattttgaaaaattagttgtcgcctatacgcatttagatcgatttaagcgtagaaagcaaacacctattttggcgccgagttatcatcagctttatattattagtgcattaggttcacgtggtttatgctctgcacctttatctgctgagatcttagcaagccaaatctttgatgagccatttcctgtagaagatagtgtgttaaatgccttacatccaaatcgtttctgggtaagaccattactacgcggaaaagctattgaattaaaatcatag

SEQ ID NO: 304704 - DNA, 963 bp, Proteus mirabilis
atgagtggttatgtgtatgcagggtttccaagctctgtaggagtcattattggtggttttttcctcgtgatactttttaagtggttacgatttgcattgcaagacaataaattacccactgctacaatgccagcaacaacagagcctgagcccgttttatcgtctccagcaacagaaagcccagtaaatcagttattacccaaagaatggggattatatgttgcagccccttatgctgtcatgaatgaatgggcgtataacgaatataatcaaggtaaagatgatggtgggctatcagcggcttggggagttaatgatcggtgggatttaatctaccaattattttggttgctgactcaaggtcataccaatgacttttaccagttacgtgaccagattttgaatggcaaagaagaagatattcaatcattaaaaaacgatattttattatctgatttaactgaaaatgataaaaatgaacgtttatggcaaatcgatatgatgaacaccaatcgaatgaatatccaaaatgtaaaatatcttatttgggatctttgtcgttttaacaagctttgcttagaaggctgccaacaaggttatattactcagcaagaagcacaaacatggtcattaatgagtgcatcaatgctacgtcgtatttatgatggttgggaagatatgtggcaaaactttattgctactcgttggttatgggcaagtggtgatcaaaattgggcatcatcacatcaaacattttccgatgtcgtacaaaatatactcaaagcagaaaataccttagcgacagaagaaaactgggtaatggagctacctccattagatttaatgtcttttacacgagccgtagctggattaggttttatgaaaaatgatgtgcctatgacactggctgagatagaagaaatgatcagcgaacgcattactttaaaaacacttaatagctaa

SEQ ID NO: 304705 - DNA, 936 bp, Proteus mirabilis
atgcgaaatcgcacgctaagtgatttagatcgtgttgtagcccttggtggaggtcatggccttggacgtgtgctttcagcactctcctatttaggaactcgccttacggggattgtcacaacaacagataatggtggctccacgggacgtattcgtaaagacgaaggcggtatcgcgtggggagatatgcgcaattgtattaatcaattaatcacagagccttccgttgcttctgcgatgtttgaataccgtttctcaggcacaggagagcttgctggacacaacttaggtaatcttatgctaaaggccttagataacttaagcgttcgtccattagaagcaattaatcttatccgcggtctacttagagtcaatgctcatcttattcctatgtcagaacaagcggttgatttaatggccattgatgatgaaggaaatgaaatctatggcgaggtcaatgtagataatttaccgaggatgcctcgtcaattaaaactctatccagacgtcaccaccacacgagaagccattgaagccattgagcaagctgatttaattttaattggcccgggcagtttttttaccagtttgatgcctttattgttgctacctgatttagctaaagcattacgtcgtagcagtgccactactatttatattggtaatttaggtaaagagcttagccctgcggctgcaagtatgacgatgtcagataaaatcgccatgatggaaacctatattggcttacaaactattgatgctgtgattattagtccagaaacacaatatgaatcaatgaaaggacgattaattattcaagcgcaattagaggcgaaagatattccttaccgtcatgataggcacctattaagtaaagctattgaattaacacttcagcaattaggtcaacgtaataccgcttgtacagcgagttaa

SEQ ID NO: 304706 - DNA, 927 bp, Proteus mirabilis; identical to SEQ ID NO: 301231

SEQ ID NO: 304707 - DNA, 336 bp, Proteus mirabilis
atgcttaattggaatgaatatcgaaaacaattaatgggacgtattggtgagttaggaaaattaacacctgatacggttactggctaccaagcactttccaatgcaggtaaaaaaactaatcatttagatgcaaaaacaagagaattaatcgcattagcagttgcagtcacaacacgctgtgatggttgtatcgccgtacatgctgacaccgctttaaagttgggtgctagtcatgaagaaattgcagaagcactcggtgttgctgttgcattaaatactggtgctgcgatggtttattctgctcgagtattggatgctattgcacctgaaaattaa

SEQ ID NO: 304708 - DNA, 933 bp, Proteus mirabilis
atgaacgatttctatgaaaagcaaaatgagcctcatatgctcaaacttcttgctgggcagcgtcagatctattctgatgtcaaagctattctaatgaaagtttttttcgcgggggttgttgtcccatcaatactttcattaattttctttgtaatgagtttttatccaggtcatacggggccttggataaaaacacttcttactatctatggggtagtatttttcattgttaaccacttcataatggagcatgtaagtaactgtaagaaaaaggcagcgcgtattcaggaggagtatgataccagtttgtttaacatggaatggaatgatatcgttactggtaaaaaaatacctatttctgaaagtctagagtatgcccaaaaacacttagctactgaaggcgatcatcgcctccgcaactggtaccttaatgctcccatgagcgtttctgctccgttaatggtaatgctctgtcaaagtaagaacatgggatgggatgcaggtctaaaaaagaaaacttcaacattcctgagtgttattttagcgctgaacataattatgtttgcgataacatttattttcaccaatccaacatatctacaatttgttgcatttgtagcaatattgcttccgatttatcaattttattatcgatacgttagtgataataagaaatctgtcgcccgcgcagatgaacttcgcatacttgttgagaatgcgctaaggcaagtagcaaaagagcgcgcttacgacaaaaaagcgctagataagcagtcgcgtttagttcaggaccaaatctttaactacagggcaacagggaatccggtgcctgattttatgcataaaagtaatcgggctaaagacgaagaacgatacgatcggattttcgaagaatattcttcacaattaaaaggcattgcaacgccatcttag

SEQ ID NO: 304709 - DNA, 1005 bp, Proteus mirabilis
atgccttatcaggttagtactgctttcgatagcctcatgaacaactttgtcaatctagacgcagatgatacacgcaacggaagaagaagccgtgactggttagtcgatgagcagctgaccagttttccagataaagatgataaattcccacggttaagcagtacgcctaaaatgtggtttggttcattctccagaagaacaaaaattcgtgaacttgatgacatcgatatgatgattgtcatgcatgctgaaggcagcacatacactcaaagcggtaaaaccttctatataactccgggaacaaattcccgtttccaaaactatttgaacgaaaccggtgagtgggtaaattcacgcagaatcgtcaacaaattcgtttcttcgctaaaatctgtacctcaatactccgccgctgatagtaaacgtcaaggagaggctgccactctcaatcttaaatcctatacatggaattttgatattgttccagccttcatcacagcaccagacagctatgggaacacattttacctgatcccagacggcaacggtaactggaaacagaccgacccgcgtattgataaagaccgtgcgactagagtgaatcaaaagcataatggtaaggtattgaacgtaattcgtttagttaagtattggaagcgcaagcgcggcgtacctgcaattggctcatatttgctcgaaactattatgctaaaccactatgacgaacttaataaagattccatgtcagaatatctcgatgtcgaattttcaaatgctttacaagtattagctactgcaatcgtcggttatgttggcgatcaaaaaaaattccagggtgatataaatcatttaagttcagaagagcagaaaaaggtgcaagaaatggcacttgaagatgccaacaatgcgaaagaggctctatcgattgaattttctgatcccgaaaaatctggaaagttatggcagaaagtgttaggtaaagattttccagtaggaaacgcataa

SEQ ID NO: 304710 - DNA, 1275 bp, Proteus mirabilis
atgagtgttataaaagattttttagaacaatatagcaagcagtatgattactattctgagttggcaaaaattggttcaaacttgcttgaactggaattagaaaagagagggattaaagccatagtttcattcagagctaagagaccagaccgattagaacaaaaacttaatcaaagaaatgaaaaatcagcatatgcagatgttgctagtatatatgaagatatagtcgatctggccggtgttcgggtggctttatatttcccaaaagatagagaagtagttgatgaaaccattaattttttatttaatgtccgaaaaaagaaaaactttccagatgcatcttataaacctaaatttgaaaaaaggttttctggttactgggcatctcattatcgtgtcaatttgaaaaactcaaaccaaaataagaagcgttacgaaagtgcattatttgaggttcaagtagcatcggttcttatgcatgcctggtccgaagtcgaacatgacctcgtttacaaacctttagcaggcgatttgtctgaagaggaactggcgatcctggatgagattaatggattagtgcttactggcgaaatagctcttgaaagacttcaaaaagctataacaaaaagaaccaaagaaaaagataatatttcaaatagatatgaactgacgagctttataaccaattcacttaataagaattatataaacaaacttaaattaggtgataccaaaattttatttaattatctcaaagatgattctagcataagtgtcagtgaactttctgaatatttgcgtaagattaatcaaagtgaaaaagaaacaatcacagatcaattgcttctaatgattatttatgattcatacaagggcgctggaaataatttaaatctttcaaattatttcaagcatgctcttggagaacatgaggatgtatcagggtttgaatcatttgttaagacatggattttactagaaaaagcagtgtctttaattcacaatcaaaacaatcgtaaacataaaaaattcttcaccgcaaaatttgagtcattagtttctgacggagtgctgacgaaggaagaggcaattgaactaaaccattttagaagaattagaaataacttactccatggtatagaaacacctaatgataaagagctaaacaaaatgttcgttaggttgttagaattaacgaagaagattatctcatctattaaaaatgatgatgataaagctaaattgctcaacgaaataaagacgttgagcaattaa

SEQ ID NO: 304711 - DNA, 900 bp, Proteus mirabilis
atgtggttgcaatttaatatattggaaaaaatgactttaacagaactaaaagaaacctgcatttttagatatagaaactttaataaaaatacaagaagagaggtggtcaattctgaaatgtggcattcaaatatcgatggattgaatgacccttttgaattccctattgtggttaactgggacaaaaaactacacagcaaagataaggatactttagctcattatgcattgaaatataattttttaagtagccttgaattatctaaaatgttgatagaccataaaaattatggtgtagatagtatttacagaataataatagaaaatctagagcgcttagttataggattaaatgactatataaataatttgttggtctgttgtttcagtaaaaatatggaatcaccactcatgtggtcgcattatgcggatggaatgagaggggtatgcattgcatacaatagaaagtccattgaaaatcatgagaactttaatttactgccggtagtatataatacccatcctataaagttcaatgaggacgatataaaaacaattaaagtaattgatgagttcaaatccttcgattttaaaaattcagagcctattttaactgatgggcgattaatacgattaaaatcccaaaaatattttttccaaaaacatataaactgggagtatgagggggaggtaagaaatatagttgatctcaataaaaggcgtaatggacagttggtatcattccctaaatcggctattaacgcaataataattggatataaaatatctgagcataatgcaaatcggattctgaagttttgtaaaaagaatcatctttctatgtttgttgcttatccggataaaagtaactacaaagttgattttgttaaaattatttaa

SEQ ID NO: 304712 - DNA, 183 bp, Proteus mirabilis; identical to SEQ ID NO: 298826

SEQ ID NO: 304713 - DNA, 1398 bp, Proteus mirabilis
atgaataacattaaaatggaatgtgttaactatttattaggattaatggcgctatttttattaacgataagtaagataacttttgcagaaataaataataatgtaaataattgcttcttaattaatgaaataaaaatagaaaggaatggtttattaactaataaggcacaaaaagaattaatatctaaatatataaataaatgtttaacattaagtgatatgcaacatatcattaaatcaatgactaatgcgtatattgaaaaaggctatattacttcacaagcttttattgccgatcaagatctctcaaatcatcaattaaccattaacgtaattgaaggaaagataaaatcaatctttattgataacatgacttctcccatggttgatattctatttccttcatatcaagataaacgacttaatttacgtgagttagagcatgggcttgaacaacttaatcgattaacaacatcacaatatagattagatattcaacctagtgacaggataggatactcgactatttttatttataagaaaaacaaaacgcatcctttcagaaatcaacttactattgataattcaggttcaaaagcaacaggtgaaattttactgacgaataccacaacaatagattcgttatttggatttggagagcagtgggatctctccttaaacagtaatacagatttattacattcacattattatagaggctatacagcgagtataaacattccctatggctattggttttatcaatatcagttatcttataaccgttcttctcattttattaaaagttatagtaatcaatatatctataaaagtataaatactaatcagcaagttgatattagtcgtttactttatcgggatagtaagaagaagataatattaaaaggcatattaaagcataaaaaagtaagaacggaattagccaaacagccgatattaatcaatagcccaacattaacatcattatcattagcccctcaatatcattttaatctgacatcaggttatttatctattaatccatcagcagaaattgggttgtctttttttggggcatcacctgattatattgctgaaaactcaccccgaagccactatagaaaattgagtctaaatatacattatcaatatttatttccttactctgtctcctatattacgtctttttatggtcaatatacatctgataatctttatagtgtggaaaaaataaccatagatggattaaatgcggttcgtggtactaaacaaaataagcttagtgccaatagaggactttattggcgtaatgaaattaatacaccatggataaattcatttttaggtcaatggcgttttattacggctgttgattatggcgttatctattctgattaa

SEQ ID NO: 304714 - DNA, 630 bp, Proteus mirabilis; identical to SEQ ID NO: 294866

SEQ ID NO: 304715 - DNA, 309 bp, Proteus mirabilis
atgattatcgcttattcaacagcccctaatgaaactgtcgcccatgaaatagctcaccatcttatacaggcaaagcttgcagcttgtattaacgtccttcctaatatcaaatctatctatcattggaataatgaaattgttgaagataatgaggtacttatgatgatcaaaagcgagagttcaaaacaacagattttgattgatacactagtaaaaatgcacccttacgatacaccagaagtcattattgtccctatagaaaatgggtttcatggctatctagaatggatacatcaaagcctaaattaa

SEQ ID NO: 304716 - DNA, 507 bp, Proteus mirabilis
ttgaacaagcaaattttacacaatgctatttggatgatgtctgaaaaagcagtttctattataggactatttttagtaacctcttatgttgctagatatgttggtccggaaacctttggcattatagctttagctacagcaatatttcaagttgttcaaattattgcacaattaggcaatgataatatcatttttaaaagagtttcaaaaaacaaacaatcaggaattaaattaataaaatccactttttttatacgtagctttatttacataaccataacaataccattacttatctacttttactcttataaagataatttcacatttttattttctctcgccatttcaattgcatgttacttctcatcaatagatgtttattcaatctataataatgcaattcttaaatcaaagaaaaatacaatatctaatatagttggattgagtttaggtttaagtcttcagtttataattgctcataataaatacaacccgatctattaa

SEQ ID NO: 304717 - DNA, 1101 bp, Proteus mirabilis
atggaaagagaatcacaatcctcggttacctcgctaattgaagcattaggtgaaaaactaccttatgttaacttctatcgtttgtgccaacttattgaaaatagttgcgcagaaacctctgggctaggtcgtagctcttctcttaaagatgatcctattcgttttaggcctcatcgtggtatgggttttcccgttacagaaatcaaagggttagactcctttaatcgttatcgtccaagcacagtacctagcatacgtacaacatttttaggtctttatggtattacgtctcctttaccaacaacatatcttaatgacattgctcaatatcgtgatggtaccgactcattaactgattttttagatattttcaatcatagattaacgacacaattctatcgaatatggcgaaaatattcttaccctgcaacttttcaagcaggtggtactgatgaaacctcaaaatatctttatggcttaattgggttaggcattccagggtgtgctaatcatgtcgaatcacctttatcgcgctttcttgcattattgggtattttacgtttacctacacgcaccgcagaaggtattcacgccttagtcaaattattagccccgtctacaaatgtagatattattccacacgatccacggcaaattatacttgataaaccaacgcaaatgtcgtgcaaaaatccaacaacgctagaaaataaacctgtattaggtgcttatgcatttgatgtaaatagccaagtgctaatacaacttcaaacagatgataaaaaagaatctaaaggctggttacctgatggcagtatttaccaagattttatggcattactccgcgtttatttaggttcaagagttaacgcacgattatgcttaagactacctagacatcttttagctgatgcaacattaagttcaaagcaaaaacaaggtgttcaattaggtcgtactgctgttatgcgccccttgtcatctaaagctaaaaacaatgcaactccttcctatatcaatattggattaggtttttatcaatacctagcaccccgaactcaacattataaaagtgaagaatatggcaattataaattctaa

SEQ ID NO: 304718 - DNA, 1764 bp, Proteus mirabilis
atggatgatttaactctgcgctattttgatgctgaaatgcgctatcttaaagaagctgctaaagagtttgctcaagctcatccagatagagcggcaatgcttgatttagataaggcaggaatgccagacccttttgttgaaaggttatttgaaggttttgctttttctatggggcaattacggcaaaaaattgatgacgatctgcctgagcttaccgaaggactggtcagtttattgtggcctcactatttacaaaccatcccttcactatcgattgttgagctaaagcctgacatacaaaaaatgaaaatggcagataatattcctgctcaattcgaagtactttctcggcctatagggcctaaaaaaacggtttgccattaccgaaccacacaagatttaaccatcaatccaatgaccattggtactgtaaaattagcaacagagcctgatggacactctgttatccggctaaaatttatttgcagtgagatcataaattggtcagaagttaatcttcataaactttcattatatttatcaggcgatataccaacaaccaatgcgctacatttggctttaactaaacaagtagctcatacttatctaaaactacctcaatcaaaagataggattgcgatccctctctatttttcacctggaggttttgctgaacaagattcattatggccaaaaagtgataccacattcagtggttatcaactactactagaatatttctcttttcgagaaaagtttatgtttgtgtctttatctggattagatgaaattcattttccagaagaaaccacagaatttgaattagatattgttctaaacacattttgggataacgatctgacgctaacacatgaaaatattcggttacattgcgttcctgttattaacttatttaatatcgaagcagatcccctgactattaatggtttagaaagcgaatatctcttacgtccccgtcgcattcaagatggacatacagaaatctattctgtcgacagtgtacatggttctcaacgcactgatgaagctatctatgtcccctttacgagttttcgtcatcgtggaggaatgttacgccataatgctcctgaacgttattttcatacccgtgttaaacgcggtgttacaggattacatgatacatggcttattttggggggagaaaaacaagcattagatacagcgacacagacagaaacactatcattacagttaacaggaactaatggccaattaccccgtaaagcgttacaaagtactttactcgatagaaccgaacaaactttacaagttccacttacagtccgtaatttatgtaaacccacattaccgctttatcccccagccgaagatcgctttcattggcgagtgctcagtcatcttggatcaagctttttaaatatgatggataatgctgaagtattgcgaggtacacttgcgctgtatgactggcgtgatgatgatatgaatcatcgcaagcttgaggcgattattcatgttgagcatcatcttattgaacgctttgaaaaaggctttttacaacgtggtatcgatattgaagtaactatcgatagtaatggctttaatggtgaaggtgatattcatttatttggtgaaatgcttaaccgcttttttgctctttatactgatgtacatctttttaaccaattgacactcattatattgcctacaggaaaacgtcttcaatggaaagagaatcacaatcctcggttacctcgctaa

SEQ ID NO: 304719 - DNA, 1632 bp, Proteus mirabilis
atgtctgtattaacatcattaaaaaatctttgttttagcgaagacccctctttatctacacagctcgctcaacaacaaattgctttatgggaaagatggctattacctatttcctcagataatcccgttggagatgatcctagttatgaagatgattttgagcgaatgaaagaagaggttaataaattatccggcgctgatactgaacttatttgtcttttagctgaaaaattactccttaatttttgtaaagatgttcgtgtagtgacttattatatctgggcaaggctacataaagaaggcgaacacgggtttgccgattcactaggtcttctcgcaggtttactcactcattatcaccgcaatttattaccacaacgagccacaagccgaaaagctgcacttgagtggctatctggacaacgcgttttagacagcctttctctttatcctgaagtcgatcataatgaattttcccgtattattgcgttattagcacttattgaagatgaattccaaacttggggtgaagacgagaaaccacaattagtgggacttcataagatcctagaaaaacgtttagcacaatctggcggggcaaatagcttagttccacaaaatatcagcagtcacgagacagacgcaacttatcattctacatcgccatctccatcaactatttcaccaagcacccctctagacaccattcaatccggtcgcgaattattagatcaagctaaaatgttagcaagctacctacgtaatcagcctaatggctggttagcaggacatcggttaatgaaagtcgttagatgggatacaatccatcaattaccaccacaaaataatcaaggttgtacccgtttatcccccccacgaacagaagcaagagcacagctaaaacgcctttatttacaacagagctggggtgaactagcggaacaagcggataaattgtttgccgtaggtgtaaatcatttctggctagacgtacagtggtatttatatcaagccctcacaaaattaccagcaccttgggatggctggtctgaaattataaaagatgatttaaaacaacttcttaacagacttcctgatttagaaaatttatcttgggaagacggttctccttttgctgatgaagtgacattaaactggatcaagcaacatgttctggaagagaattttgatgcaatgcacgatatttctcactcaccgcaacaccaatcggaagacgataacatcttagctttagaagcagaagctattacacaagcggatacagacggtgttgaggttgcactaaaatggctacaacatcgaccagagatcacgacacctcgacaaaattggttgttacgcttagttatggctagggttgcagaacaatttgcaagacaagatcttgcacttaatttattgcgagaattggataatagcgcccagaccatgtcgctatcacaatgggaacccaactatatatttgaagtgaaagcacgacaacttcatctttatcgggcgaaaagtcaacgcaacacctcagataaaacacatatagaaaagcagatggaacaattattgtgtgaattaacaacactcgatccggttcgttctgcaattttatactcttaa

SEQ ID NO: 304720 - DNA, 435 bp, Proteus mirabilis
gtgggctcggagatgtgtataagagacagatgtacctccgcaccagaaggttgggcttgttcctcttggtctgcacctaataaacaactaaatgattactattattttttcgttgttttaaaagataaggggctctcatctcttttgatcttagaattagaaaatcaatctaactcacaagttttattaaaaaaatacaatcaattaaaccgaacattatttgatgagtttggttcacctacttatcaagtagataatattcctcgtaataatgctttttttcaatgcttgaagaatacagaatgtggtgaaataaaaaatcaatatgatgctaatggcgtaacggcaatattaagtattctcggggatgataatggaggaagactcaatttacttatggcgatagataatgacgagaatattcattcttactag

SEQ ID NO: 304721 - DNA, 375 bp, Proteus mirabilis
atgatcaaagatatcattattaaagcgcttgaagaagcactggaaaaaattgataagcagttagctaaagagatttctaaaaaagcaagtattatgttgaatagaacggtggttgcttctaagttaaccaattcagcagcaacaaatactgttaatatttatggttctgttatcgcgtcaaaaataatccagtctattgccggtagtaaaaaattaactgcagttttagatattattcaaaaattaatggataagataatggaaacttatcatgagaatattgattctataacagatattttaaaaaacctcagcgataaatcttcagtaagtaataaattaaaatcagacatgataagaaatatatctatttaa

SEQ ID NO: 304722 - DNA, 1227 bp, Proteus mirabilis
atgtctttgaaacgtaaaattgcgctggggaaaaatgtattagaagctgctcaagagagagtccagtggatatttgatacttttgaacaaatcactctctccttttcgggagggaaagattctactgcgctttttcatcttgttgccgcacaagcgcgaaaacaacatagaaaatttaatgtgatgtttcttgattgggaagttcaatattctgcgactatagatcatattataaaaatgaaatctatctaccaagattgtattgaacggttttactggatagcactccctatcaccactgaaagtggcatttctcaatatgaacctacatggacagcatgggagtctggtaaaaaatgggtaagacaaccgccagaagatgcgataactgaccctcactttttccctttttatcacccaaatatgctttttgaagattttacccctgcatttaaccagtggatcacaggtaatcatcgcagttcgattatcctgctaggcataagagcggatgaatctttaaaccgatttattgccattagtaataatcgaaagttacgttatgccgatgatattccttggacaacggcatcagcagaaggcttttattatatggcctaccctatttatgattggcatgttaaagatatctggacttatatagcgcgtttcaatttaccctataaccctatttatgatctgatgcaccaagcgggcgttagtttaagtcaaatgcgtatttgtgaaccttttgggccagagcaacgcaagggactatggttatatcatgtgctagagcctgaaacatggagtcttgcttgtgaacgagtgagtggagctgatgccggaatgttatatacgaatcctcgtaataaatcaggtttctatgggcggcatcaaattagcaaaccttcccatcatacgtggaaatcttatgctcactttttattagccagtttaccagagaaaacagcagaacattatcgtaataaaatagcggtctatcttcgctggtatgccgaacgagattacccaaatggcatacctgatgcacaagaaggtgatactagcactaaacagataccttcttggcgacgaatttgtaagaccatcttgcgtaacgatttttggtgtagaacattagcatttagtcctactaaatcacactgttatgatcgatatttcaaacggatacaaggaaaacgaaaagactggcaacttatttag

SEQ ID NO: 304723 - DNA, 1227 bp, Proteus mirabilis; identical to SEQ ID NO: 304722

SEQ ID NO: 304724 - DNA, 168 bp, Proteus mirabilis
atggcattcctcgcggaacaagcgggtggtaaagccagtaatggtaaagatcgtattttagatatcaaaccaacagagttgcaccaacgcatgccattctttgtgggtactaaagcgatggtcgaacaagcagaagcatttatggctcaatatccagacgaagaataa

SEQ ID NO: 304725 - DNA, 1770 bp, Proteus mirabilis
atgaaacctgccatgtcacaaacatttattcccggcaaagatgccgcactggaagactctatcgctagctttcagcaaaaattaactcagttaggttttaacattgaagaagcttcatggttaaatcctgttcctaacgtttggtctgttcatattcgtgataaagattgtccgttatgttttactaacggcaaaggtgctactaaaaaagcagcattggcttcagcattaggcgaatattttgaacgtctctcaaccaattatttcttttctgatttctggctaggtgctgatattgcagaaggtgagtttgttcattacccaaatgaaaaatggtttccactgacagatgatgatgctgtacctgaaggcttattagatgcacgtttacgtcaattttacgatcctgaaggtgagctatgtggcagtgaactggttgatttacaatcaagtaattcagaacgtggtatttgtgccttaccgtttattcgccaatcagataaaacacctgtatatatacctgttaatatcattgcaaatctttatgcatctaatggtatgtcagcaggaaatacgcaaaatgaagctcgagtgcaagggctttctgaagtgtttgaacgctatgtcaaaaatagaattatcagcgaaagaattagcttgcctaaaatcccccatgaagttttagctcgttatcctgctgttattgaagctattacgacattagaaaaagaaggcttccctatttttagttttgatgcatctttagggggacaattccccgttatttgcgtcgtgctgtttaacccacaaaatgggacttgtttcgcttcttttggtgctcaccccgattttggtgtggcattagagcgtactgttactgagttattgcaaggccgtagccttaaagatctcgatgttttcaatccaccgagttttgatgatgaagaagtcggtgaccacactaatcttgaaacccactttatcgactctagtggtttaattagttgggatctgtttaaaaaagatgcagactatccatttgttgattgggatttcagtggttcaaccgaagaagaattccacacattaatgtcactgtgccagcaatgtgatgcagaagtgtatattatggattatgaccatttaggggtttatgcttgccgtattttagtccctggcttatccgatatttatcctgctgaagatctgcaactagccaataacattatgggtgtccattggcgtgataccattctttctttaccaacaagtcatggcacaaaagaagagtacctctcacttattggccaatttgatgaagatggcttagatgactttactcgtatcagagaaatgattggtattgcaccgggtaaagataatggttggagtcatttacgtgtaggtgaattaaaatcaatgttagcactcgctggtggcgatttagaacaagcattagtttgggttgagtggacacaagatttcaacgcatcattatttacaccagcgcgtcaaaattattatcgttgcctgcataatcttttactcctacgtgaagagcatgagcgtgagcctgcacaatatatggaggcattttctcgtatgtatggcgaggaaacactgcaagctgcattaaatgcaattggaggtaaacaacctttttatggcttgcaacccatagatccatcattagcgaatttgcctgttcatcaatctttattagccgcgtatgaaaaattacaacaagcaaaacgtcaatcgaataaataa

SEQ ID NO: 304726 - DNA, 957 bp, Proteus mirabilis
gtgggtataaataaaacacgttcactttatgacaaaaccctgacctttctcaaacaaaaccaaggtaaacaatatactgcgcgtgatatcgctgagaatttagttaaacaagatcctgactgggcgatggacaaagtgaacaaaagccaagcattatcgaccttagatgatgctgtgaaacaatatgcagctgaaataggtgcacaaacaccgaaatggttaacaccgaaaaaaaataaaactgttaaaataaaaaccacaatagagcgtccacgaaaatatttttatagtgaaatgaccgatgatgaggaaatcgcgttaagcgaaatcgcagatgcgacagctagccccaatgattggagtgaacatgacctctatcctttgcttaatgcatggctagaaagcaacatgaatgtctattcgttacgaattaatgaaaagaaaagccaaaatacacaaggtaaaaacggtaataaatggcttcaccctgacttagttggcttagaagataaaggccaacattggcaagcaaaattaaaagcatgcgtgaatgaatacagtgaacccagaacacgcttatggtcttttgaagtcaaaaaaagaattaatatgagtaatgtgagagaagtgttctttcagacaatatctaactcatcatgggcaaatttaggctatttagttgcagcagaagtgaccggagaagatacgcttaaagagctcagaatgctttgtgcggcgcacagtattggcgtgatcttactcgataaagacgatatcgcgaatactcaaatcttaattcaagctaccgaaaaagaaaatgtagattgggagctgtgtaatcgccttatctcaattaatcgtgatttcgagcattatattgagttagtcagcgaattttataaattgggtgaagtaaaaaaagcagactggaagtggagtaacaaagatcttatatga

SEQ ID NO: 304727 - DNA, 1890 bp, Proteus mirabilis
atgaattataaagaatttgcaaaacaaattctcgctattgttggtggcgaggataatataaagtcattagtacactgctcgactcgattacgttttacattacataatgaagataaaattgatccttcaaaagccaaagcaaatagtaaaatattatctgatgtgatgaagggaggacaatatcaactggttatcggtaatgatgttgataaagtatttaatgaactaacaaaaatgataaaaacaaataatactcctcatgataataataaagaccagaagaaacagtctatcgtaaataaaatattatcagcaattactggctctatcgctccggttatccctctgttagcgggtgccggtatggggaaagtgttacttattgtattaacgatgcttggttggttggataaaagtgaccaaacctattatatccttaactttatctttaatacggccttctattttatgccggtatttattggtttctcggcggcgaaaatatttaattgtaaccaatatttagctgcgatggtctgtttagcgatggtcagccctgaatggacaagcttagttaaagccggtgagcctgtcgaatttatgcatattcctgtcgctttggttaaatattcatctcaactgatccctgctttaattactgtttggatgatgtcttatatagaacgctttattgttcgtattgtgccagaaatggttaaagtatttatggtgcctttattggtgattttagtttcgacacctatagcgttgattgcggtcggtcctgtcacttcatggttcgctcaattaattgctgatggggtgatcttaatccaagagcacaccggttttattgctattccattattagtggctatttatccatggttagtatctattggtatgcataaagcacttagtcctgtcagtattatgttagtggaacaaaaaggctttgatcccattattcgtgtgatggcgctatgttctaatatgtctcaggctgctgcttctttagctgtttctgtacgtactaaaaacaaaaccttaaaacaattagctttttctgccagtattaccgccttttttggtggtataactgaacccgctatgtatggggttaacctcaaactgaaaaaaccaatgtacgcttgtatgattggtggtgctattgcaggattatttgctggtattgttaagttaaaagcgttcgtctatgtcactccggggttattaagtttaccaatgtggatatctgatacagataaccaagtggtaaatgcaataatcaccttattgattgccagtgtagccacttttattgcaacgcttattattggttttgatgatcctactgatgacccaatccgtgacgaagaagaaaataataaacaagctgcatcaaccaacaaaaaaccacaaatagcgaatagtaaattacctgttgggttaatttcacctctacaaggtaaaacggttgcactttcagaggttaatgatgaaacatttgcttctggcattatgggacctggcatggcaattatccccacaacaggaaaagtgattgcacctgcagatggcgttgttgatattaccttttcttctggtcatgcgattggcttaacactggttaacaatattgaaatgctgatccatgtggggattgataccgttaacttagcgggacagcacttcacatgctgtgtcgttaaaggtcagaaggtgacaaaaggtgatacgctaattgaatttgatttagatgcgataatagccgcaggctatgatccaacaacgatgatcatcattactaatgatgataataagctagacgttgttcagaccgataaaaaacatgtcgaccaaaatacagttttactaaccgtgggttaa

SEQ ID NO: 304728 - DNA, 345 bp, Proteus mirabilis
ttggttgatattagtcttgcccatcattttgttaaaggtgaatgtactagtcgccaatttaatacaccagaaggcgatctaattaccttactgataattaatgctgaaattgattatataaatcagttaactacttcacaccatcgttatgataaatggcgagatggcaagatcattgaaagtgaatgggaagttttcagcttaaaatggtttggtgtgtctgaatttgaacaaatactacgcttgattggttttaaacagatcacaatatcagccgattaccagtatctgcaaacccccagtaatacgacagaaattatgacttttgaagcgtataaaaaatag

SEQ ID NO: 304729 - DNA, 723 bp, Proteus mirabilis
atgaaactttctactgttaaacaaaaattgtctcttatcttgctgttaaatttggttggattgactctttttttatcttggtatcttcccgcacaacatgggttttggctttcaatagatacacgtatcttttatttttttaatcggcaactattgccagactcttcttttgctatgtttgtggcttatgtcaataatcgagcattcgatatgattattctgctggcgatgggagggttgtattaccatacttttcgtcagaaagattatcagggcaaacgccatctcattattgtgggtatagtcatggtgctaagtgcaatcgtaattaatcagattggacaaaatattcctatcgaaagacctagcccaacacttcattttcacgatgtgcaccgtgtaggtgtagtgacaggaataccgactaaagatgcatcaggtgatagctttcctggcgatcatggtttgatgctactgatcttttgtagctttatattacgttatctttcatttcgctcttttttatgcgctcttttaattacggtaattttttcattacctcgtgttatggctggcgcacattgggcttctgatatcttagttggctctatctcgcttactttagtcacaacaagctggttattaataacccctgcctctgatatcatcattcattggctagatgagcatctcccttttaaaggcaaaaaagcatttagctaa

SEQ ID NO: 304730 - DNA, 717 bp, Proteus mirabilis
atgcaaaccccgcacattctgattgttgaagatgaagtagttactcgtaataccctgaaaagcatattcgaagctgaagggtatatcgtacacgaagccactgatggcaacgagatgcataatattctgtccgaccatgatatcaatttggtcattatggatattaatcttcctggtaaaaacggtcttctattagcccgtgaattacgtgaacaggtaagtgttgcattaatgttcctaacaggtcgtgataatgaagttgataaaatcttaggccttgaaattggtgccgatgattacatcactaaaccatttaatcctcgtgaattaactatccgtgctcgtaacttattgtcacgcactatgaatttagcgaatggcacagaagagcgtcgtttagttgaaagctataaatttaatggttgggagctagatattaatagtcgctctcttattagccctacaggtgaacagtataaattacctcgtagtgagtttcgtgcgatgttacatttctgcgaaaacccaggaaaaatccaaactcgtgcagaattactgaaaaaaatgacgggtcgtgaattaaaacctcatgatcgtactgtagacgttaccattcgtcgtattcgtaaacactttgaatcaacccctgatacacctgagattatcgccactatccatggtgaaggttatcgtttctgtggtgatttagacgagtga

SEQ ID NO: 304731 - DNA, 177 bp, Proteus mirabilis
gtgtctatatcaaagaaaaataccttaagagcaagtgtctattttaataatgattattatattataacaacactttcaaaaatcggtatttatttgattgattttaaaaaaggttataaggttttatccaaagatccatttgatgcagatttgggttctttacaagaaatgcattaa

SEQ ID NO: 304732 - DNA, 255 bp, Proteus mirabilis
atgggtaaaaaaataattaaagaatgtaattataaaaataaaacgacactattcaaaaacatgaacttatgtaatgtgaatgtgactgatggtattatatctattattccttatgatcacttacgattggatcattggattggtaaaagtatgcctaacaatgcaattattacattaaaaaccaattgtagtgatgaggttttaggtgcttcaataaaaaaagcttttacacgttgtattagctgtaaagtttaa

SEQ ID NO: 304733 - DNA, 429 bp, Proteus mirabilis
atgccacagccttctctttatgaaatgctcactggatattttagtgatggacttcctattgaaacgatatcagaagaagatcaagtgatcctttctgtaatggataatattcgtcggatattaaattctcgggccggaacgataaagcatttacctgactatggcctgcctgatatgagtaaaattatccaaggtttaccgggaagctctcataaagttatggcagtattatctgctactttattaaaatatgagcctcgaattaaaaccgtctctttaggtatattgcctgataatgaatttggtaaattacactattctttagatattgaattacatgaacaaggattaatacgttatggtacagagttctcttctgatgggcgtatttttcttcatcatctaaagaaaaattttaatttatcttaa

SEQ ID NO: 304734 - DNA, 243 bp, Proteus mirabilis
ttggcatcatcgctgttagcacaaaaagatttacgtatacgtcctggtgaatcaatttctttagatatgccgatggaagaaggtgcacaatttgttgctattgctgccatgttccactcccctgacgaagctaaaaatagttggagggttgtcattcccaaaaatgagctagatcctgataatgctcgtaaaattattctcgatgaaaatacacttacgttaaaacctttggataagaaataa

SEQ ID NO: 304735 - DNA, 687 bp, Proteus mirabilis
atgaaaaaattgctatttagtcttgctacgctgattgtaatgtcaacaccagcattagctactccaccaggcgctaacttaaaaataaacggtgatattactccccctacttgcaccgttaatgctggtgataatgatattattattgattatggtgtaatatccccctcttttattcctgctgaggaaaattacgcactaggagctaagagtgccaatatcaaaatatcctgtgacgcaagcaattatttaacacttaaggtatcagatacttataaaacaagttcaacagattcagcgaaaattagcgtttttggattagttaatgcaaaaaatacagaacaagagattggtggatatataattgatgtcattgatatcaaagttgataataaacgagcttatttaggaagagtggcagataagatttggactggatcgtctgcaactatttttaaagataccttaacagcgttaactagtgaacctcaagcccaggttgataaaaacaatttaaaacttatagctggaaaagtgtttaatgcaaaaatacaaataggagcttataacgaaagtaggtatgcgtatattttatcaagaaaaaaattggcacaaaacaatatcgatttaactgatggaattgattatataggtgaagctgtttttacttttaactttggtgtctaa

SEQ ID NO: 304736 - DNA, 990 bp, Proteus mirabilis
atgaagttaaatggctctaataataggaatttttatcaaggtgattttaaaacaggtataaatttttataattggattttacgtaataacagtagcttttcttcaggtgatgggaaaacttactatagatttaatgaaacaacgctttcacgtacaatagaacgcatcaaagccattttacaattaggccaaattacatctaatagtgagttattagatagtgctgatgtgaatggttttcaattatattcagatagtagctatcaaaacagtaagttgacagttcctattactgggatgtctgaaaaaccggctaccgttgaagtcacacaaaataatcgattgttatatagaacgataatacctgcaggccctttccaattaaataacattagtggtgtatcatcaagtcaaccattacatgtcaaagttattcaagatgatggtactattcaagaatttgatgttattacatcaaataaagacttaaaaaatccacagagtagtaccagctttaacttttttatggggaaatatagaaaaaactcaagtgatgaacgcatacatactccttttattaccggttttgaaggtggcattaattatttaaatcataattttctagggggtatggaaatatcatcaaaatataagtccattgtaggtagcgtaaatagcgtttttggtgaacatcgtcctttatctactggctttggtattaaatatgcatcttcttctaataaaggtgatggcttccaagcaaatgctaatttaagtttacctgtatcagtattctcactaggcttatcaacaatatatcgttcacgcaactattccacactctatgaatctctacaaatagataatatagaagacccattagatgataatcttgctaataatcagacaaaaacatcaagctcattatctctaagcttaggaaatcaacgttatggatcactgagttatctgtctcttatacacatctga

SEQ ID NO: 304737 - DNA, 246 bp, Proteus mirabilis
gtgacattccaattaattgatgatgaaaataatcctattgatttaaatcagaaaaatacattcactaaaactattgatgaaagtggtactgcttattttaatttctttataaattatgtcaaaaaagataatcttcgcgcaaagccagggtatatatcttctcgtattacgttcattgtggaagcaaaagatcagattgttgaaaatgataatgaatttgcgggtgtagaaaacagagtactgtag

SEQ ID NO: 304738 - DNA, 288 bp, Proteus mirabilis
ttgattagttcaaatgccgttgctttaacacttgatgaggcgcgcgcgcaaggcttagtaggggaaacttttagtggttatgttgagttagtacaaccaaaccataagcaagctcaaatattggtgaatgaaatcaatcaagccagaaaagccaaatatgctgaaattgctaaaaccaatcaagtgactcctgaatctgttgcccgtttagcgggtgaaaaattagtggcaagagccaattcaggtgagtttgttaaaggaattaatgggcagtgggttaagaaataa

SEQ ID NO: 304739 - DNA, 552 bp, Proteus mirabilis; identical to SEQ ID NO: 298001

SEQ ID NO: 304740 - DNA, 363 bp, Proteus mirabilis
gtggcgattatttgttctgattataccatcagcaaacatttttattgtcaaatactggggcttagcctattaaatgaaaaataccgtgaagaaatacaatcttggaaagctgagcttgcgttaggtacagtctaccaaattgaattatttagcttcccagatgcgccagcacgtttaagttacccagaagcacgtggtctacgccatgtggcatttgcagtggacgatcttgatgcttcagttgcttatttacaacaaaacaatattcaatgtgagccaatacgtatagatcctagtagccaaaaacgttttaccttttttcaagatcccgatggcttacctttagagctttattcaatatag

SEQ ID NO: 304741 - DNA, 390 bp, Proteus mirabilis
atgtctaaatcggcaaaaggtacgacagaacggcatggacggaacgtaaaagctaaatctggtttaaaccgcgcaatactggagcagggctggtatgaaatgcgccgtcagcttgagtacaagcagctctggctaggtggtcaggtactggcaataccaccagcctacaccagtcagaagtgcgcttactgtggtcatacagcaaaggaaaaccgccagtcacaaagtcaattcgagtgccttgaatgtggatatacagcgaatgctgatatcaacggggcacgtaacattttagcggcaggacatgccgtgcttgcctgtggagggagggtgcagtcagaccgcccgtcgaagcaggaacccgccgaggtgattcagacatcagtctga

SEQ ID NO: 304742 - DNA, 336 bp, Proteus mirabilis
gtggtaaaagatttttcactttatatatcagactgtaattttaataatacattagccattgttttaaacccaaaaggaggaagtacgcttttatataaaggaaaaaatatattagcaacaagtactgatgggttaggtatagatattaatgaagtgactggtggaactattcgttcactggaaacaagtaaaaagcataaaatcaatccagaacgaattaattcaactctttatcgtgttgacttacaagctcagttagtaaatacagtgcctattaataaattaaaactagggaagttcaattcaatagttactatttcagtgacttataactaa

SEQ ID NO: 304743 - DNA, 966 bp, Proteus mirabilis
atgttgagtatggaaaaaattaagcaaccctattggccagcattaaaattgatattaagttcacttattgtttttagtttctatttgaaacaaagccatacccctgacttttcattactgattaatatatttgatttaacattaattcctatgtttgtttttattatcgggtttattactaaaaatgggacatggaaaagttggcgtgataatttattggctgccttagtgatttatgcgactttccaaactattgatatgatccctctttattattcagggcaatttgaccttaatacttaccttctttttcctcaaaatggtgtttggttttttcttgctacacctatttggcaagcttttttcctattgttaccttcatacatcagacatcataaaccaatattattctctcttctgcttgtcagtattttgctatcgttgttaactaagggctatgaaactaaactatctactttcttggctataatacaatattttccattttttattatcgcttatttagtagaccaacaaacaattgctaaattaagaagtcaatttttggtggttattgctgtaacaagtttattatcaatatttatactttattatcaatctaatatcaattatattattataacaaaattagaagggagtctattttttgcaaaattaattatatatattatctctttattgataagttttattttaagcgcagggattatttaccttgcaccaaccactcaaaaatacgcttctcttgccaataatgcgttaggtgtttatttaattcatccaattatttgctttatccttttacaaggcataatcttttttcagttatctcttacattaccgatggtttttgcactcactgttatcaccattagcctagcactattattggcatcaattaagcttattcattggtttattagcccaacttttaatatccgatag

SEQ ID NO: 304744 - DNA, 894 bp, Proteus mirabilis; identical to SEQ ID NO: 298557

SEQ ID NO: 304745 - DNA, 318 bp, Proteus mirabilis
atgaatcatatgaaagacagccctgatttttgggatcaggtattccaagttattgttgctcataaagagcaagggattagctcatcactcgcaatcagcatggcgatccttcgaggaaagtataatggcggtggttggacgaaaacattattcgatggtgctatgtgtgcattgtttgcatggtttgtaaaagacctattaacactactgaatctcaatccagattttgcgtatttggcgagtgtatttattgggtatttgggtgtggacggattaagtaaactcattaagggtaaggcagggctgaaaaatgactag

SEQ ID NO: 304746 - DNA, 396 bp, Proteus mirabilis
atgttagaaataaaaagtattgagccaaaccaagtaagagataattgtttaaaagaaagaattaaaggtgcatctcatgatacaagtactgagtacattgcacttatgaacaatatagaagtaggatttatttcccttgtattttggcccacaaatacaactgcatttatatatgaaatatatgtgctacataattatcgaagaaaaggagttggtgaaaaattacttacatttgccgaagataaagcagctcagtctcatcgtaatccaattaaattagaaccaaataatttcgatcgcactataacaaaagaaaagctaatttcttggtatgaaaagcacggctataaaaaagacaacacttctaatgaatattggataaaaagtcttttctga

SEQ ID NO: 304747 - DNA, 1107 bp, Proteus mirabilis
atgccaaaaatagtttcttatataagtacaaaatttaatagcgtaaaaaatgctttaggaataaaagataccacgggaaatcctaatttcagtagtgttaagaatactagtgctatatggtatacagaaattttatctgaaaaaaaagcacctgttctctatatgcgacaaaatatcaataacgtaaataatatccaaagattagtatctacagaagttcttaacaaattatattatgatgaaaactcacctcaatatgatgaaaataactatcaatgtgtacctaattctagatatagaataccatattgtaaaaaaactttaatagaatctaatggggtattattacctactaataatgtgagtgttaagaactctccttatgtgacttttgcaagccaatatcctcttaatgataaagagagtttaaaacattattttaatatgttatttgataatgatataaagacagtttatgttttagcctcgaataaggatattgaatgcgacctctcaaaacctgatattgaatatgataaaagcaattctcagcagaaagggtttaaatactttagagaggatttttattcagataatatagaatctcgccactttaataagtgggatttcagtcgttttaaaataaaaggtaaaaatggggataatgaaattttaggaaatgaaagaactttagattgcaaagtatatactaagaaattgactaaaaaaggttgtgatgaaaataaagatataaactttgtacatatttataattgggaagatcatacagaaatagatgcgacaaaattaaaaaatacaattgatttgattggcaaacaattaacaataaacccaacaaaagaaaatatagctgtccattgtcttgcgggattaggaagaacaggagagtttattgctttaatggagatgatgaaaatgatagaggcaagaaatacaaaaacaaaaagcttagaaagtattctcgttcacttaaggaaaaatcgcagttggcagctacttaaaatgaaagtacaagttaatgagctgattaagtttgcaataaataataacattcctttagtcaatgatcatattaaaataaaataa

SEQ ID NO: 304748 - DNA, 222 bp, Proteus mirabilis
gtgtttgtagcgcaatctgacaatcaaaaaaaccttatcgctaagcgtgtctctgtgaaagttggattgcgctacaacggccttatcgagatcaaagaaggcttaaatcagggagatcaagttgttacctcagggcaaatcaaacttagtgatggcacctcaatagcccccatagagcaagatacgttaacactggcccaatctactactcgtcaaccataa

SEQ ID NO: 304749 - DNA, 1698 bp, Proteus mirabilis
  misc_feature (1635)..(1644): n is a, c, g, or t
atgtctcacgtcgcgaataaattattggtaacctgcgcgttaccttatgctaacggttcaattcatctcggtcatatccttgaacacattcaggctgatatctgggtccgttaccaacgaatgcgcggcaaagaagttcatttcatctgcgctgatgatgctcacggcacgcctattatgctgaaagctcaacaattgggtattaccccagaagccatgattgaagagatgagcaaagagcatcaacaggattttgccggttttaatatcagctacgataattatcactccacacacagtgaagaaaatcgtcaattatcgacgaaaatttatctagccctgaaaaaaaatggtcatattaaaagtaaaacgatttctcaactttatgatgaagaaaaaggcatgttcttgcctgatcgttttgttaaagggacttgccctaagtgtaaagcgcccgatcaatatggtgataactgtgaagtatgtgggtcaacttatagcccgacagaattaattaatcctcgctctgtggtatcgggttcaacgccggtaatgcgtgaaactgaacactatttctttgatctcccagcctttagcaatatgttgcaagagtggatccgctccggtgcattgcaagagcaagtagccaataagatgcaagagtggtttgacagcggtctgcaacagtgggatatcacccgtgacgccccttatttcggttttgaaatccctgatgcgccgggtaaatatttctatgtttggttagacgcccctattggttatatgggctcattcttaaacctatgtgaaaagcgtggtgatttaagctttgatgagttctggaacaaagagagcaaaactgacttataccattttatcggtaaagatatcgtttatttccacagcttattctggccggcagtgttagaaggtagtgaataccgtaaaccaaccaacctatttgtgcatggctatgtcaccgtcaatggtgcgaagatgtcaaaatctcgcggtacctttattacggcacgtgcctatcttgatcactttgatgctgattgcctacgctattactatgcggcaaaactttcatcacgtattgatgatattgacctaaacttagaagactttgtacagcgtgtaaacagcgatatcgtcaacaaggtggttaacctcgcgtcccgtactgcgggttttatcagtaaacgctttgatggcaaattagcggcaagccttgatgatgcgaagttatatcaacatttcgtcgatatgcaagaaagcatcgcacaatgttttgaaaaccgtgaatttggtaaagccattcgtgaaattatggcattagcagacgaagctaaccgctatattgatgaaaaagcgccttgggtggttgctaaacaagaaggtaaagaggctgagttgcaagctatttgtactatgggaattaacttattccgtgtactgatgacttatttaaaaccaattctaccttctttaacagaacgttcagaaaccttcttacaaactgaattaacttggaatgctctgtcgcaaccgctgttaaaccatgaaattactaaatttaaagcattgtttaatcgtattgaaatggataaagccaatgcaatggtagaagcnnnnnnnnnnagtcaaagaaatcacgggcccattagcagacgcgcctattcaagaaaccattaa

SEQ ID NO: 304750 - DNA, 294 bp, Proteus mirabilis
atgcgcattgctgaaattaaacaggctgatttcgttgacggctcagataagttgctaaaattaatactggacttagggggagaaacacgccaagtattctccggcattcgttctgcataccctgatccgaaagtattagaaggtcgcttaactgttatggttgcaaacctagcacctcgcaaaatgcgttttggaatttcagaaggtatggtgatggccgcaggccctggtggtgaagatattttcttacttagcccagatagtggggctaaaccgggtcaccaggtgaaataa

SEQ ID NO: 304751 - DNA, 1119 bp, Proteus mirabilis
atgactaaaatatttaaaatcccctttgccacgcaaggggataaaacagttgtgcctgttgagatccaaacagatggctcagtatcttatactcaaggttacggttatgattatgagcgtgaccaagtcactgatccggccgcaaaagatattgaacgtgaaaaaatgaacagcctatttcacgatatcaccgagtctattggtgaaatgcaattacaaggttttgctaaatggtcagaagcgggcaagccctatgccattcgtagtgtggtttatcataacaataaggtatggcagtctaaaattgagaataataatattgagcctattgccggtaatgcatgggctgagttaaaagctgatatcaccgcgaatgaagtgggcgcttataacaaagccgaggctgataagcgttttcagccggtgggtaaatatcaagcggaaggttatagctatgcaaaagcggaatctgatactaaatatcagcccaaaggcaattatgctcctgcgggaaattatgcgaataaaggcgatagctataccaaagcagaatctgatgggaaatatcaacctaaaggcaattatcaagcttcaggagattatgccactaataccaatttaaaaaatgagcttaataaaaaatttgataagggtaatatttctcaagcgaccggaacctcaacggctcatgttattagccaaaaagccgctactgatgcttttcagccaaaagggaattatcaacccaaaggcaattatgcattagtgggtgcatcctatacgaaaacggaatctgataataaatatcaacctaaaggcaattatttagcgacaggttatagttattctaaatcagagtcagatggtaaatatcaacctaaggggaattatcaacccaaagggaattatgcagttattgggagtagttatactaaggcggaaagtgacgatcgttatttagctaaaggttctaaatctaaattaagattagtttgggataaatttatcggcaatggaggtatagctaatctagccgaagatattagaggaaagtttgccttagttcgtgtagattttagtgcctgtctcttatacacatctccgagcccacgagactag

SEQ ID NO: 304752 - DNA, 1305 bp, Proteus mirabilis
gtgttatccggtattcgttttcaaatgtctaactatggatttgataaatttattgtacaggagacgaatatcagtgtagcggtaaataactatctttctattgcttggcaaggaatgttagagaatcatggtagtcaccgtaatattagtacgctttctattaatatcccagaaggctatggttcattatgggcatctaaagagaaaactatcgtaagaggtgatttaccgctatatgaggcagacagttactcttatggaggaactattaatttcgataagataatggatagaacgggttcatttactatcagcaataccaaagataagcgagttggtagtgattctattaattatgaatatgcaaatacattattttcgggacgttatggcacggtaggattaagagctggggttcagcgttatcattatgataatcaaaatagcactaatgaaaaatttattaatcttgatttctctttacctctttcaacgtggttaagtactgggatctcttcaaccaatggcaatgtaaaagccaatatttatgtgaataagaattttgaaaactccgtgatcactaatgcgggcgtttctgtttctaagttagtacatgataaagataatggtgaatctgacttctcaacactaggttacgcttcttatgatacgaagtataactctggtacggtgaccattaatcgccctgataataaacgacttaatggtaatttaacttctcgtggctctatagcttatagtgaagggatgatcacacccagtggtcaacaaggtaaatctggcattattatcaattcagatattaaaggtagtggcagtatgctcgctaaagttaatgggcaaaattacccgattagtggaaaaaatacctttattccattatctccttattcagattatgacatccaattaatgaatgatggcaaatcgaaagacagctttgacattatttctggccgaaataaatccgtcacattgtatccaggaaatattgccttttatcaaccggaagtgaggcaattagtcacggttttcggacgtctgaaatcccctaatggtgaacttttaaaatatgcttcaattcgaaaccatattggtcgaactaaaacagatcaaaatggtgagttttcaatggatgtagatgtccgttatccggtgatctcgttactacaagaagatcagcaaacaatctgtgaagcagacttagatcttaaaggggcacaaggagcaatgtgggttggagaggtaacttgtcaacctcagtctagtttcgtaaaaagataa

SEQ ID NO: 304753 - DNA, 246 bp, Proteus mirabilis
atggatggggaacggggtcacgttcatttactgattaattacctgccaaaactggcgatatctaatctggttaacagccttaaaggggtatcgagtcgattacttcgacgtgatcgtcctgatattgcccaacgtgattactacaagggggttctttggtcgccgagttatttcgcggggagttgtggtggcgcaccaatatccattatccgccagtacattgagcaacaggaaacaccgagttag

SEQ ID NO: 304754 - DNA, 1623 bp, Proteus mirabilis
atgcttaattcctttcctcttagtacttacctatatcaacgtaatggtgtctactatatacgtatgagagttaagctatacaatcaatataaactaacatcattatcacttaagactaaggatagacgtacagccatggctaactctagacacatcaagtcagcacttaaagatatctatgcagatagacctaatgtctcctatgaagagcttagagaacacctaaagactatcgtagagtgggagcttagtgtcagacgtgaagatatggtagaccctatggcttatcagctttatgtagaccaatacgatgagaccatagcaaccttaagggaagccatagccacagagagtctaacagctacacaacacaagtatattaatgatgtaataggtgtacttaaagccagccaaagcagacttagaggtgatagctctggtctcctagggtatcttaaagccttagactcaaaggtaggtgactctttgtctctatctgtaagtacacctcaagtctctacacctcaagtctctacacaccctcaagtctctacacaccctcaagtctctacacctaatgaagctctaaccttatcgtctcttatagctctctatgaggctgagcatagccagaactggaagccatcaaccttaagagacaataaagcttctcatgaggtcttagctgagatattcgattatctgtgtattggtgatgatatcaataaggctactagggcagatatgcttaaggttagggatatacttcaagtcttacctaagaaccgtaagcaacgctttaagggaatacctttagcagacctactgtctagagataataaagatgattgccttgatgtagtgactatcaataataattatcttgttaagttatcagctctattcaagtgggctttaaagaatggtctagtagataagaacatgactgagggtctagaacttaaagtcccacagcataaagcctctaatgaccgtaaagcctttagtcctgaacaggtgaagctattggtctcatcagctaaggactactcacagaagaccacaggtagaccatatcattactatgttcctctcttagctgctattactggggcgagacttaatgaggtagcacagcttcaagtcaaggacattaagaagactgtggagggaactgtttatattcatatcaatgaagatgatagaagcctagagggtaagagcattaagaatgttcatagtgaccgctgtgtacctctggttgatggtgcctatggttttgtattaggtgatttcttgaggcttgtagacaagaggagggagactctaggtgatgaggctatggtctttgatggtctacggttgatgaagaatggttatggcgaacaagtaagtaaatggtttaatagaaccttgttacctaaagtcattcctaaccgtgagggtctagcgtttcactcctttagacatactgtagcgactcaattgaaacagcatggagtccaactagcgtatgcacaagctctactggggcacagctctgggtctattacttatgatagatatgctaaagaagtagaggtagagagacttaaggttgtactggagggaatactgccataa

SEQ ID NO: 304755 - DNA, 192 bp, Proteus mirabilis
atgtggcttatggatgaatcaaccacatatcgtcttctacttcaaggacacgccccacagtctgaacctttccgtaaatgggtaactgaggaagtcttaccatctatacgcaagactggaagctatgacctagcgaaatcagagactccagaagcaaaacttatggcagtattccctccagtacaaccttaa

SEQ ID NO: 304756 - DNA, 573 bp, Proteus mirabilis
atgtctactaaacacattaacgctaatcatattatcaatattgaaggtcatagtttcaaagctgatgaccaaggtctgtggaacctcactgagatatggaagactttaggtctacctagaggtaaagcaccatctgagtggcgaaccaaagaagctaagagattctctggatgcccgcaaaaaatgcggtcattaggtcaaggcgtttcatctcacatattagccaataaacaggtaacacttcgttatgctggttgggtctcttatgaatttgaagacatggtctattcagcctttgagtccatcttagctatgccagaagtccagaccgtagtagctaacaagatgatagagctaggctataaagctgaggctgagttactagagcgtcaaactaatgcagaccgtgactatgctctacgtgagtttaacaagctatccaatagacttgatgggcgtaaacctgagcgtctatataaagctgtggtagctggtcacattgataaagagaaagctttaagtctcatccctgtaagcagtgtatggcacagcagactcggaggtctagactaa

SEQ ID NO: 304757 - DNA, 180 bp, Proteus mirabilis
atgtctatcaaccctaagaccccaagaggcaagctcatcttacgttatagaggctggagaacagagcatatagtcaaagctttaggtctcccgcctcttgatgactctagaccaaagtaccctagagacgaactaatcaacatgatggtcgatattaagatgactgtacgcgaaaagtag

SEQ ID NO: 304758 - DNA, 489 bp, Proteus mirabilis
atgagtttatttgataatcacagttggcaactagaagtcactgacattgatacctatggcaacactgtaaagctagatggtgtctcttatcctttatcgttagctatgaagacccttattcctgcttacgttaataacctatcgcctaactcctcggctgtcatcaacctgttaaagcaattggtcgaagctggagtagtacttaaagcattctttgatatccctgtacttaaagcttatgaagcctacaaggtacaagaagctaaagagttagctcaagcacagcgtatgcgtgaacaacaagaggaacgctttaaggaattgaataagactccagagcaatgggctaaagagaaagctgaggttgaggaacgtaagcagtatctacgtaagcagagcgagttaatccgacaagctggctcaactattggtcgttctaaagctgatgtcctagctggtctaggcgctatcaattgggctgaggattaa

SEQ ID NO: 304759 - DNA, 1098 bp, Proteus mirabilis
atgtcaagcaataacgtacaactagaagtatcaaaagtaacagccacagcaaaccttaatgaactacaagatggaactaacttagggtctcaatataaagctcctaacgataaagtagtccacactgagtctatggctttccgtgaagagaccacaggctttgcttgggcttctgatagtcctgaataccatagtattgagcctgctaagtctccagctatctatgctaagaccttagagtctactttacgtcaaggactcaatgctattaaagacgatacacaatcagtcaattcagtattccctgtggagttcttacctaatcgtactgatgttcctactcctattattcgacacttatttaataaccgtactgtggttactgctacaagtggagactggagtaaaccacagaaagccacagctatggctggtagtgaaatcatgacagagccagctaacaaggctatcctattgtcttacagcattccgttgtatgacttcaaggttgagtcaggctttactcatgcgactctagttggtgatatgactaacatcattaataatatcttaaaggatatcaactcaaaggttgctggtcagttggcagactctaagctagtccgtaaggttgatggtggtaaacttgagggtaaactctttgataaaggtcaagacatcttagacgctatcacagaggctactgattcagctttaggctctgaggttaacgaatatggtttagttatccatgaagacctagtgaaagctttagtctctgtggctcgacgttcaggctttggtggtgaagatggtctagaggaaatgctagggactgattactgttcttataatggtgaagacaaaggtgtatttctgatgcctaaagcgtttacaggtcttagcttcgctccacttaaagtagacaatgaatggtttactactatcttaactcgtgatacagaccgtcaagctttcgtattagaggttatcgctaaaatgtatatccttaatgaagcttctacacagattaaagatggtgttcataaagctgatgctatcttaccagtagtcaccaacattacattcactaagtaa

SEQ ID NO: 304760 - DNA, 147 bp, Proteus mirabilis
atgcagatggaagacaagaagatgttaacttatagtctaatcaggcttgtagtctacatcactatattaactctatcagtctgtggagttataagccttacagctttagagaccgtaggaagctttacagacgttatgcttaagtaa

SEQ ID NO: 304761 - DNA, 822 bp, Proteus mirabilis
atgaaacggatcacgatagtcggattaggttggttaggattaccacttgccaatgccttgcgtgaagcggggtatcaagtaaaaggaacaaaaaccacagaagatggtgtagaagcagcacgaatgagtggtgttgattgttgtctaatgaatttaacaccggctattgagtgtgatagagatgattttgattacttaatggaaactgatgtactgattattacattaccccctagtgcggcggggggaggatatgattatgttgaagggatacaaacattagtggatagcgccatgtctcggcatgtgacaagagtgatttatattagctctacttcagtatatggcaatcaaagtggtgttattacagaagaagttgatattaggccagaaacgcaatccgctaagatgatagcggaagttgaaaattggttacatcgtttaccacttacgaccgtcgatattttacgtttggcggggttagttgggcctggtcgtcatgcaggacgctttttatccggtaaaaaacaggtcaaaggtgcacatcagagtgtcaatttagtgcatttagacgatgttatttttgcgatagagcaactgcttgctcaaaatgaaggaggccgtttatataatttatgtgcgcctattcatcctaaaaagaaagatttttacagccgtgttgctgcacagttagatcttactccccctgaatttgctctagaagataaaccgccagcacgagagatcgacggtcaggagatttgccgagatctcggatttcattatcactatcctgatcccgacaaaatgccaatgagttaa

SEQ ID NO: 304762 - DNA, 624 bp, Proteus mirabilis
atgtgtaatgtcggatcaggtcgtccttggagtccggcaacgccagcaggctttcccgctcggcggcggacaggatggaacgacgtggcatatttactgatccgttctcaagtattgatacagggtttcgcgactgattccgaattcacgagcaagcttggtcttttgctcgccagcctcgacacgttggcgcagttcggcaatacgctcagacgacagggatttcttcctgccacggtaagccccgcgttgcttggcgagcgcaataccctcgcgctgacgctcgcggatcagggcgcgctcgaactcggcgaacgcgcccatcaccgagagcatcaggttcgccatcggagagtcttcgccagtaaaactgaggtgttccttgacgaattcgatatgcacgccgcgttgtgtcagcgtttgcacgatccggcgcaaatcatcgagattgcgcgccaggcgatccatgctatgcaccaccacggtgtcgccggtgcgggcgaagcttatcagcgcttccagttgcggacgcttgacatccttgccggatgccttgtcgctaaaagcgcgatcaaccttgacgccttccagttgccgttccgggttcggcactgttgcaaatag

SEQ ID NO: 304763 - DNA, 705 bp, Proteus mirabilis; identical to SEQ ID NO: 61560

SEQ ID NO: 304764 - DNA, 471 bp, Proteus mirabilis; identical to SEQ ID NO: 23315

SEQ ID NO: 304765 - DNA, 150 bp, Proteus mirabilis; identical to SEQ ID NO: 23314

SEQ ID NO: 304766 - DNA, 246 bp, Proteus mirabilis; identical to SEQ ID NO: 23313

SEQ ID NO: 304767 - DNA, 1218 bp, Proteus mirabilis; identical to SEQ ID NO: 233747

SEQ ID NO: 304768 - DNA, 444 bp, Proteus mirabilis
atgaaaacgataaacgagttaagaaaagaagcattacaatttcgagaactacttaataactgtgataaatcaaatacgaaactagtaatagatcgctttccgattatgagctgtaagctctcctcaatgcttttagcataccattttctaaaaaaatggcccaaaatagaactaaaaaatgtctccacagcaacagacgaggaaataagccattattggctagagatcgacgatattataatctatatcactggagaacagtacactatgattgatgatagtgaactaaacaaaaatcataaaagttgctttttcccaaaagtgtattgtttgtatactgaaatattactggaaaaaggctattgtttaatacaaacatattttatttcacgttgcaaagtagtatataaaaaaggaaaaaatgaaaactatatctttatttaa

SEQ ID NO: 304769 - DNA, 1065 bp, Proteus mirabilis
atgaaaactatatctttatttaacaacaaaggtggagtaggcaagacaaccttaacttggaacttaagtgtatctctatcggcaaaaggaaaatcagttctacttatagactttgatcctcagtgtaatttgtctatcgcattgttgggagaaactaaattctctagtcttttaaaaagtgattcaactaatccttatggcaaaactataagagcattttgccaaccctttattcaacaagatacttcacctattgttcatacattcccaccaaaccatcctatggagcgaggttcaggaagattagatataattcctggagatttttggttaaataatctttcggatataattaacgtaggtacagatttaatcgcaggaaatgcgataactagatttttaatacctagcttgatggctgataaggcccagcaattgaatgattgtcagtacgattatgtcctcattgatgtgcctccatcatttaacactatcgttagatcagcattatattgttctgattattatttggttccatgcaccgctgatgttttttctgcctattgtataggtcttattggtgaaacattaccaaaatttagagatgactgggagcaaggtataaggagaagttcagctcaaagtaacacgttagtaaatggaaaaggtcagcctaaatttgcaggatgggttttcaacggctttgatacaagaaaaaaaaatggccaagcattaccatctgaaattgcagcagatgcagctcatagagataaaataatcgattctgtcaaaaatgatcttcgcccaaaattgtcaacaataactacatatcctgctgtagcaacctttacaacagactccccaattgcgaagatagaagatctcaatgtaatggctccagatagtatattgcaaggagttcctcttcgatatttatctagtgtaagacccactagagatgttcttgtgagaggagcttggtctggccctcaaaaggacctgatgcttcacatgtcagatgaacatgataaattagctgattatataattcaaaattttgtttag

SEQ ID NO: 304770 - DNA, 837 bp, Proteus mirabilis
atgagtcgattagcctcacgctttgggcgtgccaatagtattcgtcgtgaacggtcattaacgatggaagaattattttgtaccgtacccagtgttttctctgaagaaaaacatgagtcgagaagtgaccgttatacctatatccctaccattacattactcgatagccttcaaaaagaaggattctatccgttctttgcttgccaaactcgtgtacgtgataccagtcggcgagagcataccaagcatatgttacggctcagacgacacgatcaaatcacagggattcaagttcctgaaattatcctcttaaacagtcatgatggatcaagcagttatcagatgttgccggggctatttagagctgtatgtcaaaatggtttagtttgcggagatacctttggtgaagtgcgtgtgccacataaaggtgatgttgtaggaaaagtaattgaaggagcctatgaggtattggaaacctttgattcgttggcagaaaagcgcgaacagatgcagtcactattgttaccgccaccagcacaacaagccttggcacaagcagctttgacctatcgatttggtgaggaatatcaaccgattaccgaagaacaagtattacagcctcgccgatgggaggataagaaagatgatctttggacagtgtaccagcgcttgcaggagaatttaattaaagggggattgtctggtcggaactctaaaggtaaacgtgctcgcactcgttcggtgaatggtattgatggtgatattaaactgaataaggcgctatgggtgatgacagagaaaatgtatgagcatttctctggaagagaaagaatatag

SEQ ID NO: 304771 - DNA, 420 bp, Proteus mirabilis
atgtcttcacttgaacaaattatttctaaagaagtcccattacgtcatcgtgataatttttggtttcagtactttggtactattccacaatggttaaaaatagaatcggttatctttcacacgctcgaccaattatgccctgattatcacgggggtttttggtcgttttgtaccttatcgaatcaaggggcttatctttaccctgatttatcggaagagcacatgcttttaatcaactctcataatgggcatgaagcgcaggtttctcctcaagcgatggggattgtcgtgtgtttattggtttttagtgtgtggtcatttaaaacagaaagcgagatgatgtgcgaacgtttttatcaactacgggattttgcttcacagcaccctgaagcagaggccatcttctacctaattgattaa

SEQ ID NO: 304772 - DNA, 966 bp, Proteus mirabilis
atgattttaaaggaaatgagagaagacttttactttgtgttacctgacaaaaaagatgcttatattgaagttaaggctgacaaggcgttgatagaaaaaatagaaagattaatgcaggattactgtttctttattgaggtagtggatcaaggtaaggtagtttttggatcaatattaaattatttatatgagtattatttcaatgattataactatgatattcccagaaaaattttaaactctttacatgaacaaatctataaaaaagcattactctatagaaagatagaaagttatcataataaattgacaacagtaaataaaaaaagatatatgatttgcgtttctttaggtatggatgaaataagttataatgaatcttacgctacttttgcaaaagaatataaaaaagtactctctcgcttttttaacaatcttaggtctcacgctttttaccgagattttgtgattggctatttttgggttttacttaagaaaaaatccagtaattattgctacgctcatattaatttttatttaagggattgtcattttaaccaaaagctagtaagagaaataaatagcatttggaggaaaattattaaatcagaaaataggacaggtgaagttttatatttcacaatgaaagaaaatatcaactcagctgaacaatatgaaagtatagggaacagcacaacaagaaataggataaaaaagaaatatgaaaaagtggtttctattgcatccacgaagaatgataaaacccttattgtttatcctgattttaatgaaggtaatgaaaattatgaatactatttcaataatgataataaaaaagaattttttcaaaattaccttatatcgttagcaaaaaaatctttttatataccgagttttagagggtatggtatggcatcagtcgaaatggcgaaaaataagctaaaaaaagaaaaagtgaaaaaataa

SEQ ID NO: 304773 - DNA, 600 bp, Proteus mirabilis
atgtttattaactaccctgacgaaagttacaattcgtcttacctaacaatcattcacaatgtaattaatgatgcgttgaattcattatcacgtattattgctattcgtgttgatctacgtttcccttattcatctattgatattccacctaataataaaataatgacacgctttatcgaatcactcaaagcaaaactaatcagtgacacaagaagaaaagagaaagcttggggtaggcgtctcaataatccattacattatgtttgggtaagagaatacggtgaaaagaataaacaaaaacattaccatcttcttttattattgaataaagacatctattacacattaggtcgatataatgaaagtgataatggcttatcttccattatacaatctgcttggtgtagcgcacttaatattaattaccctgccaatgcttctttagtacattttacaaagcaaggtaaatattatttagatagaaactcaccttcttttaaacaagacttagattcccttttaatacgtgtaaaatacttggctaagcatcatacaaaagattataacgatgcttatcgttcgattggttatagcctctaa

SEQ ID NO: 304774 - DNA, 321 bp, Proteus mirabilis
gtgccaatttctcaagctgttgctgacatgatttgtacaaagaaatcaggattgctttttactgaaacgtcttatcacatgtttcgtcgagcaattaaaaaagtgaaacccagtatggcattaggtcaggcaacccatgcattacgccatacattcgccacccattttatgatgaacggcggaagtattattaagttacagcgcatcttaggacacactaatttgcaacaaacgttgacctatacacactttgcaccagacttcttacaagatgccattcaatataaccccttgaaagggtgtacagaattactggtttag

SEQ ID NO: 304775 - DNA, 2661 bp, Proteus mirabilis
atgaaatcataccatattcaggcgttattgcctcgccttatacacgactttcaattcaaagagcaaaatggttatttgcgtcaaggtgtttgcccaaactgtaagaaaaaagagttatttacttcaattgaaatgccgtttgtgttgcgttgtggccgtgagaataaatgtggtgctgaattgatcgtaaaagaaatttatcccgatatatttgacgattggtcaactcattaccctaagacacaacaagcacccaatgcggcagctgatgcctatttacagcacgctagagggttgaatattgagctattaaaggggctttattctgagtctagttatcatgctaatgggttaggtgccgcaacagttaaatttgcgttaccagagggcgcatattgggagcgtattattgatagatcatcaagatttgatcgtaaagctaacttttttggttcttataaaggtcattggtggtcatcacctcaacaagatttaacacaagctaaagagatctggcttactgaaggtatttttgatgcgctaagtcttattcaaaatggtatgacagccgtttcactgatgacttgccataattatcctgaaattgctttggccaagttaaaagcagaacttggcaacaataaaaaaccattattggtttgggcgttagataatggtgcagctggcgaacgggctatgaggaagtttgttgcgcgtagtcatgaggagggttggaaagcgactgccgccagaccagcagaagttgataatgggaacgattggaatgacttgcacatgaaaggcaagttaactgaacgagatatggctcgttatcgttattatggaaagttgttgttagcttccactgcgtttgaaaaagcacgtttaatgtttaattggacggagcgttcagagtttgattttcaacatgataaccgtttgtattggtttaagttagacatcgataaaatgatgaagacgattgagcgtattcatgatgcagagcctgatttagatgaagatgaagccagacaaaaagccgttaaagaatctggtaccgtaattgaaatagccaactgttatcccacgccattatatttccaaaaatcggtagaaaccgatgaatcatggtattacatccgtgttgattttcctcgacagccgcaagttaaagccacgtttaccgcatcacagttaaccagcgccagtgaattcaagaagcgtttattgcatgtggccaaaggagcggtttataccggcacaactttgcaattagaccgcatttgtaaacaagccttgccagatataaaagaagtgatcacgcaaaattatgtgggttataacaaagagtatggtgtgtatgtgtttaatgatgttgcggtacaggatggtaagtgttttacgttaaatgaggaagattatttttctctcaataagttggatatcaagacgttaagccttagcccatcattggccattaataccgattttagcgaatttgataccagttggttgagctccctttgggatgcatttggcgcaaaaggttatgtagtgttggcgttctggttgggttcgttctttgcggagcagatacgcaagacccataaaagctatccatttttagaaatttgcggtgagcctggttctggtaaaagtacgttgattgagtttttatggcgcttatgtggtcgtgctgattacgaggggttcgatgcatcaaaatcgagtgttgccgctcgaggacgaaacttctcacagattagtaatttgccggtgtgtttaattgaaagtgatcgcgtgcaagataatgcgaagttaaaagcgtttgattgggaagaacttaagtcactgtataacggccgtgcgacccgttcattaggggtgaaaaatagcggtaatgagacctacgagccattatttaaaggcagtattgtgattgcacagaatgcagagataaacgcgtcacacgccgttttagagcggattattcatctttataccgataaagcggagcaaagtgttgaaacccgttatgccgccatagcccttgaacgttatcccattgaaaagctgtctggttttttgcctacggtattgatgaaagaagcggcgatattaaagcaatacaatgagcgcgtagatggtttacaggcgcaattatttgcggataaggcgattaaccatgagcggatcgccaagaatcacgcacaattaattgcattgctagaaacgttagcgttagttcttcctgtaaaagcggcccatattcgccaaactcgcgattttattattgagttggccaaacaacgagtccaagcgatccaactcgaccaaccacaagtgatggagttttgggaactgtttgattatttacacgataacgaggcctttggtgtgaatcacagtagtgaaaagggcgtttatgcagtgaattttaaccatattgcacaggtggccagtgagtatcgtcagtctatgcaattgaatacggatattaagaatttattgaaagcggggcgcatgcataagtttgtgggcgttaagacggtgcgaagtgtggtaaacagccagtttaatagcacgcttgcggtagggagtacgcttaaaagaccggaagtgattaagtgctgggtatttcaggaaaacagtgagagttag

SEQ ID NO: 304776 - DNA, 576 bp, Proteus mirabilis
atgatttttttatcattgttaatgtctacacgttatctgtattggcgagcaacccacacacttaattttaatacctctattgaagggatattgggtacaggattatttttggctgagatctactcttggattattttagttttaggttatttccaaacagcttggccattaaatagaaaaatagcgccattaccaaaagatatctcgttatggccaacagtggatatttatgtacccacatataacgaaagtttagatgtggtgcgtgatacggttttagccgcacaaggtattgattatccaaaagataaaatgaaagtttatcttttggatgatggtagccgtgaagagtttaaacaattcgccaatgatgttggtgtgacttatattgagcgtgaagagcacgatcacgctaaggcaggtaatctaaatcacgcaatggcattaactgatggtgagcttatttgcgtctttgattgtgaccatatctctacccgtatatttttacaggcaacggtgggttatttccttgaagatgcaaacaccacactatttctattcacccgatccttttga

SEQ ID NO: 304777 - DNA, 1455 bp, Proteus mirabilis
  misc_feature (1399)..(1408): n is a, c, g, or t
atgactgacagccaaaatttcgaatcccacacccccatgatgcagcagtatcttaagcttaaggcagagcacccagaaatcttactgttttatcgtatgggtgacttttatgaactgttttttgatgatgctaaaaaagcctcacgcttattagatatttcattaacaaaacgaggtcagtcggcaggtcaacctattcctatggctggcgttcctcatcatgcggttgaaaattatctggctaaattagtgcaattgggggaatccgttgccatctgtgaacaaattggtgatccggccaccagcaaaggccctgttgagcgtaaagtgatccgtattgtcacaccgggcaccgttacggacgaagcgctacttgaagagcgccaagacaatctattagccgctatctggcaagataaaaatggcgcttttggttatgccactttagatattacctctggacgttttcgggtcactgaaatgccggatagcgaaagtatggctgccgagctgcaacgcactcaccctgcagaactactctatccagaaacctttgagtcaatggcattaattgagcgtcagcaaggtttacgccgacgtccaatttgggaatttgagtgtgagaccgccaaacagcaacttaatttacagtttggaacccgtgatttaactggatttggtgttgaaaatgcccgacttgcactttgtgccgcaggttgcttattacaatatgttaaagatacgcaacgcactgcgttgcctcatattcgtagcattaccatggagcgtccacaagataccattatcttagatgtagccactcgccgtaatttagaattaacccaaaatcttgctggcggttgtgataacaccttggcatctgtacttgatctgtgcgtgaccccaatgggaagccgtatgctcaaacgttggatacacacccctttacgccagcgtgaacaattaattaaacgccaagatgccattagcgccttacaacccctctattttgaattacagccttttttacgtcaggtgggtgatttagagcgggtacttgctcgtttagcattgcgatccgctcgtcctcgtgacttatcacgtatgcgccatgcctttcaacaatatcaagatatccaccaagtgcttgatcaggcggatatgccctatattaaagaattacagcagcgtatcagccagtttgatgagttgcgtgaattactggaaaatgccattgttgaaacaccacccgtattagtacgcgatgggggggtgatagcctatggttataatgcagaattagatgaatggcgagcactggctgacggtgcgagtgactatcttgaaaagcttgaagttcgtgaacgtgaaaaatggggtattgataccttaaaggttnnnnnnnnnnggttcatggttactacatacaagtcagtcgcggccaaagcaatttag

SEQ ID NO: 304778 - DNA, 1953 bp, Proteus mirabilis
atgaaaggtgaaacagatttacccgtctaccaacagcaagttgtttttatttttgatgaatgtcaccgtagtcagttcggtgaagcacaaaagaatctgaaaaagaaattcaaacgattttatcaatttggtttcacgggtacaccaatttttgcgggtaaaaatgccttaggcgcagaagatacggcaagtgtcttcggtactgagttacactcttacattatcaccgatgctatccgtgatgaaaaagtgttgaaatttaaggtagattacaatgatgttcgtccacagtttaaattgatagaaaccgaaacggacgagaaaaagctcagtgcagccgaaaacaaacatgctctacttcatcctatgcggatcagtgaaattactcattacatcctgaaaaactttcgtaaaaaaacacatcgtgctttttctggagcaaagggatttaatgctatgtttgccgttagcagtgtagatgcagcaaaagcctattatgagacttttaaacatctccaacaggctgctattgagcaagataatcattataaaccactcaaagtggccaccatcttttctttcgctgccaatgaggagcaagatgctatcggtgatattaatgatgagagttttgatgttactgcgatgaacagcagttcacgggaatttttagaatcagcgattgcggattataacgctcaatttaaaaccaacttcagcaccgatggaaatagctttcaaaactactatcgagatcttgcaaagcgggttaaagcacaagaagttgacttactcatcgttgtaggtatgtttttgaccggctttgatgcgccaacactcaataccttatttgtagacaaaaacctacgctatcacggattaatgcaagcattttctcgtaccaatcgaatttacaatgccacaaagacctttggtaatattgtcacctttcgtgatttagagcaggctaccgtcgatgcaattactctgtttggaaaaagtaataccaaaagcgttgtaatggaaaaaagctacaccgagtatatggaaggttttacggatagcctaacaggtgaaacacgacgtggttttatggatattgtaggtgaactagaaaatcgtttccccaaccctgctgatattgaatccgagaaagagaaaaaggccttcgtcaaactatttggagaatatttacgtgctgaaagtgttctgcaaaactatgatgaatttacctcattaaaggccttacaaactattaatcttaatgatcctgatgcagtaaaagcctttaaaaccgaacattatttggatgatgagaaattcgcagaacttcaaataatacgtttacccgcagatcgcaagatccaagattatcgctcaagttataatgatatccgtgaatggcaacgccgtgaacgtgatgctaatgctaaagacaaaaataccgttgactgggatgatgtcgtttttgaggtagatttgctgaaatcacaggaaattaacctcgattatattttagggttaatttatgactacaacaaaaacaatacagacaaagaaacgctcaaagaggaagttaaacgtttgatccgtgccagtttaggcaaccgagcaaaagaaggattagtcgttgattttatcgaacaaacaaactttgatgatatagcagataaaacaagtatcattgaaacgttctatacctttgcacaacaagcccaacaacgtgaagcggatgcgttaatcaaagaggaaaatttgaacgaagccgctgcacgacgttatatcagtacctcattgagacgcgagtatgccactgaaaatggcacagaattaaatgagactctccccaaactcagtccgcttaatcctcagtataaaactaaaaaacaaactgtatttcaaaaagttgtagattttattgagaaatttaaaggggtgggtggggacgtataa

SEQ ID NO: 304779 - DNA, 885 bp, Proteus mirabilis
ttgcaagatcaaagccaaaagcaaaaatatactgaaacaatactgtcattgactctttctattccatttgattggaaagacaaccgtacttcggtagcaataaattatagccaatcacgaaacagtcaatcttcaacgctatctattactggctctagtggagatcaaagtgatttttcttggtcattatatggtggttatgatcaccatcgttatggtaaggaacatttatcgacaaactttggtgctggctttcaacaaaatactcgcttgggaacactgagagcagtttttgatcagggtaaaaattatcgtcaattatccctaggtacgtcaggaaccttagttttgcattctggtgggataactttaggcccttacactagtgatacctttgccttaattcatgctgatggggcgcaaggtgctgttgtacaaaatgggcaaggagccgtcatcgatcattttggttatgccattttgcccactttatcaccataccgtcgcaataatatctcccttgatacccgccatatgaaccgtgataccgaattgtcagggggaagccagcaagttgttccatattcaggtgcagtggctaaagtcaattttgcaacaattacaggtaaggcggtactaatagacgtgaaaaagaaagatggcagtataccaccaatgggcgctgaagtgctcagtgatgaaggggcggtaataggaatggtcggacaaggagggcaagtttatgcccgaattaatcataattcaggaagactacttattcgttggggaaaaagtgttaatcaatattgtcgagttccttaccagattgatttacattcatctaaaaaggtgatttatctaacgacaatttgtgaggataaataa

SEQ ID NO: 304780 - DNA, 576 bp, Proteus mirabilis
gtgctcccagcccagcggcgacaggaattgcagcagctcgccgtccaccggcttgccggcctcgaccaacccctgggtggcgcgctccaggtacaccgtgttccacagcacgatagccgccgtcaccaggttgaggccgctggcccggtagcgctgctgctcgaagctccgatccctgatttccccaaggcggttgaagaacaccgccctggccagcgagttgcgcgcctcacctttgttcaggccggcatgcacgcggcggcgcagttcaacactttgcagccagtccaggatgaacagcgtgcgctcgatccggcccagctcgcgcagggccacggccagtccgttctggcgcgggtagctgccgagcttgcgcagcatcagcgaggcggtgacggtgccctgcttgatcgagctggccaggcgcaggatgtcgtcccagtgggcacgcacgtgcttgatgttcagggtgccgccgatcagcgggcgcaacgtcgggtaggcttgcacgccctgcggcacgtacagcttggtttcgccgaggtcgcggatgcgcggcgcgaagcggaagcctag

SEQ ID NO: 304781 - DNA, 270 bp, Proteus mirabilis; identical to SEQ ID NO: 28148

SEQ ID NO: 304782 - DNA, 282 bp, Proteus mirabilis; identical to SEQ ID NO: 28147

SEQ ID NO: 304783 - DNA, 663 bp, Proteus mirabilis
atgcatattaacagtcgtctagataataacgtacttagagatattctgcttgtttcattagcggatgggatcgttggaatatcttatggtgctttagcacatactcaaggtttcgatttttgggtacctctttcgttatcgatttttgttttagcaggggcttctgaatttctatttatcggagtggttgcgatgggaggaagcgccatctatgcggcactcgctggcttaatggtcaatgcaaggcacatcccttttagtatggcggtgaaagaattacccggaaaagggattaaatcactattaggctttcatgtattaaatgatgaaagtgtggtttttgggttatctcaatcgactgctgagcaaaatagattagcattttgggcttgtggattaggcattttactgatgtggccgttaggtactatgctaggtgtttatttaggctcttttattgttgatataaaaatgcttggtttagatgcgatgttcccagcgattattttggcactaagtttaccggcattgaaaaataaattaacacgaaaagccgctattattggtagtgtgattgccttagcaacgacactgtttctccctgcgggaataccggttttattatccttgttaggcgttttatttgtggtgagaaaaatatga

SEQ ID NO: 304784 - DNA, 1371 bp, Proteus mirabilis
atggaattatcttcgctgacagcgatttcaccgattgacggtcgttacggtagtaaaacctcgtcgttacggactatttttagtgaattcggtcttttgaaattccgtgtacaggtagaagttcgctggctacaaaagctagcatcttgcaccgacattaaagaagttcccgcctttgaacaaaacgcaatcgattaccttgatgcaattgttgctaacttcaatgaagatgatgctgctcgtatcaaaactatcgagcgcaccaccaatcatgatgtgaaagcggttgaatatttcttaaaagaaaaagtggcagctatccctgcactacagcaagtttctgagtttattcacttcgcttgtacttctgaagatattaataatttatcccatgccatcatgttagaaacagcacgccaagaagtgctactaccagcatggcgcgagcttattgatactatcagtaaaatggcgcaagcatatcgtgatttacccctgctctctcgtactcacggacaaccggcaacaccttcaacggtaggaaaagagtttgcaaacgttgcataccgtatggagcgtcaatatcgccaacttactcaagtagaaattttaggtaaaattaatggtgcagtaggtaactataatgctcacctagctgcctatcctgaagttgattggcaccaatttagtgaagaatttgttacttcattggggatcacatggaacccatatactacgcaaattgagccacacgactatattgccgagctttttgattgcatcagccgctttaatacaattttaattgattttgaccgtgatatttggggttatatcgctcttaatcacttcaaacagaagaccattgctggtgagattggctcatcaacaatgcctcataaagtgaatcctatcgattttgaaaattctgaaggtaatttaggtttagctaatgccgttatgggtcacctttccagcaaattaccggtttcgcgttggcaacgtgatttaactgactcaaccgtactacgtaacctaggtgtcggtatcggttatgcattaatcgcttaccaatcaaccatgaaaggcttaaataaattagaagttaatgaaagtcatcttcgtgaagagttagatagcaactgggaagttcttgctgaaccaatccaaacggttatgcgtcgctatggtattgaaaagccttatgaaaaacttaaagagttaactcgtggtaaacggatcacggcacaagatatgattgtgtttattgacggtttagcgctaccagaacaagaaaaagcacgcttaaaagcgatgacacctgaaagctatattggttttgccagtcaacttgttgataaattagattaa

SEQ ID NO: 304785 - DNA, 3282 bp, Proteus mirabilis
atgcctagtctcgtgggctcggagatgtgtataagagacagctcttatactctgaatagcattaaggcaccatttattgatgtgtctgaaaaaatagacttttattcaggtaaaaacatttatatttcaaatgtaataattaatgaatcaaatgaaaaaagtttatcagcattagagaatattaaaataaaacgtgatgagtctttatttttcaatctaatgccaacttttagagatgaacaatatattccagcgtttttatttaatatggggctttggaaaagtaagaataatataagcttgatggctggtaaagatattgttagtcagggaataaaatattatagtaacaaagaaataacttttaatgcaggacaagatatttttcttgcctcaaaattaataaaagaagccgctccttttttcagtgatattcattacccccaactacaatctaaattattttcagataataaccttattttaaatgccgcgcgtgatattgatttaagttcaacagtattaaattcaaaagataaagttattgtattagcgggtagaaatataaaactgggtgcaaatgcttattccgccatcaaagatccccacgaagatgcgcaagacattcaatatgccaccacatccattatgggaaataaaggtatttctattgcatcatcaggctcactcacaacagaaggaagttcacttaaatcagagggggatattgctatttccagtggtggcaatatccaattgggatcagtaagaacacattttcgtaaagagtcggactcagagttagaagaacttcgtaaacaagtcagtactgaaattaatagcggtaatcatctaacactattatctgagggcagtattttatttcaggcctctcaattggctgctaataaaaagatggatattgctgctaaaggtggatttctttatgcacaggcaatggaagaatccagttactatgaagaagaaaagaaaaaatgtaattggtggacactgtgtgcgactaaaaagaaatataccaaaacatttaataacacaacgaataaagttaccgagtttattgctaatgacgatattaatttaattgctaaagatgatatcactttagaagcaagcaaattagagacagcaaagaatgccaaattaaccagtaaaacaggaggcattaattttaaagcggtgaaagatactgcttttaaacaagttattactcgttcaaaagatatatatatcactcaacgtaatcagggatacaccaagggaacatggctattacctgaactctatattggcggaaagctgactattgatgcgccaaaaggcatatctgcagatattaaagccaaaaaagagcaatctttagagcaggcattaactgccttaagtaacacaccagaatatgcttggcttaatgcgctccaacgtcaagaaaatattaattggaatttagtgaaagacacttattccagttgggatgataaaacccagcagttaaatccagttgttggtgcggttattgccatcgcggtaggggttgcaacttatggtacggcaacagctgcctcaataggaggaatggcaagtaatgcaactattgctgcaggagcctctgcgggggttgcgtcaacggcatcagttgcggcacaagccggttttgcttctttagtttcgcaagctgcggtctctttagccgaaaatcaaggcaatatttctaaaacatttggctccttaagtcgcagtgatacggtgaaatccattgtcaccagtatggccgttgcaggcaccttgcaaggtcttgaccaatttatgggttgggatcaagcaatacaggggggaacattaccgacaacaggcaagttgcttgcgacggataatgccacatggactcaagttgctcaacgcgttgcctcacagtcagtagtgagttctacactgggcacagccattcaaggtggcagttttattgataattttaaaactgcgctattaagccatatcggcagtcaatttcacgctgaaggtgccaatctcattggtgataacggtgcgatattagggcatgcaggaaaggttttaagccattctgttgttgcaggagtgagcgctgaaattgcaggaggcagtgtaacaggtgcagtagccggcgccttggcagcagaaatagcggcaatatcgctacaaagtaaattatttgagcctagttatttaaatgaaactgacagacaagttgcattaattcaagaggcactacatggcaatgaaggaaaaacacagctcactaaattaattggtgcactgacaggcgctattgtgactcataagcctgagggcgtattttctgcggctaattctgcggagttagtttatcgacataattacagcgaacatatgctttcaaagctagcactagaaaataataaggacataattgcagcgtcaaaaggtgatgttgcagcagcagaaagagttgtaaatcgacaaaatgcagggatgattgcgattgctcttggtttaggaggaagtgcgagtattattggtggtcacactgttattgcagcaacaccagaacttattgctattacgcaagctgcatttagtacatgtaaaactaattgggtttattgtgctaatcagctaggtattaatattgctgggatatcagctccagaagctgcaatcgctggtgtcaccgttggtactggttataaagtattagctagttcagaagaaagtgctaaagctttctctagcatgttagctaatagttcaaagtctttaatgacttcaggaaaattaaatataactgctataaaaccgatagtagatcaagaaaagttatttatagcagcaaataaacgtgtaatagatgaaattaataaaatatcttcaaaaaataaagctaaagatatagctacaatggtagctgcatatgatattaaaacaggaactattatagtaagaggaagtgttggttctgacattaaaatagaaatgcttcataaagatactgtggttctactaaaaaataaattaggtgatgttaaagttggaacaaaaacagtacattgtgataatattgtaggaggatgcggtgaagtattagccgcagatcagctgattcgaaaaggggtcaaacctcaagatatcagaatttctcaggcatatcgccccagaaaagcttacggatatgatttatctactatgccagaagaagcatttgttgatacatgtaaaaattgtattaaagtttttttagatgaatag

SEQ ID NO: 304786 - DNA, 135 bp, Proteus mirabilis
atggaatttaaattaatatatagtccatcattagagaatattaaaggtacatcattaggtgatgtatctgttagtaaagatcttaaaaaatcttttttgtctattttaatattatgcttcattgccaaatcctag

SEQ ID NO: 304787 - DNA, 549 bp, Proteus mirabilis
  misc_feature (20)..(29): n is a, c, g, or t
atggtattctggcggaactnnnnnnnnnngttaagaactcaagaggttaaatttactgatatttcagcaactgacgttaaaataactgaagctgcattgaagaattcatccgcaaaatggatccctgaaaactgtgtcattatagcaatttctggagctacagcaggtagatcagctattaataagataccattaactacaaatcagcactgtggctgtttagaaatagatagtaaaaaagctctataccgctatgtatttcattgggttagttttaactacgaaagtattaaagtacttgggcagggagctagaggggatcttaactccacaatcataaaaaatttcaaactaccgattccttatgccactaatcctgaaaaatcactacaagaacaagcaaaaattgttgctgtccttgataaattcgacactctaataaactcaatctccgaaggcttaccccgtgaaattgagctacgacagaagcaatacgaatattatcgagatttgttatttagtttttcaaaatcgagtaaattaatatga

SEQ ID NO: 304788 - DNA, 639 bp, Proteus mirabilis
  misc_feature (625)..(634): n is a, c, g, or t
atgagacagttaagctatctggaaaagttgttaagtggtgaagaggtggaatggaggcgtttaggtaatgtagctcgcatcaaaaatggcaaagaccacaaattgcttggcgaaggtatgtttcctgtttacggctctggaggtatcatgcgatacgtagatacttatgcctatgacaagccttctgttttgattcccagaaagggctctcttggtaatctattttttgtcgatgtcccattttggactgttgatactatcttttatacgataattgatgaggagcaaattcgtccaaaatatttttactactttttaacgacagttggccttggggatatgaaccaagctggtggtgtaccaagccaaacacaagcagttttaaatgaattaaaaattcccatcccttgccctaccgacccaaaaaagtccctcgcaatccaatctgaaatcgtgcggattttggataaatttactgccattaccgctgagcttaccgctgagcttaccgcacgtaaaaagcaatacaactactatcgtgaccggctattgagttttaaagaaggtgaggttgaatggaagacattgggggatgttactaaaaaatggtattctggcggaactnnnnnnnnnngttaa

SEQ ID NO: 304789 - DNA, 573 bp, Proteus mirabilis
atgagtaatctgactgctgaacaatttaaattgatctctaatgtaatgtatgaaccgttaagttatatccattcagactacgatgtattagcatcgccaaaagaaaatactctatggcaaaaaatagctaatcgtcatttaattcagcaatatcaacttatactgcatattgattgtgagattgatactaccgtagaaaaaatatttactcattggcacactcttcctcgttgtgctttatttttaggttatttttattctcgtcatacactattagcacaaaattattatcatttagaaccttcattaaaagcatttttagctctctatcctatgttaaataggactatcgatagcaaaatattactgtcactaaaagttatttcccccatagatattggctatcaattactatttaattttattaagctaatatcgaacgcactagctcaacgttttaaattacttttttcaccaaaatctttatcaattaatattgaatttcctaaatcacttgttttatctcctacactttttttactggtattaaattatgctacgcttgttacctga

SEQ ID NO: 304790 - DNA, 510 bp, Proteus mirabilis; identical to SEQ ID NO: 158772

SEQ ID NO: 304791 - DNA, 504 bp, Proteus mirabilis
ttgcagcagctcgccgtccaccggcttgccggcctcgaccaacccctgggtggcacgctccagatataccgtgttccacaacacgatggccgccgtcaccagattgaggccgctggcccggtagcgctgctgctcaaaactgcggtcgcggatttcacccaatcggtagaagaagaccgccctggccagcgcgttgcgcgcctcgcccttattcagccccgcatggacgcggcggcgcagctccacgctttgcagccaatccaaaatgaacagcgtgcgctcgatgcgccccagctcgcgcaacgccacggccaagccgttctggcgcgggtagctgccgagtttgcgcagcatcagcgaagccgttaccgtgccttgcttgatggaggtggccagccgcagaatttcatcccaatgggcgcgtatttgcttgatgttcagcctgtcgctgctaatcatcggcttgagcgcgtcataggcggcatcgcccttggggatgaatag

SEQ ID NO: 304792 - DNA, 321 bp, Proteus mirabilis
atgactagtttcaaagataaaataaatagctcaattttcttatttactttaggaataattcttcttaccccagtcctattacaaagtaactttcaaataaaagcatcaggaataggttatgaatataggtgctactccagtaatgaaattacttcgttaggcataccaaaaaaattcactacccctatatctgaaattaccagtaaggttttcatcttagcaaaaacagatgaaataatgtatataaaaaaagattcagatagtaaagagtctttacgaataacaactttgcctaaaatggagtttacttgtgtagaataa

SEQ ID NO: 304793 - DNA, 240 bp, Proteus mirabilis
  misc_feature (214)..(223): n is a, c, g, or t
atggttagcgtttttgatatttttaaaatcggtattggaccttcaagctcacacacggtaggcccaatgaaagcaggtaaagaatttgtcgatttacttgctgagaaaaaccttctctcctctgtttcccgcgtagtcgttgatgtgtatggctctttatctctaacaggtaaaggtcacgcaacagatatcgcgattattatgggattagccnnnnnnnnnncagggattagccggtaa

SEQ ID NO: 304794 - DNA, 2523 bp, Proteus mirabilis
atggtgaatagtatggtatttgaactcaatcagttaaggcaagtcgtattattgacaatgagtattagtgtgttttctgcttatgctacagaattcaatatcgatgtgttagatgcagaagatatacaaaatatcgatatgagccaattttccattgctggctatgttccccctggtgattatgtattaacagtttttgttaatggacaacgtttaggtgcacctcgcgatatcacggttttagagcaaaaaacgcaaacacaagctatctgtatacctgctgacttacttgattctattggtttaaaagagtctgtaaaaccaaaagtgactgtataccctaatagtcaatgccttgatctttctgttttgaaaggaatgcaaacagttattgatctcccaacactatcactcaaaataacgatcccccaattatggatggaatatagagatccttattggactccccctgcattatgggaagaaggaattaatggtgctttccttgattacagcgctaatgtttcaatcaccgaagaaaaagagggggataaacgtacttatttgtccactaatggtactgcgggtattaatttaggtgtttggcgctttcgtggtgattatagtgctatctatcaaaaaaagcggggtggcagacaatcacaagaaatacacgattttgattttagccgtctttatggttttacctccttgaaaaaattggcttcaattttaactattggagaaaattatttttactcagatgtttttgaatcatggcaatacagcggtatttcattagaaagtgatgatcgcatgctacctcccaaattagtggggtatgcaccagagatcacaggtgtagcagataccaatgcaatagtgattgttcgtagccaaaatcgagtgctccttgaaacaacagtaccccctggaccatttcgtattcaaactttagatagtggtgttcgagggatactcgatatcacaatccgtgaagaaaatggagaagagaaaaaatttagtatcagtactgcctcattaccttatttaactcgccctggccgtctgatctataaattagtgatgggtaaaactcgttatgatggacatcatttaacaggtaaacccgtattcagtggtgaattctcctatggtctatctaatgcttggtcgttatatgggggaacacaatttaacagcgattatcaggcaacggcgattggtataggacgggatctattttcttttggggcattatcacttgatattactcagtcttttgcacgttttactgataaaaaaataaaagggcgttcttatcgtcttaattatgcaaaatcttttgatgcactacgcacggatattacttttgctgggtatcgatttgctgctagagattatcgcacattaactcagtttatggatcaacgtcgtactggttatgatattcgctctccaaaagagaactatcaaatttatataaacaagtattttgataattttaatatatcactaaattatcaatatagtacctattggcaagataaacctcaaacacaatatggtttatacgcaagtactaatatcagtattccaatgttatctcagcaaaatgcgaatatatctttatcagcaaccagaactgaacgagatagtggttatcaagatgatgctattaatctgtatttaacaataccattatataaaggccatagcatttcgttttctgaatcatattctcgtattggtaaaagtaatcaatatagccatagagcaagttatagtggttatagtgatcgcgataattatagtctgaatgtgggctatagtcatggagaagaaattgatagccaatcaagtatcagtggttattattctcgcgacttttctcaagctaacttatctgctaacgcaagttatgtaccacaacaatatcgtagtgttggtgcatcaattaacagtggtattacagctacaactcaaggtattgcgttgcatcgttcagctaatggtgatactcgtttaatgattgaaacaccaggggttggtgatgtacctctagatagtggcgttatcaaaactaatcactttggacttgcagttattcctaatgttaatagttatcgtaaatctacggtttctattaataccagtcagctacctgaaaatatagaaacgctagaatcaacaactgatattaccttgactaaaggggcgatagggtatcgcagtttatcagtaatgaaaggggaaaagttgtttgccattatatccctaaatgatggtaagaaaccgccttttggggcaagtgtacgtaatgcggataatcgtgagttgggtattgttggtgaagatggtgtgacatggctagtaggcatttcatcaaaagaaaaactatctgtttattgggcagggaaaaaacaatgtgagttgtcacttcctgaagatttagcatcgccaactagcatgttattgctaccttgctcttcacctactatatcaaaaattacagaaaattaa

SEQ ID NO: 304795 - DNA, 579 bp, Proteus mirabilis
atgaatagcaactctaaacaatttgtcatgctacacgatgaaaaacgttgcattggctgccaagcttgtaccgtagcatgtaaagtcatcaatgatattcctgaaggatacagccgactacaagtacaaattcaaggccctcataatgatgaggcaggagatccacattaccaatttttccgagtttcctgtcaacattgtgaagatgcgccttgcgtttctgtctgccctacaggtgcttcatttattgatgaaaatggcattgtacaggttaaaaaagagctctgtattggctgtgattactgtgttggtgcttgtccttatcacgttcgatatatcaatccattaacacacattgctgataaatgtaatttctgtgctgatactcgactaacagaaggtgagttacctgcttgtgtaacggtatgcccaactgatgcattggcatttggtcgcattgactcacccgagatccaagcttggatcaaacagaaatccgtttatcaataccaattagataatgtcggaaaaccaaatttattccgccgtaaagagatccatcagggagataaagcatga

SEQ ID NO: 304796 - DNA, 354 bp, Proteus mirabilis
atggaacaattactaaccaaaacagaacttccagaatggttttcttacccacgtgagtttctcagaatagttgagcaaaatttacttaattttgatccttgggtcattttggaaggtgagagattacgagatcattatgctggattaaaaaaaagatacccatatagaaatattattccttttgctcgtcgggaagataatgatgacattatgtgttgggataagaataatcttgatcaaattattattattcacgattttgcaagtgaaggttatgaatatgtcggtaagtttgattcattttgggactggctcagagctgccctagaagcaactatcgaatacgatgagtaa

SEQ ID NO: 304797 - DNA, 243 bp, Proteus mirabilis; identical to SEQ ID NO: 297991

SEQ ID NO: 304798 - DNA, 882 bp, Proteus mirabilis
atggctgagaaaacacaatctgacaaattcaaagcggccaagaaaagcacattggtcagtgtttttgttaatatctttttatccatatttcaaatcacaattggtttcttctctcattcccaaggcttaattgctgatggtattcattcactgtctgatttaattgctgacttcgtggtgttaattgcgaataaaggcagtcaaaagcaacccgatgccgatcatccttatggacattttcgctatgagaatgccgcttcattagtgctagggacgattttattgattgttggtttgggaatgatattttctgctatccataaaatgttagatccttcaatcattcctgatgttcatagcatcgcgctttatgtggctttattggcattagcggctaaagaagggttatttcgttatatgttagctgtagccaaaaaagtcgattctagcatgttagtggcaaatgcttggcatgcgcgctcagatgccgcctcttctttagtggttgcaatagggatcattggtagccttgctggatttaaattctttgacccactagcagcacttattgtcgggctatttgttggccgtatgggatggcgttttacctatcaagctttgcaagatctcatggatagaggcgctgatgaagaaacacttgaacagatcaccaatacattaatcaccacaccaggagtacaaggggtacatgatttaaaaacccgtcgtgcaggtgattatttattagttgatgtccatttagaaattaaaggcgaattaacggtcaatcaaagtcatgatattgtggtcaatgcccatgatagagtacttaaacagcatgcacagattttaagtgtgatgatacacgtcgatcctgcttaa

SEQ ID NO: 304799 - DNA, 2247 bp, Proteus mirabilis
atgcctattactatatctttaaaagataataaactttttacatatggcttaccaccaaagctaattgctaaacgggatgtcgtagatggtgagagtaaaaaaaatgaaataaaattgccattaaaatcaaaagataaaatattagcgataaaaccggtgttaaataaaatccaacttgtggttgataaaggtaataaaataaaaatatattactttgatcctctgcatatttttgcattaaaagattatcattatgaaatcactcgtttaactcaagagccaccgttatctttttattcaatggttggagaaaataactataaaaactatcactcaggacagccattttctactcaaaaaataggtaattttagtgctaaaaatattccctttttttcgtcggctattgataatgcaagggttcactttgatagagcaaaacaacaatatgcattaaaaaaatatggtgcaatggtaaaagatatcgcgaaaagtcttgatcctggttttagagggatgttttctactataaaagctatagttaattctgctacattaccgagaacaattaaaacagatgctttaaatggtgtaaaaaaggtgattaaacatgattataatctgcttaataaatatattaccggaattaacaatggtaaatctcaaggtgaggttgtttattctttagtagaacaattaaatgataaagagagcattacaattagccagtataatgatatccgtgcattctttggtattagtgcatttcatttatctcaaaatattggtgtgagtgcgtttcttttagctaattttgcgaaaacacatgccctaacaatttcaaaaaataagcaagatgaagttgtattctcatttgtaaataaaatggatgcagggattgctacgggcttatctgctgggattatgaacaatgaacaaaaatggagagaaggggcgtttaattatggttttgtaacaccgttaatggccactgtgatactcgattatcattatgaaaaaaaatctaatttttcatttaaaattcaaccaaaagatttagtcgaatttattaatcaaggggtatctcttacagaaagtgaacttaaggataatgcaacgctggaatttaatagaacacaaaacgcgtcattaggtgttgaacttagaagtgaagtcagttttgatgtgggagtttctgctaatgaaaatatagaattaaatttaccgagaaatgcggttggtgctaatctctctttaaaaataataaatgtcattcacaatataaataaatttattggtcatggagagaccaaagcaaaacagttggaaaaaaatgttgatgttgagtattttagcggaagttttgaattataccgagatttaaaatttacaccttcagcgacaaaagcatcgcataatattcactggtatccattgacatcattgaaaaattttgaagtcatgttagaaaaaagagttaattcactatttaaacatagaatttatgatggcaaaataaaacaagacaaaaaagaatttgaagcacataaaaataatttaaaaggactttataaaagagtacttaaaataaataacctatttgataaataccctgttcaatacgatgttaaaagaagtataaataaacttgatcatgtttatttacagttggatgcaaataagaaattaaaaaacaaactaaatccacaattgatggagaatgatctttctctcaagagtgatgtaatagataactcaatagatctagtacacaataataacagagtacaacaattcttagctgatttaaccgaaaagaaaaaaatactttcttcacagaaaaaaaataatatgaatgaaaaatttaagccatattttatttctaaatatcagctaaatagtgaggggagagtgcgttattcagtgcttgaaactcaactggaagagcttatcaatgaagtgaaaacagatgaaaatctaacagttaatgatataaaagataaattagataatttctataataatgcgaaacaagagttaaataatattgaataccagcttaattcaatagatgtgatgtctataagtgaactcgccgataaagcaaaatcatttcctcttgcttttttacgattagaaagcaaaaagtctattatgcatcatcaagttaaaggtgaaattaattttttatatgataaatatgaaaagcaattggagaaaataaccactaattattattttcattaa

SEQ ID NO: 304800 - DNA, 663 bp, Proteus mirabilis
atgcgtaatgcgacatttaaaaattcactatacctgttaatcggattttcagcagtcgcttggatttttctcgtttatattaatgggctagatttgtccaatataaaaagttttttagagcttgttccaaaagtggtcagtattgatcttttggtggtagctctattcgctaaatggggttggaaatttaaaatctttagaggctggcttgttccctttccaaatttgaacggaagctgggtaggttttatatattcagattggaaaaatcctaagacgggagaaaaggtaccacctataccagtaatgcttactgtgaatcaatctttcttccacattagctgcatgatgcgtacgaatgaaatggaaagctattcgtattctgagggttttcttatcgatcctgaacggcaaattaaaaatgtcgcatattcctatggaagtagacctaggctcagtttgaccgagcgaagtattcctcatgatggaactgctgtgttcaagattattgaaaatccgaagcaaaaattaataggaagatattggacagaaagattaacaaaaggggaaatagttcttcaatatcattcaaaagaattacttgaggaatttcctgaaaattttggtgggcatcccgtaacagaagatgaaaatcgacgctag

SEQ ID NO: 304801 - DNA, 849 bp, Proteus mirabilis
gtgctcccagcccagcggcgacaggaattgcagcagctcgccgtccaccggcttgccggcctcgaccaacccctgggtggcgcgctccaggtacaccgtgttccacagcacgatagccgccgtcaccaggttgaggccgctggcccggtagcgctgctgctcgaagctccgatccctgatttccccaaggcggttgaagaacaccgccctggccagcgagttgcgcgcctcacctttgttcaggccggcatgcacgcggcggcgcagttcaacactttgcagccagtccaggatgaacagcgtgcgctcgatccggcccagctcgcgcagggccacggccagtccgttctggcgcgggtagctgccgagcttgcgcagcatcagcgaggcagtgacggtgccctgtttgatcgagctggccaggcgcaggatgtcgtcccaatgggcgcggacgtgcttgatgttcagggtgccgccgatcagcggccgcagcgtcgggtaggtctgcacgccctgcggcacgtacagcttggttttgccgaggtcgcggatgcgcggcgcgaaacggaagcccagcaggtgcatcagggcgaagacgtgatcggtgaagccggccgtgtcggtgtagtgctcctcgatccgcaggtcggactcgtggtacagcaggccgtcgagcacataggtggaatcgcgcacgccgacattcaccacgcgggtgctgaacggcgcgtactggtcggagatatgggtgtagaacagccgtcccggctcactgccgtacttcgggttgacgtgtccggtgctctcgccccggccgccagcccggaaacgctggccatcggaggatga

SEQ ID NO: 304802 - DNA, 183 bp, Proteus mirabilis
atggccgcgagcgttctattattagttcctggatttcctttaattaatgctgttgctgatatgtttaaaggtcatgttaatacaggactcgcacgctgggcgatggcaacgatgttgacacttgctacctgcttaggggttattttagcgatggcagtatgggagttaagagattgggcataa

SEQ ID NO: 304803 - DNA, 462 bp, Proteus mirabilis; identical to SEQ ID NO: 298454

SEQ ID NO: 304804 - DNA, 282 bp, Proteus mirabilis; identical to SEQ ID NO: 303337

SEQ ID NO: 304805 - DNA, 474 bp, Proteus mirabilis; identical to SEQ ID NO: 5003

SEQ ID NO: 304806 - DNA, 1122 bp, Proteus mirabilis
atgggattctggcaaaagctgattgccaatttagccgaaatttttgttccattattacctatcttaatttgcggcggtttattgttaggattaagaaatgttattggcgaaatgcctatatcagataataaacccctcacttatttttatccttggttaacaccaatatatgattttctctggttaccttgtgaagccatcttccattttctgcctgtaagtatttgctggtcgagtgtaaaaaagatgggcggtacacctgcactaggtatcgtactaggtataaccttagtttctccacagctaatgaatgcttacaatttaggttcacaaattcctgaagtttggaattttggtttatttactattgagaaagtaggttatcaagcccaagtgatcccttcgattttagcgggactatttctgggatggtttgagactaaattacgtcgttttatccctgattacctaaaattagttattgtgccgattgtaactcttattgtcgccgtttttgttgcccatgttattttaggccctatcggtagaagcataggtgatggtctcgcccaactgatcaagtttttaatgttaggtgattttgcccctattggttcaactatttttgcctttttctattctcccatggtgatcaccggcttacatcacacaacgttagcgatagatttacaaatgactcaaagttatggcggtacacctatttggccgattatcgctctgtctaatattgctcaagcatccgccgttgtaggcattattatcgttagccgcaaattaaatgaacaagaaattactattccggcagctatctctgcttatttaggtgtgacagagccggccatgtatggcgtcaacttaaaatatggctttcctatgctgtgcgcaatgattggcgctgcgctagcgggtttgatttgtggattaaataatgtgctatctaatggtattggtgtcggcggattacccggtattttatctatccaacctacttattggttagtttatttattagcaatgattgtggctattgtcgtccctattggattaaccattctggtctatcgctataaagaaaaagcaggcaccttgcaagtcgattaa

SEQ ID NO: 304807 - DNA, 990 bp, Proteus mirabilis
atgcccaacgcaataaatctacctttaatgaataatgaagagcgtgcggctgtagggacttgctacaaacaacatggctctcaaaaagcggtagagttggggcatcaattagttaaaggcgagataaaagcacatcgtgttgctgcttggcgtgaggcttgcgagcgttttccttctggatttatttgctgtgctcgtggcggtatgcgttcacacattgttcaaaaatggttagctgaaataggcatcgattatcctttaattgaaggtggatataaagcgttaagacaagcgacaatcgaaatgaccaatgagctagtacaacgccctattatcttaattggtggttgtacaggtaatggtaaaacaaccttagtacgctctttaccagagggaattgatttagaaggattcgctcatcatcgaggctcctcatttggtcgcactgttgaggctcagtttgctcaagcgactttcgaaaactaccttgctgtcgatatgttaaaaaaatccccctatcattcgcgctgggtactcgaagacgaaggccgtgctattggtgctaatggtttaccggaaagcttgcgtatacaaatggcaacagcccatttggttgtggtggatgatccatttgagcggcgtatggcaagactcaaagaagaatattttgatcgtatgactcatgactttattgaagcgtatggtgaagaaaaaggttggcaagaatacagtgattatttgcatcatggattgtatgctattcgacgtcgattaggtgctcaaagagccgcggagttaacccaattacttgataatgctttagccgcacaaaaaataagtgcgaatacagaagtgcatttttcatggttatcgcctttactaaaagaatattacgatcctatgtatcgttaccagttaagtaaaaaacaagataaaattatctatacgggtagctatgaagaagttgaacaatggtttgctaaccattaa

SEQ ID NO: 304808 - DNA, 654 bp, Proteus mirabilis
atggacacaaagcgcgtgggatatactgttgttgatctatcccaatggggacgaaaagaacactttgaagcatttcagtcttttgctcaatgcacctttagccagaccgttcaactggatattacttcattattaaaaaccgtaaagcaaaatgggtacaaattctatccgacatttatatacatcattagccgattggtaaataaacatgcagaattccgcatggcaatgaaagacggggaattggtgatatgggatagtgttaaccctgggtacactatctttcatgaacagaccgaaacattttcatctttatggagttattaccacaaagatatcaatcaatttttgaaaacttattcagaagatatagcgcaatacggtgacaatctagcctattttccaaaagaatttatcgaaaatatgttttttgtgtcagcaaatccttgggtaagtttcaccagttttaacttgaatgtggcgaatataaacaatttctttgcccctgtatttacaataggtaaatattatacgcaaggagataaagttctgatgccactagcaattcaagtgcatcatgccgtatgtgatggcttccatgtaggcagattactcaatgaaatacagcaatactgcgatgagggatgtaaataa

SEQ ID NO: 304809 - DNA, 849 bp, Proteus mirabilis; identical to SEQ ID NO: 304801

SEQ ID NO: 304810 - DNA, 849 bp, Proteus mirabilis
gtgctcccagcccagcggcgacaggaattgcagcagctcgccgtccaccggcttgccggcctcgaccaacccctgggtggcgcgctccaggtacaccgtgttccacagcacgatagccgccgtcaccaggttgaggccgctggcccggtagcgctgctgctcgaagctccgatccctgatttccccaaggcggttgaagaacaccgccctggccagcgagttgcgcgcctcacctttgttcaggccggcatgcacgcggcggcgcagttcaacactttgcagccagtccaggatgaacagcgtgcgctcgatccggcccagctcgcgcagggccacggccagtccgttctggcgcgggtagctgccgagcttgcgcagcatcagcgaggcggtgacggtgccctgcttgatcgagctggccaggcgcaggatgtcgtcccagtgggcacgcacgtgcttgatgttcagggtgccgccgatcagcgggcgcaacgtcgggtaggcttgcacgccctgcggcacgtacagcttggtttcgccgaggtcgcggatgcgcggcgcgaaacggaagcccagcaggtgcatcagggcgaagacgtgatcggtgaagccggccgtgtcggtgtagtgctcctcgatccgcaggtcggactcgtggtacagcaggccgtcgagcacataggtggaatcgcgcacgccgacattcaccacgcgggtgctgaacggcgcgtactggtcggagatatgggtgtagaacagccgtcccggctcactgccgtacttcgggttgacgtgtccggtgctctcgccccggccgccagcccggaaacgctggccatcggaggatga

SEQ ID NO: 304811 - DNA, 171 bp, Proteus mirabilis; identical to SEQ ID NO: 296626

SEQ ID NO: 304812 - DNA, 363 bp, Proteus mirabilis
atggaatcgataatccatctgatcactttcgaagatgacagcacaaaagttcaacttaaagcagtgctttcttctttagcggcaaatgtgaaaacctattcaaatgaacaggcatttttaaagtactatttttcatcaactagaggggctcataaagagtgcatcataattaacactaaaagtagtgcatcgccatcaattgcgttggtaaaagagttaaacaaattaaagaatatcattcctgttataattatttcgggagatgcatcgatagaaagttgccgtaacgcatttaaagcgggggctttcgaatatttaactcgccctttaaacgtcaatgagcttcttaatattgtgtcataa

SEQ ID NO: 304813 - DNA, 849 bp, Proteus mirabilis; identical to SEQ ID NO: 304801

SEQ ID NO: 304814 - DNA, 849 bp, Proteus mirabilis; identical to SEQ ID NO: 304801

SEQ ID NO: 304815 - DNA, 576 bp, Proteus mirabilis; identical to SEQ ID NO: 304780

SEQ ID NO: 304816 - DNA, 270 bp, Proteus mirabilis; identical to SEQ ID NO: 28148

SEQ ID NO: 304817 - DNA, 267 bp, Proteus mirabilis
atgggggctgaacaacaaaagtaccttacactttcttctggcgttaataaaagtaagttagccattggattaattgatatagatggaaaccaacgtattactttaggtgaaaaccataacggtggaaatggaactcaacttaacgatggcacgatgttgctgacctttaatgcatttgttgaagcgacaccaaaagcaatacaggaaaaaagtgttgtacctggagtttataatgccacggtagaatttgaggtttcttatgaataa

SEQ ID NO: 304818 - DNA, 576 bp, Proteus mirabilis; identical to SEQ ID NO: 304780

SEQ ID NO: 304819 - DNA, 291 bp, Proteus mirabilis; identical to SEQ ID NO: 303339

SEQ ID NO: 304820 - DNA, 135 bp, Proteus mirabilis
atgggcgcggacgtgcttgatgttcagggtgccgccgatcagcggccgcagcgtcgggtaggcttgcacgccctgcggcacgtacagcttggtttcgccgaggtcgcggatgcgcggcgcgaagcggaagcctag

SEQ ID NO: 304821 - DNA, 291 bp, Proteus mirabilis; identical to SEQ ID NO: 303339

SEQ ID NO: 304822 - DNA, 135 bp, Proteus mirabilis
atgggcgcggacgtgcttgatgttcagggtgccgccgatcagcggccgcagcgtcgggtaggtctgcacgccctgcggcacgtacagcttggtttcgccgaggtcgcggatgcgcggcgcgaagcggaagcctag

SEQ ID NO: 304823 - DNA, 291 bp, Proteus mirabilis; identical to SEQ ID NO: 297184

SEQ ID NO: 304824 - DNA, 528 bp, Proteus mirabilis
atggtatcgcgctatgaaaaaggcagtagctcgggacaacgttatcactatgacagtgaccaccgcattatcgcggtggatatcgaccaagggcccttagggtatcagcgagcggaataccgctacgatattttagggcgccggattgaaaaacggttatggaaagccagtgcgattgccaatacggtgacctatcatcaacatgagccggatgaagtgtacacttttggctgggtagggatgcgactggtgtctgagcacagcagcgtagcgccccataccacggtttatcatgcttacaatgaccaaagttatacgcctcttgctcgcattgaatgcacggataacccgcttaatccgcaacgggcgatttattatacgcacagtagtttaagtggcttaccggaagcgttgaccaacagtgagggtgaaatagtttggcaagggctgtatttcgacaaagacaaatttgtcgggaacaaatttgaacagcgcttgcgctggcccgtagggcgagtatcaggatga

SEQ ID NO: 304825 - DNA, 231 bp, Proteus mirabilis
atgcgtagaggactagcatcacaggcagctcttaatggattattccaaccttatggcgtcggtaaattaaactttacagcagctgtgggtggatataactcagaaaccgcaatcgctgttggttctggttatcgtattaataatgatgtagcagtaaaagcaggtattgcaactaacacgggtaattttgaaggtgttacttacaacgctggtgtcaatatagaatggtaa

SEQ ID NO: 304826 - DNA, 309 bp, Proteus mirabilis
atggtaattaatctaacagtatcatcaattatcttggtgatactgtttattttagataaaaatcttatgagcacaatcaataaagctgttgattataatataaaacaaaaaagaaaagaattaaaaatgacaggtatacaaatgggatacctacttggaataagtcaacaacatttttccagattagaaaatggtaatgctaaaattactgtagatatactattttccattgcgacaatattaaatgtaacacctcaaagtttactaccccatcatcatccccagaaaaggagcaatcaatcaagctaa

SEQ ID NO: 304827 - DNA, 282 bp, Proteus mirabilis
gtggcgatactggtggttgaccagctcggccagggccgccgaataggtctcgtcgcggatgtgccaggcttgcagccaggacagcttggcgtaggtcagaccggggctcgactcggccatcttggtcagcccgaggttgatcgcatcaccgaggatcgcggacagcagcaacgtccggtctttggcctcggccccgtccttcaggtgggtgaagtggcggctgaagcccgtccagtcgtccacgtccatcagcagttcggtgatcttgatgcgcggcagtaa

SEQ ID NO: 304828 - DNA, 270 bp, Proteus mirabilis
gtggttgaccagctcggccaaggccgccgaataggtttcgtcgcggatgtgccaggcttgcagccaggacagcttggcgtaggtcaggccggggctcgactcggccatcttggtcagcccgaggttgatcgcatcaccgaggatcgcggacagcagcaacgtccggtctttggcctcggccccgtccttcaggtgggtgaagtggcggctgaagcccgtccagtcgtccacgtccatcagcagttcggtgatcttgatgcgcggcagtaa

SEQ ID NO: 304829 - DNA, 588 bp, Proteus mirabilis
ttgaaaatattcatatttagctttctctctctgattatcttacccatttctgtttcccaagcgataacaccgacacaaaataaacagctggtggcttatgcaacggatctacctagagccgttatttatgatccagcctaccgtaaaattaattatcctaatggtgatgtgcctgctcattatggggtgtgtagtgatgtgattattcgtagttaccgaggaattggcattgatttacaaaaattgttacatgaagatatcaaagccaattttgcactttaccctagtaagcgtatctggggacttagtcgacctgatactaatattgatcaccgtagagtacccaatttggaagtttttttctcgcgtaaaggaaaggtgaaacctattagcaaagaggcgtcagactacttgcctggtgatattgttagctggcgcttagataatgggcgtcctcatattggtctcgtcatagacaagaaaagcagtgataatcagcgctatttagtgatgcataatattggttttggacaaatcgctgaagatgttttattttcgtggaaaataaccggtcattacagttattaa

SEQ ID NO: 304830 - DNA, 411 bp, Proteus mirabilis
atggatttaaaaaaaggctataaggttttacctaatgatattattgatgacgaattaggttattatgctaaactcgctctgattaaaagtgaacaaataaaaggaaattcagataagtttcatcaaatgtataatgataaaaaaatctatcaagactggataaaaaaaattgttaaagagtatggttataaaaataaaacagctctatttgaaaatatgaatttgtgtagtttaagtgttgtaggtaatgaaattatcattagacctcaaaaccatttacgtatggatcattgggtaggtgagggaatatctgatagtgcaattattacattaaaaaccaattgtagtgatgaggttttaggtgcttcaataaaaaaagcttttacacgttgtattagcagtagagtttaa

SEQ ID NO: 304831 - DNA, 612 bp, Proteus mirabilis
atgacatcaaccattctaaattataaaagcgtttttattttaatcggtagtttattacttacagcatgtgataacgaatcaactcacaataagagtgaagagataataaattatcctgtacgtactatgtcggggtttaatatcgcgtatccaacttcattctcattaaatagagatgatacagaacactattttcaattattacctgatcatgtccaagatgtcacatcacagatgttagtttatcaagccaaaccagtatgtcagttatcagaagttcgtttagtttattttaaacttgacgatatgatgagctatgatattgattcaggagcacagggtatcgttgataatatttccactattgatggcatgaaagaaacttcaacaacaataaagcctttcacagtgtcagaaatgccagctcgacaaattttctttgaaggaaagttgtctaatcaaaaagtgagctatgaaggggtattaattgcggatactaacacaaatcgtgtatggcaattacaatttattgctgaaaataaaagtaataataatcaagaagttattgattgcactaataggtatgtgaattcaattagtatcaatcaataa

SEQ ID NO: 304832 - DNA, 408 bp, Proteus mirabilis
gtgggcacgcacgtgcttgatgttcagggtgccgccgatcagcggccgcagcgtcgggtaggtctgcacgccctgcggcacgtacagcttggttttgccgaggtcgcggatgcgcggcgcgaaacggaagcccagcaggtgcatcagggcgaagacgtgatcggtgaagccggccgtgtcggtgtagtgctcctcgatccgcaggtcggactcgtggtacagcaggccgtcgagcacataggtggaatcgcgcacgccgacattcaccacgcgggtgctgaacggcgcgtactggtcggagatatgggtgtagaacagccgtcccggctcactgccgtacttcgggttgacgtgtccggtgctctcgccccggccgccagcccggaaacgctggccatcggaggatga

SEQ ID NO: 304833 - DNA, 291 bp, Proteus mirabilis; identical to SEQ ID NO: 303339

SEQ ID NO: 304834 - DNA, 390 bp, Proteus mirabilis
atgtctaaatcggcaaaaggtacgacagaacggtatggacggaacgtaaaagctaaatctggtttaaaccgctcaatactggagcagggctggtatgaaatgcgccgtcagcttgagtacaagcagctctggcgaggaggtcaggtactggcaatacctccggcctacaccagtcagaagtgcgcttgctgtggtcatacagcaaaggaaaaccgccagtcacaaagtcaattcgagtgccttgaatgtggatatacagcgaatgctgatatcaacggggcacgtaacattttagcggcaggacatgccgtgcttgccagtggagggagggtgcagtcagaccgcccgtcgaagcaggaacccgccgaggtgattcagacatcagtctga

SEQ ID NO: 304835 - DNA, 252 bp, Proteus mirabilis
atgatatttttttcatttcaagacctttgtcgtttattaattaccgatatttatttttcacacaataataatatcttattactcggttctattttatttggaagtttagcgacacattgttgttcagctccccaagatactctaatttcttcatttgggttaatacctgttagccaagcaaaaccatcatcactaattattcctagctctcgtcctttagcattactaattattgaaccaaatggtggataa

SEQ ID NO: 304836 - DNA, 249 bp, Proteus mirabilis
atggagaaattagcgattgatcctaaccgtgatagagcacaaatgagccgagttgaaaatgtcattttgcagtggcaacagtggttagctaagttaaccgagaagcaaaaacagcaagaagaggtacaaaatattcgttggatgatagaggaattaagagtgagtttatttgctcaacagataggaacgccttatcccatctctgataaacgcatcttacaagctattgagtctatctcattaagttaa

SEQ ID NO: 304837 - DNA, 408 bp, Proteus mirabilis
gtgggcacgcacgtgcttgatgttcagggtgccgccgatcagcgggcgcaacgtcgggtaggcttgcacgccctgcggcacgtacagcttggttttgccgaggtcgcggatgcgcggcgcgaaacggaagcccagcaggtgcatcagggcgaagacgtgatcggtgaagccggccgtgtcggtgtagtgctcctcgatccgcaggtcggactcgtggtacagcaggccgtcgagcacataggtggaatcgcgcacgccgacattcaccacgcgggtgctgaacggcgcgtactggtcggagatatgggtgtagaacagccgtcccggctcactgccgtacttcgggttgacgtgtccggtgctctcgccccggccgccagcccggaaacgctggccatcggaggatga

SEQ ID NO: 304838 - DNA, 342 bp, Proteus mirabilis
atggatgctgatgatatatcaagaaataaaagaatagaaaagcaagtagattatttatctaaaaatagagatatagatgtatgtggaacatcatgtaaagaatttggagcttcttttgctttaaaagaaaaacatcttccaaaaatgcaccaagatcttttagaattcagtataactcgatgcccatttatccacccttcagttatgtttcgtacagcaatttttcaaaatggcatacgttatccaacaaatactaacttaactgaagatatggcattatggttttatctattatctgtctcttatacacatctgacgctgccgacgatactccttgtgtag

SEQ ID NO: 304839 - DNA, 168 bp, Proteus mirabilis
gtgacaaaaggtgatacgctaattgaatttgatttagatgcgataatagccgcaggctatgatccaacaacgatgatcatcattactaatgatgatcataagctagacgttgttcagaccgataaaaaacatgtcgaccaaaatacagttttactaaccgtgggttaa

SEQ ID NO: 304840 - DNA, 291 bp, Proteus mirabilis
atgcgccgtcagcttgagtacaagcagctctggcgaggaggtcaggtagtggcaataccaccagcctacaccagtcagaagtgcgcttgctgtggtcatacagcaaaggaaaaccgccagtcacaaagtcaattcgagtgccttgaatgtggatatacagcgaatgctgatatcaacggggcacgtaacattttagcggcaggacatgccgtgcttgcctgtggagggagggtgcagtcagaccgcccgtcgaagcaggaacccgccgaggtgattcagagatcagtctga

SEQ ID NO: 304841 - DNA, 210 bp, Proteus mirabilis
atgaattatatatattatgttcttaaagatgatgaaaaagaaatattaaaattaaaaaagtattgcgcaaaaaataataagttattttttaaaataattgtcaaaattatgaatttaaattttcatataaatgaatctagctttagaggattaaatctagaatattatttattgaatagtaaaaaaattactgttggttatgtaaattag

SEQ ID NO: 304842 - DNA, 414 bp, Proteus mirabilis
ttgtcttattataaaaatcaaaaagaatacatcattggagacttaaaaataatctctaaagaagatataagtacaacaaatgagataaaaaataatttttttaaattagataataaacattgttctctaggtcaaaaatttgaatattatgagaatatatttaaaggtaatgcattatcaatactaaaagcactaaatgatgtagctttctttactaaaatacaagagtcatttgaacatttatctcaatttaaagatagtttaattcgatatgacgaacaagagcagttattaagacaggctaggcatcgaataagaaaatacgatttaagtcaactttattccttcgaatatatatttaaacctgattacattgatgatgaagataaattaaagttaacttttaacttttaa

SEQ ID NO: 304843 - DNA, 426 bp, Proteus mirabilis
atgtttactatacctattgataaaaaatgcaaattagaaattattaatactttggcgacaatggaatctgagttatttaaaaacatttcccccttggaattttttgattctattttaaacttaaggattttagcttctgaagatcctcgttatcaagatgcatatggagatttaaatcaacactacattaataataatgattggactctagagtatatcctccttgaaagatttgactttttaaaatcagacgaattatttaccctattactcaacacactggtatctccatccataatgaaaataggtgtgaatgaaatttcttacatctataacaagttaaatccaattttaattatatataacatagagtatcaattaaatggacacgatgaaaataatataccaatttatgaactaaattaa

SEQ ID NO: 304844 - DNA, 372 bp, Proteus mirabilis
atggataacccaggaagtcttacaaaaaaggacttggacaatttaatagaaaaaaatattataacctatcctggacatgtggataatgtcatagagtggttaaataaaagtcatgttttcgtactaccgtcatatagagaaggattacctaggagtacacaagaagcaatggcaataggtcgagccatcattactactgacgttccagggtgtcgagacactgtttctaataaaaaaaatggattgcttgttaaaccatggtcatctgatgaacttgcatctaaaatggaatatctaattaagaataaatctgaaataataaaaatgggtaataatagctatagttatatgaaaatcacaaacgaaaaataa

SEQ ID NO: 304845 - DNA, 1557 bp, Proteus mirabilis
atgaaaaatttttttatatcaaaatataccaaactaataattaatataataatttatgtagtaccaattgcgttgttactaatctcatcgaaactaatgacgattggagtaggaggtgaaagtagtgtaaatgatgtagtactattaactattctaataatagtattaagttcgtcaagaaaagcattttattttatcgctttaccgatagttttattatacgctttatatacaccaataggtattacatttggcaaacccacttatcaatatatagcatcgttatttgcaactgacttgttagaaagtggtgaatttttataccaaataccactaataaattggttttgtgcgatagctatcattatattaattttttcatactattttttatgtagaaggttgaatatttcctactataaaaatagaactttaatttgtatcatggtaattgttagtttaatagaccaatctccattctctttttttagaaatattattacctctggtcagaaagtaaaagaagaattagttaaattaaattcttttgataaagaaaatagatggggtaatacaagattaactaacaattcaaaatatgatgattatattttagttataggtgaaagtgctagaaaagattatcatcatgcttatggttatcctataaataatactccatttatgagtgcgtcaaatggcgtattagtagatggttttacatctgcagggacaaatactattgcatcgttacgattaatgctaacaaaacctaatctaaaaaaatgggaacctgattatagccttaatttaattgatttagtaaaaaacagtgggattaaaacatattggatttctaatcaaggatattttggtaagtttgatactccaatttctgcaattgctaataagagtgatgtaaagatttttatgaaatctgggacttataattcatataatatcagtgattttgaattaattcctcggtttgataagattatttttggaaagagtaaaactaaacgttttattgtaattcatttatatggttcgcatcctatggcttgcgatagattatttgattataaaaaaatcatagagcctaaagatcctaaatatgattatttagcatgttatatttcaacaataaataaaacagatgatttgttaaagtcattagtaaattctttgaataaaaactatcaagataacaatcgaacatactcattaatttatttttcagatcatggtcaggttcataatgaagtaaatggaaaaatattatttaataatgcgttcgctggaaaacggcactatgatgtacctattttcaaaatatcttatgatgatcacgaaagaaatgttattaaaaatttcaaatcaggcttaaattttatcgatgggattgctcattggattggtattgagaatgataaattaaatataggatatgatatttttactaataaagatgaccaaaatgattatgggttatcggatagaataaaagcaattaataaagaagatgatcctgcgatagatataaaggataaatag

SEQ ID NO: 304846 - DNA, 738 bp, Proteus mirabilis
atgacatttattaaatctatttcgacctttatcagtctaataacacttttttgctcattttctttacacgctaatttcgaagagcaagataaaaaattatttgaagatacccgcaaagaagcactaaaccataatgcactcgctcaatatcagttagccgaaatgtatttactgggggatggcgtagaaaaaaacctgctaaatgcacagctgtgggcaaatgaagcaataaaaagtggctatgccgatgcctatgcgctccttgctgacatttacctctttaatgccgacccttattttaaaagctattatgtcgaagcaaaagagttagccaccactgccgttaataaaggaagcatgagaggaaaaatcagcttagcaaccgcgcttattgcccctttatctggtgaagtagattatcagcaagcgatggtattacttgaagaagccacacaagcgcatcaacaagaacttgtttatgcccccatttggttaggtattttatatagtggtataggtaatattcctgtcgatatggaaaaaaccaataaattatttgcacaagccaatgaaatgacatttgaaggatttgctcaagcaatggcctcttttatgttctcaggtcaatatcatattatcgagcccaacaaacaaaaagcagatgcatttatgaaacaagcctgtgaagaagcgagaaaagttggcaatgaattttattgccaaccagaattaaattaa

SEQ ID NO: 304847 - DNA, 1488 bp, Proteus mirabilis
atgaaacagaaaccaacagcttatttccctaaccttgtattagaagaagggtctattagctcacaagtctattacgccgttagaaaggctattttagaaggcgttctatctccgggtagccgtctaccgtcaagtcgcacattggctgaaatgatgtcgatttctcgcaattctgttattgccggatttgaacgtttaattgatgaaggctatttatttactcgtcgcgggtcgggcacttttgttacgaataccattcctgatagcattaattccaatcagtgggttaaaacaaccctgccgacgtcttcattgcatatcgataatgaattaggaacacttaatcctaatttgcaaaagatgcatgctttttggcaacaatcacaactaaataccaatagtcgctttatgtttcatgtgggtgttgggtgtattgatcttttcccccatgagctttggggaagattattaggacgagtttggcgacactccaaaaaagaactcgcaacctttaactcgccaacaggctatacaccattaaaaaagatgatatgccaatatgcccaatcaacacgtgggcttaactgtcaacctgagcaagtcatcattgtcaatggcacacagcaagcgattaatcttgctactcgagtgctattacaagaggaagatactgcttggttagatgatcctggttatgacagcgctcgagctatcttcacatcgtatggtataaaaatacaccccgttcgttcagatagtgacggtatggatatttctcaagctatagaccaatgcccgcaagcaaaactagttttcaccacaccttcacatcaattccctttaggtaatactctttcactttcacgtcgtattgccttattagagtgggcatcgtccaataacatgtggatctttgaagatgattacaatagcgaatttcgctatcacactaaacccattcaagctctacaaggattagacaaacatcagcgggttatttatgccggaaccttttcaaaaatgatgtacccgggatttcgtttaggctttttagtggtacctccatctttaattgacagctttaaagtcgctaaatactacaccgactctcattctggttttttagaacaagcaacattagcgctatttatatctcaaggacattatgctcgccatgttagacggatcagaaaagcctgttatgaacgttatctaacgttaaccaatacgataaaaaagtatctctctcacatttttcgtattgaaccgactgattctggcatccatattgtctgctggttacagtctggttatacagaagaatatattgtgaaagagggacggaaaattgggttagccatacagcctttatcgcgttattgtattcaatcttatcctaaacagggtatattattagggtatgccgcacaccatccctctgaaattgaaaaaaatattattttgcttgctcaagctttatctaaataa

SEQ ID NO: 304848 - DNA, 498 bp, Proteus mirabilis
atgactagaaaagtattttttagttttcattatcaacctgataattggagagtatctcaggtaagaaatattggtgtaattgaagggaaccaaccagcgaaagataatgattgggagacagtagtcggtggcggtgatacacaaataaaaaaatggatatctgctcaaatggaagggagaacttgtacagttattctcgcaggtcaggatacagctaatcgaaaatggattaattatgagattactcaatcttgggatgaaggaaaaggtgttgtagtaatttatattcataatttaaaaaatgcacaaggtgaacaatcaaataaaggagaaaaccctttagattttataaggcatagagatacagggaaaaaactatccgagattgcaaaagcgtatgatcctccatatttaactagcaaatttgtatatgagtatattgaaaaaaatattgacaaatggattgaagaagccataaaaattaggaaagaaaattaa

SEQ ID NO: 304849 - DNA, 1161 bp, Proteus mirabilis
atgaatcatgtatatcagcttgtattgttaggtgataaagaaaaatatgaaaaaccaattgttaattggttattaatacaaactaaaattcttggtatacaaaatgaatttattaaagttattaacagattaaactttaatgagtatctaccaaataatcccacctacggcctctattttggaagtgaaaatacttccctcgatcaaaatattcttaatactttaatagatgatgctactcttatcttacccattattcctgatttaagcttggcgaatcattatcttcccaaagaattacatcctattaatgccatagccatgaaatctataaatgatattcccaccataacaagtgcaattttagaaggttttgaactattgcgtcaatctagaaaactatttattagctataaacgttcagaatctagcactgtagcaatacaactctatgaagtactagaaaaatttggatttgatgtattcttagatactcatagtatcagaccaggagaaccctttcaggaagaactttggcacagaatgactgatagtgatattgttattttgcttaatactcctgactttcttggtagccaatggacacaagaagaactagctaaagcaagtgcaatgagcttaggtattattcagatcatatggcctgattgtactcctttacgtgagtcagagctttttagaactattaaactacaacgagaatctattaataaccaaggacatctttctgaatttattattaaacagttaatctctgagacagaaagtctgcgtgcaagaacattggctgcgaggcaagataatttaacaaccgaatttatagatatatcccataaattaggggttaaatctatattacatacagataaatttattacattttcaatcaatgatagaaattatgttgttattcccactgtaggcgttccacaatcatttacaagtaataatatttatactttaagacaaaaaatttgcaaagataaaattgaagaaatatatcttttatatgatcacacccatatcaggaaaaaatggttagctcatctaagttggttagatgagtatcttcctgtaaaaacgctacgattacttaatatacaacctttcatagaaaatcaagagattaaaaatggataa

SEQ ID NO: 304850 - DNA, 597 bp, Proteus mirabilis
atggataaaaatatttttctatctgctagtatcccattgcctgatagagaccctaagtttattgaaagtgcagatatttctgctattcgtgattctgttaatgcattatccaagttaatcattcccaaagcacatttaatttggggagggcatccatccattacaccactaattaaatttactttaaaacaattaggaaaaaatgcacaagaccatgtaacactttatcaatcaaagttatttgaagaattttttccagaagataatgcctcctttgcaaatataaaattagtagatagtgtgaataatgaccgtaaagaaagtctacttgcaatgagaaatgaaatgctaagcaaagataaaaattttattgcaggtatctttattggtggaatggaaggagttattgaagaaatgaaattatttcagaaatatcaccctgacacacctatatttccaatagcaacgactggtgcagctgctcttgaaatttataatatgaacccaattgtttatcctgaagagttcaaagatgagctgataaataactatgcttatctatcattatttattaaattactaggaaataagttataa

SEQ ID NO: 304851 - DNA, 705 bp, Proteus mirabilis
atgggtaaaaaagtttttatttcatataaatatagtgatacagatgttgcttcttttaaagagctctctatggaatcatcagagccaactaaagtcagagattatgtgactaaattacaagaagtgattggtgaggaacatgtaaataaaggtgagaaggatgatgaaagtttagaagaatttaaagatgacaccatccaagggaagctagcagataaaatttttgatagcacagtaacaattgttttaatttcaccaaatatgaaggatactcttaaggcagaaaccgaacaatggattccatgggagatatcttattcattaaaggataaaagtagaaaagataaaagtggaaagattcaaaggagtccgatgaatgctgtattagcggtaattctaccagataaaaaaggaaattatgaatattatattaaagaaaatatttgttctaaatgtggctgtatcaatttaaaaactaatatgttatttgaaattctttctaaaaatatgtttaacattaaagagccaagttattcaaattgttcaaatcatgatgaaaactctgtttatataggtgatccttcttatattatttctgttaagtggtgtgatttcattaaaaatgttaattactatattgaacgaagccttgctattaaagacaaaaatgaaaattataatattgttaaaaaaccaattatataa

SEQ ID NO: 304852 - DNA, 495 bp, Proteus mirabilis
atgttaaacaaagaagaaaatttagaaaaagaatctaaaacaacacctctaaatgttgaatctaaagctgtacaaacacatttaggatttttacaagatattatttcaagattatctgataaaagctcaacatgtaaaaattggtgtattacattaacttcagcttttattttgttatcactaagattagaaaatggtagcaaatacatactgctatcatatataccgacactcctatttgcattattaaatacgtactatgtctacttagaaaaatcaataagaaaccaatataatacgtttgtcagtaaattacataacaaccaattgactacctctgatatttatacaatcaaagttaattttgaagaaaaatgcaattgcaaacaatggaaattatcaattaaatcgttctcgattcttattttttatttgccgttatggatcattaatgtagttataacattgtttattttttgtggagataaagtgtaa

SEQ ID NO: 304853 - DNA, 156 bp, Proteus mirabilis
atgttgattaatccttttttcgccatcccgttcataagcccttttccaagagtaaaaggtttctctattgtgcccaaaatagcgacaagttttagtaaaatttttactttatggcatggtttaagatttttgttttatgcacaatatctcgcctag

SEQ ID NO: 304854 - DNA, 480 bp, Proteus mirabilis
atgaaagttaatcaactaaaaatcaggcatttcaacgatatcttacctgtactttctggaagaatatttcatgttactcctacagctaatatgccacttataaaacaatctggtgctttgattccgaattctgaactattgcaagtttcaaaatttggcaactcctctaatggtttttttaggaagcgaaattgtgtatcttttttcgactatagatgctgtgggtccaagtactgggaagaacatgcacataaatgcttccctactctaatccttgaacgtggacgtggtgataagatttcaatactgtttcttcacgaaagtaagtttaacaaactgattccatggacactctggaaagaagaggaagcatggggcgatagggtggtcccatatgttgaggctggatataacggtatagtgcccctaaggtatattacagaggagctaatcgttgagtatgaccaccagcagatctag

SEQ ID NO: 304855 - DNA, 510 bp, Proteus mirabilis
atgaaatataaagtggttattggaattgcatgtggtgcgatagtattactatctggttatttaggtagtagcgtcgcctttgcaatccagtggccactttttgaggcgttaagaactactgcctctattatatttgctgtagtgggcgcttggtttgccattatctacccagaaagactgaagaaatcatttcgtggtggagtatcaaaaaataatggatctggcatacaccggctttttactccaattgttcattctacagccattcttgctgcggtattaattactgggattgttgccccattgttgaaacagttcgaatggatactgtctcacagagaggtgttcagaggcatttcgtatgggttacttgtttttctaacgttatggcagttagctacagtgttgtttagtttaataggtccagatatagttaagcgcagcgtatcaaaacaagaacggtctgatgaggcggcagaggcagtgatgccagtaaaaagaaataagtag

SEQ ID NO: 304856 - DNA, 1050 bp, Proteus mirabilis
atggacatggtaactgaacaagcggtttttacgttttataagatcaagagtgctggatattatacttatggtagtgcacaggcatcatttggctctaccactgagatgcttgaagatttacaaatgtgggcgagcgccaaaaccttaaagcaaaccaagacatttgaagcaaatgatgaaagatacccatgttatcttgttgatgctaaaaggaatggaagtgattgggctttactgatttggaatgaaatcccaactaacgggcaacaggttccatcaatcagtgaaacagcacagtttggcgctgatcctgaagtaatattgaacgcagtacaaggtgggagcataccaggttacgcaacatatttttggtttctttcggataaaaatatgttagcgactgtaaggctccacaataaactcacatctcaggcatctcttcagcactatcttaattgtttccttaaacagtcatctcgacacgtattagctgccccatttacgaatgaagatggcagcgttgaagtgagagtaacgggttataaaaataacccactcgatgagactgaagaagatagacattataatcctaagttcaaggcaaatttggttcgaaatcgtggaaagcatgacatcattagacagaatgctgaacatattagaaaaattgagcgtattattgagttggatttagcaaaaccagaagagcttgggttatggcaaagaatgcttcagtccgtcaagctaagtgaggcgcaaggtgctggcattacaactaaagtaagatacacgctatccccgaatgtatcactagaggaagtcaatctaatgattaatagctgggaggctgatctaagcgatgttaatgactatgggttttacttcgaaggggagtcaaacaaaccttactggttgagtaaatcattagcaagaacggagtttcagcttgatattgaaagagacaatattgagttcgtccagcttgactcttttttaaatgaattagttagaaagaaaaacattattttgaatggtgcaggaatacgatga

SEQ ID NO: 304857 - DNA, 807 bp, Proteus mirabilis
atgaaattaaaaaataacagcttaaatgctggtggattcgctcaccctaaattcaagttaaacgatattaacgaaacaactttcactgatatgttgcctattattcgcagcgatattaacgggcaagtaattaattgtgttagtgcgaaagcattacatagtgcgttaggtgttaagcgtaattttgcggcatggtttagcgatagaactaaccaatatgagtttatcgagaatcaagattattttactgttgaaagtttgagctacccaaaatcggatagcgcaaaatctaggcaacaattaactaaagattatcatttgacgataaatacagccaaagagttggcaatggttgagcgtacagaacaaggccgcttaatccgtcaatactttattaagtgcgaggaagcattacacaaagtagcgccaactatcaccaagcaattacgccatcaacttaaatcacgcctcaaagtggctagttactataagccgatgtgttcagctttagatctcgctcgtatggagcaagggaaaagtacaaagccacatcattacaccattgaatcaaatatgttgaatcgtattgttttaggtgggctgacggccaaagcgtgggcgaagcagaacggtattattggcaatcctcgtgatgccatgagcgaaactcaattagagcatctttcataccttgagcagacgaatacaacgttaattgagttaggtatggactatcacgcacgtaaggacaagttaatcggcttgtctcagaagtggttagcgcaacgtgtagaggtggcgcaatga

SEQ ID NO: 304858 - DNA, 567 bp, Proteus mirabilis
atgccacaaattgttatggaaaatcttaaaaatctttactacgacatgcgttcaaataaattgtcagttcaaatttataacgtccaattaggcgctattagtttcaatgtttgcttttcaatttcagaaaacccatttgtcttaactttgacgtctcgtacagatacccccgaattttttctattcaatgtaacaaatggatttagactagaaacattcatcaatatcgatacatttaaacgacttcaatatcttctatatattggaaaaaacagtaataagctaagtaccaaatcattttttttagatctagataaaaaatcaccaacaaaagctaatcttgagaaaatagatgaacgagagattttaaatttaagacaagatatcaaatatgatcgagaaagaccgtattttgatcattggcgcgaacatataacagatggtaaaaatgtaacagaagataatttagcaaaaacattagctctcttagggaaggaagcttattatttttctagaaataataacaattcggcgatttggagtcattgccccgttatcaggaattaa

SEQ ID NO: 304859 - DNA, 381 bp, Proteus mirabilis
atgaaaagaatattagcagctgctacggtggttgcttgtgtgtttgcgtttaatgctcaggcaagtagcaagtctcgtgatttaactccagaggaaaaagcatatgtagaaaaagctgtaaaagcgacgctaaaagatcctgatagcgctcaatttaaacatacaaaacttgttttgagcagtgatggagttgttgacccatactgcggaatggttaatgcaaaaaactcatttggtggatactctggatattctgttttctttgttggcataacaaataataaagatggcaaaagagtggctatttacttaggcccacaagaagaatcagatgttgcgcagcaatctataattgaggtatgcgccaagcaaggttattaa

SEQ ID NO: 304860 - DNA, 408 bp, Proteus mirabilis
atgccaataacatgcagtgagttgctggattttgctagagactgtctagataggaacgatgaagtagggtatagaaacgccatatcaagagcctactatgccgcatatcattgtgtttatccagcacttagacatggaccaaaagataatcatcagggattaatagattatttacttggtgacggctcaaagggtagtgaaaaatacgatcctaaagcattgagagcaataggatttatgttgcaaacactgaaagataacaggatcatagcagactataggctagataataaatttgcttctggtaagagagatgcggaaactgctatccacctcagctctaatgttcaaaataaaataatagaaattataagtaaaaagcaagcatcgataccaaattcaaactaa

SEQ ID NO: 304861 - DNA, 783 bp, Proteus mirabilis
atgcaacctatacacaagtctgaagaattactttccaaaatggcctcgatgcttcagtctggacagacaatcgatgatatgtcgctaatgagatacattaatgatattaacaagtatttttctgggcttgaaaagaattacgcacttggtattgcttatggactaaataaaaatatccaaaaatcaatttattattttgaattagctttacaggttcctaacggtgattatgctcttggatatctatcaatcatttgcaatttaggatcgacaaggcaggcaagagagctatctgcgagacttgccacggaatacgaatcaaaaatatttgctaaatttgcattccaatatagcttgttttttgctgatttaaaaatgatgggtgttttcatgacacagtggataaaattatctctaaatgaggagcgcatgaaattacaggaagagttaaaaaaagctagctcagccctgtctaaatttagagatatggctggattctctcagccagaaactgagatgttgtcagggattatcatggatctaatagatgacaataactatcaggtgctaagtgtcgagtacattagtgacaatagattcgatgagcctataaattcatacatggtaacaacaaactgctcaacggcatcaactttagcagatatgaacatggatttagcttttaagttcgcagatcatgaggaatttttaggtaaaaagtttagcgtttatattaaaggctctgatagcgatgcaggatcggaggcttcgtcatgccaataa

SEQ ID NO: 304862 - DNA, 1245 bp, Proteus mirabilis
atgacggtagcgatgattgaaataccgcctaaattaattccagcttttgaaggcaattatcgctatcgatgttcacacggcgggcgaggatctgcgaagacaagaacgtttgcattaatgacagcgattcgtggctacatggcagcgatgaatggtcaatctggcgtgatactttgtgctcgtgaatacatgaactcgttagaagaatcatcaatggaagaggtaaagcaggcaatacgctctgtgccttggctaaatgatttctatgaactcggtgaaaaatacattcgcactaagtgccgctcagtgagttatgtattcgcagggttacggcataacttagatagcattaaatctaaggcgagaatattaatcgcttgggttgatgaggctgagtcagtatcagaaatagcatggactaaattaacacccactgttcgtgaggctggatctgaaatatgggtgacatggaacccagaaagagacggtagcgctacggataaacgatttagaaagaatcctcctgataatgccgttgttgttgagatgaattacggagataacccgtggtttccatcagtgcttgaagaagagcgattaagtgatcaggaaagattggactctgctacttacgcatggatttgggaaggcgcttatcttgaaaactccgataagcaggtgttggcaaataaatacgttgttaaatcgttccctgatgacttatggcagaaggcagacagattactattcggtgctgacttcggttttgcaaaagacccaaatacattactacgtcagttcattttaaacgactgcctgtacatcgagtacgaggcgtacggcgtaggggttgaacttgaccatatgccagcgttttacgacaagatacctgaatctcgcaagtggccaattaaagcagactccgcacgacccgaaacaatcagttacctaaaacgccaagggttcaatatatccgcagctaaaaaatggcaaggtagcgtagaagatggcattacacatctacgcggattcaagcaaataatcattcatcctcgctgtaaagaaacagcaaaagaagcccgtctttactcgtataaaacagaccggatcacaggtgaggttcttcccattattgaggataagaacaaccactgctgggatgcggttagatatggtcttgatgggtatatcacacaaaaatcaaatgcaggcctattggttccaaaacgattactgaggcgataa

SEQ ID NO: 304863 - DNA, 603 bp, Proteus mirabilis
atgcaaaagccgagaaaatcggtgcggcgaaaatgtaaaatatgcaaagtaatatttcacccgtcgtacgataatatttggtggtgttgtccggaacatggagcagaattagcaatcaagcgacgaagtaaggagagagaaaaactagaagctaaactcaagaaagagcagaaacaaaaagaagtaaaagcccgcgataaactcaaagcccgcaagttagcagtaaaacccctctcatatttcaccaaacaagcacagaccgcattcaacgcatttatcagagaaagagacaaggatgagccttgcatctcgtgtggtcgttttcacgcaggtcagtatcacgcaggacactatcgaacaaccggcgctaatccagaacttaggttcgatgaagataactgccataaacaatgcgccccatgcaataaccatctatcgggaaatatcgaaaattacacgcctcgactaatagaaaaaatcggtcaggaacgtttcgatcgtctgatgggttctcatgagttgccaaagtggaagcgcgaggattatgagcggatacgtgatcactaccgagccaagttaaaggagctgaagaatgactcctga

SEQ ID NO: 304864 - DNA, 213 bp, Proteus mirabilis
atgaaaaccgaagcagaagcgtttatgagcgcattaacaacactcaagctatgttgggctatccataagtccaatgaagccatcaggaagtgtgcagggctattaaagcgcaaatttaaagagaatttagcgtatgaggcaatgcggaagattgaaagcagtagtagcccgatgttggttattacacttgcagagtgggagttggggaaatga

SEQ ID NO: 304865 - DNA, 294 bp, Proteus mirabilis
atgcagggaactaattcaaccgaaagaaaaattaacataccagccgaacttagtgaaaatacagcaaatcttgttgttaaatttgctgaagccatggcagaaaaattacataagtctgagaaaaaatacgggtattcagacgaatggatggctaatagctggggattggattgtaagaatcaattcatgcgacacatacagaaaggcgatcctgttgatgtggctaattattgcgcgtttatgttttatcacggctggtcaactatgctcccaccaatgccagagggtgaatga

SEQ ID NO: 304866 - DNA, 210 bp, Proteus mirabilis
atgcagggaactaattgggttaaggtgagtgagaaatatccagagaggggtaagctaattttgttctatgcaggcggtgaaactcacgccggatggaggattgatgaaggatgcggtttttacagcataaaaatatcacagtggtttgattattcagacgttatctactggggcgatctgccactcccaccaatgctagagggtgaatga

SEQ ID NO: 304867 - DNA, 1875 bp, Proteus mirabilis
atgtcttcttattttgatgtagcggttaatattgaaggtaataaaaaattaagaacaccacaaattgaagcatatattaaaataaaagagttctttagtgatccaaataataaagaagcattggttgtattacccacagggacggggaaaagtggtttaatatcaatagccccatacggggttgcaaaaaaaagagttcttatcataactccagggctagtcacgaaagacagtataagaaaaacacaagaagtactaaatgataatttctggataaactttgatgtcatgtttagcagtaaagacatccctgtcgttaatgagtatgttaataacatatcagatgaacatcttaataaaagccaaataatctatacgaacatacataaaatatcaggaagtaaaaaaggtggactaataaatagagttaatcctgacttttttgatttaatcataattgatgaggcacaccattccccagcccaaagctggaaagaagcgataaattatttctcatcagctaaaatattacatgttacaggcaccccttttaggggagataataaagaagtacctggtgaaaaaatacatgagacaccactatctgaagtcatgagagatagatatgtaaaatggctaagaaaagaaaccgttaatgctaatgaacttttcttctatacccctgattcacctgatgttagattaaccaaagatgaagttctagctctgaaagatcgagaatggctagaaaaaagtattgctctttctcctcaatgttccctagatgtgataaatcacagtattcttagacttagagaactgaaacaaacatcaccaaacgtaccacataaaatactggctgtgggttgtagcatatctcatgcagaagatttactcacttggtacgaacaacaaggattaaaatcagtaattattcatagtgaaatggatgatgatgatcgtgatgatgcatttcgtaggattgagcataatgactgtgatgtcgtcatttcagtcaatatgctaatggaaggatatgatcataaatatctaagtatattatcaatatttcgaccatacagaagtttaaatgcttttgcacaagttgtaggtaggattttaagagcaatacctgaaaatgaaatcaccagctttgaaatagataataatggcttagtaatattccatgatgaaatcggtttaaacggtatgtgggagtctttccaacgagaaactgaccgagctaaaaaagcgttagtgcgtgaatactcatttactgacagagactataatgaaaaagaaaatacattagcaggaattgaaagtggtgaagtcataattagctccacagaatcgtatttaaaagatattgattttaatgcaatctttgaacaaaaaagagcagaaataagtcaatcagtatcagatgatataaacaaaataaaattatctggtattaacctctccgaagatgcattagaaggactaagaaagacattagcagagcaagcaacaagaaaaattgccgatgacatcatagatcccgaactaatagaaaagcgtcctcatcaagcaaggcttcaaatgagagatatcttaaagaaacgaactcaggaagctgttgctaatatattgtttgacaatgatattaatgagaaaggctctgaattatataagttattcagtagacacatgaaacatcttaaaccaacagatccaaatgatggtatactagtaagatttatcaacacaaagctatcaatagcttataaccctgttgataaaagagataatcaaacattactacgttcaattaaagcacttgataacgtggttgccgaagtcgaaaggatgattaaaaaaaatgctgtgtaa

SEQ ID NO: 304868 - DNA, 432 bp, Proteus mirabilis
atgctgtgtaaaatcaaaaataatgaatttgttgacaaactagttgcatttagcctaatgaaaggcgttcaacctgaagatctggttactgctatttttgaaaaagaatatactagtatagatgtattaaaacaaaatgatgaagtttatgttattgtttcttacaaagaacatttggaagaagatgtaggattcaatattatatcgacacgatatacttacaacttagatagccagcttcagcgtgtagagcaaaaaattaataatacgaaatataaaacacagtgggataggatttctaaactaaaggaactaatttcattagcatgcaccaatgttggctctagtcatgatctatctaccattttagatgaattactccctaatactatctacaaatcaattactccttatttaaaattagtcagttaa

SEQ ID NO: 304869 - DNA, 288 bp, Proteus mirabilis
atgaaagtctatctcgacgacgagcgccaaacgccagatggatttgttcgcgcttactggcctgatgaagcgattaaattactggagactggcgaggttgagttaatcagcctagaccatgatttaggtgatgatgaacgaggtacaggctatgacgttttattgtggatagaagaacaagtttatttaaatggatttaaagcacctgaaattattgttcattcttctaattcatcagcacgtcataaaatggaattggcaatcgaaaatattaaaaaggtggagtga

SEQ ID NO: 304870 - DNA, 369 bp, Proteus mirabilis
atgaataaaataccaataacatatgataacggtttccctgatggttcttttctgaaaaatgcaaaagatgagcaagcggcaattaaaatatcaaacctactaaaaattgttgagaaaaaatctcatgatttaattattagcggcgtaatgcgaaatgacggaaatatgataattaagggaatggttaatcatgcaattgagaaaacattgtacgcaatactccatcaatatgattgcaatatcaatggcgaagactatgccggtaatttagatactatggcagatataatactgaatgatggttatgacatatcaattactgattcaattgttggtattgtctcaggcattaaaataaacgaagaataa

SEQ ID NO: 304871 - DNA, 162 bp, Proteus mirabilis
atgaaatttaaagtcggcgataaggttaaagttaaggggtatgagaaaattggggttattgaattggttcgagaagaactttacgcgccttacttagtgcacgattggtgggacaaccgagattggtacaatgagaaaatgctggagttaatcaatgaataa

SEQ ID NO: 304872 - DNA, 357 bp, Proteus mirabilis
atgaataaatacaccgaactatctgacttcgagattaataaaaaggttgctgaagcgttaggtttgctaccacatttatttattgcgagcgatgtaggtaagttgatttggaatgttccctcaaaccataattacggagaaataataagccaaaaagggtgtgagttggatttttgctgcacagtaaataatgcgtgggtaattatcaatgcatatggaattagtcttgtatatcaagataggaagttccagtttgcaactaatgacggaaatatagagtgcagcgttagcaatccattaaaagctgcaatgattattttcttgtgtatgaaggatgcggagaatgaaaaagtatga

SEQ ID NO: 304873 - DNA, 315 bp, Proteus mirabilis
ttgcttgatcggggaataacaatcggcgctgcagtctcaagagttcgtcgtgctattccgcttatccttgaagatgctgaaaatggtcttagcgttagaatgcgcaggacgactgcagaactttataatctctttaacgatcttggtcgtcgtataagcttttttgataaagaaattgatgctgtgttcaggcaatcagaagcctgccagcgcattgccaaagttaaaggcattgaccctaaaacagcaacagctgttgttgccgcgattggcaaaggaactaaatttaaaaatggtcgtcattttgccaaatag

SEQ ID NO: 304874 - DNA, 444 bp, Proteus mirabilis
atgaatattatctatctcggtattgatctggctaaaaatgtttttcagctttgtgggttaaatcaggcgggtaaaccggtttataaaaaacgcactgatcgtaaaacgttactacagaccgtcgcgaatattccggcctgcctgattggtgtggaggcctccacggatgcattttactggcagtgtgagttcgaaaaactgggacatagggtaaaagtggtcagtccccagtatgtaaaaccctttgtccgcgggcaaaaaaatgacagtaatgacgcacaggctatcgcaattgctctgatgcagccaacaatgcagttcatcccccaaaaagccctgaacagcaggatattcaggctctgcaccgtgcaagacagcgtattgttaatcaccgcactgcgacagtctgtcaaatccggggactgttgcttgatcggggaataa

SEQ ID NO: 304875 - DNA, 567 bp, Proteus mirabilis
ttgaagcgacgggttaaaaaagtacttccaaagcgtgaaaaaagaccattaaaaattgaaagtgtcccgaatattcaatgggcattagattttatacacgacagtttatattgtggtaaacgtttcagaacactcaatattattgatgaaggaacgcgtgaatgtttggcaattgaggttgatacatcactgcctgcagagcgtgttataagggtgctagaacaattaagaatggaaagaggattgctaaaacagatccgagtcgataatgggcctgagctaatctcgattaatttattgaattattgcgaaactcaccacgttgagctttgccatattcaacccggcaagccacagcaaaatggctttattgaacgatttaatggctcatttcgccgtgaatttttaaatgcctatttatttggatcattaagtcaggtgcgagaaatggtgttgttttggcagcaagattataatcagaaccgtactcatgaaagtttaaatcacctcccgccggaggcatacagaaaacagttagaaaactctaatttaatgtgtttcaattaa

SEQ ID NO: 304876 - DNA, 666 bp, Proteus mirabilis
atgaacgcgatcacaccaaaccttgaagcgacgattgaaattcttaagtcagcaagaattttagcaaactatgccaaagagcaaggctttgaagtcgatggacttcaatatagaccaacttatgaccatatgggagcaatcctagcggattcagtactccaagcaggactgaactacactactgtggtcagacctagagtactcacgatacttaacacatactcagaaatgaaaagtacttgcgagttagctcagctacttcaacaagatggtccacaaaagattcttaactggactcactcgacaaagctctctagattcgagaaccttgtgtcttatatgttaaacaatgacattcatactgccagcgatctgaaaaacaaactcatgaaagacgatttttgttcagatcttcaatccctaaacggtattggtccaaaaactgttgattacatgaaatgtctggttggtatagattctattgctgtagatagacacatccgaaattttgctaaaaatgcaggaatagagagttccgaatatacttttctgaaagatgtattttgttcagctgcagacttgttagcaatttctagacgtgagtttgattcatgggtttggagtactcttgcagtacaagactcccctcagcaatctcttttttaa

SEQ ID NO: 304877 - DNA, 639 bp, Proteus mirabilis
atgacaaaagccatagtgttaacgtcaggggggctggattccaccactgtggtatataaacttcttgaaaaagggtatgaagtttatccactgttcttcgattacggacagcattgcgtcaaaacagaatggtcaagattaaatgaggtcttacctgtttcatgcccatgtccagaacgagttgatatcagtgagatttttagaggctctacatctagattgatcgatgaagctgatttgtggacagacgacataattgatgatgatctgtacatcccatatcgaactatgctatttttcgcagctgctgctgcgcgagcccagacgataggtattctcgatgtctatactggttttatcaacagcaatcatgcaaaggaaattgactgtacttctagttttatgaataagcttgatggtctaacggaatctattggtcctgttaggtttcattctccatttagattctcaagtaaagctgatgtagtacaagaagctatgaaactaagtgtacctataggaagaacgtactcctgtcaggcagcaagcagtttcccatgcggagcttgtcctaattgtgtcgaaagactaaatgcattgaaagttattagagatgaacgcgatcacaccaaaccttga

SEQ ID NO: 304878 - DNA, 1317 bp, Proteus mirabilis
atgttgatacttggtgagatattcatagattacacactgccatccgaacacaactcatgtaaaatgcgtttaggaggtattattcatgcagctagaggcctttgggcaaataagattaaatactctgctgcaataatctgccccagctaccttacctcagaggcaaccaattatctaaagtgtcacggttgtgatgaagtaattgtaattggtgaggttcttggctcaccgaacattatgtctttagttgaccaaagagaagttggtcagcagggctacgaagagttgttaagggatagaaaaaatattgagtttactcaagacacacagaaactaacatctttcgataacgtaattctttttcctggacgattttgcgttaaaacactaaccgactgttttagtcccaatgcgaagtttagcatcgatgttgcttacgacatttcagatctgagcgagttgagcccgattacaggaaaaatcgaaactatttacctctctacatcttcagatttatttctaggtctagcagcaaacgacatatccagtttgattacggaagctcaaaacttatctccatgtagcgttgtactaaaagaaaatagaggaggaagtagattatttgacttagcgtccgatcgaatagtgtctgtcccggcaatccttcagaaaacagtgaactctgtcggtgtaggtgacgtctttactgctgtagcagcagcttatcgattttcttctcattcaattgaagacgccgtttggcgaggtgccctttcggcgacgtactactcccaaacaacatttccagacgactttaagagaaccgttcaaagaagccacaatacacctttagataaacacaaaagcattggcggaacatctttgtcttggcatgcaaggaagaaatataacatttatatagccgcacctgacttcagctatattgatagaaagcatcttgactcagctatatccagcttagagtaccacaactttaatattagaagacctgtacttgagaacggggaactaaacgaaaaatcctccaactttgaacgtcgaaaagcttatgaggacgactgtgcgctcattgatgtatgtgacgtaatatttgcaattccacttcaaagagaccctggaacattggtagagattggtattggcttagctaaaggaatacctgtaataacttatgaccctaatcgagaaaacgataataatatggttgtgactggtagtaataaatactcttccgatctcgacgaatgtttgaatcatctctacgttgaactttcatatttggagaataaaaaatga

SEQ ID NO: 304879 - DNA, 381 bp, Proteus mirabilis
atgggtagtacgggatctggaagcttcactgattacactaagaccagaagcaaagatggtagtacaggtggcacaagtggcgaagatcagtgtcagctatcaatagcttgtcttttggaagacgtcgcacagtcatctttttataatacaaaacaagatgtacctccagctggtaacgcggttttaatccaatttatgtctcacagaattgttgcggttgatacaatttctggtgaagactgtggcgcactccctactggttacaattacttactcaactgtatggaaaatggctattcatatgctggtgttgtatccaactcttcgaacggattaaatccaataattgaaatagatattcgtccaatcaccacaccatga

SEQ ID NO: 304880 - DNA, 243 bp, Proteus mirabilis
atgcattcctctgaaatcacctctctacaccactctcaagttgatttgaaaaagcacatggttttcttgatcgaaacccaaaatactatgtcgagaaccgttccactttatatcctaacgttagaatcctttaagcaagcgattaataatccggtacagtcaattgataccgacctgattttctttcgcgaaccagacaagacagcaagcgacgaacgtacaactacaataaagtgtggatga

SEQ ID NO: 304881 - DNA, 567 bp, Proteus mirabilis
ttgtaccggtacgggcaagcccgcaccagtccaacaccgccccttactcacctgcggttcgacggcatcctgctctgcgaggctgacggtcgctgccgcgacaaaggagccacgggcaccaaaaaggaggcgcaagccgggcaagacaacgacaccaatccgcgccatcgggcgcgatggaaaggggcactgatgagtgacgaagaacagaaaccgaaagggaagggccgaggaacccgaccccgaggccaacgaatagaggtatgggtgaacaacgacgaaaaggccgagctggccgaccgggctgctcagtccggtttgtcgttgtccgcctacatgaaagcggccggactgaacgcgcctattcgggcaagggctgacctgacagccgtggccgatcttgtgcgcgtgaacggcgaccttggccgggtggccgggttgctgaaattgtggctcgcggagaagcgcgggcagggtgcccggccggtggacgtggaagccatgatgaaggactttcgcgccctacaggatgaagtccgctcgatcatgatccgggtggccagatga

SEQ ID NO: 304882 - DNA, 2697 bp, Proteus mirabilis
atgattgcccatcgcatcgagcgcaagccgcaccagtcatcgaacccggccaagctggtcaggtacatggtggcggccaagggcggcatcgacccgacgagctggcagcgaacagccgactacattctggacaccgcgaacgacaccgcgaaaggcgagaaggtcgaaagctaccgcgttaccaactgcggcacggacgaccccgccgacgctgcaatcctgatcttggccactcaggcggccaacaccaggtcgaagggagaaaagacctatcacatggtcttttcgtttcaggcgggcgagcggcccccgctggaagtcctgcacgccattgaagacgaactttgcgaatccatcggccttggcgatcaccaacgggtgtccgccgtgcatgtcgatactgaccacctgcatgtgcatgtggccatcaacaaggttcatccgaccggcctacagaacatcgaaccttattacgacaagcgcaggctgatggaggcctgcgaacgcctcgaagtccaatacgggcttcgccatgacgaccacggcttaggagatagaaaccatgagcacaccagagaacgaagcgaccgaatccagcttgatcgaggtcagcgaccagagcagcgcgatagtagatttcgacgatatttacgagagtcctacgatctctcgtttgccgatgaaccagaggccaaaaccctcaacggtctgcgaacgctgtccggctgccgtatggttcgcgcttccgaaagaacttcggtgctattgccgggtgatacacgcagtgatctacagcaacgaggaaaagaacgcgctgacggcctgcgacggccgggacatggcgatagaacagctattggccaaacaggaagcggcggacgcggccgggtaagcggcaaagccgccgacgcagaggcccacagtggcatcgagacgctgaccgggtacgcggcccgcgagctggccccggcgatgcgacaggcgacgagctggcaggagctgcacgacgcagcggccgagcacggcctagaggttcgccagcgcggcgctggccttgtcatcggcgaaccagatttaggcatttgggcgaaggccagcaacgtcggccgcgacctttcgatgaaggccctaaccgaccgttttggcccgttccagccttccgaacggcaggccgaggcgaaggcgaaccgcaagcggtacgagccacggccccggcggccggataacccgacgacagcgggcttgttcaaccagtaccagcgcgagcggcaggcggccattctggcccgccgtcagggcctcgaccagatcaagcgcgagagtgcggctttcaatgcgcaggtgaggcagtggagccagacagagcggatgcttttgaaggtcgcgggcaaagggccgaccaaacgcctgatgtacggcacgatcaaacagcaggcggacgcctcgcgccagaagaaccggcagagcgcagacgctcgccgtcaggcgctgttcaagcagacgacgatgcccacttgggccgactggctaacgcagcaggccgagcgcggcaacgccgaggcgctggccgtgctgcgcgaccgcgaggaacggacacgccgctggaacggggagctactgaccgccgaccgggccgacaaggccaaagctgtcgttctcgacaagctcaagcccaaggcccggaaagacgggacgatggcgtacagcaccatcgacggcggcatggtgatcgaccggaagacgcacgttcaggcgcagaaagccacgaccggcgcggcgctggttgcgctcgaactggcatccaagcggttcgagggccaagccctcatcgtggaaggcacagacgagttccggcttgaagtcgcccagctcgccggtatgcacggcctcaaggtcacgttcaccgatccggcgatggagcagatgcgccgcgagacggccgagcacaaggaaatggagaaggcgtttcaggccgaaatcaaggcatcgagccgcgacgacttcgccgaactggtggactttggcaaagcgccgttcgagcacgtcaagggcaaccgcaagagctacttcgtcacgctgcgcgacgggaacggcgaagaccgaaccctatggggcgtcgatcttgaaagggcggtggcaaatagcggtgcgaccgtgggcgaccgcgtgcgtgtcaatcacatgggcagcgagagcgtgacgctaccggacggccggacggtggagcgcaacgaatggcgcatggagatagcaccaaaaggaagccagacagccaagccgaaaccgaaccgtccaacccctgcgccgaacgacatggatgcggcgtttctggccgaaactggcctgtccggcaagcagacgggaagccggacaggcggcaagcccgcgcagcccgtggagtctggcccggcggtacaaaaatggattgaagaacgcaacaaaaatagagacaaaatatcgtctatagactatcatcggctttggcaatccaccgacgcaggcagggccacatatcaaggtcgcaggcgcatggaagacggtagcgaagtgctgttgttgaagcgcggcgatgaaatgttggtcaagccatccaccccccgcgtagtcgccaaggcggcgacatggaaactaggtcgcgtcgtccaattggacggacgtggacgattcactgacaggagtaacgaggtcgaactatga

SEQ ID NO: 304883 - DNA, 1959 bp, Proteus mirabilis
atgagcgataaaaattcgtcggcgggtaagctgcggcttatcggcggcgtttatttagtgctgttcatcatcggtttgaacagcatatgtacgcaatttattgcgtaccgggttggctaccacccggcacttgggccgtcactgttcgggcagctttatatgcccttcgactggtggcgatggttgttcaagttctacgactcagcgcccaattcctacaactatgcctttgtgattttcgcgctcggcgtgctggtcggcctgctgacctatgttctctggatcggcttcaagacgcgcagctcgcgcaagcatgaagacgttcacggaacggcgcacttcgccacgctggacgaggtacgcgaaaccggcctactgccgcgtgagggcaagcaagggcagggcgtctactgcggggcgtatgacgaccccgaaaccggcaccacgtactacctgcggcacgacggcccggagcatgtttgcgcccttgccccgacccgttcgggcaagggtgtgggccttgtcattcccaccctgttgagctggccccattcggtgttcgtgctcgaccgtaagggcgaaaactacgccatgacttcgggctggcgtcagaagcacgccaacaacgtgatcctgcgctttgacccagcgaagccgggcaccggctgcgcatggaacccattgggcgaaatccagtttcgcacccgctttcaggtcagtgacgcgcaaaacatcgcgctgatggtcatcgactccgatggcaaaggcatcgagtccgaccacttccgtagtgccgcgttcgagctgctggtagggctgatcctgcacgcgctctacaagggcgaacaggtaggccgcacgccctgcttgcaggacattggccacatgctgaccggcgtgggcgacttcgccgcgccggacacggccaacgaccttgtagacgacccggacggcgacccgaaagcactggccgggctgttcgatgaaatgcgcgaggtgtccatcaatgacggcgacccggcgaaccgggaagcgcagcttgtcattaccggcgtcggcacccgcatggccaacaccccggcccgcgagctgggcagcatcatttcgacggcgaacaacgcccttgcgctgtaccgcgaccctatcgttggcgagaacacttcgcgcaacgacttcaagattgccgacctgatggatcacgaccggccggtgtcgctctatctcatttcgacgccgaagacgtccaagcgccttgtgccgcttacccgcctgttgttgaccatgatcgtgctcacgatggccgacgaaatggagtttgacgacgggcgggccaagacggcgcacaagcaccgcttgctgctgatgctggacgagttcccgacgctcggcaaaatcgaagtgttcgaggaagccttggcctacatcgccggttacggcatgaaagcctacctcatcacgcaggacgtgcagcagctctacaaggcttattcaaactacgaaagcatcatttccaactgccacgtccgcatcgcctacgcgcccaacaaggtcgagacagccgaatggatgtcgaagatgacgggcaccaccaccgtcgtcaaagagcaggtgacgacttcgggcaagcggttcggtgccgtcctcgacaacgtttcgcgcagctatcaggaagtgcagcgcccgctgatgacgcccgacgaaatcatgcgcctgcccggcccgaccaaggacgccagcggggagaagatcaccgcgccgggcgaaatgcttgtgttcgtcgctggccagccggtaatccgcggccgccaaatcctctacttctttgacccggttttctccaagcggtcgaagctcaagcccgtaccgactgacgttgtgcgcgtggcccagcaatccaagcccaccccggccgtcgccgggccgtccaacaacagcaacgggggctttgtcgtccaatga

SEQ ID NO: 304884 - DNA, 567 bp, Proteus mirabilis
atgaaaggtcgccgcttcggaatcgccgccttgtgcgcggccgcagtgatcggcgttgcgatcacgaccggctatcacgcaggcctgcgcctcaacttcacggactcggccccgcatgggctttggcttgtgcagaccgccgaagcggccagcatcaagcgtggcgagctggtcgaggtgtgcccgcccgcctcgccgattgttcgcctcatgggcgaacggggctacctcgcgcccggtgactgcgaggattccggcgtaaccccgctactcaagccggtgtcggcggtagcgggtgacgccatccagttcgagccgggccatcccgtgaccgtcaacggcgtggccctgccgaacaccgccgctatgcccgcgctgccgggctggcctgccgggcgctacatcgtgcagcccggcgaggtctggctgttttccagctacagcgcgggcagcttcgacagccgctactttggccccgttgtgctggccagcgtgcgcggcattgcccgccgggtcgccgtgatcggcgacccggcggccatcactacgggagtaaccaaacaatga

SEQ ID NO: 304885 - DNA, 897 bp, Proteus mirabilis
atgatcggcctcgacatgatgatggcgtgcgcgccgaacgtggccccggccacgatagagaaggtcattcaggtggagagcggcggcaaccccttggcgctcaatgtgaacgtcaagtgggtgatcgagcgtgacgagaagggcaacccgatcatggtcacggccgcagacggccagaccaagccgaagcgccgcaaggtcgtcttcaaaagccctatcgccatcaagaccgcgcaggacgccgtgaccgttgcctacatggccatcgacgcggggcactccgtcgatatgggctacatgcaggtcaacagtaccaaccttaaatcgctcggctacaccgtcgaagacatgttcgacacttgcaagaacctcgcagccggtgcgcgagttctgaccgcgttctacagcaacgcgctgccgaaatatccgaatgaacaggccgcactccgggcggccctgtccgcctacaacacgggcgatttcaacaagggttttttgaacggctacttggcccgctacggcgtcggccaacaggtcgccgtgagcgttcccgcgctcaatccgtacacggccccgactgccgtgtttgtacgtcaaccgagaaaggaagaagccatgagcaccaaagaagaagcgagcagcacccagcaggtcgcggaagcgaaaaccgccttggccccgcgtgtcgatcccgtcgtgagcaagtcgcccgaagacagcggcacgcccggcgtgcaggtcgagcacacggcggccgaagcggaagccaacggcgcattcaaagaaacggccatgtccgaagccgaggcgtgggcctcgaacgcggacttgtccgctgacccggaaggaaccgccatcgtcgtgaacggcaaggccgtgcggaaggggggtaactaa

SEQ ID NO: 304886 - DNA, 3624 bp, Proteus mirabilis
atgaaaaaggaatacgccgaggaagtcgcggcgcggatcatagagcagttggagcagggcaccgcgccgtggcaaaagccgtggcagcccggcgagctgcgcttgccgtacaacccgaccaccggcaaggaataccgtggcatgaacagcctttggctgcacatgcagggccacagtgatccgcgctggatgacctacaaccaagccgccgccgaaggcgcacaggtgcgcaagggttccaagggaacccatatcgtctactggaagttcagcgaggaacgaaaggccaccgacgagcagggccgcccggtcattgacccggacaccggcaagcaaaagaccgtgaccgtgcagctcgaacggccgcgctcattcatggccgtggtgttcaacggctcgcagatcgacggcttgccgccgctggaagcgcgacccaccgggccagagccggagcgtcacgcccgcgccgaggccatcttggccaattcgggcgcggtcattcgccacgaacccggcgaccgggctttttaccgtcccagcacggacagcatcacactgcccgagcgcaaccagttcccgaccgccgacaactactacgccaccgcgctgcatgagctgggccactggacggggcacccgtcgcggcttgaccgcgaccttgcgcacccgttcggttccgagggctacgcccgcgaagaattgcgagcggaaattgcctcgctcatgttgggcgaacgcctcgaaatcggccacgatccgggccagcacgcggcctatgtcggttcgtgggttaaagccttgaaggaagatccaaaagagatcttccgggcagcgtccgacgccgaacgcatcagcggctacgtgatggatttcgagcgtgagcaggagctatcgcaggcagttgaggccgagcttggcccgcgctggactgtagagcaccgcgacacatttgcggccaatcccgagcaggtcgtgatcggcgaaaccaatagcgcagtcgaggcgctggccctattccgaagcaagccagacacaaccgtgaccgataacagaacggaaacggttgaagggcgcacctcttgggttagagacggttccgcgccggagtggtcgccgtcgcccaagctggtcgctatggccaacgtggaagaaaggggcgtccggcttccgcatccgcgccccggtgtgcccactgccgaccatcgacttgccgaaacgctgctgctcgccgccaaccatccagagccggggagtcacggccaacaggcgttgatgaaagccgccgcagacgcaaccgccgaggccttcggggagccgctggcaggcatccgcgacggcaagctgccggagcaatggaacgggacggcgcgagcggttccggtcgcattacagggcagctatgaggcaggcgacgaggaatatttacccgtcgaacaagggcagcatacccattggcttgtcgagactcaggacgcgaccggcaactggcattggttcgctactgacttcaatcaggaaggcgcggaggcggccactacggcgaagcgtcttaataccattggcgaagtcgccgggctgtcagccgggcaggccgacgcgcagcaaggtgtgccggaacagcaggcctacaccgtgcagagccgccgtgtcgtgccggagaacgccgccaatcatgcaggccagaacgccgtctatgtgcagctcgatgacggccgcagggcttggggattcggcgcgaccgacgaagccgccgagcaatccgccgtagaacgtgcgcagcgcgtcggcctcgatgccgaccgggcaccgacccgcaccgttctgcatgagcaaccggagaagcctatgcaatcgcgcacctatctggccgtgccctacgccgagaagaacgaggcgaaggcgctgggagccaagtgggataaggaagcaaaatcatggtacgcgcccgagggtgtggacgtaaccacatcgggccttgcccggtggagcgtggacaaggccaacgtcgtcaccgcgtcggaacccaagcccgccatcgagcagttcaaggacgctttgaaggatgcgggcttgaagctcaagggcgaggtcatcacggacgggaagatgcagcgggtgcccgtcgagggcgaccggggcggtgccaccagtggcgcatacgcctaccacgaagccgggcgcacgccgggcggtttcatccagaactacaagaccggcgaagtcgtacattggaagcccgaaggcaagacgccggaactcagcgccgccgaccgtgcccggcaggccgccgaggcggccgagcagcgcaaggcacgcgatgcggcccgcctgtccgagcacggagcgaccgccgccgccgcgcaagcgttgtggaacgaggccccggccgcgaccgctgacaatgcctattgcaaagccaaaggcatcgccaacccggtaggcctgcgcgtcgtgccggacagcgtttcgccggagactgccgcgcacgggatcaagatcgccaagacagccaaggaagccaaggcgctgcgcgaggctgacccggccaaccgggttttcaaggcgggcgacctgctgatacctggcacagacggcgaggggaaattgtggacgctgcaaagcgtcaatccctacttcaaatcgttcatgaagggcggccggaaagcaggcctctacaccgttgccggtgctgacgatccgcgcaaggcgctggcccaagacggcgattcccctttggtgctcgccgaaggctacgccacagccgacacggtttcgcgtctgctgggcggcaagccggtcatcgtggcattcgatagtggcaatctcgacgcggtggccaccgagctgcgcgagcgtcacccgtcgcggccgttgctgatcgccgccgacaatgaccacaacgcgccgaaggagctggacgccaacggcaagcccaaggtcaacgtcggactggtgaaggccacagaaaccgccgagaagcacggcggcggcgtcatggccccgcagttcaacgacggcgagaagggttccgactggaacgacctcgccgggagccgtggcgacgaagctgcccgccggatgctcgccgagcaaatggcggtagccaagcgtgatgccgccataactgccgaacggctgaccacccttgcgcgtacccgcgacatggaagcccgcaacgacccgacgacgagcgccgacgatgcggccgtagcaacagagcgcgggcacgcggccgaagtattggccggtgcgcaatccgcgctcagtgaggtgcgcagcatggccgccgatggcgtgaccggcaacaccaaaggggcaacccgttcggctgctgccgtcaaagccgggatcgaccggaagaccgaggcgatgcacgaccgcgccaaagaggaacgcgaggaagtgctgaaccacggccagaccggcccgctcgatggcgtcaacgctggcgtgtcgtggaaaaagctacccgagcaagccaaacaggcgctcatcgaggacgtgaagaacggcaaggacgtgaccttgccgaaggacgccccggccaagctcaaacagatggcaggccttgaaccgacccccgcgccgcgctcgcgcagccgtgggattgatgcaggcctttga

SEQ ID NO: 304887 - DNA, 2028 bp, Proteus mirabilis
atgacgacattggtaatcgtggaatccgtcaagaaggtagagaagatcgggccaatgctgggcaacggctacaaggtcatggcgagcgtcggccacgtccgcgacctgccgcagaaagaaatcggcatcgagctgccatcgtatgcgctgacctacgagcctaccgaccgaggcaaaagcatcgtggccaaactcagggccgcagcctccgagtccgaccgcgttatcttggccaccgaccccgaccgggaaggtgaggccattgcgtggcatctggcggaaatgctgcgcctcaagaacccggagcgggtgacgttcaccgcgatcacgaaagacaaaatccttgcggccttcgcgtcaccccggccgctggacatgcagcgcgtctacgcgcaggaggcccgccgggcgctcgaccgcatgattggctatcgtgtcagccctgcgctgtcggatgccaccgggcaacgtcttggcgctggccgggtacagtctgcggccgtccgccttgtagtggaacgtgaacgggctattggcgccttcaaatccacccagcactacggggccgagctggtctttaacaacgacgacgcgacgagctggaaagcgcagtgggacacgaaaccgcacttggcggatggtgaaacgtacctgctcgatgccgagctggccaagcaggccgcagccgtccgaaacgtagtcgtcaccgactacgaggacagcgagaagggcaaggcaccggccgcgccgttcacgacctcgaccatgcagcttgccgccggtcagcgactgaaattcaagcccaagcgcacgatggaactggcgcaaaagctgtacgagcaaggggcaatcacctatcaccgcaccgactccccgaacatggacgaggaaggtattgccgacatcgccgcttacgctgccggtgctggtctgccgatggccgacaaaccgcgaaaatggaaggccaaagacaacgcgcaggaagggcacgaagccatccgcccgacacacgttgctgacttggattgcggcgaagacgacgacgaaaaggccctgtatcgcctcatctggcaacgtgccgtcgcctcgcagctcgccgatgccatgtacgccgtccgcaccgttcggctcgctggcgatgccgcaggcacgccagtttcctttaaggcaaccgggcgcaccctgttgtcgcccggctggcaggccgtctacgtggaagacgcgaaggacgagaacgacgagccggacgaagaaagcaacaacccgattccggccctcgcggtagacgccgcactggtagctgatgatggccgcgtgctgaccaagaagaccaagccgccggttcgcttcaagcagccaacccttgtaatggaaatggagcggctggggatcgggcgaccgagcacctacgcggcgatcatggagaacatcaccggccgcgaatacatcattgcggacaaaaaagagtacctgtcacccacgccagtcggcgaactcgtctgcgatggtttggtggatcgcttccggtttatcgacctcgactacacccgaggccttgaagaacagctcgaccagatcgcggaaggcaagaccgactaccacagcgtcgtctcggcggcttggactgcgctcgatgacgagctgggcagtctggattcggccaccctgccagtggcgcacccgtgcccgacatgcagcaagccgctgcgccggatcaaaggccaacacggattcttttgggcctgctcagaccgggaatgcaagaccaccttgccggacgccaaaggcaagcccggcgagcgcaaggccccaccaccgccgaccggcattgcgtgcccgaaatgcggtaaggagctggcccaccgcgtcggtacgagcaagccggtcaagcggggcatgaagccccgcccgtatgacttctatagctgcaccggcttcccgaaatgcgatgcgaagtacaacaccgggccggatggcaagccggtcttcggcgatgacgcgaaacccgcgcaggaggttgaggcatga

SEQ ID NO: 304888 - DNA, 243 bp, Proteus mirabilis
atgacgctgttcagcgagtacaccgatgccgagctggccgcgctgcccgataccatcgagccgctgaccatgcttgaactgcgttccgttctgctggcccttgacgacgatagctttccgccgcgctcgatgtacaccaagggcttggccagcgcgaccgagaagatggagcggatgcttgacgaagtgcgggccagactggtgcgcgagcgttatcaccgcccggccccggtcgaaagctaa

SEQ ID NO: 304889 - DNA, 708 bp, Proteus mirabilis
atgtttgagaagtggcgaaatggtcgggcaatacgtgcagagctgcgcgagcttgaccaaaagcaggccccggccgcgctggccaagcccgacgacagcaatcccggccgcctcctttggtgcctgccggttcccggcaagaccgatgttttcatggctctggaaaagggcgagcacgccgatcacgataggtttgtggtgccggtcaacgccgtggcgttcaaccggctatggctggccgggggcctcaattcacgggagcggccggacggctgtttgttgcgccgggacatgcccgccgatagcaaataccgtcacgcggccgcctgctttgccgaggggccgcagtcgcccgtgccgctggccagcgtctcgctggaacgcgaccgggacggcacccaatcggtcaggttcaacgacggcatgacgcgcagcatgtggctgctggccaacaacgtcgctgcgtttcccgtcctgatcgcaggcgaggcggccgccaagcagctcgcccagctcgccgggacggacggcagcaccttgcgcgtatccgaggctttccggcaggtcgaaaaggccccggccagcccacagaagacggtcagcaccaaaaaggaaggggtagggcaggggcaggcgaacaatgcgcctcagcgggccgcacagggccacagaaggccgtcccgaggtggcggcataggtatcgactga

SEQ ID NO: 304890 - DNA, 330 bp, Proteus mirabilis
atggatcgaaacaggaagctgctcttggcagcggcggcgggggccgtcgctgggtggttctgtaccgccattttggcgacctctttggtggtcaaggtaggccatgcagaacggcgtgctgaaagcgccgaagcggacgccgcaacatggaagcggcaggcaggcaaagcctacaccgaactactgaaagcccgcgctggcaccgacaacacggccgcgcttattcctgtgggcgctcgtattgattgcgtcatgcaaatgacaacggtgggcggcctgacaaccgccaagtgcgaggacgccactatttacccgcctcgggactattaa

SEQ ID NO: 304891 - DNA, 864 bp, Proteus mirabilis
atgcgatgcggtcaagcgggaaactgcacggcgtgccgttccccgatctgctcggcaaccataaggccaaggcgcgcaagttcaatctcacggccgctctgcggttcgtggatcaggtcaataaagcccgctcggaagggggaaacagtgaaagctcttaaatccacggccagcccgacgattcaggcctatggtgagctacaggcagcgtttgagcactacaacgccgctctgttcgatggccagctcccgcactgcctcatcacgatgcagcgcgaaaagcgcacctatggctatttctcgtcgcgccggttcgccaaccggcacgaaaagaccatgaccgacgaaatcgccatgaatccatcctattttggtgtcgtgccgctgctcgaaatattgcaaactctggttcacgaaatggcgcacgcttggcagtttcatttcggcgagccgggccgacgcggctaccacaacaaagagtgggccgacaaaatggaagccatcggcctgatgccttccgataccggcaagcccggcggaaagaaaacgggcgagaagatggccgactatgcgattgacggcggccccttcatgcaagccactgaggcgctgctaaagaccgacttccgcattacatggttcgacaggcacccgcctgcgggaaccgaaatcgcggcgatcttcggtgacgccgacgacgacgacggcggcctgatccagcccgccacggccgggaacaaatcgaaccgggataaataccgctgcccctgctgcggtgcgcaggcgtggggaaaaccgggcctcaagctgctgtgcggcaatgacgattgcaacgccgcgccgttcgagttggccatcaactga

SEQ ID NO: 304892 - DNA, 678 bp, Proteus mirabilis
atgagtgactggctgatacaggcgctttgcctgatgggcagcgtgatcggggtggttttattggtgtcaatgattaggcgcgacggcgataacgagttgcgcggcttttatatcttcatgggcttggcggccgtccttattgcccttgtgtatttcgtcgcggactcccggcaaaagaccgctccggtagacgaagggcagcaagtcgcacccggcacgcattcgccggaactgatcggaaaggtcgtccacgttctcgatggcgacacgttcgagctgctggtagatcaacggccagtccgcatccgcgtgaccggcattgatgccccggaaaaagatcagccatttggccagcggtcgcggcagtcgttggcgggcatgattgatagaaaccctgtagcggtgcgcgtaaagggcaaagaccgctacggccgcacgctcggcgcggtctacgccaagatatgcgccccttctgccccttgccgcgccgtttatgtcaacgctgaacaggtcaagacgggtatggcttgggcttaccgattccacggtcaagccgtcgatccggcaatgctgaaactcgaaacgcaggcccgtagcgagcgcgtcggcctgtggtcagcgccgaacgcagtggagccgtggaagtggcggcaccaaatggtgagcgcgggcaaatga

SEQ ID NO: 304893 - DNA, 339 bp, Proteus mirabilis
atgaacgtagagaaacgccagcgcatcgagcgccgcattgcacgcgaggccatcaaaggactactcgccgagggctacaagatttccgtctttgacggcgaggaaaccgtactgaccaagagcgtcgatccggccgccatcgaaaaggccatgttcagcacggacgaggatcagtttcacgtcgagcgcgacggcggcgagaagccggaaactggctgggtgctgttcgtctacggcaacgacggttgggacgtgatcgccgacaacaccgtgaacctcgaaccggcgttgaagggcgcgaccgagctggccgacaaaatcgccgaggaagaagcgtaa

SEQ ID NO: 304894 - DNA, 408 bp, Proteus mirabilis
atgagcgggcgcacgtcactaatcgttgttgttggggcaggtcttgcattcgccgcgctgacgttcggcgtcatgcggcgcagcgaggcaaccacagatttccggcaagccgctgtcgctgaccagcacgcggccgagaactacaacgggttcattcagcaggtggccgaacatgccccggatggcatgaaaaagaccgtggccaccgcttgggcgaactgcgctcgcatcagcaccaaatgggtaggccgtctgccggtgtcgtctggcccttcgcagcacgaactagacgtgtgcgaggcctcggccgtgcagttagccaccagtcgcggccacgacgccgcagcatcgagccaatacgcccaacgactccgcgctgccagcgcggcggtgcgggctgctaactga

SEQ ID NO: 304895 - DNA, 198 bp, Proteus mirabilis
atgcgtaatgcaaaagaaggcgtattcaaggtcgccgaagccgccgaccgcatcaaggaaggcatctactaccggctgcgttacgtcgaggacgaccacgttgtgttcgatccaaaaaccggccgggaagtaccggccgaacgcaatcacaacctttcgctgttgaacgaactggccagcagtgagcaggccgagtga

SEQ ID NO: 304896 - DNA, 615 bp, Proteus mirabilis
atgttgttacaccttgtaccccgcctgttcgcgtgccgtgtcaacgagccggaatgcgccctgatcgactttcattgtcccgcgctcgggctgaagctgcgcaacggcatcgagctggtcgcccggcgaccgtacccgaacaagcactatctggtggcttgccgcaaacttggccaaaaggccatgaacggctttctggtcgagacgaccgagcgcgtgcgcgagttcacgacgctgacccgctgggccgtcggcgctgatcgcatcgtcaaccatcaggtgcagtatttcgtgctcgatgacgagctggacgccatcaccgactatatgccgctctggtatgcaacgtcgccgagcctcggcggtttctccagccgctggcccgtcgtagccaacgattggacaccggccgccgcacagccgcgcatggagctggtcagtcgcgaccgtgcaggacattacgccgaccgcctcgatgacgctggccgcgtgatcgaacgggccgaagtgttccagttgcataccgtcgagcgcgagcgcgttttgtatcgcagcaactcatccatttacgaccgtattccgaccgccgatatggcgtttcgggccaccctctaa

SEQ ID NO: 304897 - DNA, 291 bp, Proteus mirabilis
atggccacagaagacaccacgccgcaacgaacctttatcgtgccggaaggcgcatacaaggaactgctctacatagtcgagctgcacaagcagcacggcgcaccgaaccgctttgaaacggtcgatgacctgctggatttcatcctgctatcggtcgcagacggatcgcgccgaccgggcgcgtgggagcgggggatgcttgaacaaatgggcctcatcgccgaatgcccggcgcatcacgtctaccgttccagctatggaaaaccgagcgaggacaagagcgatgcgtga

SEQ ID NO: 304898 - DNA, 630 bp, Proteus mirabilis
atgcgtgatccgaacgaccccggcacgatggatatagggataaccaccctaatcggttatgcccgtgtctcgaccgctgaccagtcgcttgatatgcagatcgaggccttgaaaaaggccggttgccatcaggtattcaccgacgtggccagcggggccaaggcggcccggccgggcctagaaaaagccctcgcatacctgcgcgaaggcgatacgcttgtagtgtggaagatcgaccggcttggccgttcgcttccccatttggtgcaaaccgtggacgagctgcgcgagcgcggcgtagcgttccgctcgctgactgacgcgggaattgacaccgcgacccgaaacggcaaactgctgtttaacctgttcgccacgcttgccgagttcgagcgtgacctgatacgggaacgaaccaaggcagggttggccaccgcagcggcccgaggccgccacggcgggcgcaggccggtagtaacaccggccaagctggaaagagcgcgtaagctgatggccgacaaggggctgaccgtccgcgaggcggccgccgctgtcaaagtcggcaagactgccttgtatgaggctttgaaggacgccggcgacggcgaccgcacggagggcgacgaatag

SEQ ID NO: 304899 - DNA, 249 bp, Proteus mirabilis
atgaactacaccgccctttactcgaccatctaccgcgtgcggaaccttacccgcaccgtcgccaaaatcctcgcttgggcgctcggtctacagctcgccatcctctacggactggccaccgtcgccgacgcgccgctgatgcagcttgcaggccccggccttcgcttcgcggccgtgctggccgtggtgatcttcgccccgcgagtcttcgacgccgcgctacgccgtatcgccacccgccgggcctga

SEQ ID NO: 304900 - DNA, 471 bp, Proteus mirabilis
atggcaagcacccccaacagcctgaacccgatagggccgaccacgaagatgatgccggaaggctcgcgcaaggtctgcgtcctgaacggtagtcgccagctcgaccaggtggtgaaaggcgagtggatgactatcaaggttctgccggaaaacgggctgcccaagggcatctaccaactggccgaagccaccaagccggacaccggcaaggatggcaaggaatccgcctacaccgggcaggttctgcacgtcgatagcaaggcggtctaccagctttccggcaagggcattgtcgagcattcgcgctcggcctttgccgatctggaagccaagggcgaccagatcgttgccggtcgcacctacacggtcggctatgtgaacgggaagggcaccgcccggcccggccaagccgccagtctggcgcaacaacaacagcgcagcgcctcgaagggcggcggcatttccctttaa

SEQ ID NO: 304901 - DNA, 1455 bp, Proteus mirabilis
atgagcacgcacgacaaagacaacgaccagaacaccgacctgccgcttgaggatgcggaagtgcataacgaccgcgagcatgacgacgacgcggacatgcacgacgatcctgatatgcgagcggatggcaacggctcgcctgactatctggcgacaccaaaaagagggaagggggttcgccgcctgaacaacaaaccgttgttcgttgtcggtggcgtgatcctgctcgcggtggcgggcgtcagctacacgtttttccagcggcaggcggcgcaggttgccccgaaggccgaaggcgacgggccaccagtggcgacggtagcggctccccctgtgcggccggacggcaacgactacgtgccccccgcaggtcagccgcagatgcccacggactcggcgcagccggtcgaaaccggcggacaaccgaccgaagggcagcagcgtgcagcggctccggccgcgccgtctgaggccatgcaacgccggttgcggcagattcagcaggccgaagacaagcgactggccaagtgggacgaagccctgaacggtgacgcctcggtgcagggcttcacgaccaagggcggccagaacggcggcacccagcaggtggccatgcagcaggcgggcgggaaccgcgtcaacgcggacgagctgatgaaccgctacttggccgcgaacggtcaggccgcaggtatgggcggtggtatgccgggcatgggcggtggcggtatgggtggcaacagcatggcggccgagaaccaacaggatcgcaagcaagcgttcctcgcaggcacgccagaagctgaggtctatttggctcgccagcgcaagggggccgtcgctccgtcgcaggaaatcaaagccggttgggttattcccggcgtgatgatttccggcatcaactccgatctgccgggccaaatcatcgggcaggtgcgcgaagcggtgtacgacagcgcgaccagcacgcaatgcctgatcccgccgggttctcgtttggttggcacctacgacagcggcgtaacgctcggtcagcagcgggcgctcgcggtctggcggcgcatcatctacccggatggttcctcgatctcgattgacaacatgccgggcgctgatgtgggcggctatgctggtttcaacgacttggtgaacaaccactatgctcgaatcttcggcagtggcttgctgctttcggtcttctccgcaggcatccagctttcgcagccgcaggccagcaacggcgagaactacagcagctcgcaaatcatcgccgggtcgctgggtcagcagatggggcagattggtatgcagatggcccaacgcaacatgaacattcagccgacgctcgaaattcggccgggctacgagttcaacatcatggtgacgaaggacattatcctgccgacgtgggaaggccacccgatggcgggcagcaccggcaagggttgcaactga

SEQ ID NO: 304902 - DNA, 459 bp, Proteus mirabilis
atggcacgccttcacctgattgcgccgctcgcggcggcgcttctcctgagcgcctgcgcaacgtcgcggcctaccatgtcctacgtcgaaccgaccgtgacggccagcgatgcgcagacgctcgcaagcgatacggtcgcctatctggccgatccgcttcctcctgcgcgaaccaccattgtgctcgatcctcctgccgcgaaggatcacgacgcactgacggcggccatgctgcccgcgctccgtgcgcggggctacggcgtgacgttggttgatccgcagaccggcaaggccggtggtgcgggtgtgcctctgcgctacatcgcatcgccgctcgatagcggcgtgctgctgcgtctgcaatatcagggcatcgaggccagccggtactacccgcgcggctctaatggccagctcctgccgggtgccccgttcacggttcgagggggtgcgcaatga

SEQ ID NO: 304903 - DNA, 939 bp, Proteus mirabilis
atgatgactggtgaatatatgaaaaagactcaatggatggcgggccttttcgttgccgcaattgctgcccccacgttcgcgcaagacgttccggcgctcgctgctggccaaggtgaagttctgccgccggtcaatctggtgtcgcccgatcaggtgcggctcgatggcaaggaggcctacggcatccgcttggccaatcaatggaagtcacaccctgaccgcccgcgccgtggcgcagacggcagcgtgaaatacctttttggtgccaccctgccgacgttggtttgcacacccttgcaggtctgcaatatcgagctgcaaccgggtgaggtagtgaacgacgttcacgcgggcgacaacgcacgttggaaaatcaccccggccacgatgggcagcggggcgaacgctacgaccgtgattgtggtcaagcctaccgacgccggactggtcactaacctgagcgtggccactgaccgccgcctgtactcgatcaagctggccagcacgcaacgcgagtggattccggtgctgtcgttcgactatcccgacgacgtagaacgccagtgggccgcgtaccgcgagcagcacgccaagcaggtctacaacaacaccatgccgaccgggcagaatctggccaacctcgatttcggtttccgcattggcggtgatagcccgagctggaagccggtgcgcgtctacacggatggcaccaagacctacattcagttcccatcggccagcttcggcggcgaggccccggcactggtggccaagggcaacgatggcggcctgttctcgaaggctaccgagaagctcgtcaattaccgcccgatcggcgatcgctacgtggtcgataaggtgctggatcgggcgtctctgattgtcggcgtcggccgcaaccaaaccgaagtcaccattacgcgcacggggggcaaataa

SEQ ID NO: 304904 - DNA, 699 bp, Proteus mirabilis
atgcaacccaatagcaagaaaaagggtcagcgggcaccgaaagccccgcccggcacgccttacctcgcagcccgccgcgagtggaacgagcgttatggcagtcatatcatcgacgcccgcaactggcggacggccgcgtttgtcgttggtgtcgcgctgattctctcggcggccgggaatgtcattcaggcttccaaagagaaaatcgcggtctactacgtcaacaccgacgccaacggcaaaagccgcgaaatctggcgggccgatcaggccacgccggggccgaagaccgaacaaatccgcgctgcgctgcaagattgggttcttggtgctcgcacggtgtacgcggacaaccgggcaaccaagcgcgtcgtcgatgcgacctatgcgatgacgctgcccgacagcgccgcgtatcagacgctggccacgtatcaccgggagcacaacccgtatcagcgggccgccaatgaaaccgtcgaggtggccatgcaaacgcctgtccagctctcgaaagacacttggcaagtcgagtggacggaaacggtgaaaaaccgcacttccggcaagctgatcggcacccaaagctatcagctcacggccaacgtcctgatcgctgcgccgaaggatgaagcccagcttatggccaacccggttggcctctacgtccgccaattctcttggcccgttcgcaactaa

SEQ ID NO: 304905 - DNA, 1710 bp, Proteus mirabilis
atggcacggcgcgagcaacatcagttcttgttgtgggtcgtgctgctgctcgcgtcgttcgcctttgcgagtaatgcgtcagcggctgacctgcacgaccccagcggctcatttaccggccttctcgatctggtgaaaaacagtgcggcgcagtgggatggcaagctacgtggctatgccaaaacgctgttctggctgctggcctccatccagttcgtatggacgttcatgcctttggtgttccgacaggcagatttcggcgagattgtcggcgagctgatccgcttcattttggtgattggcttcttctacgcgctgctgctgttctcggcagagtgggccgacaaggtggtggacagcttccgaacggcgggcgcgtcggcggccgggctgggtacgtcccaaatccggccgggcgacattttcggtacgtctatcgagctggccaacactatcggcgacgtggaaacgtggaacccgctaacggccactatggtcgcgctggccgggcttctggtgctgttgtgcttcgccttcattgcggcgttcatgggcctgaccatcatcgaatcctatgtggtcatcaatgcgtcggtgctgtttatgggcttcggtgcttcgcaatggacacgcgaatatgcgttggccatcgtgcgttacgccgtttccgttggtgccaagctgttcgtcctgaccttgatcgtcggcttgattgtggactcggccaagacgtggcaggcggcctacaaccacgacgacgcgagcatgtggacgatggtggggctggctctggtctgcgcctatctggccaagactatccccgagctggttgcgggcatgattagcggcacctcgatgggcggcggttcggccatcggtggcatggcagcggccggtgcagccggtgcagcggcagctattgcaaccatcgccacggccggggcggccgctccggcggcggccggtgctcttggcgcggccggtagtggtggtgcagccggtgcagcgggggccggtggcattggtggtggcggtctggctgctgcgatcaattccagctttgccggtggcagtgcgcccgcagcggccgcaactggcggcggcggggcagcttccggcctcggtgcaagcactggcggccaagcggcggccaagggcgcgtcgtcggcaggtgcccgagtgggcggcagcgccgcgccacaatcgccggggccagcgccgcagcagcctagcagcggtgtgcagcaggccgccaagcaggccgggaaggccgcgcagggtggtgacgacgacaagggccagcaaacggcagcaggggcgcaaacgcctccggccggtaatgcggacgcctccgcgtccagctcggcccctagcgcctctgcgcagtcgccagcggcccaagctggcgaagggcagggcgaagccaaaagcggcgtatctggccatcaaatcgcgtcgggcattacccgtggtgcgggcatcctctccgcgattgccgttcccggcatggaaggcgcggcaggcctgtcgctgggtgccggtgcgccgcagccggtgcccggctccggtgctgacgctgatggctcaatggctcccagctcggccccggccagtgcagaaccgcagaacgtcattcgcccggcagaaccgtcgccagcatcgccaagcgatgcaggcccggccaagccagacaccaaagggggggagtaa

SEQ ID NO: 304906 - DNA, 789 bp, Proteus mirabilis
atgaacagtatctttcgcgcaaagctgcgtaatggcgttctttcggcggccgtgacggccagcgttgcccttggtgccgggttctttgcagctccgacaccggcttacgctatctactgctccaactgctcgacgttctatcagcagatgttcgagtacgccgaagcggtcaacacgcaactgaacacggcccagcaactggcaacgcagattcagcagtatcaaaacatggtcacgcagggcctgagcctgcctaattccatgttcggcagcatcgcggccgacctgcaaagcgttgccagcatctacacgaaatcgcaggccttgggccgccaaatccagaacatggattcgcagttcaacacgcagtttcccggctttcagtcgtacctgaattcggccgcggcctcggccaaggctccggcatcgagcacgatgcccgaccgttacgaaaagtggtcggaacagggccgcgacaacgtgaaagcggcgatggaggcggcgaacctcaataccagcactttcgagtctgaggacgcccagctttcccgcatggtggcccgctcgcaatcggccgctggccggatgcaggcgattcaggcgggcaatgaaattgcctcgcagaacgtgcagcaactgcaaaagctgcgcgacctgatcgccacgcaaatcaacatgcagggcaactacatggcgcaagaacaggatcgcatccagctcgatgacgctctgcgtcagcagcgccgtagcggcaccatcacacaaaccggcagcaacaaggggtattaa

SEQ ID NO: 304907 - DNA, 2508 bp, Proteus mirabilis
atgcttgcgttagcacccttccgtagcaaggccgctggcttgcccgatctgctcaactatgccgccctcgttgatgagggcgttgtattgggcaaagacggctcgctgatggctggtttcttcttccgtggtgacgacgcagcatccgccaccacgtcagaacgcaactacctgaccgcgttggtcaaccagtacctggcccggttcggttcgggctgggctgtatggactgacgcctcgcgcttagcctcgccgggctatccagcccccgagcagtcacactttcctgaaccgattaccgccctgatcgacgccgagcgtcgggcggccttcgtcaaggaaaatacgctgtttgaaagcgagtacgcgctagtcctgcaatacctgccgccgacgcggcgggattccaagctgggcgaactggtctacgacgatgacggcgtagacgatagcaatccggccgaccggctgttgctggacttcaagaaaaagctcgatgacctgcaagacggcctcggcgatctgatgcacatgcgccgcatgggcaccatcacggtaggcgagggcgacgaggcctaccagagtgatgagctgtgcaattacctgcactacgtgctgaccaatgagcctatcgcgctgcgcatccctgattgcccgatgtatctggatgcgtggctgggctatcccgaactgtggccgggcgacacgccgaagctgggcaacaagttcatttcgtgcgtggccatcgaaggcttccccggcaactccttccccggcatcctcgacatgctcgacggcctgccaatgtcctatcggtggtcgtcgcggttcatcttccttgaacagcacgaagccgtggccgcgctcaaccgctaccgcttgaagtggcagcagaaaattcgcgggttctggtcgcaggtcttcaagtcgcagaagggcatgattaacaccgacgccctgaaaatggcgcaggaaactgaggtggctatcaacgacgccaagtcgggattggtcgcctacggctactacacgccggtcgtggtgctgatgcacgaagaccgcaatttcctgtccgaacaggcccgctacgtcaagcgtgagcttgaacgcaagggcttcgcggcccgtatcgaaacggtcaacgcgctggaagcgtggcttggctcgctgcccggacagacctacccgaacgtgcgccgtcctttggtgcataccctcaacctcgccgacctgctgccactggccagcgtctggcccggcctgcgcgaaaacccgtgcgatttgtacccggccgggtcgccgccgctcatgcacacggtaacgaccggcgcaacgccgtttcgtctcaacctgcacgtcggcgacgttggccataccctgattttcggcccgaccggggccggtaaatcgaccttgctggccaccctgcaagcgcagttccggcgctatcgcagccgtcgccgccgcgatggcagcacggcaccggcaacggtgacggcattcgacaagggacgttcgctgtatgcgctgtgcaaggccacgggcggcgttcactacgacattggcaacgatgaggccgacaccccggcgctgacgccgttggtggacattgatagcgagtcagaagccttgtgggctgaggagtggattgcgacctgctacgagttgcaggccaaaaagccgccgacgccgcagcaaaaggccgagattcaccgggctatgaacctgttgcgcgaggcaccccgcgagttccgttcgctgaccgattacgtcacgacggtacaggatgccgaagtgcgggacgcgctgacgcactacaccatttccgggtcgatgggccacctgctcgacggcaaggaagacgggttgaagatcagcaactacacggtgttcgagattgacgacctcatgaaaatgggcgacgcgaacgccattcccgtgctgctgtacctgttccgccggttcgagcgttcgctgaatggccagcccgccatgctgtcgctcgatgaggcttgggtgatgctgggtcatccggtgttccgcgagaagctgcgcgaatggctcaaagagctgcgtaagaaaaactgcctcgtcatcatggccacgcaaagcctgtcggatgcggtcaagtccgggctgctcgatgtgctgctggaacagtgcccgacgaagatcctcttgccgaacaaggaagccgacctgcatggcaccaaagagacacccggcccggccgacctctacgccatgttcggcctgaacagcaaggaaatcggcatcctgaaaaacgggcagtacaagcggcagtattactacaagtcgccgctcggtcgccgtgtgttcgagctgggcttggggcctcttaccaaggcctttgtagcggtatccgacaaggaagacttggcggaggtgcggaacctgatcgccgatcatggcgatgactggccgcttttttggttgcaacacaaaggagttgattatgaacagtatctttcgcgcaaagctgcgtaa

SEQ ID NO: 304908 - DNA, 492 bp, Proteus mirabilis
atgatcgcaaatgctctgtctgcttcgccaatggcgtcgaaggcttctcccttcatgtccaaagcgcgtgcggtgctgaccaatccctacttctggctgatggccgctctgttcttggtgcttctctttggtgccatcgaaccggcgcacgcggctgatgcaaccgaaggcggcggctccggcctgccgtgggaaggcccgcttaccaagctcaagcagtcgatcagcgggccggtggccttcgtgattgcgctgctcggcatcatcgcgtgcggcgcaacgctgatctggggtggtgaagtctccgagttcacccgccgcatcatctacgtcgttctcgtggtctgcatcatcgtcttcgctaacacgctgctgactggtgcgctgttctctggcgctgtggtgccgcacgacgctgcaatttctgccgctgatgtggccgcctacgcgaaggctcacgccgcagccctgaccggggtagggggtcgctga

SEQ ID NO: 304909 - DNA, 984 bp, Proteus mirabilis
atggacgtaattgcatccgatccgaagtctcccagcatcgcatcaaatcgtgcagaacacgataagcgcataacggaaaaattgcggcgcgaactcgggccgcaaatatgcgagctgctggaagactcgacagtgatcgaaatcatgctcaaccccgacggtacgttgtgggttgaacggcttggggcaccaatggaaaagattggcacgctcccggcctctcgggctgaatccctcatgggtacggtggcctcgacgctgcgcacccaaatcacggcccttaatccgattctcgaatgcgaactgccgttggatggttcgcgctttgaggcgttgattcctccggttgtggccgggcctaccttcacgatccgtaagaaggcgtcgaagattttcacgctcgataactacgtggagtcgggcatcatgacgcaggcgcagtgcgaggctatcgaggccgctgtacgcaaccgccgcaacgttctggtcgttggtggcaccggcaccggcaaaaccaccctcacaaacggcatcatcgactacatggcgaaggcctgcccgcaagaccgtatcgtcatcatcgaagatacgggcgagctgcaatgcgccgccacgaacgtcgtcattctccgggccgtcgatcacgtcgatatgacccggctactcaaggcaaccatgcgcctgcggcccgaccgtattttggtcggcgaagtccgcgacggcgcggcgttggctttgctcaaggcttggaacactggccaccccggcggggctgccactgttcacgcaaattcggcacctgcgggccttatccgcatggaacagcttgtggctgaggccacgcaggcgtcgatgcacgcgctgatcgctgaggctgtggacttgatcgtttcgattgagaaaacagcaggcgggaggcggatcaaggaagtcgtcacggtcgaagggcatgacggcactcaatacctcactaaaccgatatag

SEQ ID NO: 304910 - DNA, 261 bp, Proteus mirabilis
atgcctagccgacgcgacaccgatagcaacgaaaacgaaaagccggtgccagcggagcggctgatttttgcccgcaatttccgtaaggcacgcaaggccgcaaaactaagccagcgcgcagtcaaggataagacggggttcgcacagtcatggatcagcgaagtagaaacgggcaagtcaccgctcaacatcgacaacatggccgagctggccaagtgtgtcggtgtgccgctgtggcagcttctcgttcctccgtcgtaa

SEQ ID NO: 304911 - DNA, 1242 bp, Proteus mirabilis
atgaacgggcctaagccaatcagtgacattgtggggggcaatctgctggccagactagagcagacgcaccagaggtatcgcgaaaaagtggaggccgcagccctgcccggcgagacgttcgagcaagccgagaagcgcctacgcgaagaaggcgaacgcgaacagaggcggaaaagtaacgaggtcgcccagctacaagccgaggcaactttggctgcacagttgcgcgatagaagccctatcccgcgaagcccaatccctaacacatcgtcccccagtggacagaccaaacggagcaatccggcctcaatgcgtcgccctcccgagagcgaccgacagcccgactttttcgtgccgggtctgtacgacgtagccaccaaggacaaccgtagcctgatggacgttgcgctgttccgcctgtcaaagcgcgacaagcgagcaggcgaagtgatccgctatgacctgccggacggcttcgttgaagtgaaggccgggccggatggcatggcgtcgatatgggactacgacattgtgctgatgctcatctcacacctaaccgagtcgatgaatcttttcaatgccgggcgcggtgccatgccgggcaagaaattcgtcccccacgcttcggacattgccaagttctgccgccgtggcgacggcggccgtcaggccgacgagctggaagccgcgcttgaccgcctgctaggaacgaccatcaagagcgtgcgcgagacgccatcgcgtaatggcaagcgtgtcgtgcgcgagacggaagcggaaagtctcattggcccctaccgcgttgtgtcccgcaccgataccggcaaggtcgccagcgtcgagattgaggcaccaaactggatttaccgggaagtgaccggcggcagacaacccgacgtgctgaccgttcacccggactacttcctgatcgagccggggcttggccggttcgtctaccgcctcgctcgccgagctgctggcaagagcacggccaaatgggcgttcaagaccatctacgagcgcagcggcagcgctggcacgttcaaagagttctgccgcatgatgcgccgcctgatcgacgccaacgacctacccgaatacgacttgcgcgaggaagacggtcagagtgggccgctgctgctcatcacgcgccgcaccgacgccgtggagctggccgccgatgacgagccagaaccagacggcgacgagcaggagaacggcaagaatgcgcccggtgtgtaa

SEQ ID NO: 304912 - DNA, 444 bp, Proteus mirabilis
atgcagatacgtgaacagggccgcaaaattcagtgcatccgcaccgtgtacgacaaggccattggccggggtcggcagacggtcattgccacactggcccgctatacgacggaaatgcccacgaccgggctggatgagctgacagaggccgaacgcgagacgttggccgaatggctggccaagcgccgggaagcctcgcagaagtcgcaggaggcctacacggccatgtctgcggatcggtggctggtcacgctggccaaggccatcagggaagggcaggagctgcgccctgaacaggcggccgcgatctggcacggcatgggggaggtcggcaaggtcttgcgcaaggctggtcacgcgaagcccaaggcggtcagaaagggcaagccggtcgatccggctgatcccaaggatcaaggggagggggcaccaaaggggaaatga

SEQ ID NO: 304913 - DNA, 312 bp, Proteus mirabilis
atgaaagatcgagcacacgacacggctatggccgaagtgttccgcaacgaccccgcctacgcggtcgagctgctgaacagcattcttgaggatggcgaacaaggcgaactcttgattgccctgcgccagatggccgaggccttcggaggcgtgcgacaggtggccaagtcggccgagctgaaccctaaccagctttaccgcacgctgtcacagacaggcaacccggaggtgcgcagtctgaccgcgatccttcgcgctatgggcctgcgactggccatccagccgctgcaccctaccccggccgcccactga

SEQ ID NO: 304914 - DNA, 456 bp, Proteus mirabilis
atggcttctgctcaaaggttgaaggcatgtttggcaagatcgaatgcacgcccggcctctgatggtcatcgcattgaggaaatgagcatgggcctagacattggacaattaagtcagtgggtggtcgtcgcttacttagtaaccctattggtggttctggcgtggctcccgggcgttgcattcaaggacggcgaactgtggacgatggtggggcttctggccatcatgctgatgggactcggcatgttcgccgtctacgaacccaagcccgacgagtgggaaacgttcaaggccgcgcataactgcaaggtcgtggcaaaacgtgacggccatagcaacaacgggatcggcgtcaccactcgcggcagcgtgggctacatcatcggcgacgatacgcccgatcaggtcgcctaccagtgcgacgacggcgtgacctactggaaaaatgcgaggtag

SEQ ID NO: 304915 - DNA, 411 bp, Proteus mirabilis
atgaggccgccgggctacggcccggtgcctccccacaataggcaacagcttatgaaaatgatggtgtttcttctggtcgtcatggttgcgtacatggcgttcttccgtgatgacggccgggacgcggcggcagcgacctatgccgcgcagcggatcaacgagcaggacaaaattctggttgagcttcaatcgctcaacgatccccacgtatcggatttcgtccgcgattggcgctactacgcgccaaggccttcgcctgagcaactttctgagcttcggataattcagcagaacatcaggaacgataaaagcgttgctgaaaagtacacgctggaatggcaaaacaagaatggcttctgctcaaaggttgaaggcatgtttggcaagatcgaatgcacgcccggcctctga

SEQ ID NO: 304916 - DNA, 456 bp, Proteus mirabilis
atgatcgactttgacgagatacggaaacaggtggcgatcaagcacaacgtgctgatcggcaaggacgatccgatactggtcacggtcacggtcagcgatatggtcttgggccgctacctcgaactggtttccgaccagtacgacgaagccaacagggccttgaccgtgagcctgcaacagcaggtcgaacagtccaaggaaacggccgggaaggtaatcaccgatgcggccaactacgtcagcgaacaggtgcggcaggccgtgactgccgccctcgccgatgctggcaacgacgtgcggcggcagatagccaacgcgcaggccgcaagccgcgatgcggtggccagtggccgggatgcgcaggcggcgaagaccggcgcatacctggctgcggccttggccggagtcgccgctctggtggccgtggcggccttggtggtcgttcttctgaaatga

SEQ ID NO: 304917 - DNA, 756 bp, Proteus mirabilis
atgaacgacgtaaccactccggccctgaacaccctcgcccgtcaggttcatttcacgctgcaaggcaagggcggcgtcggcaagtcctttatctcgtccctgctcgtccagtacctcggcggcaagggcctgccggtcacggccgtggacaccgatccggtcaatgccaccctcgccggttacaaggcgtttaacacccagcgccttgagctgatggaaaacggctcgctgatcgaacgtaatttcgaccgcctcattgagcaggtagtcgaggaagacaccaatttcgtgatcgacaacggcgcggcgtcgttcatcccgctgtcctactacatcgccgaaaacgacgccatcaacctgattggcgagaacggcaagcaggtcatcattcacacggtcatcaccggcggccaagccctgcgcgacaccctcggcggcttcgcctctctggccgagcagatgccgggcaatgccgagctggtcgtctggctcaatgagttcttcggcgacattgaggccgaaggcaaaaccttcgaggaaatgaaggtctaccagaacaacaaggatcgcgtgcgcggcatcgtgcgtatcgctcgccagaccggcagcacgttcggcgaggacgtgaaactgatgctcgatagcaagctgaccttcgatgaaatcaagcagtcgccagacttcggcctcatgtccaagtcgcgtctctcgaaggtcaaaacggcgatcttcgagcagttggccaccatcatctga

SEQ ID NO: 304918 - DNA, 384 bp, Proteus mirabilis
atggcagacacgccaagcaaaaagccccgccggggcgcaggacgtgtcgcgtttctggcccgcttagagcagttccgagaactgctcgcagcgggtaacgaacagcgcacgatctacgacgactttggcggcgaggcggaattgggcatcagctactcccaattcaatcgctacgtcgtccggtacataacaggagcaaaagacgatgggcaccaaagaaaaggcaccgggcaaatcgccccgccaagcccctccccggcccctacaggagccgcaggaggccaagcaaggggtagcagcaccccggccgaaaaacccggccaaaagcgccccggattccagcacaacccaaacagcggcaacgaccgcgacgacctcatctga

SEQ ID NO: 304919 - DNA, 438 bp, Proteus mirabilis
atgcctagtctcgtgggctcggagatgtgtataagagacaggttaagtaccccacctacacgtaccatctctgtctgtttaatatatccggagccaaatacaatagcattgggtggcgttgccactggtaacataaaggcacatgatgcaccgataccaataatcatcgttaacgccataacaggcatacctaaagcttgtgccaccgttgcaaagataggaacaagtaacgcagcgctggcggtattactggtgaattcagttaaaacaataataaaggttgttacagcaagaataatgacaaaccaatggctgttaccaaaagtatctttcataaaatcagccataaccaaacttgcaccagaagattgtaaaattgcgctcagtgttaaaccaccaccaaacagcattaatacgccccactctgtattttcctga

SEQ ID NO: 304920 - DNA, 699 bp, Proteus mirabilis
atgatggaaatgccaataattgaaaaccttgcagtggaggcgggctatagtatggagaatatctgtgctctaatccctgattttatggaacagctagctcgaaaaacaccattgacatatgatgcgtttgttcagcaaatagataaagatttaaatgaaatcatttcaattacagaatcaggtaggcaacatcatctggataaaggtgaagatgcgattactgagcatattatttctcaattaaaacaaaaatacacatctgtgcatcatgatgcccaacatggtggtcattgtgatatctatattgaagcaaaaagttcaaatggcgatttgtataaatggattatggaagcaaagctctgggaaggttttgaatatgtttatagtggtctcaatgaccaattgctagaaagttatgccgtagaaggtattaataactgtagaggaggcatgattttttattcaaaattaaaaagtggcgtgtcttatgctatgaaagaatggtctaaaggtctagaggatagaaatataatagttagtaatattcgtcaagataatttgagatttgatactaatcacagattaaataaagggaatgggggaatttttattgtaagtcattattgtgtcgagctatatcatgcaccaacagacttgaagttggcaaaggcagcagtaaaattaaaagctagtaaataa

SEQ ID NO: 304921 - DNA, 447 bp, Proteus mirabilis
atgaataatgtaacccaaattagagagttgttagttgatctggtggaatcgacagaatcaccagtttatgatatgtgtatccaaattacttgttatctggagcagtatcctcaacaacgcaatttgacaatagggggattacgagctgcattaaataagtctgacagtagtgataatatcttgattcaagcggcttttactcttgccgcgcatcctttcttagttcttgaagtccgttacaagttatatgatgctgagatcgaagatgttattgaggaattagatagttcaacatatttgaatgcgttatctgacggtctttttattgacgaagatggtaataatgttagcctgaaagagttaaattcaagagtatttccatattttgtgagtcggcttcaagaccttgaaagttcagaaccttatgttgtatcgaggtcagaatga

SEQ ID NO: 304922 - DNA, 1074 bp, Proteus mirabilis
atgtcgatatcatatgagcataaattagataccttgttagagcgatttaattttaactttactaaaagtcaaattaagcaagtatttgatacagtagctcgttctaaagatgattttaaagctaatgttttggctgttgttagtagtaatcaagatttacaaaataagataaatgagcttggactgttggctcttcagttggatactaggcaggtagaggtatttaacatctccgactcttctgttcaatcagctttaaattcactatttagtacaatacaattaaccaatgaacaatcaattattaacgcatttccgtttccaatagaaaataaaacacagctagaacgtttgaaaacggggacaatatatccagttaaatctgatataatagttatgggtaccaatacgtactctagattgattgtatgtacagttgttgacaaagaaattgaagaggttgctcaaccagcccatttatctcaagtaggccaacagcttttgaacttaaatacaacgttcacaatgaagcgaaaggttcgaactcagttatttcatgtagtctattggtctattgcactttctaggttaattctatctgtagaccgtaatatgatgtctatttatgcctgtcaagatcagttatttatgttacgacaatttttgatgtcgaaaggtgttgattcaggtaatgctattaacgtattcggagctattgaaccactctataatgcagtagatggctatgtcactaagctgggtcatgtgacaactgatggaaaccctgtacgaatacctctgcgaagtaagcaaaaatgcttaaagcatgatcactaccatcaagctggtgaagttggtgggcacgtacatgctaagtttgcagttgctaaaaaatgggagtttaaaagtgcaggtacaaatcgagtagaaaatattgaagttggtttaatgggacagccgaaaatgttagatacagctcaaccattaacagatttttctattaataaatctatgcgacttgaagatttcaattttgcaattgatagagtactatcattaatacctaatccataa

SEQ ID NO: 304923 - DNA, 1353 bp, Proteus mirabilis
atgctttcaacaaaagacatgctagtccttggaatgatggtttttgctcttttccttggcgctggtaatattattttccctccaatggcaggtttccaatctggaaaccaatggtttagtacgtcattaggatttttggttacgggtgtcttactcccttttttaaccttagtcaccgtagctattcgtggacgtggtgaacgcctttctatcgacttgccatcatggtttgcggtgttattttggattgcactttacctgattgtcggttctacctttgcaatgcctcgggtcacgaacaccgcctatgagatgggatttttacctcttggtcttattgaaaaaaatactacgacccatctgactttcgcattaatatttaacctattaagtatgttctttatgcttaaacaaggtacgatgatcagtgccatcggtaaattcatgaccccagcgctcttaatacttctggttgtcgttggtattgctgtagtggctaaaccgctttcccctattgaagagcctaccggcctttatgcggtaaatggcttcttctccggtattattgacggttatcaaaccatggatgtgctatctgctatggcttttggcgggatcgtcgctcgtgcgttatataccaaagggatcaccaatcctaaacaaattggttttatcaccataaaagcggggatgatttcggttttactcttagccgccctttatttatgtttattctatttaggtgccacaagtcacgcagtatctgtttttgctgatccggcactaaatgccactaacggtggtcaaatcttctcacgctacgtagacgctttatttggctctgtcggtacttggttgatgggcgggattgttttattagccagtatgacaaccttagtcggggttactagtgctgcggcagactactttgcgacattccatcatcgtttaggctatcgcttctgggttgtagtatttacactgttaacgacgttagtctctacttttggtcttgataccttattacgtgtcactattcctgcattattaatgatttatccaacatcggtgacactagtcttactacaatttgttcgccataaactaaaatcaccgcgttttacttaccgctttacaatctgtgtcattgttttaatgagcctacttgacacattaaaacagttaaaatggctaaatggagatttattacaactatttagttacattccactgtctgagtatgggctaggttggttattaccgggtattattgcattcgcaatttcattactaattagtctcagttttaaagaaaccgacacagaaattgctacacctaatacagtaaaataa

SEQ ID NO: 304924 - DNA, 2109 bp, Proteus mirabilis
atgtccctttctcaatctgtaaaaatgcaaatcagccaatggtataaagcattacctgagcatattgaaggctttattccacgagcgcctcagcgcgaaatgattgctgaagttgcgaagacattttctgatgaaacggggcgacatctaattattgaagcgcctacaggagtaggtaaaacactctcttatcttattcctggtattgctatcagtcgggaagagaaaaaaccactgattatcagtacggcgaatgtggcgctacaagatcaaatttacagcaaagatctgcctttactaaaaaaaattattccagacctgacttttgctggggcttttgggcgaggtcgttatttatgtccccgtaatttagaggcaatttgtgcaacagaaggcgagcaaattgatttaatgttcttgctggaagataaagttgatgtcgcaaccagtgcggaaagggagatttgccaagagttaaagcacgattttaccagctttggttgggatggtttgcgtgatcaccataaacgagcattaacggatagtttatggcgcaagattagcacagataaaatgaattgcttaggtcgtaattgccaatactatcatcgctgtcctttttttctggcccgtcgagaaatagacgaagttgatgtggttatcaccaatcatgctcttgtgatggctgcgatggaaagtgaatcggtgttacctgatgcaaaaaatattttattagtattggatgaagggcatcatattcctgatgttgctagagatgcgcttgaagttgaaggggaaataaccttatcggcattaaatatgcaacttgataatatgactcgtcatgtcagccaatatttagcacaatttatcccagtcaaaccacccaaattagccgatcccattcgttttgatgctcatattgcaaaaatgcgcgaagcctatcaagacgttgaacattttacccgcgcgttattgcctgagcgcagtgaaaatgatgaatatttatttccattaggtcaattacctgaacaattactattatgttgccaagacttatttaagctaaccgatggtttaaaaatgttaggtgagtcgattcttaacgacttaactgagcgaacagcaaaagaagatgttgtacgtttacatcgcgcgattttaaccaccagcagaatggttggttatctggaaaatatggcaaaactatggcgacttgcgacattagagcagacatcaaaagcacccgtttcgaaatggcttactcgtcgttatgataaaaagcagtcacatctctatttacattgtgctggtattcgcgttagtgaacagttaacacaattattatggaaaaatattcctcatgtggtgatcacttctgccacactacgttcattaaacagtttttcgcgtattcaagagcttacaggactaagcgaacactttgatgatcgttttattaccttgtcatcgccttttacacatgaaaggcaagggaaacttgttatccctaaaatgcgttatgaaccgacaatggcgaatgaaaaagcgcatttaaaagagatggcacgctattttcgtcaaggaatggtagaaaaccaccatcgagggcaattagtattatttagtagtcaacgggcgatggaaggttttttagaggaagttaaagatctacgtttgagtctcttagtccaaggagatcaaccgcgctatcgtttagtggagacacattgtaagcgtattgatgcgggtgataatagtgtattaattgggctacaatcttttgctgaagggttagatttaaaaggtgactatttaacacaagtacatattcataaaattgcttttccacctgttactgatccggttattgtgacggaaggggaatggctaaaatcactgaaacgttatccttttgaagtgcaaagcttaccaagtgcatcatttaatttgatccagcaagttgggcgtcttattcgtagccatcattgccatggtgaagttgttatttatgatagacgtttattaacgaaaaactacggctcacggctattaaccgcgctaccagtctttcctatttatcagccagatatacctaaaacagaataa

SEQ ID NO: 304925 - DNA, 1035 bp, Proteus mirabilis
atgaggcgattattaccctatgatgctattaacttggccgcttatgctttttttgagccacaggagccactgatcccttttattccttcatggtataacgtatgggaatctcatatgttacgtttagcgggtaaaaaaagcgcaggaaaaagttggagttttcaacgctatggggtcaatcatgatatgtatctacgtgaaggaataagaaaaacaaattgtcgtccttacctatctgcaatagagcatgtggtcgatcatgctgttggtcaattagatacaaaatcacaattcctcttaaaaaaagagcgaaatggactgatttatattgatgcatggggagagctaacggctttcgaacagatagatagtttaagggatgtgtttactcttaatattattcctagaaatatcataaaaaaatacagtataaaaaatttctcttgcaaaataagaggtgaacgtaatggtatgatgtcggcactattattagcacaaaaacttattaatagtgatttacttgataatatatttatttgtggtggttttcgggctgtaccaattttatcttttagtgaaatagaaagacaaccgataaccctttttttcaagcctaatacattggaaaatataaatagtattgaaagagtcgcctgcatcattatcaataaaaaacagtgttcagatatttcgatttctatcaatcattatttttctatgaatcaaaatagaaaaaaggcaataaagcaattagttaaaaattggcaccgttgtattaataaacagacgggttcaatttatataactgcgttactgacttataaatatatttctatgcttgaaaccgcattcacagcattacctgttaatcttaattgctattttttaaatcgtctttatggtgatagtgggtttatcacaccggctcttatgttcgatcatttacaaaaagcagcagatagtgcctctcattaccttttgagtgcgtttgatggagaaaatggtgtttggctggttgattgttggaaacaataa

SEQ ID NO: 304926 - DNA, 969 bp, Proteus mirabilis
atgacagatactaataaaaaaaagttaacaatcaatgatatagccaaactttgtggtgtgggcaaatcgactgtttcaagagtacttaatcaagatcctatggttaatgaagaaacaaggaaaaaagttaactcaattattgagaaatataaattcacaccgtcaaaatctgcacgagcaatgcgggggtactctaatcgttcttttggtattatcgtcactcgccttgattcttatgcggaaaatcaagcagttagtgccatattacctatcctttatcaaaacaacattgaccctattattttagaaagccaatttagccaagccaaagtagaagaaaacttaaaaatgctcgcccaccagaaaatcgatggcgtaatattatttgcattttcagggatcaatgcggctaacttagcaagttggaaacaaaaaatggttgttatagcaagaccactagaaggttttgtttccatttgtcatgacgatgaacgagctgttaacgctttaatgcattatttccatcgagacaaacattatcaacatataagttttatcgggatccaaattaatgatgaaacaacgggtttattacgttatcaaacttatcttcaatattgccagcaacatcaattaatatctcaagctcaacttggtgaacttaattatcaaagtggctatttacttgccaaacaagcattagcaagcaagcctcaagctattttatgtgcgaccgactctctggcctttggtgtacaaaaatatttagccgaacagaaaatagatcatattgaggtggcctgtatcggtcgtaatgatctactcacctttttatttcctcaaactaaattctatcgattaggttttagagaaagtggacaagaagctgctaacatattgatacaaatgctagaaaaaaatattcctgcacaaaaaatcattatatcaagtcatgacttaaacccatga

SEQ ID NO: 304927 - DNA, 1677 bp, Proteus mirabilis
atgctctctcctcaactaaggggatatgcaccacaagttacagggatcgctgaaactaacgcaagggtagttgttaagcatcaaggacgtattctttacgattcaacagtacccgcaggtccatttgccattcaagatttagacagttcggtgcgtggtaaattggatgttgagattattgagcaaaatggaaagacgaataaatttcaaattgatacagcctatgttccttatttaacaagaccgggacaagttcgttataaggttgttgcaggacgctctagagataaattacataatacagaaggacctatatttggtacgactgaagctgcttttggtttaagtaatgcttggactatgtatggtggtaccattttcgccggtgattataatagtgtagcacttggggttgggcgcgatatgttcgctttcggtgcggtatctgccgatattacacaatcttatgctcgattacctgatcgtggcactatgcaaggtaagtcatggcgagtcagttactctaaacgttttgataatttggatgcggatgtaaccttcgctggataccgatttaatgaacgtaattatatgacgatgcaaaattatttagatgcacgttatcgtgatgattttactggaaaagagaaagaactctatacagtaacctttaataaaggtctttctgaatataacacatcaattggggtgcaatataatcatcagacatattgggatcaaagtaattccgattattattctattaacttaaataaatatatggatgtttttgcagttaaaaatatttcattaaatttatctgcatcgagatctaaatactatggcaaagataatgatgtcttctttgcaagagtcagtattccattagagaataatagaggatttataaattatgatggctcaagaaattcggggaactatacgcataatatagggtactttaataccactgaagataacttagctaattataatttaaatgtttcaacgacatatggcgatgatatggatagtagttcaagcttctctggctattatggacgctatacttcaatcgctaatattaatgcgaatgccactatctcaaataaaaatacctcatcatttggtttttctgctaatgggggcttaacgattaccgctaaaggagcagcacttcacccagatggatttaatggtggtactcgcttattagttgatactgaaggtgttgcaggagtaccagttgatggtggccgtgtaacaaccaataattggggttatggtgttgttaccgatattaatagttattatcgcaatgaaacaacgatcgatttaactaaattacctaataatatagaagcgacacaggcgattgtagaatcttcattaactgaaggtgctattggttatagaaaatttgaagtgttaaaaggtgagaaggcctttgcaataattaggttagctgataactcttatccaccatttggttcaataattagtaatgctaaaggacgagagctaggaataattagtgatgatggttttgcttggctaacaggtattaacccaaatgaagaaattagagtatcttggggagctgaacaacaatgtgtcgctaaacttccaaataaaatagaaccgagtaataagatattattattgtgtgaaaaataa

SEQ ID NO: 304928 - DNA, 543 bp, Proteus mirabilis
atgaaatatagtttaatatattctattgtcctattttttactctttcatttacagcctattctaatgacagggataatatttctttagacgatggtattgtgacttttaaagggggaattgtagagcctgcttgtacagtatcttctgaaagtgaatatcaaattgttgatcttggtgttattagtagtaaccaatttcatggagtaggaagtcactctataaaaatcccattttttattaaattaatgggatgtaataaaagtattacggataaagtcagtataattattataggtgatgtaaacaataatgataaacgattatttagcatcaccgatcaacaaaattcagcttcaggattaggtgttgcattatttaatgatgaaggtgaaataattattcctaataaattcaataagtataaatttattgaagagaatgaattaaaactaaaatttaaagcaagttatctggcaacgaaagaaaacgttatcggtggaaaagctgacagcgtagtttggtttgttttcaattatcaataa

SEQ ID NO: 304929 - DNA, 693 bp, Proteus mirabilis; identical to SEQ ID NO: 297544

SEQ ID NO: 304930 - DNA, 423 bp, Proteus mirabilis
gtggttgccatccctaatgaagcaagtatgaaagggcgagctttattattacttgcagaaaatcacctcatttctttaaaagagggggttggttttttaccttccgttgaagacattattgataatcctaatgccttgatatttcatgaagttgaaactcccatgttagttgaagcccttgatgatcctgaggttacgatggcggttatcaacaataatttttcctctcaaattggcttacttgctacccgcgacggtttaattatggagaataaacattcgccttatgccaatgttgttgttactcgtatagataatatgaatgatgaaaaaataaagaaattaattactgttttacattcaagacaagtcgaattaaaggtgcaagaaatgtataaaggggacgcggttaaggcgtggtag

SEQ ID NO: 304931 - DNA, 1083 bp, Proteus mirabilis
atggcacaagtcattaataccaactatctatccctggtaactcaaaacaacctgaacaaatctcagggaactttaggaagtgcaatcgagcgtctgtcttctggtctacgtatcaacagtgcaaaagacgatgcagcgggtcaagcaattgctaaccgtttcacttcaaacatcaatgggttaactcaagcttctcgtaatgcgaacgatggtatctctatcgctcaaacgactgaaggtgcattaaacgaaatcaacaataacttacaacgtatccgtgagttaactgttcaagcgaaaaacgggactaactcagaatcagatatcacttctatccaaaatgaagttactgagcgtttagatgaaatcactcgtatttctgaacaaactcagtttaacggtgtgaaagtactgagcggcgaaaagtcaaccatgactattcaagtcggtactaacgataatgaagttattgaatttaaattagataaagttgataacgatacattaggcgttgcaactgataaattatttgaaacaaccgctgcgggtaaagcaaaatcagaaggtgcagctattgatgctactgctgctgatgctgcagtttctggtgcaactggttttggtccaggtattaaatctgtgactaaataccaagaagatggcactgatgttgcgaataaattcgttgttactaaagatgatggttcaaaagtcgttgcatcgttaaaagaagacagtggtaaagcggttattaatgcagaagatggtgctttcaaagcaactgatggtaaagctaaattagacgttaaagatgacgctttagcaactttagacaaagctatcaataccattgatgaaagccgttctaaattaggtgcgattcaaaaccgttttgaatctactatcaacaacctgaacaacactgttaacaacttatctgcttcacgtagccgtatcttagatgctgactatgcaacagaagtttctaacatgagccgtggtcaaatcttgcaacaagcgggtacttcagtacttgctcaagcaaaccaagtaccacaaactgttctgtctctgttacgttaa

SEQ ID NO: 304932 - DNA, 1128 bp, Proteus mirabilis
ttgaaaacgataactattaaaatcagtctttttgttttgtcactgtttttccctctcctaacaaaagcacttgttattccagataatggaacggggtatataggtgaattaacgcctcctcaatcatatatgtcacttcgtagtagtggtaattactatggagcggctgtaggtgttaataatgttgtagattattgtagtaaaaacagtgcgcaatggcagaattttttattcccattcccaggaagtcaagagggggagtacggattaaaattatataataaaaacgtaagtgaagaggaaaatagggaaaattatttagttgcagctatcaatggaatagtatctatcgatgcgttgtattatcagaatggattaccttccccgacaagaattaccctgcgtcgaggaaaagaaatttctagaacagaggaatattctaatcaatttgtctatcgtcacccaatgtgctggtatggtaatttatcacgtgtaagtaatactagcttgagaataagctcttattctatttatgcagtaggccatgttaaacccggtatttacgattttgtagctccaatatattttactacagctcaaacagcaacctcaggcggggctaatccagatctatcttcagttcctttttcatttggtaatggtcctattcacgtcttaaaaacatgtaatgtttctcctgctagctcaacaaatatacaatttgccgctcaactagcacaaaattttaagtcagccaagttacttgagcaaagtgtcgctagtatgcttgtctcttgccctcattcaggaaatatgtacgtgacattaaaaccctataatgagctagtcaatgcaagtaaaacggggatgacaatgtctcccaatatccctttgaaagataaagaagtcgcaccttatatcacggtatctgatgcagctaaaaaaataactaatgcagtatgtaataacaattctgccgaggccttagagttttatgcaggacaatctttgggaaaatataatgggggaactgtttataagtcattatcattcaacctttgtgccaatggaaatatacctacgaatacttataaaggaagtattgatgtatcgttcctgattgaatga

SEQ ID NO: 304933 - DNA, 717 bp, Proteus mirabilis
atgaccataatattaatccaaaatatattatcattattaatttctttttatatcatctttgaaaaaatgaatataaaaataaaaaaatctagcttaaatgatacatggtatatcgcaaaagattcaactgaatattttatatctagattaggagtatcattatactcaacttgtggtagttttttccttggaatattctcaggatcgctacatcaagtagccatatacggtgcagcagaacaactatatagggctggagtttctgctatgtcatccatatcatcaccgcttacaccatttatggctagaactaaagactttaatctattatttaaagtaataaaattagcattattattaactatttccggttctttattcggttttattgttggtgattatatcataaatataatatacggagttaattatgagaatgcaaaaccagttcttaatgtgttcatgattactattatatttagtgtcatcgggatgatattaggttatccagctttaattccattaggaaaagctcgaagtgctaattatagtgtcatgtatgctggaatattgcagatactgtttataataactatgttactttttgagatcccatttaatgctattaatatcgctatttcatatttattatgtgatatttttatgtttacttatcgtggattaatatttattaaaggatataaaattaagaaatga

SEQ ID NO: 304934 - DNA, 708 bp, Proteus mirabilis
atgtgtataagagacagtatattaggaggccaaagagggccttttatttcagctataatgatgggtatttggttatatggtataaataaaaatatctctcttaagaaacttatgtctctattttttttattattcttatttttaataataataatgggtatttcttcaagaggagtgaatggagatattaataactatgtatacttgttagaaatgtttatatataaacaaggggttactcttggtgttatatcatatagtataagtgattttcagaattttccaattatggcctatgtaaattcactaattccaggggcgactagaatttattcgctttttattgataatcaacttagcttaccagatcttggttttggaccttttgtctctcacacagctaataatgttatgtttcaagaaggatacggattgggatggagtattttattaaatctatatctgtttagttttaataacccattaatatttatatttttttgttttctattttcttattttctcaataaactagataattgcttctatcatgattattggtttggattatcagggactcttgcaacaaaaatagttttttcaccaagagatgatttaaaaaatataattcattttgcaatattttttacaattgcatatttcttattaaaaataataaacacaacgctattaagatatagaaattaa

SEQ ID NO: 304935 - DNA, 273 bp, Proteus mirabilis
gtggcagataagatttggactggatcgtctgcaactatttttaaagataccttaacagcgttaactagtgaacctcaagcccaggttgataaaaacaatttaaaacttatagctggaaaagtgtttaatgcaaaaatacaaataggagcttataacgaaagtaggtatgcgtatattttatcaagaaaaaaattggcacaaaacaatatcgatttaactgatggaattgattatataggtgaagctgtttttacttttaactttggtgtctaa

SEQ ID NO: 304936 - DNA, 357 bp, Proteus mirabilis
ttgtcaatagcatataaaataaaaaaactatcttattgtaataatattggagcaataaaatatattctaagccgtattttttctattattttacctattattattttagaaaaaacgaaaaatattattgctaataaaatgaataaagaacctaacaatagtttatacggtgctggcattgaaactcctttcactagagcatatttttctgaagatgaaatatttccattaaaaaaaattttttttgagggttatgaatttaactgccctaataatactaaaatatatttagaaaaaatgtttgggccaaattatatgacacctccacctgaagaagaaagatataaccattcctaa

SEQ ID NO: 304937 - DNA, 228 bp, Proteus mirabilis
atgagtggaagatctacaagcattttggcaactatattatttataatttattctcaaaatgtatattctgtagagtttaacttagatgttgttgactctaaatctaaagataatattaactttgctaggtttagtgaagccggttatattttaccgggtaaatatcagcttaacttagtacttaatggacaagggatcggttcatcaacatatactgtagcgtattag

SEQ ID NO: 304938 - DNA, 1155 bp, Proteus mirabilis
atgctgcaaacgattcagcaggatagaagtactgtattttttactgcggtggaaaatctcgaagatgtttcccatcagactattgtagatggagaagtcagtaattacttcgaagaagacaagaattatgacttgaatggcaatttcacaatttttagtcctccggttataaatacgttggtcagtttttatgacatctatgtagatcaatttcgcaccagcaacagcgtatatttgggcttttacacgacgagggatgtcggtaaggaaagaaaatccaagctcaatagcggtaaagaaatagctctaccagaaaaaccaattttagaaattcttcaatcgtttgatgatgtttcagacgatacaattaatttagtaaaagaaattcttgttgaagagtacgcttcccaatataaagaaaagcctaagtcaggaaacttagaaacgcttcggggtctaaatgctgatatgtttaaagagtttttgaggaaaattttatggcatttcggtcaggaagatgaggatgcactcaagcagacagttttaacggatattgaaaattcaccacttcacaacaatgcgcatataggcaaagaaaaaataatattttgtttgttaatggataagctgagtgaaaagcaaaatagtaaaaacttagtcgataagttggttcatagttcagatgtaaaactgatttttaaagaagcagagtctcaaattccagacgagagtatagaccctacttggcgctatatcgccgagcttgaaaaggatgtgaccgacaagcgaaatctgaaggaaaaagtactttcagtaattgaggatatttcagatcgtcgaattagactgttagctagaaaagcaagtggctctaagtatgaagagcgtgaagcagacaagtcttttttgtctttgaagtatcgtgtttttgaagcttgtgaagaatatttttcagatgatggatatgtagcccctgaaagcggcaacgacttggatgctgttcttcaaacgctcttatcaaaagcagtagaagatatttctaagttaaagaccgattacaaatatacgatttctaatgataaaacaatagaaggaattatttggaatttatttgatgggtgttttttagcttttgatgagtgtagtgatgagtga

SEQ ID NO: 304939 - DNA, 522 bp, Proteus mirabilis
atgagtgatgtaagtacaaagaaaaggctaatgtacttaagcggtgaagatttctatctttattgctattccgttcttgttattttggattctttaggttgtcgtgatgggaaattttttagagactacaggaagttggcttttttaactgacattatcagtaatgataaaacagtctatgtggtttctcattcttcaggagaaaaactgaacccgaaagattatgagtgtttacttgacagctattcgaatggattaactagaagaagtgaaattcttaagttgttgtttgttcttgagaagagaggctatgtgactttgaatcgaggtaaagcacaagaaattgatgttactttgactaaggataaccttcccaatgactttttgaacagcaatgttttcgagtcggaatctaagaatataataaatatatcaaagaaagtgggacggttggcatcgctaactctggataccatgttaggtaaaatttatgttgaaaatggagttcgaacatgggtctga

SEQ ID NO: 304940 - DNA, 1998 bp, Proteus mirabilis
atgggtctgatgcgagttaataagcttatttatgaaggaagcaagtattttttcgagtctaaagagttcgacgaaaatatcatcctaattgagggcgataatggaacagggaaaagcaccttctgtaatttgatttattttgcattgggtggagaggttccaatatttcgaagaaataatgataagcgccacgatgaaataacttctgatagtgataactatgttgatctttatatctcaatcaatgatggcagttatttactaaggcgctactttggagataatgaagtaacagtaatcccctatgagcgggtggttgagaagatatattcagaagataaaaatactttaattaaagagaaggtaagattttctctttcggaagataagactgaaatatatcccgtaaacagaagcaaagattcatacgttttttctgactggattctcgagaaattggaaatatctgtggtcgagctttttcatggatataatacatttaaaattaatatatcagacttgatgcggctgatttatcacgatcaacagccgaacccagagggtatttataaaaagccagatactaattcaacgtatgtttctgattctgagttggttcgaaaagctatttttgaactcttagttggtaaagcctattctgattactacgactctattgtcgaggaaaagaagctgtcgagagagaaaagcttggctaaagcggttgtgaatgagtacacgcttttagccgacaaaatgcgaaaaaatggcggggctaaaaatgtcagttttttacagaaagaaatctctgataaagagcagcaaattgacaagttgcatgatgccagacaggcattcaagcgaaatcgaactggatcaaatacaattaatcaagatattgagtcgtgcaaatcagaattaattgattgtgaacttagattaagccgattaaaagaaaatctggtttcagctcttgatgaacggtacaaattaaacgtagttagaaatgaatctgcttcagaaattagacgcattgaaaaagttattttttcacacgatcatctaaacctttttacatctgatacttgtccatactgcttaagtcacgtggatcgtgtggaagggcattgtgtttgtggcgcttcgatagaagaagaacaatatgagaggtttttctacacatcaaaagagtataaagatattctgaaaacgaaacttaaggcactgtcaacaattaaaaccgcatatgatgattgtgactctgaagttcaagagattaaaaaagaaattgagttgatagagaaaaagtcggtgactttccgtgaaaagctacaagaaatgcttgggcgggtcgatgaaattgttgacattgaaagcctaaatgatattgacgataaaatattgcagcttagagaagatgttgcgaatttgaatcgattgttggagattgaatcaaagctggaacgtatccaaaaagattttgatctggttagctctaaagcaaaagacgctgagttaaagaggaaagggcttgagattaaagctcaacaggatgtaacttcgaaggtaaatgcgtttagtaaaaagtatgatgagctgatgaaaaatactttgcctgattgcagatcggcaaagattgcgcttgataactatttgccttcaattaatgatggtctctatcgagaaacaagttcacttgtttcaattcgaatgatgtactttatcactctcatgcatttagctttgtctgatgaatcagtgacattcccgcgctttttacttattgacacacctgaaactgccggaatcgaattagagtatctgattaactgtattcgtcagttggaagaattgaaaaattatggagctgactttcaagttatcatttcgacaggtttaaacaagtatcccgagtcattaaaggacaatcgtgtactctttatgcccgataagcagaaggaacatatgctcttgaagaagaagagcctttctaagtaa

SEQ ID NO: 304941 - DNA, 708 bp, Proteus mirabilis
atgatggttttaaccctgttaacaaagcagattgatggtgagtttacggtttactggaagaccggccttcgaagaggtggtgagctaaaggtcgatttaggtgagcaatacgacaagctacctgagcagcaaaagccaattgcagctgagctttatgctattcatcacctactgtcagtgaaagaggtgatggggagtaaccgaagcggtaatgggcttcaaatccgggtcagtaaaggagctatcaaaaagttacagaaacaacgctcaactcagcattcactttacagcctgactaggtttttgcttactcgataccaggaagcacagatctcggtagagaagcgggacgattggctctcacattccttcgaagaatacagcgtcgataatgctacagtgagagaaatcgatgaggtcatcaacgttccgaacattggacctgtcgtggtgactcgtcatgcactggaacggtttgtggaacggctttcagacggtgctcctaagcatccttggaaggctttgtgcacaaagctgctatgctctgggctaactaaagcccagttaccagaaagcgtcgctatccaaaaaacaaaaaaatatgcacaagaggccgagttctggcagcatgttggtagcaaaatgaactttgttatggttccgggtgactcaattaaaacgttggttacggtttttgcagtaaattga

SEQ ID NO: 304942 - DNA, 408 bp, Proteus mirabilis
atgcgcattggtcagttggcgcagttggtaggggtcgacacacagacgatccgcttctatgaacagcagggcttgttgccgccgcctgatcggcaggacaacggttaccgtgtctataccgagaagcatggtgaggggctggccttcatccgtcgctgcagaatcctgggcctgtcactggctgagattcacgaactacagagctatcaggacgaccctcatcagccttgtaccgccgtcaacgccttgctcgatgatcacatctctcatgtgcggtcgcagataaccgctctgcaagcgcttgagaaacaactcgtttcactgagagcgagttgcaacgatgaccgggaagttgaggcgtgtggggttcttgctggaattagcgaaggaaacatgcaccagcagtag

SEQ ID NO: 304943 - DNA, 897 bp, Proteus mirabilis
atgagcaaatcctgtggtggcgcctgtggcgctgatgcaacgtccgcagcggataccgatatacaggcctcctccgaggcgccagggagatgggtcagtgtttatgccgtgccgaagatggactgtccatcagaagaacgaatgattcgcctagccctgaacggctttgaggagattcgggcgctgtctttcgacctgtcgaaccgccggttgaaggtcgtgcatgatggagaggctgatcctttcactgcgaaactgaagaccttggggctaggcgcctcgcttcaggaaaccgtcgctgcaaatccggagaccatcaaggccgccgagttttcggcagcttctgctaagcaagaatccgggaccctgcgctggttgctcggcatcaatgcacttctgttcgtggtggaaatgactgccggtctgatcgcccggtccaccggcctgattggagaatccctggacaattttgccgatgcggcggtgtacgggcttgccctttatgcggttggacatagcgtgaaaatgcaggtacgtgccgcgcatcttgctggtgtactgcaactgatcttggctgttggcgtgctcgcagaggtggtgagacgcttcgtcttcggtagcgagccggaatcgatggtgatgatgcttatcgcattcgtcgcactgattgccaataccacttgtttgctgctgatatccaaacatcgagagggcggggcgcacatgaaggcaagctggatattctcggccaatgacgtggtgatcaacctgggcgtcatcaccgccggcgccctggtcgcgtggaccggatccaattatccggatctgattatcggtaccatcgcgggggttgtcgtgcttaacggagccagacgcattctggccctcaagggttag

SEQ ID NO: 304944 - DNA, 507 bp, Proteus mirabilis
atgattggcaaatacctctcgccgtatgccctgttgtccatctccggcctgatagccgcgtctgaccagattgtaaaatggctggtccagcaatcaatggcatatggcgagtcggtttcggtgacgccattctttagctgggtgcacgtatggaacaccggtgccgcattcagtctttttgccaatggtggaggctggcagcgctactttttgatcggaatcgcggtggtggtctcaattttgctgatcaagctggtccttgagaaccgtcacaaaggagaggccatcgcctacagtcttatccttggtggcgcgatgggtaacctgattgatcggatatttcgtggctatgttgtggattcctttgatgtctattggcgagcctggcactggccggctttcaatgtcgcagatattgcaattgtcctcggtgtcttacttttcgtttcctcaagcttgttgcgtgaaagaacaaacaccaatgtcgaaacagattggtctgactga

SEQ ID NO: 304945 - DNA, 1281 bp, Proteus mirabilis
atgcctaacaacatcttgcacctgcctgagtaccaggtcctgggctgcaaatccaccgacgacgatatgcacttccaggtggacgcgcccgatcccatcgcctgcgaggaatgcggcgtccagggtgagttcgtgcggttcggcaagcgtgatgttccctatcgtgatctgcccatccacggtaagcgggtcaccctctgggtggtccgccgccggtacaactgccgggcctgcaagatcaccttcaggccccagctaccggagatggtggacggcttccgcatgacgctgcggttgcatgaatacgtggagaaggaatccttcaaccacccctacaccttcgtggcgtcacagaccggcctggacgagaagacggtacgcgacatcttcaacgcccgtgccgagttcctggggcgttggcaccgcttcgagacgccccgcattctgggcatcgacgagctgtacctgaacaagcgctaccgctgcatcctgaccaacatcgaggagcgacccctgcttgacctgctggccacccgccgtcaggacgtggtgaccaactacctgatgaagctgaaagaccggcagaaggtcgagatcgtcagcatggacatgtggaacccctaccgggcagctgtcaaggcggtgctgccacaggcccgtatcgtcgtcgataagttccatgtggtgcgtatggccaacgatgcgctggagaaggtacgcaagggcctcaggaaggagctgaaaccttcccagagccgaaccctcaagggagaccggaaaatcctgctgaaacgcgctcacgaagtctcagaccgggaacgcttcatcatggagacctggacaggcgcattcccgcaactgctggccgcctacgagcacaaggaacgcttttacggcatctgggacgccaccacacgaccccaggcagaaaccgccctggacgactggatagccaccattccgaagggccagaaggaagtctggagcgatctggtcagggctgtgggtaactggcgcgaagagatcatgacctacttcgagacggacatgcccgtcaccaatgcttacacggagtccatcaaccgactggccaaggacaagaaccgtgaagggcgaggttactccttcgaggtgatgcgggcacgaatgctctacactacgaagcacaagaagaaggctccgactgcgaaggtctctccgttctacaagaaaaccatcggttacggactgccggacttcgcagaggaactcaactacggggtcgatctatcaaccatctga

SEQ ID NO: 304946 - DNA, 714 bp, Proteus mirabilis
gtggtatcaggttggtggggtgaaggtgccccatcaaccattaaatccgtataccctttctttatagcgttattcgctatacctgcaattgcagaacaccccacatcgttcagtcaggcaaaacgatttgcccgagaaatttaccaagacaaccagagtacgttttactgtggatgtagctatagcaatgatggtgcgattgatgctgcatcttgcggatatgaaccaagaaagcaaccgaaacgaggtgaacgcttagagtgggaacatgtagtctcagcttgggaaattggccatcaacgccaatgctggcaaaatggtggtcgtcggaactgcgaaaagaatgatcctgagttttctaaaatggtttcggatctccataacctcgtaccatctgtaggagagctcaatggggataggtcaaattttcgatttggcatgattccgaatgaaccaagatcctatggtcaatgtgatttcgaagttgatttcaaagaccgtcgagcagaaccaccagctaaccgtcagggtgatattgctagaatttatttctacatgcgagatcaatacggcctaagactcagtaggcaacaaactcagctatttgaagcttggtcaagaatggaccctgttgacgaatgggaaaaagtgcgtgattttaagattaaaactattcaaggtaactctaactgccatgtgtcaaatagctgttaa

SEQ ID NO: 304947 - DNA, 2040 bp, Proteus mirabilis
atgagttacttgcctatagaaagactggaacagttacgaatcggaaccgttggttttgtatcgcctagtgaaattagagtttccttagaaattgattccccagactcagtctctcttcaaggaggctcacctcgcaactttcctcgaatcaacagttatgtgcttataaacagtgatgatggatttctagttggtcaagttgagtggatcgcagtagaacactcgccataccccaaaagaagaggcttgcaagattttggcttgatagacttaccttttcctctaaaaaagctcagtatcaaccccgttggtacattgagaagcgatagaaaaaacgatggtttcaaattcaccagaggaacagatgcatttccttcagttggtgattcagtgcttttacctactgaccaacaattaaactcaataatcgaatcaggtgaaaacagaagggttaaaataggagatagtcctctagctaacaatgcagaaataaaaatcgaccccgataagctttttgggcgacatatagctgttttaggcaacacaggtagtggtaaatcttgctctgtggcgggactaattcaatggtcactggacgcagttttacaacagggccaaactccgaacgctcgatttataatacttgatcctaacggggagtacagccgagcatttggtccaaagtcaaaatataaggggaatttattgcgcgtagaggctaactctgattatggtgagttagaacttaaagtaccatcatggctatggaacagttcagaatggggggcgttcactcaggcaagttcaaaagttcaactcccattactacgacgagctttgagggcgatgagaaatgatgtgttgtcagaagatgatgtgacaattcaagcaaaacatttttgcggaatacttttagtttcaataaggcaactagcaagtcaagggcagatatatgtgaatggtggtcatgccaaaggcttagttgaaagtttaacgtcatgggaaactagcctcataacattaaacgaaaaaatccacaaccaacctttcaatagtgtaataagcacgataaatacttacctatcttccagaagaggagcacagtggcctgctaagcctgaagtcagtgatactgataagttgatttctgagttaaaagaagctcatgttgcacttggtggtgatgaacaagaacttctcccgaaaagtgaagatacgcctattcgctttgaaggtgatgacttcgtcgcctatctcgaagctttagcacaagaaacgggaactgagcagttcatggaatttcttttgactcgaattcgcacaatgctaggtgacacccgaattagtgcagttactaaagattctgaggaaccaataagtttaactgattggctagatacttttcttgggaaggatactcatggtgctatcactgttatcgacctatcactagttcccaatgaaattatccatcttgtaacagcagtaatctctagagtgacttttgaagctcttcaacgatatcggaagatgaatggaaaaccattaccaacagtaatggttgcagaggaagctcatacatttatcaaacgatacaaagaagaaagtgagagtcaatcagtttctgatgtgtgctgcaaagtatttgaaaaaatcgctcgcgaagggcgtaaatttggtttgggactagtagtatcatcccaacgaccttctgagttatctcctactgttctttctcaatgtaatacttttttactgcacagaattagcaatgatagagaccaagaacaagttcataggcttgttcccgataacatgagggggctattaagagagctaccatcgctaccatctcgacatgcaattttactcggatgggcttcagaactaccggtgttagttcgaatgaaagaacttagtgaagagcaaaggcctcagtctgatgatcctgacttttgggacgtatggtctaactccacaggtgagcctcgtgaagtaaactggcagccaatcgttgaagaatggcaaaacagagattaa

SEQ ID NO: 304948 - DNA, 1419 bp, Proteus mirabilis
atgactattcagcaaattaaagttggcagtgttcctgatattattgagctaacaccaaactccaatgagcaaagtgattcttatccttttatcctatcaacgaatacttcatggggagaacagggttctaaaatatcaatagagaaattacgccaaaatattgagccttggttaacagcactttttcaatccgaacatttaaatctattgatcggtgcgggtttaagtacgtctattcaaatgtcggctacaggcgtgccacccgttggaatggggtggatcagtgatctagcggtctgtcaaagcgaaataaatgaattcgctacaaaagctgccaaatcggctggtcgcgcacaaggaaatatagaagatcaaattagagctattaatgaacttatcaaaggtcttgaaattttaacagtgttggatagcccgcaacctgaaaaccccccggctccatatgcagcctatagagacctaaaagctgatttagctgcaattaagggggaattgtctcgatgtctaggtgagttttcaaaatctgtcagtacaggagaacacttaattaaaagtgctgaaaaaaaacgaaaagaggaaactttcaattatcttgtgagtttcttaatgagctttgcaagtagaaccgctacacgcgacagattgcatatttttacaacgaactatgaccgaattatcgaggttggtgctgaacttgctggtttaagactcatagaccgttttgttggaagtattgctcccgtttttagatcctcaagattagaagttgattatcactataaccctccgggaatacgtggtgaaccaagatatttggaaggagtggcacgttttaccaaacttcacggttctctagattggcacgaacaagatggtgcgattaggcgctttggcctaccttttggagctcgctctgttgaaccgtttctagaagcagaggggcacgaaagcgatagttatgaacaacttatgatttaccctaattcagtcaaagatagagaaaccgctgagtacccctatgtagagttatttagagacttagcagcagcgactagccgtccaaacagtacattagtcacgtatggctatagctttggtgatgagcatataaacagagtaattgaagatatgcttaccgttccatctacccatctagtcatcattgctttcggagatccgctagaaagaattatgaacttcattggtaaaagtggaagaaaagctcaaatcactttactaatgggtgaccatttgggggatctaaaaactttggttgataactatctacctaaaccagccatagataaagcatcaataaagatggccgaattactaaaacagcgaggctttatccagtcagaacactcaggtaatgcaactaccaccgaggtaacatcatga

SEQ ID NO: 304949 - DNA, 474 bp, Proteus mirabilis; identical to SEQ ID NO: 112377

SEQ ID NO: 304950 - DNA, 282 bp, Proteus mirabilis
atgaatcctgaaaaatacaatagaagtataagcttgctttgcccgacttgtggctgttcagacttttcatacgaagacggttgcgatgaaacaatacaagtaatgacttgtgcatcttgtgaccgagagtttaataaagatgagcttattcaagagaatagcgaaaatattgacgagcacctttctgaaatcaaggaagaagttttaaaagacgttcaagacgaactacgtaaatctttaaaaaaggctttttctggtagcaagaatataaggattaagtaa

SEQ ID NO: 304951 - DNA, 855 bp, Proteus mirabilis; identical to SEQ ID NO: 112376

SEQ ID NO: 304952 - DNA, 1128 bp, Proteus mirabilis; identical to SEQ ID NO: 112375

SEQ ID NO: 304953 - DNA, 2199 bp, Proteus mirabilis; identical to SEQ ID NO: 112374

SEQ ID NO: 304954 - DNA, 3165 bp, Proteus mirabilis
atgaatgaagaaaatctagagagcctttgtttaggttggtttagggaaaatcattgggatattcttcatgggcctgatattggtccagatggcaacaatcctctgagaaaaaattactctgacgttatcttagaaacttacttaaaattagcatttgaaaaaatcaataaccatattcctgttgttcaaatagatatctgctatgaacagtttaaagccattatattaaaacctgatttttttgatttagttacaagtaaccgttcttttcatcgtttcttgttgcaaggagttcctgttgtatataagggagccgatggtgaatcgatacaggatcatgtttttattatcgacttcgataacttgaacaataatctatttactgtcgtcaatcagttcacgattactggcaccaaacagccacgtcggcctgatgtcatttgttttatcaacggcttaccgattgctgttcttgagttgaaaagcccaagcgatgaaaatgccgatatttgggatgcctttaatcaactgcaaacctataaagatgaagtctcagacctttttatcttcaatgaggcgctagtagtcagtgatggttacaccgctcgggtcggctctctaactgctaaccaagagcgttttatgccttggcgcactattaataatgaaaacgataaacctttactggagtggcagctagaaaccatggttcgcggtttttttgatcgtgagttgctgctggattacatacgattttttgtattgtttgaaacagacggtgagacgatcattaaaaagattgctggttatcaccagtttcatgctgtgcgagaagcggtaaagacgacagtcattgcggctcagcaaattgatggcgtaacagagaagcgggcaacctatgccgatgaggtagtacctggtagtaaaaaagcaggtgtggtttggcacactcaaggcagcggcaaaagtatttcaatgtgttgttatgccggtatgttgcttcaacaaaaggctatgaataacccaacgctgattgttgttaccgaccgcaatgatctagatggtcagctctatgccacgttctgcaacgcagttgagctcttgaagcaaacgcctgttcaagcatctgaccgagatgcgctaagacagttgttagctgaaagagagtctggcggcatcatttttaccacagtgcaaaagtttgccctgcttgacgacgagaagcatcatccaatactcaatgagcgtcacaatatagttgttatctcagacgaagcacaccgcagccaatatggcctgaaagccaccttaagtgcagatggtcaatataagtttggttacgccaagcatatgcgcgatgcgctaccgtctgcttcctttattggttttactggtacacccatttcacaagaagacaaagacactcgcgctgtatttggtggctatgtgtccatctacgacattcaagatgcagtagatgatggcgcaaccgttcctatttattatgagtcacgcttggcaaagcttgatttgaaccatgctgaaatcgctgagttgtccgatcaagttgatgaagtggtagaggacgaagaggacgtcagcaaccgtgaaaaaactaagggggaatggagccgtcttgaaaagcttgttggtgcgactcctagattaagccaagttgcagctgacttgatcgagcactttgagacacgcaatgccactatggatggtaaagccatgatagtggctatgagccgtgatatctgtgcgcatctctacaatgagattattgcactgcgcccagaatggcattcggatgatcctgaaaaaggggcgattaagattgtgatgacagggtcagcttcggacaagccacttttgcaaccccatatttataacaaaaaaaccaaaaaacgcttagaaaagcgctttaaagatatgaatgatcctctgaagttggtcattgtcagggacatgtggttaacggggtttgatgcgccttgttgtaacactatgtacgtggataaaccgatgaaaggccataacctgatgcaggccattgcgcgggttaaccgcgtatttaaaaacaagccaggcggtttagttgttgactacattggtattgctaacgagcttaagcaagcattgaaaacctatacagactctaaaggtaaaggcgagccaacactcaatgcagaagaagcgttttccattcttttagaaaaaattgatgctatccgtggcatgtttggtaaaacaccaaaatccgatggtttggacatatcggggtatgaaactcaagcgcacaaactattggtgcctgccgctaactatgtacttggcttagaggatggcaaaaagcgtttcttagacttagtgttggcggcaacaaaatcatactcactatgcagtaccttggatgaggctaaagagttaaggaaagaaatcgccttttactcagccattaaggccgccatcagcaaatttaccagcgtagatagaaagcgcactcaggaagaaaagaactcggcactgaaacagatcctagataacgcagtgatcgccgaaggcgttgctgacgtgttcgcactttgtggcttggacaagcccaatattggtttgctatcggatgagtttttagaagacgtgcgacagatgccggagcgcaacttggccgttgaattacttgaaaaactactcaaggatgacattaaagcgaaaacacgtaataacgttgtgcaagagaagaaatacgcagaccgcttgcaagaaacgcttagaaagtacaataaccgcgccattgaaacagctcaggtcattgaagaacttattcaaatggccaaagagtttcaggaagaaatgatgcgcgaggctgaactggggttaaatccagatgaaatcgcgttttatgatgctctagccaacaacgaaagtgcagtacgtgaacttggtgatgagatccttaaaaagattgccgtcgaaatcacagacaaactcagaaaatcgaccacggttgattggcaagttcgtgacagtgttcgagctaaattaaaaatactcgtgcgccgcactttacagcgttacaaatatccacctgacaaagccgctgaagctgtagagcttattttgaagcaggctgagacattgtcgaattcatggacgaaataa

SEQ ID NO: 304955 - DNA, 1155 bp, Proteus mirabilis; identical to SEQ ID NO: 112446

SEQ ID NO: 304956 - DNA, 705 bp, Proteus mirabilis; identical to SEQ ID NO: 112445

SEQ ID NO: 304957 - DNA, 1716 bp, Proteus mirabilis; identical to SEQ ID NO: 112444

SEQ ID NO: 304958 - DNA, 981 bp, Proteus mirabilis; identical to SEQ ID NO: 112443

SEQ ID NO: 304959 - DNA, 864 bp, Proteus mirabilis
atgtactccaaatttgttgtttttgtatcgctgttaagcagcttaaccctcagcattcctgccaactcttctccagacctgatagtcaacagcatcaaagaggtagagcaaaacctgggtgctaaagtaggagtctcaatctacagcgtttctgatggttacctttggcattacaacggcgattcacgttttccgttgatgagcacctttaaaactcttgcatgtgcgaaattgctccacgatgttgaaacggcgaagctgtcgattgatcgatctgtgaagattgaggaacaagaccttattacttggtcgccgataacagaaaagcttgttggagagagcttttccctcaagcaggcttgcacggctgcaatggttatgagtgacaacacagcggctaatatagtactggacggtattagtggcccatctgaattgaccttgttcatgaaagaactcggtgatgaagtaacgcgactggatcgtatagagcctcatttaaatgaagcgcgaagcggggatgagcgtgatacaacaacacctaacgcgattgtaaaaagcctcgggaaactgctttatggcgagaaactctcaagtggctctaaagaacaattaattgaatggatggctggcaacaaggtgtccgatagcttgttgcgttcagtgctaccagaggggtggtcaattgctgataggtcgggtgctggtggttttgggtctaggggaatcaccgctgcgatttggtcaaatgaacagcagccattaattgttgcgatatatctcacccagactgaagcttcgtttgacgagagaaataaagctattgccaaaataggtagagaaattttcgcttcttataactaa

SEQ ID NO: 304960 - DNA, 2361 bp, Proteus mirabilis
atgagtcgggtttccccaaaaagttttccccaaggtatcattacgaaaggccacacagataagaatttccagtttctggttctgtccggtaatgttttgcttctaattcaatctcaccttgctaatttaccgccgtcccagcggcggagcgctaatagggctgtgttctacttcgaatgtttcctgtggctaatcaaccatccacctatcacaagcactctagaccttcgaacaaatgcttttctgagcattcagcgccttttctatggcgcgctttactcaaactgttttctggctgctgaagtaaaatactcaggcagacagagacttgtccggtatttctttaaactcctcgctgagctgtctaaatcgtctcctatcaatatttttgtatattcagaccttacagatagccaggtccgagaatgcatcgctcagtttgaagctattgggattgaccctgtacgagcagccaagctcatggggtggcaagtcgcagacagaagcgcgaactcatttcgattaaagatgggagccatcttcgatgtttttgggcctgattttacgatggaattacaccaggagagtaagaagcacgccttggctcatagtcattatagtaactacgctaatgtggtctctcgatttgatgattttctgcgctggtatgacgatgatccgatagacagaccttccttaaacgctcacgtgctccaagatccagtctttgtatatcagcttttctggagctttcagcgctggcatttcgaagggtactccgagcggagccaaacccaaccgacggaacgggtgttggcaaaccttcagcgccaatggatcagaatcatctgttgggcaaagtctgttctggttagcggagggcttatgtgttccccgcttggcgatgtgtggcccgaagggagcaaaaagctcactcgattcctccatgaagtaggccaccatcgatacgctgatggtgaatcccttgtatcacaaaagcttttgacccagatcccactgtctgtcacagataaggaggcaacggagcttctattcagacagatcgaagacgacttcaataaagtcgttcggtgggctcgacgggagattgatcacatagctcatcgtttgaacgttattgatcaggcctgcgatcaaggggatctgataacgctaggttctcgaatatctgctcgggcttatggccagcctgtgatggggatgaacagccttatcagaactgtaaaagaaacccacaacggatttgcaatcatcgaccacgctatgcgcggccacttggtaagcgcaacagggagttctttttcaacatcggagttagcggcgaatctggctatgccgacgaagtatgcgattgctcccatcgctctctggctagtagcgcagcatcccgttctgaccgaggcatctctattgaaatgcgagttattcgaccgaaacggtaagcgaaccggctttgttaagaccgactctggatctgtgcttgttgtgaagaaaaaccggaaagggaagcaacaggaggttgtactgagcgacgacgcagcttcggtggtcgagctgcttatccagatcacggccccggttaggcgctatctcaaggagaaaagggatgatgcctggcgacgattgttcatcgtcgcgggtggtcagggctttcaggaaccttacactttcacaaaccagaccagcttcgccaagatcctccggcagaaagcctttatacaagctcatagcgccgagttaggagacatggtctccgtattgtcgctggcccggataagggctaccgcaggtgttctcgtctacctcaagtcgttaagcatagagaaaatggcagagtcactaggcaactcgaaacgagtcgccatgaaccattatctgccgcctaccatcatgcagtttttccaagagcggtgggtcaggattttccaaaacgcggtgattgtccacgctatgaaggactctccttatctgcttgatgcaacggactttagcagcatgagtgagttggatatgtttctagaggcgcatgcccttcgaacgccgcctgaagaacccgaacagctgagtagttcctctgagcaaatatctggttcgtcagatccagagatcgttatttctatcgatgaaggcgttcttggtgtgctcctctcgctaaaaatggccgttgagcaagctggcccacgtgcggcgggaacggctgtgtactggagccagttcgcagcgaagatagaggctcacattgaatctgatggttatctagatccatatatccgcggttgtctagttaaggctaaggggatagcgaatcctcaacagtttgagggtctagtctatggatga

SEQ ID NO: 304961 - DNA, 2124 bp, Proteus mirabilis
atggatgatagcagcgcgctacctcgcgaattggacttcataacgcgatcagtcgatgcggatctaggactattccgaagcgctgaatggctcaattcgaagttcgatgacccagtatggagcgctcgttttgccgaaaatggcaagagagacactgttattgatttcagggttaggctcgatgatgggctactgctcacccacccaagacatcacaaccttttggaaagcataaaggcatatttatgtctgtcgtcccatccgttggccaccggaggcagccagcttgccccgaagacggtacagcaaagggttcgtacgaccttaggtatcatcgactactttctcctgagagccgagcatttccaactggcatcccatcagttcaagctaattacgccgcatgacataactgagttcatggctgtgttggctactgatcagtacgctaagaacaatctctacgctgcgcgtgaagagctacagcgtttccttcgcctcaacagccatcaggttacgaagctggagacacagtacgttctatcaaaggttcctggaatcgctattgttgatgatgtagatgagagcaaccttggcttatcagagtcggagattgttgcggctaggatttttctgtggatcaacggaaactacaaacgcataccgattaaggcgggtagtcatgggcattcattttttagtcatcaagtttctccaaacagtatctactctgaaatttatcatgagcgaactttagtgacgcctaaattccgggggctggtgctggacgagctccactttagcccatccgagaagacctttagagagtatcccatggtttcgtccatggttctgtatgatgatccacttccctctgaggctggggttgatttctaccgacaatcgcttaaacggatggaactccttaagctctgtgggctggaccatatcaaccatctttcgctaacagccttggataatagagctttcctcgggcaacttaagatgaagggcaccgggcgttaccggtcgctgcctcgggacgtcgtattttcatcgtttcggaacgcagtggagttctacttagatttgggtcaggtccttatcgatggttatctggccttggcgcgagaggctgatgcacgtggatgtgccatcggggatttgacccaatctgaaacgatagagctgatcccaaagaggttgcgagacatcggagtaagtatctgggatctctcggcagattttcgcgggcagaaccgtggaggcggtagcgctctgttttttaagcggttcagagagaatgagggactgctccagctaattgaggtactttatggtgccatctggataatactcgctgcgcttagtgccagacgttctggagagcttagggatcttaaggcagatacctgccttgttaagaagtcccatggctattatttacagtttgacttgcggaaacggaacttcggcaagactcgtgaacaggtccttcgtcccattcccaatgtcgcggcccggtgcattctgagcttgggtgatcttcgtcagaagctctccttgcttagttcagttacgatttcagataggctgttcagcaagcctcattatcgcgaagttggcctgtctgcgatgggttcagtagacgcggccaaggtgctaaaccgcttttctgactatttcgaagtccaacaggacgctactgggcatcgttattacattcgtacccatcaacttagacgcttcttcgctatgacattcttctgggccggcggatttggcggcctagacacacttcggtggtttttgggtcatacgaatgtcgagcatgtttatcactacatcacagagaccgttccaggagaggtgttgcgaagaatcggtgccgaatacgcatctgatgcacttctcatagggcagagcaacacagaagatctgggtaatctcctacgtgagcgttacggattgtcatcattttccatcatgcagtcggatgaagtcgcagactatatcgaagacctaatgatggaagggttgctaaagatagagccagtcttcttcgacacaccgacaggaaagcgccatgagatcctctttaaaatcaccggagaaaattcatga

SEQ ID NO: 304962 - DNA, 579 bp, Proteus mirabilis
atgaagaaagcatcacggcaggtgtctgctcagcttgagattagcaacagatctgttctttctcgcgttgagtatctcgaatcgattattcactcacccgccgagcatcaagaaaacataacacttttgatcgctttgaagagccaaagtggacttgcaaagctggcggttagcgaagcttttatttctcctatgtctctcaatacgcttaagaacagagcgaatgacatactccctggtgggtttacgactattgatcacctgagacgccaggccgcaaaagctattcacgattcaaccgtagtcaagccttcatcgtcctctataaccaagcaggacctcaaagataagattaaggctcaggaaaggaccatctctcagttgtgggatgaaatcgcactggttacgaatgtttttagagaatcagtaacactcgcccaacagtttgccgagaaatgcccagacccggcagatctgatccttttcaaaaagcgccgtagagagctgcttttaatgttctcattaagcaagcggcctcagacgcctttacatgagagcccgtccaatgccgaaggatga

SEQ ID NO: 304963 - DNA, 1407 bp, Proteus mirabilis
atgccgaaggatgagaaactctataatctaacgagcgatgttttccgattaccttacggggttgatcgaaatagccacgtcctcagcgtcagagctgataacattccgcttctctgttggcccgatggcaggccgtgcaccgaggcgaacctatatatgctgcactgttttgagcgtggactttcccgtaaggaaggcggtgggacacttactcaatatgccaagcttctttcacaccttattcgcttttgctttaacaacaactactcattcatagggttgactgattctcgcttttcactattcatcagaacgctccaaggagaaatggatccacgaaaaccagagcagagaaaacggagagcagcccatgtggcaaacatagggagaacctgcctcggctttttaggattcgttggagaactctatctagaaccgtcgttcgtcggcgccgcaggaacgatcagggctgagacgaaggagttcaagctggctggtcagagaaagcagatagtccatacctattggcatcaccattcctttcctaaccccgagcctccaacacggcgcttacctatcaattctacaaatatcgcaaaactgatcgaagtgattccggatgtgagcacgacgacctatcagagaagacggcgtttcattctggtcaagcttttggagattactggggcaaggcgagttgagatcgcgaacatcagagtcgaagacatctataacgcgaggaagatgaagcaagagcctgttctcaaggtcttcaccgccaagcgctcgggaggaagggaagagtacagatacttgccggtttccaaaatggaccttgaattgatcgtaaatttcatcgaaaagttccgacaccggatcattaagaagaccatcggtagcgctagtgacttgggctatctgctgatttcggaaagtagtggactaaggctcgctaccgagacgctgacgaatgaactactgctgcttgccaaggctgccaagatcgaagagcaagcctgcgcacacatgttccggcatagattcattaccaagctttttgtggctttgattgagcaacatgaattcgaaaatggggacgattttcggcgtgctctcctggatggtgagaccctcaagagaaaggttcaagagtacacggggcatacttcgatcagtagtcttgaaccgtatattcacttggctttcgaggaagtggcgaggtttggaagtaccttagacctgattaaagcaaagcttgccgttgaatcgctacggtccaatctcaaggacattgctatcgaactcagacacggcaggagtcctactgaattgagcgccctcctccgcgactatatcgacttggcgctggaggaactcagtagcgcctcaatttctacagagagctga

SEQ ID NO: 304964 - DNA, 513 bp, Proteus mirabilis
gtgcttccaaagcgtgaaaaaagaccattaaaaattgaaagtgtcccgaatattcaatgggcattagatttcatgcacgacagtttatattgtggtaagcgtttcagaacattcaacattattgatgaaggaacgcgtgaatgtttggcaattgaggttgatacatcactgtctgcagagcgtattataagggtgctcgagcgattaaaaatggaaagaggattgccaaaacagatccgagtcgataatgggcctgagctaatctcgattaatttattgaattactgtgaaactcaccacgttgagctttgccatattcaactaggcaagccacagcaaaatggctttattgaacgatttaatggctcatttcgtcgtgaatttttaaatgcctatttatttgaatcattaagtcaggtgcgagaaatggtgtggttttggcagcaagattataatcagaaccgcactcatgaaagtttaaatcacctcccgccagagacatacagaaaatag

SEQ ID NO: 304965 - DNA, 198 bp, Proteus mirabilis
atgaaagacagatcgcatgatgcggcgatggccgagctcttccgcgccgatcctacctatgcagcggagctgctggccgaggtctgccgcgacggcaatccggccgagctggccattctgttgcggcagatggtcacggcctcggcaggtgatgagaggtcggatgacaccgatacagagcgcgctctatctctctga

SEQ ID NO: 304966 - DNA, 1548 bp, Proteus mirabilis
ttgggatggacattaaatttaaacgttaaaatagaaaaatctggggcgagaatgaaaaaaatttccgaaataggcgcaaaagaagctagagaacattttcttaagggaagtagttattttaatggcgactttccgagctatataagctttgagccaatgcttataagtgtttcagatgtgttggctgggacgcagtattctgctcataaatctgaaaatccagatcaaatatccggcgtaaattacagtttggtagctaataaggatggcaggtttgcatggaggcctttagaacttatgcatcctgttctatatgtatcattaatcaatctgatgtgttccgatgagaattggccgattattattaaaagattggctgattttgataaaaatagggtaatttgttgtagtttgcctgtgatatctgtagacaatcaaaaagatcaggcagcacaggtaaagaattggtggcagactgttgaacagcagtcgttaaaatattctctagaattcagccacatattgcacactgacgttacagattgttatggcgctttatatactcatagcatttcttgggctattcatggcatggaagtcgcgaaggctgcgaagggtaagggaggtctgcttggagataaggtcgatgtcgcaatccgggcggggcggtatgggcagactaatggaatttcgcaaggttctgttctgatggattttatagctgagcttgtgcttggctatgttgatgaattaatttcggtggagcttggcgagagtactgattttcgaatacttcgatatagagatgattatagaatattctccaatagtgacgtaggcgcagagaagatattgaagataataagcgataagctacggatagtgggaatgcgccttggtgcggctaaaacctttataaatacaaatgtggttgaggggtctataaagcctgataaattggctggtatagatttgcaagacttagggacaaccaatgcgcagacgctgcaaaaacagcttttgcgtcttcatacgtttgggagacgctaccctaacagtggttcactgagaaagcttattggtgaactgcatacaaaggttattgagcagaaaactcatcctgatgatttagaggtccaaattgccattgcaacagatattgcagttgtatccccatcaacatttcctgcaatagccggaattcttagccatctaatttcgctcgcccgaccagagtcgaaaggtgaattgtgggataaagttagccggaaaatgagcttggtaccaaacaatggttatcttgaaatttggttacaacgagttacaaagccaaaagccattaacatcgaacatcaaagctctgaaacattatgccgcattgtgaatggtgaaaaactacaactatgggataatagttggatatcgaataagaagcttctggaagtgttggacacgtcaggaatagtgataaaagatgcttctgaaacgcctgaggttatggcttccgaggaagtcgaactattcaagaaaaatgcgtggcaatattaa

SEQ ID NO: 304967 - DNA, 381 bp, Proteus mirabilis
atggccggtgaaaatgcgattgaggctatcaagccgcattcgcgtgggacacgtccgcggcgggagcgaattgaggtttgggtcagcattgatgagaaaaaagagttagccgaaagggccgatcaggcgggattgtcgaatgccgctttccttcgcgctgttgggctgaatctgcctataggttcacgggccgatttggaagctgtccgccagttggcaaaggtgaatggcgacctaggccgggtggccggattgctgaaattgtggctcgctgagaaacgcggtcagggcgcgcgaccgattgacgtagaagcgatgatgatggatttccgcgcaatccaagaggacatgcgggcgctcatggggaagatttccaaatga

SEQ ID NO: 304968 - DNA, 243 bp, Proteus mirabilis; identical to SEQ ID NO: 288188

SEQ ID NO: 304969 - DNA, 225 bp, Proteus mirabilis
atgaagacagctcaccgcatcagcgcattggccaatcaactcaacgaactgcaagcctgcctcggtcgaaccagtgggcggcctagcaagagcgttatggaagcccagcgcattgcggccgagctggcttcttcactcgaagagtggcaccttgaaacgttgcacatccctgaaacagagcgtgacctctatcgcgtacagaatccctattacgcggcccactga

SEQ ID NO: 304970 - DNA, 795 bp, Proteus mirabilis
atggaaagagaatcgagaaaatcggcagcgggcgccgcccggaaactcggccgaggcgcggcgctagcgctgacaatggcaagcacgggtcttggtgtaagtctctacatggcaccggccccggcttacgccatctactgctcaaactgctcgacgttctatcagcaaatgttcgagtacgccgaggccgtcaacaccgcgctgaacactgccgagcaactgagcacgcagattcagcagtaccaaaacatggtcacgcagggcacgggcctgccagattcgatgttcggcagcatcgcggccgacctcaaaagcgtggtgaacatctacaaccgctcgcaggccttgggccgccaaatccagaacatggatgcgcagttcaacacggcgtttcccggcttcgagtcctacctgaatcaagcggcgaactcggcagaggtcccggcgcgggatcgatacaaaaagtggtcagaacagggccgcgacaacgtgagaacagcgctggaagcggcgagcctcaataccagcacctttgagtctgaggacgcgcagctagaccgcatggtggctcgctcgcaatcggccgtgggccggatgcaagcgattcaggcgggcaacgaaattgcctcgcagaacgtgcagcagctccagaagctgcgcgatctgctggccacgcaaatcaacatgcagggcaacttcatggctcagcagggcgaccggaaggctgccagcgaagccgccgaacagcagtttgaagcgcgcaaaaacacacgcggcggcgtgaaggggtactga

SEQ ID NO: 304971 - DNA, 1623 bp, Proteus mirabilis
atggaccgtcgtctattgttgttcctcgccttggcgggtgtgttcatgggcggtgatgcaatcgccgcgaccgacctttcccatgccgatacatcggttcagggcttactcgacctcgttttgcagcagtcgcaccagtggtcagggaagctgtatgactatgccatcagactgttctggctgctggcctctatccagttcgtctggacgttcctgcctctggtcatgaagcaagccgatttcggtgagattgtcggcgagttgctgcgcttcgtgctggtgatgggtttcttccttgcggtcatgcagtactcggtggagtggtcgacagccattgtcgatagcttccgcgatgcagcagcatcggcgagcggtctcggtcgtgcactagaacccggcgatatgcttgcagttgcgctggatttcggccgcacaatggtggagggcatttcagtattttctccggccaagggactgttgatcgctgtatgcgcggtgctggtattggcgtgcttcgccttcatcgccgcgttcatgtttgtgacgctcgtagagtcctacgtgatcatcaacgcatccgtactgttctttggctttggtggctcgcaatggacgcgggactttgcgattgcacctatgcgtttcactatcgcaatcggtgccaagctgttcgttctgacactgcttgtcggcctgatcgtgcaatcggctaagcagtggttagcagcctacaccaatgatgaagcgtcgttgatgacgatggtcggtctggccttggtgtgttgctacctgaccaaaactattcctgacctgatcggcggcatgattagcggcacgtcgatgggcggcggctcggccatcggcggaatggcagtagccggtgctgccggggcagctgcggcagcggccactatcgccacggctggggcggccgctccggcagcggccggtgctctcggtgcggccggtagtggtggtgcagccggtgcaggtgcggcgggtgccggtggcatcggtggcggtctggccgctgcgatcaattccagtttcgccgggggcagtggtgctgccggggcagtaggtgctggcagctcgatgaccggcgcggcgtcatccagcgtcggcatcggcggctctgcgacggctaacggcgcgtcggctggttcgcggatcggcggaagcgctgccaatgcggtaacgtccgggcctgctccgcaacccagcaacggcgtccagcaggccgccaaacaggctgggagggccgcgcagggcaacgacgacaaagaccaacaggcgacaccaaaagggggagtggtcagctccggcaacgccctttcgcaagcggccaatggtggcgcaaagatgcttggcgtgatggcctcgatggcagtgccgggcatggagaacgcgcacgccttgtctcttggcgcaggatctccgccacctgtccctgacaatacaagttcggctgctccggccaatggagcggaatcagccgcggaacctacacaggcggaagccaatgtcatccgtccggcctcggacaccagttctacacccagccgcctcgcctcgctcaaggtgccgggcacggcctcgaacaacgaccaaccggagaaataa

SEQ ID NO: 304972 - DNA, 315 bp, Proteus mirabilis
atggaagtcaaattcagccgctacgatacggcggactatctcaagaccgaggacgatattgcggcctatctcgatgccgtgatggaagacggcgaccccgcgctgatcgcggcggcgcttggagacgtggcccgcgcccgcaaccttagccagcttgcccgcgacgtgggaatgagccgccaagggctggacaaggccctttcaggcgatggcaatccgagcctcgcaaccgtggtaaaagtcgctcaggcgcttggcctgcggcttgccttcaaaccgacccacggcggccccacaccagccgcaggggcctag

SEQ ID NO: 304973 - DNA, 753 bp, Proteus mirabilis
atgagcggtggtaatgccgtgacccctaccagtactagcgcacaggcacgggtaatgctctatcagcctagccagcgcccgcgattgcgcgaaggtgattggacagatacatcatttggccgctgccgcgtggcaggcaggctaggccagaggcacgccgatattgtggaagcggtcctgtactgcgcagaacgtcggcgccctgtctctgatggtggtgtagagcttctggtagaccccgctcgggtgagaaaaacactttccgacagtcgctacagctttacgcagatcgaaaagctgttggccgagctgcgagcggcgacgatcacaattgagacgccacaattcgatttcccaataatcgggggattgattgatcacgttatcccatcgcccatgacacggcctgatcccctaacagggggagagcggaatctatggcgggtgcgccttggcgtagcgctggtgatgctgcttgagcatgacttgagtctgtactacgacccagcccccattgcccgcctgcagcatggcatcagtcaagcggtagcgcggcacgttttgagccacaaagtagaaccgacaggcggttggtatcttgacaccgttatcgtggctgttgccggacaggcctcaagccaagccatgcgcgatgcgagacgaaggctcaaggaggagactcaagagttacgggaaattgggcttgtgctcgacggcgaccgcatcaagaaaaacggcgcttgcaacacctga

SEQ ID NO: 304974 - DNA, 786 bp, Proteus mirabilis
gtggcccccggagctacaggcaagagcttctgggcgttggaagcggcaatggccatcgcatgcagcgttgccggtggcgatcttgtagggcttgctcccgcgtgcgctggccgcgtggtctatttcgctggagaagacccgaaagtcgcactggtgcgccgtatccatgccatcggtcagcacctgaatcagcaggcacgtgaagccatcgcggagaacctgaccatcgagcccatcatgggcaaacggatgaacgtgatggatgaccagcaccttgcccgcattatcgaattctgtgccggtgcccggttgatcgtactggacactctgagccggattcatgaccgagacgagaacagcaacggcgacatggcacgacttgtcgccacgttggagtgcgtcgcggcaagcactggagcatccgtcctgtacttgcatcacgtcagcaagggtagcgctcgtgaaggccagactgaccagcagcaggcagcgcggggcgcgtccgccctgatcgataacgctcgttggtgcggcttcgtcgccaaaatgaccgaggaacaggccaagagcctaagcgaccgcgcctatgatcgacagccgatcggcaacgaccggcgcggcttctttgtccgttttggtgtcagcaagcagaactacgacgccaccccgctcgatcaatggtacaagcgccatgacggcggcgtccttgtgccagtggaactgttggagacgaagaaggaggtcggtctgcacatcgtcaatggaggcgacgatgagcggtggtaa

SEQ ID NO: 304975 - DNA, 231 bp, Proteus mirabilis
gtggaaagagaattaaggagagcgagtaaagttctcattagcaaaaagcagctgctggagatgattccactgtgcgagcgcacgatctacaactttgaaaagcagggaaaattccctcagcgcatcgcacttagtagtcgcaaggtcgtgtgggatttagccgaggtcgaggcatggattgatgcgtgcaaacattccggctcggcccctcgtcccggaatgggggcctga

SEQ ID NO: 304976 - DNA, 1257 bp, Proteus mirabilis
gtggggctttttgagcatggtatttttgagaggaaacccaacccgaccatgctgactgataccaagctgcgcaacctcaagccaaaggacaagctctataaagtgaatgaccgtgacggcctctacgtggccatcacgcctgcgggttcgatttcattccgctacaactactcgatccacggcaggcaggagaccatcaccttcggccgttacggtgtcggagggatcacgctagcggaagcccgcgaacggctgggcgaagccaagaagatgatcgccgcagggaaatctccagccaaggagaaggcgcgggacaaagcccgcgtcaaggatgcagagacattcggcgcgtgggccgagaaatggttgcgcggctatcagatggcgcccaatacccgagacatgcgccgctcggtctacgaacgcgagttaaagccgaaatttggcaaccaaaaactggtagagattacccatgaggacttgcgagcgctgacagacgccatcgtagaacgaggcgcaccggcaacagcggtgcattcgcgagagatcgtcttgcaggtctaccgctgggccatcgagcgcggccagaaggtcgagaacccggccgatctggtgcgcccctcgaccatcgccaagttcgagccgcgagatcgagcactgacgcccgatgaaatcggcttgatgtaccagtacatggagcgcattggcaccacgccttccattcgggcggccgccaagctgctgttgctgacgatggtacgcaaaagcgaactgactaacgcaacgtggagcgagatcaatttcaccgaagcgctttggacaatccccaaggagcggatgaagcgccgcaacccccatttggtgttcctgtctaggcaggcgctcgacattttcatagctctgaaaaccttcgcgggcggctcggagtacgtgctgccatcgcgctatgactcggacttgccgatgagcagcgccacgctcaatcaggtgctcacgctgacctatcgtctggcccagaaggaagggcagtcgcttggcaagttcggaccgcatgacctgcggcgcacagccagcacgcttctacatgaggcgggctataacactgactggatcgagaagtgccttgcgcacgaacagaagggggttcgcgccgtctacaacaaggccgagtaccgcgatcagcgccgggcaatgcttcaggattgggcggacatgatcgatgagtggacaatcaggaagccccgcctcaaggactga

SEQ ID NO: 304977 - DNA, 627 bp, Proteus mirabilis
atggcgttcgattggattgcaggtacagcgttagttgttggtatgggctcattatatttgacctatcaatctacaaaatcagctaaaagagcgatagatacatcaattgagctgtatgaaaagcaaaagcaggatgcagcacacgcagaagaaattagtaagaaaaaacagctacaatcattgtgctatttaatccaaaatgaagtatctagtaatattattcatatgagtaaattcgttactttttgcaacattgtatggaatgaaaagttactaagttttaattataacaatcttggttctgagccatttttacagtatgaaacagaaaatgatataaaagatggtttcatttttataaaacattccagcaaaataattgataaatatttattagagatatctaaaatagatagtgagctaattaatgagttgttaaaacttagatatactattgaacattacaatgataaatttttaattagtctacaaagctttattaaagtgaatccaccaatcagtgatttaattacataccttaatgattcaaaagtgtttataactgaatatcagaggcaatcgatgggtgtattagaatactgtacaaaaaaatcgttaggaatctag

SEQ ID NO: 304978 - DNA, 546 bp, Proteus mirabilis
atgaaagataaagtcgttttatataactcaccagaagctgcgagcatcaaaaccattaccggctgggttgatcgtgacggtcgtttttggggtgataacgagcaccaagcaagatattgcggagcaactcataatgtttgtgataaacacccaaatcaagagccattcgtcattaattggggttgtccagcatgcaaggaagagcatcaacaagaaagattcaataattttgagcgtgttaagtgggatggtgaaacaccagtaacaatgttttttggcgataaatacttctttgatatcgatgatattcgtgattattgcgaagaacatgaaacctctgttgatgacctaaagctcgtgttatgtgagccaaattacccgcataacttagaccctaacgatattttcgtagatatcctgccagaagatggtgaagtttcaccagagctttacgaagcttttgaaaaactaaataaagttatcgacaagcatacaccattaagttggtcgcctattgataaagcggtcattgtcacattggattaa

SEQ ID NO: 304979 - DNA, 351 bp, Proteus mirabilis
atgaaagaaataatcacagacatactcaaagaagaaattaacggcattatggatagagctgcaatgggtaatgccacagtctgtattttaaatcgctttgctaacactgtccaaatagctgcatttttaattagcaaagggaaagtaaaagaagctactgactggctatatggtgctctggaatgggattctgaggttgatatttttggcgacctgaaagatagcgacggcaattcagaagatattcaaacttggttcgataagcagatggaaggcgaaattagctttgcagaagcaattgaattaatccgcaaacattacaccgaactcgaaaagctacggacagcttaa

SEQ ID NO: 304980 - DNA, 1893 bp, Proteus mirabilis
atgtctacaattccaacacaaaatccagttccaagtgaagcaccgcgcgacctgaaatttaactcaggtaaaattgacgagtttgttacgtcaatgaaaaacaaatatattgatagatttgggaaagagcattttacaatcgaagggttgcgttggattgctcagcaagcgatatctcaatttggttacattacattagactcattccaaaaaggtgcagaaataacactgccaaatcaagttttgcgtgatgaaaccacaggagaatattaccgctgggatggcgaattgccaaaaatagtccatattgattcaactcctgacaattctggcggggttggtgttggtaaatggcttggtgttggcgatagtacattacgtggagagatctcatcagagagaggtgcgtcaattattggttccagaaatggcaatgtacaagaacagctcgacaatattaagtctagttattcaaatataataactccttatcaatttaaaacagaaagtaattcttggaatgatgcatttaatgatgctattgcgttttcagaaaataataaagttccgatccatgttggtggagtttgggatttagatgaaacaataatagctggcaataaatctaatttcatagggtatgaatcagcagtatttacaaataaaaagctcattgttagccaaaactacggcagcagaaaacaaaaggagccaaattctttattgccgataaatagtaatgtaataaatactactggtaataatgcatcacctaacacggctttctatgttaaccaaaattacaacaatcaaggactagctttttacaatggttatttttatatcggttatgatctaggtagtgggaatggaatgattgaacgatatgctcagaacggtgttatagatacctcatacggaggtgtgtcaattccaataaaccataccgctgatttagccatcagagttaaagatgaatttttatattcagctagtggaggtggagctgagccaacatatattagaaaaatagcaaaagatggaaagtcggttcttgatagtatagacctaacaaattacggcaacagcgcgctgtgtgctatcgataatcataatgacatacttatattacatagcactcttagtggtggtgatagcggattgcctacatttactttctttgaatttggcaattggaataatcctgttaagcaattcacactacctaaaactttaggtgtgcctcaaggaatggatgtttatgacaacactatatatttttacacaaatgataaaatatctcttgtttcgtatagtggagaagttctttcagaggttagaattaacgctagtggtgagtcggaagggatagctataagtgggagttacggtaacacatatatagcagttggttataataacccacgaagggtttgttttttcacatcaccgcatagcactcaagaatcatttttgggatttcctttttttgttaactctgtaacatcaccagcaacctcattaaagccacagataatacctattgggttcagaaaaacatcaacaggatgggagctattagaatattttgataaaacaaacgttaactatacagctctatgggaatctccagtgataaggggtggagatttgatcattaaattgaaatcaaaatcaccgagaagtttagtttcctcttctatttcattcaatgccagctcattccaatttacgaatatatgcaatgcaatgtctgatttttccataggttctaaagagttagtagttaaatttattggagcaaatggagttgttgtaaatgcagattctgttcttggaactggtattatctatgggttcaccatagttggagttagtaaccaaaactcttga

SEQ ID NO: 304981 - DNA, 270 bp, Proteus mirabilis
atggagatgcgaatagttaaattagagcataatgtcagtgatattaaaaatgctcttgttgatataaaagccgacataaatacagcaaaatcagatattgcaacacttaaaactgacatggcggtcattaaatcaaactacgccaaaaaagaagatgtaacctcgtctgcgaacaaaattattctatgggtggttggtgcggtagttttttctcaaatcatccctacgatcccaaagataatagagacttttggtcatttaggtggctaa

SEQ ID NO: 304982 - DNA, 693 bp, Proteus mirabilis
atgaaaaatgaacttagtatcagtaccataaaagatagagatgtatataagtcatcatcagacaagcttttgctactgatacccaagagtagatctaagaatcacccgttagcaatgaaatatgcaagtgtaatagattctgttcaagtctatatagaggagcaactattcactatatgctatatcgacttaactaatcatagagattgtgaagtagctcagaagataataaatatttctagtggttggaaaggtttctctgccgtatttaaaggaatgactattactagctttcatctgtcatatcgtgtattaccatgcatcaaagaagcattatgctgcacgagtaagaaagctcattgctcaaagatggcgactggcaactcatacataagagagcatagatatgtagattatcagatatgtaattttgatttattactgccttgtaaacttgctgatatgggtttctatgaaccacatcttgatgtttcaataaatgatcagtatcaagctatggctgtgagaatgggggttaactggtgtccgtttttcaatgctgatgatataaaaataatagatagagatcctgtaataaaaggagaaaacagtagtgctctaagtttggattttagtggtgcaacagcattattaagcattgatatatctgattttaaaaaaaatgatgagtga

SEQ ID NO: 304983 - DNA, 246 bp, Proteus mirabilis
atgagtgaacgaaaatataaacacccgcaagttaacttgagaattccatctgaacttagagataagattgctgagttagcagaggctaatggcagatcatcaaaccaagaaatgacaattgctttagagtcatgggttgaggaaaataaaaatatcggcattacatcaatcagcggattaaatagaaagattgaatctctggagatggaaataattaaaattaaaaaatcactatcgatagattaa

SEQ ID NO: 304984 - DNA, 153 bp, Proteus mirabilis
atgaaatctttaaaaccttcttctgtacggtttcctcaggaaatagagttattactaaggaagctcgctaatgaaagcgacagatcatatagcaaagagatagttagcagagtaaagagaacattaaagcaagataagttaattaatgagtaa

SEQ ID NO: 304985 - DNA, 192 bp, Proteus mirabilis
atgttcactgacttaatcgcagctattgaagaagcaagatatttaaaatccagatcaggcggtcgagttaacttctgtgtaatgcaggttatggactatatggaagtggtaagcgggctgatggatggtgtcagggttttatatacaactgccaatgatggttatcacacagtattaccggaggcgagatga

SEQ ID NO: 304986 - DNA, 231 bp, Proteus mirabilis
atgcagggaactaattgggtcaaatgtagtgaaagacttcctgttatcggtgatccggttgtagcgtttttagaaggaacaccagtggttttatttctaaatcgggtcaaccttaatgatgaaataacattatctcttcagtgggaaactacttatttacctagtaagcccatcccattctttgatgttgaatgctggatgccactcccaccaatgccagagggggaatga

SEQ ID NO: 304987 - DNA, 294 bp, Proteus mirabilis
atgaacaagcaaaaggaaatcccatttggaactattgttgtaattcatcacgctgttgatgacgaaaacgaggtctatttaaagggttgccatggtgattttgacgcaactgacattcgagagtttcaagaagaaatatcaatggttttgaccggagaagattactttcagggtgagggggtctatacgctaaaaccaactaatgattattacgattaccatcgtgaaattacatttgagttggtttcatttgagccacttataggggaggaggcatctaatgcagggaactaa

SEQ ID NO: 304988 - DNA, 273 bp, Proteus mirabilis
atgaaaggaatttacatcaatgattacatgaacggaaagcaaaggttacccaaaatgtatagagctatccctgtccgcgtgtatttgtgtgacgcattacgttatggggaatacacagagtggctcttgatggttcgccgtgtgcgggatggtagcgggtggcgttggcaaatcataaaagaccaatctcaaaaaggtatttggcagtatcttgatgaccttaaatggctacgtgaacagtttgaatatcattattcagtgaatttcaattaa

SEQ ID NO: 304989 - DNA, 189 bp, Proteus mirabilis
atgaagtcaatacttgatatgtgttgtggctctcgcatgttttattttgataaacaagatgaccacgttttatttaatgacattagagtcgaagaacatattttatgtgatggaagaattttaaatataacaccagatattatttctgattttaaaaatcttcctttccaaaataattcattttattaa

SEQ ID NO: 304990 - DNA, 726 bp, Proteus mirabilis
ttgccgttcaaatggaatgaaacccaaatacctgttaaacaaattttaacactaacagaccaaaaaccaacagcagtacagcgtgtagggaaaaatgataagacgcactggatctcttttcttaaggaggttaaataccttatctattgtgatcttccgtgggattacaaaaataaagtttcaaacggtactgctaaaaatcattatccaacaacctccctcttcaatttaacccatatctctattcattctattgcatctgataacgcagttcttgccatgtggtatacaggcaattttgtactcgaggctatcaggttagctgaagcttgggattttaaagttaaaaacatgttcgggttcgcatgggtgaaattaaataaaaatgcaggagatagaataaataaaaaacctccagaagattttttcgatttcatggaaatattaaacaacgagacgaaaattaattgcggtaattacactcgtcaaaatgtcgaaatgtgtttaatcgccacaagaggtaatggattgcctcgtcaatctgcaagcgtgagacaggttatttactcatgcttaggtgaacacagcgaaaagccaaaagaaacacatcatcgtttagaggaattgtacggagatgttcctcgactcgaattattcgctcgtgagaaatacggtgattgggatgtatacggcgaccaagcggaagaaagtattcaattaatatag

SEQ ID NO: 304991 - DNA, 342 bp, Proteus mirabilis
atgcaaaaaaagacgctcgacttttatcaaatagccgatgccttattactaccaacgctttacgatccgtttcccaatgttattcttgaggcgttatcatgtggtttgcctgtgatcacttcaaccagttgtggtggtgcagaatttattcaaaatggtaaaaatgggtttgtttgtgatgcgttagatattcctgcattaacagaggcaattgtgcaaattccaacaaactcagcatggtctgaaatgtcgcaagtggcgcgagaaactatcctcccctatacaccgaagcgattatcagacgagcttatttcactttataaacggatattaactttgtga

SEQ ID NO: 304992 - DNA, 156 bp, Proteus mirabilis
atgaatattctcgtcattggcgctaaaggtcgagtaggtcagcgtttaatcgaaatattacttgctaaaggtcatcatgtcataggtacaacccgaaaattatccgacacatcagtacatcatccctcacagtaccatgaaatgaattggacataa

SEQ ID NO: 304993 - DNA, 498 bp, Proteus mirabilis
atggctaacggatcagtaaacaaagtaattcttatcggcaatttagggcgtgatcctgaaatccgctacctgccttctggtagtgctgttgccaatttagctgtggccacatcagaaaaatggcgtgacaaacaaacaggtgaaaatcgcgaaaaaacagaatggcatcgtgttgttctgtttggaaaactcgctgatatcgccagtggctatttatgtaaaggctcgcaagtttatatcgagggccaactacaaacgcgcgagtgggatgataacggcgttaaacgatacacaacagaagttgttgtaaggattggaggcacaatgcagatgttagacggtgctagtaaatcagcaggatcacaaccagcacagcaaaacccgccaccggctcaacctcaagcacagagtagtcaaccaccaatggattttgaggatgatattcccttcgcacctattgggcttatgtatccacgccatttaattaatgtggtttaa

SEQ ID NO: 304994 - DNA, 450 bp, Proteus mirabilis
atgaatacgctaactaaagtattagctggactgctggcaatatctgcattctggctatggtgggtaatagatgattacgacaaactgagcaaagattacaacacagcaaccaatcagttatcacagcaagtcgaaataaacaaagactaccaagctcgtatcactcgactaaaccaactcgatattcgttactcacaggagctagccagtgcaaagaatgaaatcaacactcttcgtgatgctgttaactctggttctaagcgggtgtatgtcaaagccgagtgtccagcagtcaccaagaatctcaccgaaagcggaagcaatgaagccaccgcacgacttaacaaagcagttgaacaagattatctacgtctcagagaaatgatagtcgagaacgaacagcaaactttgtatttgcagaattatattaaaacggagtgtttacgatga

SEQ ID NO: 304995 - DNA, 738 bp, Proteus mirabilis; identical to SEQ ID NO: 16657

SEQ ID NO: 304996 - DNA, 453 bp, Proteus mirabilis
atggtcactttaattagatataaagtaagtaaacaaaaagtcagtaaggtaattgataacgtgtctaaacgaaccataagtatgttggctaaagaactgagtgtaaatgtcgaaacaattcgcttttatgaacgcaaaggcttaattaaacaaccaccaaagcctatgcagggctatagacattacccgaaagaaacggtaaatagaatacattttatcaagcgttctcaagaattaggttttacgctaaatgagattgaagggttacttgcgttaaacgatagtccatgtagtaaagtacaagaattagctaataaaaaactgatcgcagtacaaaaaaagatggctgacttgttgttgttagaacacgctttggaagaacatttaggacaatgccaaaataatgatgacgatagccactgcccaataattgattcgttgcaaccgaagtaa

SEQ ID NO: 304997 - DNA, 348 bp, Proteus mirabilis
atgaatcaaaaaaaatcaaaccttccaatgataggaggcatcatagcagcattaggcgcaggcgtatgctgtgtaggtcctttgctcctgttattacttggggtaagtggctcatggattggtaatttaactgcatttgaaccctataggccattatttatcgcatttgtagtgttgttgtttggctactcaggttggaaaatttaccgtcctgtagaagagtgtgagccgggaacggcctgtgcaattcctaagaaacagcaacaacgaaaagtcattttctggctgagcgctatagttgcgacaattttagtgaccagtaattattggatacttttgtttgcttaa

SEQ ID NO: 304998 - DNA, 285 bp, Proteus mirabilis
atgaaaaaattattattaaccgcactgctttcactttctagttttggtgcttttgctgaagtaaaaacagttacactggaagtgccaacgatgaactgtgcgacatgtccaatcacagttaaaaagtcattagaaaatgttgatggcgttgaaaatgcgaaagttacctacaagcctaagctagctgttgtttcttttgatgacactaaaaccaacatcaatgcattaattgcagcgactaccaacgctggctacccttcaaatttaaaaagtgaaaataagtaa

SEQ ID NO: 304999 - DNA, 420 bp, Proteus mirabilis
atgtttagccccttagaactagttacgcgtatcggagataaagcaggctctataggtgcacttgtttcggcaatgggatgcgccatgtgttttcccgcgatagctagtcttggtgcggcaattgggatgggatttcttagtcagtgggaaggggtatttatcaatacgttgttaccactgtttgcagtattagcgctggcaatgaatatcttaggctggtttagccatcgtcaatggtaccgtagttttatcggttcaattggccccattttggttttactctctttatacccttggttccagtacgggtggagttcatacgttacttatacggggctaggactaatggttgctgtatcaatttgggacatggtttctcctgcgaataaacgctgtgatgatgaaacttgtaccgcttaa

SEQ ID NO: 305000 - DNA, 1440 bp, Proteus mirabilis
atgtcaacgaatagttgttgctcgtcaaatgacatccagccagaacaattacatgtagccattattggtagtggttcaggggcctttgccagtgcgattaaagcagcagaaggcggagcaagagttactatcattgaaggagccgatgtaatcggaggttgctgtgtaaatgtcggctgtgttccttcaaaaatattgatccgtgctgcgcaattagcgcatcagcaacgtactaacccgtttgatggtttagaaaatattcagccacaacttagccgctccttattagcacatcagcaaaacgctcgcgtcgaagaactacgcgatgctaaatatcaacgtattttagagagtaatcccgcgctatctttacttaaaggttatgcacgttttaaaaatcaaaataccttgctagttcacaagtctgatggtagtgaagaagagctggttgcagatcgcattttaattgcaacaggctctacaccaagcattccgccaattaagggtttagttgatacaccttattggacatcaacagaagccttatttgcagaagagttaccgagtagtctagttgtcatcggctcctccgttgttgctctggaaattgcgcaagcttatgcccgtttaggtagccgtgtgacaattctagccagacatacccttttatatgctgaagatccgttattaggtgaaaaactggcagagtgctttgaaaaagaaggtattagggtacttaataatacgcaagcaagtcatgtttcttatgatagcaatggtttttcattggaaactaacgaaggaacattaatcgctgaaaaattgcttatctctacgggtcgccatgcaaatactggaaagcttggtttagaaaatgttggtgttgaaacagataaaagtggtgccattgttgttaatagtatgatggaaacatcaacagctaacatttatgccgctggagattgctccaatatgccacaatttgtttatgttgctgctgctgccggaagtagggctggaattaatatgacaggtggaaatgcgcaactcgacttatctaccatgcctgctgttatattcaccgacccacaagttgctacggtaggtctaaccgaagtacaagcttcagcggtaggaataaatacgataagtcgtgtacttgatatggaaaacgtaccaagagctttagcaaattttgaaacggatggttttatcaagttggtagctgaagaatccacgggaaaactgataggcgcacaaattttagcccatgaaggcggagaactgattcaaagtgcggctcttgctattcataataaaatgacagtcgaagaattggcaggtcaactatttccgtatttgacgatggttgaaggattgaagttatgcgctcaaacctttagcaaagacgttaaagagctatcttgctgcgcagggtaa

SEQ ID NO: 305001 - DNA, 438 bp, Proteus mirabilis
atgattaaatctaaggttgaaaacattcctgttggtgaagtcagttttttgacagagatacctgacatcaataagttcattagtagtgatgatgatgcgttggattttcctttgagtatttctcaactggcactagctgcacaaacatctgtccatacggtaagaaattatgttcttgagaacttagtacactgcgaagaaaaaactaagtcaggccattcactttacggcttatgtgcattaaagagattaaagttcattcgagcagcaagggcggcaggtcttcttgtagttgatatcaagccattactaatggcaatagatgcaggagaaagaaaagttcctgaagacatccaaaagctgctacttactaaaatcgagcatagaaaagtatttttaaatctagtaacaaaccaaattgaagagttttgcaattag

SEQ ID NO: 305002 - DNA, 2979 bp, Proteus mirabilis
atggccatcaaaaacgaaattactattctcacgagagcagaacaggcagatctttattccccacccattttttcaatcgaagaacaacgtctgtacttttctctgaacgatgcggaattggcagtttttcggtcaattcgtctcagagctcatagatgttactttgtcgcgattttgggatacttcaaatcaaagcccgtcatcctagatatcgcttactcgcaggtttctaaggatttaatgttcatcagtaaagagctgcttggcggcaaggggctcagaccattcactccctcacaaaaacaaaaagatcgactctacgcaaaagtattagaccttgctggttatcacaaatgggacgaaagtcagcacttcaattctcttttcgaccaccttgttcaggtgggcaatgcctggctggagccgcgttacctctttgatactgctattgaattcctaaccagtcacagcattgctatccctaggtacaccgtactccagagactgataagcagagcgatgcagcaggtcagaaaagacctggcgcaccaacttaatcaactcaccagtcctgaacttcacgtctttctggacagcataacagccattgatgacggactaagcctgaaccagctcagaggcggtgcaaaaagtctgaccgtacctgaacttaaaaaagagcttgccctttatcatcagttagcgccatggcgcacgcaaatcaatggcgttatcgatgggcttaatctgtctcttaaaaatcgacaacacttcggtgagctcatcaactattacggtagtaaactcaaacgattcaaacgcgcacagcagcatctatggttgctatgtcacctgacagagcggatacaactggcactggaacggttaactgatgggttcatttaccatatccgcaagcaacaagaagctgccaacacctttgcacaacaagcagtgttcctgtcctggcagtcagccgcggacaatgtcacgaaagcggcagagttactgcatctgtttgtggatgagaacattgatgataatcaacccttctcagtagtcagacaacaggcattgaaggtcatgaatgacagggatatccagaccctctgcctttacctgaaaaaacagaaacggaccgtggaagagtaccagtggcaacattacgatgaacaatgcaatctcctggagcaactgttaaggcaggtgtttttgtgccttgaatgtgaggccggtaaaggctcagaagccgtcgtcgcccaacttcaacagatgcagacggaaatcgcattcggtggaccactgaagacgatggatacgtcgctcatcccgaaaaagcacctcccatggttggttaaacaggataacgttaacccgcaacgttacgaatggctgctctaccggcagttaacctcacgactgaatggacgcatttatttgccaaatgttaccaaataccgcgcactggaagacgacctgatcccccagacatcgcaggataccttgctggcctcatcaacactggacagactaaaacagcccgcagagttattgttacaggagaaacaacaccggctggaaagtgcactcaaagacgttgctctccatattgatgagggagacaatcgaaatgtgatcatgaaaaatcgtaccggtacccgctggcgtctgccgaccaaaagcgctacatctctggtcaacaatcccttttttaagcgaatgcaaccggtcggtatcgcggatgtactgcggtatgtagagcgcgaaaccgggttcatgaaatgtctgactcatgtacttccgatacaaaaacaagggttcactcatcaggatgatttactggccattctgattgccaacgccactcaccgtggtgtgtatggcatggcgcagatctccgatcgaagctatgaacacctgagtacggtgcaggccaactatatccggcctgaaacgctgcatgacgccagcgacgtgatcaataatgcggttgcagcgctacccatcttccgccactaccatattcaggaggaccagctgcatgccagtgcggatggtcagaaattcgaaacccatctggaaacctttaaaacccggtactcctctaagtatttcggcaccaacaaagggatcacggccatgacactggtggccaaccacagcgccctcaatgctcggatcatcggttccaacgagcacgaatcacactatatttatgacctgttacaatccaacagcagtgaaatcaaacctgacgtactctcgacagatacacacggtgtcaatcatgttaacttcgccttactggatctatgcggttacagttttgcaccgcgatacgcgcagttcagtagtgtcatcaatgatctgtttgatgtgactgaaagtgaacaaggcagcaccatactggcgctaaagaagcctatcagaacgaatgttattacaacgggatggcaagatatcaggcgtattgttctgtcacttcagacaaagcggacgacacaagcaatgctggtaagaaagttgtctggttacccttctggacacccaatattacaggctctgacggagtataatcgactggttaaagcgcaatatttacttgactacatcgacgatgccagtttgcggcagtatgtgcaacgtgccctgaaccggggagaagcatggcacttccttagacgagccattgcgtcggtgaatggtgatcagttccgtggcaaaaacgagtctgaaatcgctatctggaatgaatgcgcaagattgcttgccaacgcgatcatctacttcaactccgcgatactgagtcatcttctgggacactttgaagcgagaggagatgaagagaaagcgggtatcactcgtgctgtttcgcccgttgcgtggcaaaatatcaacttaagcggaacgtataacttcactaatactgggaaattgcccaatattggcgaaataacaaggccgatagtggatgattag

SEQ ID NO: 305003 - DNA, 594 bp, Proteus mirabilis
gtgagtacgcaagtcattggcgctaacgaatatgaaggtcactttgcttttgacttactctataacaactcttcagatatacagcctaataccttatcgaccgatacgcatggtaccaataatgttaacttcgctatattagatttctttggttacacattcgcccctcgatacgcgaaaatgaaaaaggtgttttttgagctatttgaagtgactgaagagaacggaggccgtattcaattaaagaaagatattaatcataagctaattgctgaagaatgggacaatattcagcatattgtttgttcattgagtcgtaaaaccaccactcaaagcacaatcattagaaagttgagtaacggcaagagccgaagattgtcagcattgcatgagtacgaccgtttaattaaatctatttatgttttggagtatgttgataattcaacgttgcgtcattacgtccagcaagccttgaacagaggtgaagcataccatcagttaaaacgtgctattacttcagttaatggcaataaatttcgtggggggaatgattaccaagtatcacaatggggttctagggattttcccctctaa

SEQ ID NO: 305004 - DNA, 411 bp, Proteus mirabilis
atgaaaaaaataattatcgcgtcagtagtggcattttttgcattttctttaagtgggtgcgcaacaatcgttggagataaaactcaactagtgcaaatcgatagtaatccttctggtgctgatttttccataaaagatgagcaaggcaggattgtttcgcaagggaaaactccacaaggcgtcactttagaaaagtcaacaggtagttattttggtaagaaacagtatgaagttactatttcaaaagatggggcttcaccagtcaccttgcctttaaagtcaagcgctaatggttggtacattggtggtaacttgttacttggaggattgattggttggtttattgtagacccattcaatggcggaatgtacacattacacccagagaaggttgaagcgaccttaaaataa

SEQ ID NO: 305005 - DNA, 300 bp, Proteus mirabilis
atgaatatcgatgaattaattgttcttcctgatttaaacaaattatcggaaaaagaactaggcaacttaagaggtaatttagaattagctattgactcactcattacaggaatgaaggtattcggcgattttatgttttgggctgatgctaatgaaaattatcccgatggtaaagatcatcttggtgatgtgggattatttttaagccaagtgtcattattgatatcaatgttaaatgacaaacttggtggagttaaatacgaaatatcaaatcgaaaaataaaaggcacagaaaaatga

SEQ ID NO: 305006 - DNA, 840 bp, Proteus mirabilis
atgttcatgttagcatctatgaagttatattttcttgaaatagatgcaaaaaaatcagctgaaatagcattagaattagaggcattagaagaaaaaataatggagttagagcctcataatatacatagaaatagactaaagaaaataagagaactagctactgaagctaggagagttgctgatcaacagcaagcagaatataacaagatccagagtgctgttcttaaaatcgatgaagctaaacaagcagaaaaaagaaagttggaggctgagggtaaagaaataggatcagcacttcaatatatagaaagtgacaatattaactttaaaggtaaactagctattataaatagcgaagttttatttaatgcgagaaatattaatgttgatattgataaaacaatttcttatgtcagaaattctggtgtctcatttaatgcccatcaagataataactactcgggtagatttgcgctgataaatagtagtatcagatttttaggttatcgaaatatcccgataggagatggtaacgacgataatagcttagataaaaataagcttaatgatattaatttaaataaactatctatgcttggttttggtcaaatttttgcacatggagataacataaatataacagatgttaaatttaaagaaactctttcatatgatggattaagcaaaacttatatagatttgatagctgataatgaaattaatattaaaggtcagtttaaaacttctttaattaataaatatagcttatttaagttcgctagcaagataacggagaatgataaggttattttcgatattaatccacataaaactaaataa

SEQ ID NO: 305007 - DNA, 210 bp, Proteus mirabilis
gtgatcaatggctatgaaacggttagttttgttgattatgattggaaaggtgaccaaggaaaagagctatctaaagataaccaagaaggtctctctattttagaaaatagttcattaaaaacagatcttttctctctacaaggtggcatgaaaaatcagtattcggaattattaataaaaaaaatgaatttagagcatataatgaagtag

SEQ ID NO: 305008 - DNA, 177 bp, Proteus mirabilis; identical to SEQ ID NO: 300067

SEQ ID NO: 305009 - DNA, 330 bp, Proteus mirabilis
atgaatagtaggaaaatagaaagtaactcacaagaatttcatgagatgtatactgataaaaaatcttatcctgaatggataaaaaaaattgtcaaagagtatggttataaaaataaaacggctctatttgaaaatatgaatttgtgtagtttaagtgttgtgggtaatgaaattatcattagacctcaaaatcatttacgtatggatcattgggtaggtgagggaatatctgatagtgcaattattacattaaaaaccaattgtagtgacgaggttttaggtgcttcaataaaaaaagcttttacacgttgtattagcagtagagtttaa

SEQ ID NO: 305010 - DNA, 507 bp, Proteus mirabilis
atgtttaaattaaaaggtaataaattaagagcaagtgtttattataatgatacatattattttttattaactttttctggtcattctatttatataatggatctaaaaaaaggctataaggttttacctaatgatattattgatgatgaattaggttattatgccaaactcgctctgattaaaagtgaacaaataaaaggaaattcagataagtttaatcaaatgtataatgataaaaaaacttatcaagactggataaaaaaaataatcaaagaatataattataaaaataaaacagcactttttaataatatgaatcgatgtagcttagagcttacagatgatgaaattactattagtcctctaaaccatttacgtatggatcattgggtaggtgagggaatatctgatagtgccattattacattaaaaatcaattgtagtgatgaggttttaggtgcttcaataaaaaaagcttttacacgttgtattagcagtagagtttaa

SEQ ID NO: 305011 - DNA, 249 bp, Proteus mirabilis
atggatccatcacatcaaaaatactattctttacttatttctacccaatttacgtttattggcactatagctagttgtatcactcttattaaagattattgccaaaatctagatgtcctaacgtataagcttacctttctaaaaaaattaaaaagcaaattaaatcagttagatagtaatattatatcaataatattactaggtttaataatgtccacactctcttttataacaattaaaggaaattaa

SEQ ID NO: 305012 - DNA, 747 bp, Proteus mirabilis; identical to SEQ ID NO: 300259

SEQ ID NO: 305013 - DNA, 2172 bp, Proteus mirabilis
atgtctataacaaattcaaaaaaatatcaaaggctgggtgataaggatggcaacccactgaatgggggtaagacattaacccatggcgggggcagaacatacgcgcaagatctcgctttacaagagcaacatagacaactcatagagaagatcttaaatggcgacatgcaaagtggcttagtgtttacttgtcagattggtggattacccgaagagactttccaagtcacgcaattcgatttacaagaagggatctcacaacttttcactctctccatccaagccgtcagtccactctcggaaattgattttaatgatgtgttaggcatggcttccagtttgacagtaaagcgagatggtcacattctgcgtacagtacaaggtatcttagcagcggcagagcaagggaataccgatggggtaaaaacctggtatcaatttgtgatacgtcctgaaatgtgggtaatgaccctcaaacaagatagtcgtatttttcaagataccaccgtccctcatattcttgagacattactcaatgagtctcacattaaatatgataaacagctttatcatccagaagagcatttgcagcgcgcctacaccactcaaaaacgagaaacaatgtatgacttttggtgccgtttagccgcagaagaagggattaatttttggtttgaagaaggcccacagttattttatagcgaccgacatttgggcatgagagcggggatatccttaacctataacccacaatcggatacagatatcaccgatagcaccgccacaacgtggcgctatgttgaacaactctgtagcgatattcgcgttgataaagattacaatcaacttagaccttcctaccccttaagccatcaagtcacaggagaggttcatcaacaacatgaaatattcgaaagttatggacgctttgaagaagatgcacagggacaaccctttaatcagatacgttatgaacaatcacaaaatcagcgtcaagtaggctctgcgaccacaaactgcattgaattagcgccggggcgtatttttaccttgtctaaccaccccagtgcacgcatgaacaccacatggcaggtgattagtatctcacatcacggtgtgcaacctcttgccgacaacagtggcggtgaaggaacgcaattgagtaatcagctttcctttgtgccgagtactcaagagtggcgcccaccttaccgttttaaacctaccgccgatggtgatgaattagccactgtcgttggcccgccgggcgaagaaatctataccaatgagcaaggtgccgttacggtctattttcattgggataggcgtggtaaaccagaccatagcgcatcatgctgggtaagagtcgctcaaggttggaatggggacggatttggctttatggctattcctcgtgttgggcaagaagtgattatctcttatttaaacaatgatatagataaaccgattatcaccggatgtacttataatggtcgcaatcgttcccccattgatttacctaaacataaaacccgtaccacatttcgcaccaaaacccataaaggagacgggtttaatgaattgcgctttgaggataaaaatggcgatgaggaaatttatcttcatgcgcaacgcgataataatattcatattaatcataataaaacccaatacgttgggcatgatgatagccatactgtcgccaataaccgcaagcatgaagtgtgtcatgacgaatttatccacatagtcaatgagcaaacagtacaggttgatgtcaatcaatttgaacaaatagggaaagaccgtatcacacgcattgacaatagttggaaagaagttatccacgccagtcactttcaggaaatcggggaaaacaagcagtgtgatatccaaaatgattataccctgaaagccgcagggggtatccatacccataccaaaatccacaccttgcaagccagtgaaacggtcattatcaaaggcaaggctgggtcgattcaattggatgcacaaggtgtgactattacaggtaaaattctgctcaaaggcgatgtgtcaataacggggggcgccccagaagtggttactcagttagaagcggcggttaatgaagggttaccattagctgaggattgccgtgcgaaagcgatgaaaaaaggaacggcctaa

SEQ ID NO: 305014 - DNA, 1224 bp, Proteus mirabilis
atgctcttgagtccaaatcccctctataaagcgtattgggttgctcaatgccgttatactcgcaacggtgaacaattcaagggggtgatgaccgtagcaggtacaagtcaaccacaagctattaagcagatgcgccagtactttacggctcacccaggtgaatatacctttgcggactatgacacattaatccctttaatcacccatattgaacaaagttcaaccttagaattaccgttaatacggcaagtacgtgagcaacataatgcaaaggtttcagccgtattagtggataaatgcaacctcacacacccaagaccgtcagaaaaaggcgacattcattaccgtgaggggcaacctacgtttattgaatattcgcatctctatgtcgtcattgacagtggggaataccaccgccaaaccgggcaacatcttgtaccgaaactgcatggctcacaactgccatggaaatcactctatcaaggagaaactcaagacagccttgaagataaagccccttatttggtacacattgccgccaatcaagccggtcagcggtttctggctcattacttgaatttaccacataaagcgagtctcggattatttatcaatagcctcaaaccctttaccgatattcaccggcaaatgcgaaaactcacctatttatataatcaaaaactggagagttggaatttctttcgtttttatgatgttaagcactttatcccatttattgagtctttgactcacggacagttaattaatgtggtcaatggggtaaatgcgttctacggctatagtgcacaataccccgatgggattgaaatcacctttcacccagattatctgtatgacggcagtaagcgagagccgttatttattaatacctatttatacaatcactacgcgaatatcacacagctgcaaactgtggctaaagctaaggcactgattgaacaattttctcaggtagaaggggatgagttagagggtgacgcattaatgggctactgtatacacgcagcaaattgcagttttttagacgatattcatcaatcaaaagcgttattgtacgacttgcaagcccgctatttgtgccgtcatcaaccgagaacatggcagatcgccaatgaaaaagccgcaccttataaatacaaccaagttttattgagttaccaccgttatatcgcctgtttaaatacccaaggagaaatgaaatga

SEQ ID NO: 305015 - DNA, 3219 bp, Proteus mirabilis
atgactggagaagtgaatgagaaatatttaacaccgcaagagcgcaaagcgcgtcagatggtgaaggcggtaaacgaagcgagcccacgaaacttaccggccgacgcggtggtatgcccatgtgaaaatgaacatcgccctgtttatccggtgcgttatgcttattctaatttgtttggcgataaagacgcaaaagcggctgttcccccttctatttcaacgttactttctgcctcgtcaatctctgacacaaagggattttcggctcgattgctgcgcacaggttggatttatgtctttgaagaaggggaatttcctacccgccctgatacaaaagggcagttactgatttttaagcatactgttcaacattacgacaatgggtatgtctattcggatgacgataactccactgaggctataaatgcaaaagaaaaaggggattcagaggaaggttttatcccttgcttacgtgactcactaacgaaatcggtacaagaacaatcttgtcaatatccgtatttaccgattaaaaaagacgtcatgaatgcattgtttttattcagtgatatccctctgtctgattatgtcttagataaaatggagacggatgcatcttatcgacaagcctttatgcaaaaaatcaatttaattgattttaatgcaaatcctcacgcgcttgaactgaatgctgaacatattgaatatttgattgaagaatataaaactgaatcagagcagttttcagcctttactgaatacacaaaatccatcggtgatccgctgccaaaagagtatttctcccatattacgggaataaatagcgccagtaaaagtaccgatactctgctaaaccaagcaacacaaaatttagattacaacgaaaaaagttgtctagtcgctctgtatgatcctgttggttatcagaaagatattttatcactttataccttcgtgactgtcacatatgcgatgtttcaatattattggcagtatccaaataaaatcggtcactatctttcggcattagaaactcagtttaataatcccgaggttgctaaaacagagcaaggaaaatcattaaaagataagtttaccaagcatattgatattcagggctggaaaacgtattggccacaaattgaagccggtaataaagagtttgaaacattgcaaggcaatatcgttcaactctatcgtgattttttaagcaacccaaccgtcaaaaatcaggtaggtggcattaaaaactatcttgaccatgcttttttaataaaagagcaatatcaaaaaacgaatttttggcaccgagcttttttcgatgaattaaaagcctacagccagctgcatgaacagttattgacccctctaaaaagttcaccatcagggcgagtcacgcttgatttactattgtcaattgataacgatgatggggatatctggaaagagtatatcactagcttactagacctattgaacgaagataagataaaagataaagcgctcagtgaatttaaaaagcatatcttaccgtcattaaattcagccgtcatgatatgttgggatgcattgggttatgcttatactcaagcacatgccaagttaaataacgccaaaaattatgttcgtcgtattagtcaagcaggcctcaattttcttacgcataaagtactccctgcttttttagggtattttggtatagctgtgagttttgacgagcttacgaccttaagcgctgaagagtttagaaaaagaatgaattcactggaagggattaagcagccactcaaaagtttctcaaagaatatgaagaagatgtttgattgggatactcgatttaaatcagcgggtctaaaacagattatcacaaccgctaaatttaaattaatggaaggctacagtgctatgtatttacctacagataagaaatccttaaacgctcacatgaaattagcactagatatttatacactgctcacaagtatcattgaatttagtacagtttcacatacgaaagagtttgataaacaagacccattaaatgccgctgccgtgaatatatttcgtgttcaaatggtggcacatattttaaataccgcagaagcagtagttgaaatacgccaagcagctcgaggttatgcgacatcagtgacttttccgccgcttcagcggttattgactaaaattcagttgcctgaaatccaaaccaagttagggaaagtgggcttaaaagggcttggatataccgtggcaattttaggggtcgcattacccctcgcggaggcatcaacagagttttataaccatgattacattacaggctcagcaaaaattgcggaagcggtagggacattggctttttcagtggggttagcaacatggggtgccactgagggtgcggttgcaactaccattgcggcatttgcgtgggagttaatagttatcggtgcgatcgtctatggcgtcggtgcggcaatttacacctattttaaaacagattcgtttgaaaagttattgaagcagtgtttttggggaaatggggataagtattttgcagggggatataaaaccgaagataatactaaaatttctagggccgcgactaaagataagcaattagaaaaatatgtcatgcttttagatcgttatacggattattatcaaatagaactacaagaatttgccaatcttttctttacctcacagttacaaatcaaagcaatactaaaacccgcttttcagccaagctatggtacagcacgctactctattcaatatcaatttaaattgtccaattttcaatatggtatttcagatattgaatatcaattggtagaaaagaaaataccacgtatttatccatcagagactcctattaagtatatatctaaacaaggtaataccgtggttaaatataaaggtgctgaatatttagcttcacaacaaacaaaatttaataccgcatttgaaatggctttacaaaacaccattgaaatagctttacaaaaggacacaatgctaggtaatgggcagcttactctaaattttgagatagaagcaggtatatttacgggggatccgataggaaaatctattccctctatttactggtattacattatagatcgcattaaaggcgaaattgcaccactacgttaccgaaacggcaaccccgacgataaaatatatggctgtattgatgaggaaggcacggaatga

SEQ ID NO: 305016 - DNA, 270 bp, Proteus mirabilis; identical to SEQ ID NO: 299960

SEQ ID NO: 305017 - DNA, 1371 bp, Proteus mirabilis
atgcctagaaatattgcagtgatcttagcttcaggaagtggttctcgatttgaatcaaaaatcccaaaacaatttgtaaaattagcagggaagcccgtcattcaatatactatcgaagcttttgaaaattgttcagctatagacgaaatttatatcgtcaccaaagaagattatatcgacttagtttatgaaatcactaataaaaatgaattaaagaaagtttctaaagtgatttctggtggaaaagaacgttatgattctacatgggctgcaattaatgcaacaccaagtgaaaattgtaatctaatcattcacgatgcggttagaccttttatttctgaacgcataatcaatgattgtattgcagctttagttacctataacgctatagatgttgttgtagatgctgttgatacgattgttgaagttgatggcgattttatttctaacatccccgatagaagaagattaaaacgaggacaaactccccaagcctttaaaagagatacattaaaagaagcatacaacaaatttttgttagatccacaaaaagctgcatcggatgactgcggtattgtattaaaatatctcaaaaatgaaaaaatatatactgttgttggtgcagaatctaactttaagttaactcaccaacaagatttatacttagcagataatattattaaagatggtttatatactcgtttgactaccgataataacttaataaaagaaacaatagaaaataaagttattgttgttattggaggtagtagcggcataggggaagatatagttactctgtgtgaaaaattaaatggtaaagtttactcttgcagtagaagtcaaaataatgttgatgttactgataaaaatagtattgaattatttcttcatgaggtttttctaaaagaaaagaaaatagattttattgttaacacaactggcttattaataaaaaaacctcttttatcaatgagtgatagtgaaataactgatagttatatgattaattacactggtgtaattaatgttgcactttcgtcttatcagtatttaaaagaaacccaaggtatgctaattaactttacctccagttcatttactcgaggaaggcctaattatagtatttactcatcaacaaaagctgctattgttaattttactcaagctatagctgaagaatggttacctttaggtattaaagtaaactgtattaatcctgaaaggacagatacaccgatgaggcgtagtaattttgggattgaaccacctaattcactacttagtgcagaggctgttgcaaaattcactctatcagcaatgtcatttgaacatacagggcaagtatttagcataaagaatgatttatag

SEQ ID NO: 305018 - DNA, 1371 bp, Proteus mirabilis; identical to SEQ ID NO: 305017

SEQ ID NO: 305019 - DNA, 1392 bp, Proteus mirabilis
atgataaacagtttgtcagcgcgtatattcgccatattctggctgacactagcattagttctagtgctagttatgatggtacccaagctggactcgcgccagcttaccactttacttgaaagtgaataccgtcaaggtgttatgctagagcaacatatagaagccgaactagcgcaagatccggctaacgatctgctatggtggcggcgattaatccgcgccattgataaatgggcgccacctggtcaacgtcttattattgtcaccagtgaaggtcgtattattggtgctcaacgtaatgagatacaagttgtcagaaactttatgggacaatctgataacgcagaccatccgaaaaagaaaaaatacggtcgctctgagatgttaggtcccttttccattagagatggtgaagatcactaccaactttacttagtgcgcccatcaagtagcccgcaatctgattttatcaatttattatttgataaaccgcttttattactgatattcaccatgcttatcagtacaccgctactggtttggctctcttggagcttggcaaaaccggcccgaaaactcaaaaatgcagcggatgatgtggcaaaaggtaatctgcgccctcaccctgagctggaaaccggcccacaagaatttttagcggcaggcaccagttttaatcagatgatcagcgccttagaacgcatggttgaagcgcaacagcgattgatttctgatatctcccatgaattgcgcaccccattaactcgtttacagcttgccagtgcattactacgtcgtcgtagcggtgaaagtaaagagctagagcgtattgaaacagaaacgcagcggctagatggcatgatcaatgacttattagtgctttctcgcaaccagtataaaaatgagttattacgcgaaaccgtaaaagcgaatgagctttggaacgatattttagataatgcaaaatttgaggctgaacagagcaataaaactctaacagtaaccgccccgccaggcccatggacgatttattgcaatccttattcattagcgagtgcctttgaaaatatcgttcgtaatgccttgcgttattcacattctcgtattgaagtggcttttaccgaacaaaatcagggtatcactattattgttgatgatgatggcccaggagttagcccagaagatcgcgagcatattttccgacctttttatcgtacggacgaagcacgtgatagagaatccggcggtacagggctgggactggcaattgttgaaaccgcaattagtcaacatcgaggccatgtaaaagccgatgatagcccattagggggattaagagtggagatttggttgcctagggggagtgtggtaaataaatcacaacacgcttaa

SEQ ID NO: 305020 - DNA, 699 bp, Proteus mirabilis
atgcataaaatcttattagtggatgacgatcgcgaattaacctcgctattgaaagaactacttgaaatggaaggctttaatgttgtgctcgccactgacggcgaacaggccttaaaacttctggacgcgtctattgacttgttattactggatatcatgatgccacgtaagaacgggatcgagacacttaaagagttacgccaaaatttccaaacacctgtcattatgttaacggcaagaggcagcgatcttgatcgtgtacttggcctagagctgggagcagatgactatttacctaagccatttaacgatagagagctagttgcacgcattagggctattttacgtcgttccaactggagtgaacagaaacagaccgatggcaacacctcaccgatattgcaagttgataagttacaacttaatccgggtagacaagaggccagctttgataatgaaccattagagctaacaggtactgagtttacgttactttatctacttgctcagcatttaggacaagtagtatcgcgcgagcatctcagccaagaagtgttaggtaaacgcttaacaccttttgatagagcgattgatatgcatatttccaacttacgtcgtaagttaccggaaagaacagacgggcagccttggtttaaaacattacgtggccgtggttatcttatggtttcaataacttaa

SEQ ID NO: 305021 - DNA, 567 bp, Proteus mirabilis
atgcgtaaagtagcaatggttgcactagcatcaatgtttttagtagctccgacggtagtaatggctgaaacatcaaatacaaataatcagcctgctgggcaacaacagtataatgataattaccattgtggatacggttacggtatgcatgatggacgtgataaccgaggtcatcgtggacaacgtggccatatgatgggtaacaataatttcggtgagtcgcgtatgtttaatggtattacattaacagagcaacaacgtactcaaatgcgcgatttaatgcgccagcatcatcaagatcgttttaataacagtgattttcgtcagcgtcacgaaaatatgcataagctaattaccgcggataagtttgatgaagcagcggtaagagcgcaaatacaagatatggacaaacaagcaatagagcgccgagttgaaatggcgaaagttcataatcaaatgtatcagctattaacccctgagcaaaaagcgcagctagaaaagaattatcaacagcgtgtctcttctgttagccagcaaaaccagcaaactcaagagaaagctaattag

SEQ ID NO: 305022 - DNA, 579 bp, Proteus mirabilis
ttgtggaaaaaaattatagatgaaaatattgatgtggctggaatttttgaagacgatatttatctaggaaaacattctgaaaatttactaattaattattcatgggtgaataaagacattgatattataaaaattgaaaaatctaatgaaaaaataaaaacgtctatcagaccaatgaaaaaagttaataatattcaaatagttagattaagaagccgtcatttaggaacagcaggatatattattacaaataaaggtgcccactttttatttaatcatatttcccaaaggcccattagcaatcctatagatcatgaaatatttaatgatttattaatagataataaatatattgttggacaaaccatgccttgcttgtgtatacaagattttgttttcaataaaaatgataacaattttcctagtgcattagaagataatagaattcatcgtattacacatagtaacacaggaaataagaataaaatttcacgagaaatatctagattaaaagaacaaataatagggttcacgctaaaaggcacaatagaaagaaaagtgtatttttacttaaaataa

SEQ ID NO: 305023 - DNA, 249 bp, Proteus mirabilis
atggcaaatttaaatgaaattaacgcttttcttaatgagataccaggatggttatcatcctttatcattgcatttattggggctatagttggtggaatgtttactcttaaaggtgttgatcgtgaggcaaaaatttctagagcagcagcaaaaagagaatcacttgagttacaattatcagtactaaaaggagttaaaggagagatttttactttaattaatttataccaggaaaaatgttacagatga

SEQ ID NO: 305024 - DNA, 333 bp, Proteus mirabilis
  misc_feature (310)..(319): n is a, c, g, or t
atgtcaattgaccttaatttattacgtattttttctgcggttgcagagcaagcacagtttgccagtgctgcacgatcgctttctatgccaacatctaatgtcagtagagcaataaaacagctagaacaacagcttaactgccgattaattgatagaaccacgcgaaaaatgcgtttaactgagcaagggaaaatcttgtatcagcaagccaaaaagaccttatatgaattagataatgttgtagaacatataacgagtgatggaccattaacaggaacctttagactcacgatacccagtgaatatggcnnnnnnnnnngaatatggcagtga

SEQ ID NO: 305025 - DNA, 924 bp, Proteus mirabilis; identical to SEQ ID NO: 296423

SEQ ID NO: 305026 - DNA, 849 bp, Proteus mirabilis
atgcttatacctaagcgccaattaatcttttacttatttactagcatgttgatatatccagcttcctctatagccgctattttttcttatattacagaatcaaaaccagtaggtaatgaggggacaggggctgattacacttttattatccaacgttgggatcccgagccaccaacggctttaaatccttgttataaaaaaaaaccttgttatataaccataaatcatcgtcatcagcctaaccagtctggaggttcagcgaccagaactattttaagtgatgggcataaatatcgaagaatggaagatctacgtattgctgttatgaaagaattaggaggattcccttatggcccaggagttgccattcatcgatatgttgatacatcaactatacaagagtgcgttggtatattttatcagccaaatgcttatggttttgctgaagatggctatttattaccgggttctatttgtgcaattgctcccccacctgttggacattgtgatgtgttagcccattctgttgagttggattacggcaatgtgggggaaaatgaattagacaatgcggttcgttctcaaactgtgaatgtgacgtgtaatcgtgatgtctctttacaggttgttgcaacaggaatgaataatcgtcaagtcccactacgtaatgacaatagcttatatgctgatttatatattaatgataaatctggcgaagagggagaggctatctttgtcgctaaaggcaaaatggtttctatacaagtgagttctaaattgagaaccaatggacatgttgctccagggtatttttctggctctggcgcgttgattctaacgttaccataa

SEQ ID NO: 305027 - DNA, 924 bp, Proteus mirabilis; identical to SEQ ID NO: 297518

SEQ ID NO: 305028 - DNA, 696 bp, Proteus mirabilis
atgaaaaaattattacttagccttactatgctggcgataatatctacgccagtgttggctaaatcccctgtagctaacttaaaaatcaacggtgatattaagccaccaacttgtactgttaatggggcgacacagcgtgatgttatttttgattacggagtcataagcccaacacttatccctcaatcgactgtctactcttattctgacattggagttcaaaatacagttacgattgaatgtgatgcaaaaacatatttaacatttactgcatctgacacttatgctgatacagaattaagtgttaataatacatcaggctggtttcatttagttgataaagcaaatcctgaaaccgcggttggtgcggcattcttcgcatgggataatgtgactgtcgatagcaaacctgcgtatatttcacgagcaaacgatgtgtctattacaggaaccagctacaataacgccctatacaaagggccaaccaatggttggacatcagaaaaacaaacaagcgttgataaaaacgccctggctctaatttcaggtgaaattttccaagcaagttttagacaaggaatgacaatgagtacttttattttatctagagatgaattaagtaaaaaaggaatagatttatctaatggtttagattttatgggagaagctgttctcacttttaactttggtgtctaa

SEQ ID NO: 305029 - DNA, 1302 bp, Proteus mirabilis
  misc_feature (1284)..(1293): n is a, c, g, or t
ttgtctgcgataccagaagctaaaagtgaattagattttgattcacaaaggttatatttaagtattccgcaaattgcattatctaaaaacccaagaggatatatagagttagataatattgataatggtataaatgccttattactaaactatagttatagtggttctaaaaactatgatcgtaagaatggcagttcaaatacaacttcaaattatataaatttaagaccaggtttaaatttaggaccatggcgtttaagaaactacacaacatggtcgagtacaagtaatcaatcagggaagtggaacaccctttatacctatttatctagaaatataaataaaataaaaagtcagttaatactaggggatgggatatcttcatctgatgtttttgatagtgttccgtttcgaggcatgcaattatcaacagatgatgagatgtatccagaaagtttaagaggctatgcgcctatcattagagggattgcaaaaagtaactcgcaaataactatcaaacaaaatggatatactatttatcaaactgaagtggcagctggcccttttgaaattaatgatttatatccatcaggtagtagtggggatttatacgttacgattaagggtgctaatggtagtgagcaacatcaaatcgtacctttcgcctctttacctgtattacagcgtgaaggtcatttcacttatagcgtaacgggcggtgaatatcgtgcttatgataataatgtagataaaacgaagtttggtcagtttacattagtttatggtttaccttatggcactactgtttatgggggaagtcagttgagtcaaaattatcaatcttactccctaggtgttgggaaaaatttaggctcatttggtgctgtttctgttgatgttacacaggctaagtcaacttttaatgatggaaggaagcaacaaggtcagtcttatcggtttagatataataagaatttgaacaatataggaaccaatattgctttagcaggttatcgctattcaacgagtggcttttatagtttatctgaagtgtttgatagttttcgtcgtactcattatagccctgaaattgagcaacgccgtcatcgtgcggagataacacttaatcaaaatttaggtgataaatatggctctttagctatcggatatatacaagaggattattggaacagcaaaagcaaaaaacaatcagcaacacttggttataataatagctggcaaggtatcagctatggaataaattatacctacaataaaaatacnnnnnnnnnntttcggtga

SEQ ID NO: 305030 - DNA, 735 bp, Proteus mirabilis
atgtggataggtgaaatttcaaataataaaaagaaaaataaattatattttccatctagtgaaaataaacataatgataatctgattgagacctataaatatttagggaaaagacgtattcaatcactttataatgaattggatccagaattatctattcctaatattgtctatttagatgcagaagcgcgtaaatgggtaaatccaacagcaacgagaaaatcattatacccagacgatcttaaccaagcatggctcgcgacttatacggtgactaatgattggaatgggcaaatagaaacttcactgtttaatttaaaagcgacactgcctaatgaataccctaacatgataaagagtttaaattactttttttcagataaaagaattgatagtgaaattcttccaggtacacgtcaacagattattttatcaaatggaaggcaacatacgtttgatgagttaagttctggcgaacatcaaatacttattatgttatttacaatccaacgttggctaaaaccaggaggaattgtattaatagatgaacctgatctacatctacatccttctgttatcgcacctctcttagcggctatcgaaaatattgtgactaataagaaagggcagttaattttaacgtcacactcaacagaagtttggcaacgctatgaaaaatttggttcacgtattgatcttactttgctaaaaggatcggtgaatgtcgaaaattga

SEQ ID NO: 305031 - DNA, 798 bp, Proteus mirabilis; identical to SEQ ID NO: 112438

SEQ ID NO: 305032 - DNA, 291 bp, Proteus mirabilis; identical to SEQ ID NO: 112437

SEQ ID NO: 305033 - DNA, 678 bp, Proteus mirabilis
atgaatatctccgatattgatatttgtataatctctttagaatctgatataggaagaagagaaaaacttaaaaataatcttgcccattataaacttactccaagggtaagcaatgcaattaatggcaaaaagctttctgcagaagactacttcctcaatgctaaagccaaaacttctaaattcaacgggaggacaatgttaactccatctgaattaggatgctttcttagtcacaaaaaagctatctatgaatttttagagggcaaaaaaaaatatttacttattctcgaagatgacgtaactatagaaaacaatatattaaatctattttctaatattaacttcttagaagaaaatagtatttatatcttaggtggtcaggatggtttaaacagcttcaatcgagtaattttatctaaaaaaaataatataggctttagcaaggttcgtttcaatactcatagatggatttatagaacatgttgttatttaattacacaagagacagctaaaaaattatatagctttatgaataaaaatacttacatggctgatgactggaaatttattataaaaaatacgtctattaaaaatatttactactcatactttttttcacatccaattgatttaaaaaacagccatatagaaaaagaaagagagtatttaaataaatga

SEQ ID NO: 305034 - DNA, 438 bp, Proteus mirabilis
atgattacctgtgatccactggttaaatgcaggggtaaaatcttcaaaaagcatatttgggtgataaaaagggaaaaagtgagggtcagttatcgcatcttctggcggttgtcttacccattttttaccagactcccatgctgtccatgtaggttcatattgagaaatgccactttcagtggtgatagggagtgctatccagtaaaaccgttcaatacaatcttggtagatagatttcatttttataatatgatctatagtcgcagaatattgaacttcccaatcaagaaacattacattaaattttctatgttgttttcgcgcttgtgcggcaacaagatgaaaaagcgcagtagaatctttccctcccgaaaaggagagagtgatttgttcaaaagtatcaaatatccactggactctctcttgagcagcttctaa

SEQ ID NO: 305035 - DNA, 687 bp, Proteus mirabilis; identical to SEQ ID NO: 298352

SEQ ID NO: 305036 - DNA, 666 bp, Proteus mirabilis
atgaagtctattattctattttttatttctttatttattattaatacatcttatgcaggtgttattattagtggcacaagggtaatttataatgaaggcaataagaatgtcagcattaacgtgaaaaacccagataaaatgccttatttgatccagtcatggatagatgattttgaggaaaaaaaacagtcaaaatttacgatcacgccacctttatttagattgaatccagataaagagaatacattgaggatctttttaacagaagaagggctaccaagtgatcaagaatctcttttttggttaaatataaaaacgatccctgctacagaaaaaacagaaaattcattacaaattgcatttaaaacgcaaatgaaattgatctatagacctaaaagtctaaaagacgttaattttgaagaagaacaaaagaaattatcttggtcaaaggaaagagggaaagtcatagtttataatcccacaccttattttatgaattttcaaacaatcaaattcaatggaaaattggttgatgatgtttcttatgctaaacctttttcaactaaatcatttgatataaatgataataatgaacatggtcttataagctgggagcttattaatgattatggggctaatgtggatttatccgaagttagaatataa

SEQ ID NO: 305037 - DNA, 438 bp, Proteus mirabilis; identical to SEQ ID NO: 298411

SEQ ID NO: 305038 - DNA, 645 bp, Proteus mirabilis
atgaataatgatggcaataaaatcacggtttattcaactatttcccctgaaacggtagtacttgttcgcggtacgtatacgtcaaataaatgcgaacgttctcattttaatgcttcttatactaaagtcacttattcctctttaacacaacaagtggaggtagagcgtaaaatagcagaggataataaaaacgcgacctatatcgtgcctattgatggagggggatggtgtaattggaagttgaaagaaatagatatagcaccaatatcggtgaaatacaaacaagatagaattagcactcttgtttttcctattgttaatagtgaatattcgagagtagaattatttacaacaatagctcctataatgattgaaagtgaaaatggccaatcaatctattattcactatcaagaatagaaggtgaaaagagtttatccaataaattaaatggaaaaatttattttaattataaagttgaacctaaactaactacgactatctcaaaggatgacaaagctattttccctaacggtaatattaaaacactgagtggttcgacttatagtaaaatgattggttttaatgaaataatcgagaatagtgatgaaaaagcgtttacttcttttgttcgatatattgattga

SEQ ID NO: 305039 - DNA, 9216 bp, Proteus mirabilis
atgctgaattttgaaactttctatggtaatagtgaacctatagctgttattggtctttctggtcgcttccctgatgcacaaaatattgatcaattttggcataacataattaataaacacgatagctctcgtcttttttctgaagaagaactaaaagccgcaggtgtcgctgaacaaacttatcattcacctgattttgttaatcgtggcgcgccgttagatgaagcggaatattttgacgctactctatttaattattcacgctcagaagctgaacttatcgatccccagcaaagaatttttttacaaggtgcttggcatgctttagagcatgctggatatgccccttgcaatataaccatcaaaacaggcgtttttgcttcagcaagaatgagcagctatcctgcccagcaagatttagcattgcacaatattggccatgtccgtggcatgcaaaaattattagggaatgataaagactatctcgcaacacgtattgcatataaattaaatttaactggtccagcattaactatacaaaccgcttgttctagctccttagttgccgtacatatggcttgtgaaagtttacgctctggtgaatgcagtatggctattgctggtggaattggtatcacatttccacaaaccggtggttatctatatcagaaaggcatgatcttctcaccagatggtatttgtcgtccttttgatgcagaggcaaacggtacttttgctggtaatggatttggtattgtagtgttacgtcgtcttgaagatgccttagtggatggaaacacaattattgctgtattacgtggtagtgccattaataatgatggtcatcaaaaagcgggattcacagctccctccgtagcaggccaagtttcagttattagagaagcaatacaactggccgatattaaaaatgaagatattgaacttattgaagcacacgcaacagctacaccattaggtgatccaattgagtttagtgcattatgtcaggttttcgctgatcgctctcttactgcttctaaatgcgctattggctcagttaaaggcaatatcggacatctggatacagcagcaggtatcactggcctaattaaaacgatattagcggtaaataaagcacttattcctccatctatgcattttaatcacccaaatcctcaattacaaatagaaaaaagcccgttctacattcctaaaaaccctaaagcttggtctagcagaatacgaactgctggtgtttcttcatttggtattggtggaacaaactgtcatatcattgtgcaatcattgcctgactcattagtatcaatcaaacctgaacaagaggtagacaataattttgaatactcattattgcttagtgccgccacaaaagagagtctaaaaaaacttgctggtgattatgcaccattaataaaaattaccccagcaaacattctggctcataatgcattacagcaaagacaactcaacttaccatggcgcttatctatccccttaacaagtgagagtgatatttcactgttagctttctctcaaggaagtgctgattctttaatacaatatggtcatacatcaacaaataagaaaatagcgtggctattttctggtatgggatcacaatatcctgctatgggtaaagtgatgtaccaacattcaacaacatttgccgaaacaatcgatcgttgtgagcaagcatgcctgcaacacttaacatttccgttaaaagaagtcatgtttggcctacatagcgataaacttgttaatgccagttatattcaagcggctattgtcgcctatgaaatcgcaatggcagcacattggcgagcaatcggtattttacctgaaataattgtaggtcattcttgcggagaatatgccgcagccgttatcgctggtttctatacaatcgaacaaatgatgccacttgctgtatatagtggacaattaatggaaagtcatgttaatggtgaaatgattgctgtatttgcagaatatcaagatattcaaatcattgctaaacaatgtcatgttgaattagctgcaattaatggccataacaacttatcattcgcggggcaacccgatgatatgcaaaagtttactcaaatattgaaagcaaagaatattcgatttagagaaatgaataacgtgtgtgctgctcatacctcttatattgataatattcttgatcaattgatggaatttactgagtcattatcagcctcacaaggaaaaatagccttagtctcaggctatacagggcaattaatttctcaaaaagaacttcaacatccatcatattgggctcagcaactacgcaatacagttatgtatcaagatgcaatacaaacgttagtcaatcatggtgtcacccatgctatggaattaggaccaacttctgtattaagtgatcttggtgaacgtgaaggcattactgagattagttggataccaactgccagaatgggagttgatgaaattcagatgaaacaacaggctgcaacaaccctatttattgcaggctatgatttaccatggcagtcactgtttaaaactcaaggaagttatataccattacctctctatccctttgaaaaacaatattattggtatgaaaaaaaggatagtgaaaaatatcaaccacaaaaaagcgcatttgatttacctattagccaaggtcgtgaaacggcattaaaagcgcttacaacactcgatcttcctcgtttaaactcatttaattcaacacttaccactttacataattattacgtcgataaaatgatatgctcgtgtttaggccatgagttgaatacccccatgtctgtaatcgatattatgcgagcaggacgcattttaccccgctattatcaattattagtacgtttattagaggcctgtgttgaggatggatattatatttaccaacagataaatcagcacaactactataaaaaaataaaatctatttctagtgataaattaccattattattccatcaattacaattagatagcgaaggtcttcaatctattcctgacaccgtcaagcgagcaggagagcaactctacgatatgatgacaggcgtgattgaacctgtttcagtgatctttcctgaaggtgcatctcaaggtgttgaagttctctatcaagattttagttttggtcgttattttaaccaaattgctgccgcggtacttaaaggattactttctcactaccagcccactgtggctaagcctttgcgaattattgaagtcggtggtggcacgggaggaaccacctcttggctgctacctattttatcaaccatacaacatgttgaatacgaatttaccgatatttcacctatcttcacccgacgtgccgcacaaaaatttagtcaatattcatttgttaactatcgagagttcaatttacaacaatcccctgaaatacaaggttttcaatctgattattatgacattattattgctgctaatgttattcatgccactcaacatattggagatacattaactgctcttcgtactttactgcgttccaatggtcatttgcttatgcgcgaaataaccaaacaagctcgcttatttgattttgtttttggcccactggtgttacccctccatgatgaaaagatccgtaaaggaaaactatttttatcaccagaattatggcatcaacagtgtcgcttagcaggatttcaacatattcgctggttacctgatgcattaccagaaaccaaagatatgtgtgaacatattattctcgccagtgtttcgacagaaaacgatcactttgatcaagagttacctagtgacaccaagatacaacaaagttcacactaccaatggcaattaacaccttgtgtggaacaagatcttatcaagccaacattaatatttaaccatcaacaaacattgccttctgaaatcacagctattttatccgctattggatgtctttctgaacagggcgaaaatcaattaatcgttgccaaccttgcagatcctttaattatcgccgagcagatccgccaaatattactgtcatcgtctgatgggtttgttgttatcacgcaacaagcctgggcattaactgccatagaaacggttaatccagcacaacgtagtattcgaagtttattaaaaactattcaaaaagaatatagctcaaggttaattgccattgttgatttaggtataaatgcctcatggtctgaattagttcctgcttttatacaaatagaacaaggtaataatgaaattattgttcgtaaccattgctgctacttaccacaattaaccccactgccctcatcttctacgatcatagcgcagaacatcatggtatccccgcgctggcatattattactggtggttttggaggcttaggtcgaattacagcaagttggttagtaaggcaaggtgctaaacgtatcgctattttggcaccacgagctgatagcagcgcattagattggatgaataacttacagaaatctaaccagctagaaataaaatggctaacatgtgattgtcgtgataacgctcaatgtcatgcagcactcactcagcttgaaaatgaaggtggcattgaggggcttatacacagtgcaggtattttggatgatgcacttatgacacaactcacccctaagcgtatgtctgacgtattttctgttaaagcgatatctgccaagcaattttgtgatgctttagaaaaaacagatgccagttaccttattttatactcctctgccgctgcaactataggctctgaaggacaagcagctcattccctcgcttgtggatatttagatggattagctgaatatgcacgtcgcaatatcaagggattaaccgtcatttctatcgcttggggggcatggcaaagtgttggctttgtggcagaaaaacaactccatgataaattacaacacaaaggtatgagtacgcttactactgaggaaggactggcacatttagatgcttgtctgctagataatacctcttgtcgccttgcaatgcgcttagcgactccacctttaatgacacaaaaaacgcctttatttcatcagactaatcataatgatcattatgataaccatgaaattaatcacactcgccagctttgtgaaaccccaactcaaacggatcaaacagagccggtaagccctaacagggttgattatcgcgttggtgataacttagaacagtggctaacagcatgtatcaaacaactgttgcgtcttggtgatgaacatattgatactcacattgaactattccaattaggactagattctctctctttcctcgatctcagtgcggaaattaagaaacagtttgcggtcaatattgacgctgaacaatcttatgatgatatgactattgctggtttagcctcagttattcgaaccgcagcacctgagaaatttactgtgacagaagcactccataatcaagacaacatttcccacacaatggagtcagaacgatatgccccatttccattaacaccaattcaacacgcctattggatcggacgtaaaaacctctttaactacggaggcgttgcttgccatgcaatttttgaatgggattgtcaacgccatatatgggagccggcctcacttgaaaaagcttggaataaagttattcagcgtcatgatatgttgagaatgatcatagatgatgatggacaacaacgtatcttaaaagaagttccttattttcattttattcaacatgacctaacaaatttaacccaacaagagcaacaagagagcctaacacagataagggaagccctttcttatcgggtattaccgactgagtcatggccattatttgaagttgaaatttcttggctaaataacgattgttacagattacatatcaatctagatttactgcagtttgataccatgagctttaaaattctgtttgatgatctatttaacgcctattcaggacaagaattaataccacaaacatttaccttccgcgactactgcttaaaaaatcaaacaaatcgtaacagtgatgagtggaaaatggcatggtgttactggcaggatctattatctgatttaccttctgccccatatttaccgataaagaattcatccattactgaacaacctcgttttacgactttccaacatcatgtttctatagcgcaatgggacaaattaaaacagaggtggaaaaagcatggtattacaccatcagcagggcttttaacactttttgctttagttttaggtcgctggacaaaatacccagcctttacactaaacttaactttctttaatcgtcaaccatggcacccagatgttacacaacttattggtgattttacctctgtactccctatagatatttatctagataacgactgtacattaaatgagtcaatggcaaaaatacagcgcagactttggcaacatttaagtaagtcccaagtaaatggtgtagagattttacgtgaatggggacgctataaaggggatagtagccaatctctgttacctattgtatttactagcatgttaggtatgacactagatggtgacaatattgatgaagcattaaatcagcttttcggccaacccgtatatagcttcgcgcaaacacctcaagtttggttagatcaccaagtaatggaaggaaaagaggggctaacattaaattggttctgcatggatgacatctttgctgacggtttattaacaatgatgttctctgattatcaaagcttgatcactcaattatgccaagatgaagataataatcaatcagttgataagattattgcgcaacttccttcatatcaacatttagcaatagataatcacctccaatcacgctatcaacaactcgagcaaacattggaaaatcatccgcaaatcaaacgtgctcatgctatggtaatggtaaaagacgatacgaaagtagagcctcctctacaattactgtttgaagcctcttctgatattccactatccgttattaaacagcccaattggttacctaatttactttcgccatcagcttcactcagtgacattattgaaaagagttggcaacgatttgaggaacgagcacggtatggcatatgtcacacactgtatcgaaatgctctttttaccgagctaaacacaccaatcaccctagctgaaatagtggctcgtttaaaagcaaagcctcagtatgagaggctacttagtcagtggctagatttattatgcctgcatcacttattaaccaaagagggtgatcagttttatgccacaacacagtttattaacttatgtttatctgccccagtatttcaacaacctgttaatgattgggaatatgtactttgggattaccttgaacaatcactaacccaacatgaattactctttagtggtaaggtttctcctctttcactactttttaattcagatgaaattaccacagcactatacgccaaacaccctgcactaaattatttaaatcaatgtgcaaaagatattgttagtgcaatggttggtgcaacatcttcactcaatattttagaaataggggcaggtacaggagctaccactcaaggtatagtcgcagtacttaagaatacgcattactcatacacctttactgatatatcacattacttccttgataaagcgcgaaaaaaattcactgctgtaggagaaatgcgctatcaactctttgatattaatgcaccaatacaattttctcatcatccagataatggctatgatctgatcattgcatctaatgtattacatgatgcatcacatatcggccacgcactaaaacggattagaagcctgttaaaacctcaaggctatttattatttatcgaagcaaccgagtgtcaaagtgctatgcaaatggcgactgttggctttattgagggattaagtgcatatcaagataagcgtatattgacgaataaagcgatgcttgatagtgaaagttggcatgatattttaatcaatactggttttgaaactattggtcaatggccccaaacagattcctcatctttgcgacaaacactctttttagcctctcccactcgtggaggaaaaccttatttaggtaaattacgtgattatttatctcattctcttgatcagaatatcgactcttttgagttgttccaatgtgaaaatattgaagcaacccttaatggcatagcaacatcatccgctcaagagctaaatgaacagatacaacctgttgcaatacctgatgtaccaaccaatatgattaatgaaatcattgcattatggtctgagttattaggtcgtgaggtcaatagtacaaatgatttcttccgttctggaggagatagtttgattgcaaccaaaatgatcagccaattacatcaacggggatatccagcaacattacaacagatttttacctatccatgcttagccgatttttgtgctcatttagagcaggaaaagcaatctcaacgagagtactcctctttgatacctctaagcgctgtatctgctccaaaaccttaccactactttatggtacatgcttctgatggtgatcccggtgtttacctacctcttgctgagtcgttaaataatacagtgtggggattaacagttacagatgcttcaaaactaactgatttggatacattgttatcattacatttatctagcataaaaacagcacaacagactggcccttatattcttattggttggtcatatggtgcttttattgccagttaccttgcagaacaactctcgcaacaaaatcattccgtattattagtattaatagatcccgtctatcgacatgattttattaaattttgtcatgatgactcagatagttcatcagatgaaaataagcagcttgcatgcactaaaagacttatgtcattcctacctgaaagtgacctaccattatctgatgatatcgcctgtttatggctggaagccaccaaccacccaacagaatggacatcacctgaaaaagagtggtaccaacgattaccgccacatacccaacatcactatttttcaggggagcactggtcaatactgcaagatcgcgctaccagcacacatctggccgaaatcattgatcagtgggtgcaacaaaaactttctaataacggatatccatccgaaggaggtaattaa

SEQ ID NO: 305040 - DNA, 195 bp, Proteus mirabilis
atgatcctcgcaaaggtaatcggacacgtagtcgcgacacaaaaaagccctgaactgaaaggaagcaatttattaatgatagcgaccttagatgatgagcttaatccactgaaaaataaaacctatgttgcagtggatatagtgtgggtgcaggtatcaacgatgtggtgttggctgaagaatacttcgcactaa

SEQ ID NO: 305041 - DNA, 2445 bp, Proteus mirabilis
atgaaaaacatcaaagagatgacgttactttccacccccctatctcgccgacgctttgtcaaagtgggagccgctggtggattagttgcaacggcaggtggattatctctcccctttagccaagccatggcttcggagcaaacagcgccgacatctaccaataaagaaaaagtcgtctggagtgcatgtaccgtcaattgcggtagtcgttgtccattgcgtatgcatgtcgttgatggcgaaattaagtacgttgaaacagacaataccggcaatgacgtttacgacgagttccatcaagtacgagcttgcttacgtggtcgctctatgcgtcggcgtgtttataatccagatcgcttacgttatcccatgaaacgcgtaggtaaacgtggtgaaggtaaatttgaacgtatctcttgggatgaagcctttgatactatttccgacaccatgaaacgcctgataaaagattatggcaatgaatctatttatctaaattacggtacaggcaccctcggtggcaccatgacaaaatcttggccaccaggagcaacccttattgcccgtttaatgaattgctgtggtggttatctcaaccattatggcgattatagtactgcgcagatcgctgcaggcttaaattacacctacgggggatgggctgacggcaatagtccttcagacatcgaaaatactaaattggttgttatgtttggtaataatcccggcgaaacacgtatgagtggcggtggtgtaacttattatgttgagcaagctcgtgaaaaatcagatgctcgcatgataattattgatcctcgctatactgatacgggtgcaggtcgtgaggatgagtggatccccattcgtccaggtactgatgcagccttagttaatgcgttagcttatgtcatgatcaaagaagatttagtcgataaacccttcttagataaatactgcgtaggttacgacgaaactacgatgccagaaggggcacctaaaaacgcccactataaagcctatattttaggtgatggcgcagatggtcaacccaaaaccccagaatgggcagcacaaattaccggcattcccgcggcacgtattgtcaaattagcccgtgaaatcgccggtgctaagccggcttatattactcaaggttggggccctcaacgccgttcaaatggcgaattagcctctcgcgctattgcaatgctcgctatcttaacaggtaatgtgggaataaacgggggtaatactggtgcccgtgaaggctcttacagcattccttttgtccgtatgccaaccttaactaaccctgtcacgaccagtatttctatgtttatgtggacagatgccattttacgtggccctgaaatgaccgctacacgtgatggcgtgcgaggtaaagataaactggatgtacctattaaaatggtctggaactatgcggggaactgcttagttaaccaacattcagaaataaaccgtactcatgaaatcctacaagatgataaaaaatgcgaaatgattgtggttatcgataatcatatgaccgcatcggcaaaatatgcagatatcttactgccagattgcacggcatcagagcaaatggatttctgtatggatgcttctgcggggaatatggcttacgtgattttcgctgaccaagcgattaagccacgttttgaaagtcgcaatatctatgagatgaccagcgaaattgctaaacgtatgggggtgggtgagaaatttaccgaaaatcgtacccaagaagagtggctacgccatctttatgagcaatctcgtcaaaatttaccagaactgcctacctttgaagaatttcgggcacaaggtatctttaaaaaacgtgatccacaaggccatcatgtggcttaccgtgaattccgcgctgatccactcaacaatccactgacaacgccgtcaggaaaaattgaaatttattcttcgcaattagctgaaattaaagcgacatgggaattagcggcagacgatgtgattgatccactgccaatctactccgcaggttttgaaagctatggcgaccctgctatggataaatacccattacaaatgacgggttttcactataaagctcgtacccactcaacttatggcaacgtagatgtattaaaagcggcttgtccacaagaaatttggataaaccctgttgatgctacaaaacgtggtatcaaacatggcgatttagttcgtatttataacgatcgcggtgaagtacgtatcaacgctaaagtgacaccacgtattttgccgggcgttgtgggattaagtgaaggggcttggtataacccagacagtaaccgtattgatcatgcaggttgcattaacgtgttaacgacccaacgcccttcaccacttgctaagggtaatccttctcacagtaatcttgttgaagtcgtcaaggcgtaa

SEQ ID NO: 305042 - DNA, 204 bp, Proteus mirabilis; identical to SEQ ID NO: 301349

SEQ ID NO: 305043 - DNA, 555 bp, Proteus mirabilis
atgaaaatagcggaacccttggttgataagtggctgccgatactcgcacaacttaatttgcaattaaaaaccttacaagagcctatttggcaattagttttagtggagcctgaaccggtcgatagtggtcgtcgctttatgctatttcgacaaaaattagatgaaaagccacttaataaaggtcacgtaaaaacaggattaaatgcaaggaaacagctttatccgcaagatagctggttccatattcaattagataaagaaagttgtattctttgttctgcatgtgccaaggtgtgtgatgaaggtgcaatcacaatcgaagataatcgctttatcattgatgaaaaacgttgcaccggttgtatgaactgccaagttgtctgttttccaaaatcaataaaagtcgtagaacaaattgctaaaaatagcacaccgacacattaccattattatgatgcacaatgtgataaatgccgccttgctttttttgcttgggagcctaatgccaccttatgtccgatttgtactcagcatcaaaaacagggatggctataa

SEQ ID NO: 305044 - DNA, 678 bp, Proteus mirabilis
atgatgatatcagaaatcaccaaaccgaaacgaggacgtccccccaaaaatcatagtcctaatacagatgtaaaaaatatagttattcaaagtggtatagaaatgtttgctgaaaaaggctatatcagttcagacatttgtaagatattagaaaaagttggtatcccgaaaggatcattttattattactttggtagtaaagaaaaatttggtttagtcgtcatccaacattatgacaactttatttctacgcaactagataactatttgtcttatactgcattacctttccccaaaagactattagcattttgtcacatgataaaatcagaaatggaaaagtatcattggcaacgaggatgcttagtaagtaatctcatacaagatattgttaatttacccattagctattataaaatactgaataatgtgatttctggatggcagaaaaaggtagaaaattatcttctagaagcacaaaaatataagtttatatctaaaaacattgattgtagacaaatggctatttttttctggatgggttggcaaggagcaataatgcaagcaaaactaacccgctctaatcagccactagatatatttatctctatttttatggcgcaggtgtttgatattcctcaacatgaactagaaattactaaaaatagaataatttaa

SEQ ID NO: 305045 - DNA, 648 bp, Proteus mirabilis
gtggtgcttaatcaatcggtttcgggcttaccgcgatttatcaaagatcgtgtggaaagtacgtttcgtatgaccaaattgacagcattaggattgagaagtcgctatcgtgttgatgtgtatactggaattaagttattcaaatcaaataaagtcagttcttatcaatgcaaatacgataaaaaaattttcccgctttatcaatcacatgtaaatggtcagggtgtcgaacaggtcgtggataaacgacaaaatgtgtttagttctcccaaagttattcttatgctttgtgcatttcctattttactccttatcagtctaaattttctttatcagttttttacgcgatttgacgctaaaaatgaggttgatgtgcccgcagagcaagcaacatcacaacgtataaatcagacatcaaacaagagcattatttcaccatcaataccaacacctataccgccaccgatatcagagcaatggcgtattgttggcaagttggaaaaagaagggaggtcatgggtgattttaaaagacaaacaagggcggttacgtctcgaacctgcctctgggtttatgctcaaaggtagaatgcaagcgggtatcatcgacggaaaagttgtcacggtatattcaggggatggggcatga

SEQ ID NO: 305046 - DNA, 3687 bp, Proteus mirabilis
atgaaaaaacagacacttaatatgattgttaaagtgatttatgccagttgcttattaggcgttacccattccacgcttgctaatgcaacagatgcgaatattgtcagctcgttaatagagcaagcaaattactggcatggaaaagcgcatgatgaacgagccattgaagcgctacaaaaagtgctgatcatggaaaataataatcaagatgcgctgtatttaatggctttttttactgcgcaacaaggaaatgaaaaacaagccagctattggcgtgaaaaactggcacggattgcacctcaagatccgcgtattgcgggattaaaaaatattcgctcatctcaatttagtgaacagcaattgggttacgcgagagaattagcccaaaaagggcaacatgaagaggcaataaaagcctatcagcgcttatttgtcacacatgaaccacctgatacgctatcacttgaatattatcaaactatggctggaataccggcaatgttgccacaagcgattgctgggttaaaacaacgtgctcagcggatgccagataataaagaaacacaaaaagcattaggattaacattaacttataacgaagaaactcgccgtgaagggattgctattttaagtaagatttctggtgatgaaacggcgaaaaatggattaagacaagccttactatggcttaatgtacgtcctgatgatgaagggctgtatcaatcttatctacaaactaatcctaacgataaagccattgcacagcattaccaaggagcaatacaaggtaatgcccgacaagcaggttatgaagcgctaaacacaggcaacctaaagcaagcaacaacttactttaaacaagcattaacggtcgatagtcaagatgctcaagcgttagcaggattaggttatgtggctctacgttcaggtgatttggcaaccggacaaaagttattaaaccaagcctctcagtcagggggggaacaagggcaaaaatggaaacaacaagcagaggatgcgggtttttattctcaattacgagaagtgcaacgacaagctaagcaaggtaatactcagcaagcactggataaattattacctttaactcactcatcgggtgaaaaaggattatcagcacatttattgcaagcggatttattgcgcaaacaaggtaatttacctgctgcttatcagctattatctgaactatatcaacagcatagtcaaaatgaaaaagttatttccgcatattactacttgcttattcaacaaggaaaaaacagccaagctgagcagttagtagcaaaacaacccgcatctttacgacaaaaattaacggcaaatactgatccatcagaaagattacgtcgtgatgcgcaaaaggcgttagaaaatggtcatcgcactcaggcaagacaattattaactcaggcacaacgtaaaaacccgcaaaataattgggtataccttgatttagcccgtttaatgatagccgaaggtgataaaacgcaagcggatcagctcattttacaacttgaacgtcgtcaaacacgtgatgccaattatattgcagcgctcttttatgttgaacaaaaacagtgggataaagtttttaccctactgaacaatcaacctcaacaaaatgaggcggaaaaagcgttattagagagagcgcgtttttatcgtcaactgacacaagctgagcgttactataaaacgggcaatctcgttgcgatgcgcaatacgctgcgccctttaatcaaccaagtggctgattatccaaatgatgtaggggaattagctgaaaaactggtaaatagtggtgcacaagatgaagcactgcacttgattgaaaatgatctgactaaagggactaaaggctccgtgggaaattatgcagggcatatcaatgtgtttaatgcgttaggacgttatgcacaagcctcgagcttgattaatgatcccgcattacagcaacaaacgccagcagccgagaaacaacgtttagctatactgacaaatgttgcgcaagcggatagtttacgggaaaaaggtgaaatcaaagccgcttatcaaactctcgtcacctcattaaaggtaagtcctgatgatccagacttattaatggcattaagtcgtgtgtatttagcgcaatctatgccagagcagtcaaataaaattctctcttaccttgaaaaacagcaagggagagatagcaaattacttcaagcacaaattgaagttgctttggcgcaaaaagacggtcgtaaagccaaaacactgttacaacaaataccgacatcttcacaacctgcttatctattacaagcagcacaagtagcgcaattaaacggtgaaaatcgtcaggcattggcgttattgcgtagcgcacaatggcaaacgacaaataacacaacaggtacggtgaataccgcagcagggcagttaatggcactagagagtgaaaatagtgtgatgactggctctataaatgaagataaacagatggttgctgttcaacgctccattcgtcaattagagcagcagatatctccttgggtacaaggtggtattgctattcgtcatcgtaatggtgataagggattatcaaatttgactgaaatatcggcaccgatttctatctcaagtgttcctggtgaagattggcgctggcaatttaatattaatcccgtttcaatcaccagcggtacggcttctggagagcgcgctaatcgctttggctcggggcaattgcagcatgctgaacgttttgcgaaaaacagtgagaatcatgatgaaaagaacaaaataaacgcagatgatgcgggaagccagcgggcttcaggtgttgaattaggattggttttatctgatcacaatacacgttttgatgttggaacaacacctttgaataaagatagttccactattgttggtggactgacttactcaccaaaaattggccaaaatggacagttaacattaaccgcagagcgtagagcgattaaagatagcttactttcctatatgggacgtaccgatcctataacgggagaaacctggggacaggtcacgcgtaatggtgctaaagcgcaatatgcatgggatgatggcaaagtcggtgcttatattggtgggggatactataactaccaagggaaaagtgttgaaagtaatgaagaggtaaaagtttggcttggctcttatgcaaacttctacaaagatgagcaacaagaagtcaaagcaggtgttcatgtggactatatgaactttaaaaacaaccaaaattacttctcattagggcatggggggtacttcagcccacaagattatgtcgctgtctctttgcctgttgcttatacccgtcgttttgaaaaaggagaggtatcgctaaatggtgcgataggggtacagagttacaagcaaaaggggagtgattattttccaacccatgcttatatgcaaaatgcgttaaacaaacgtcatacgagtgactcacgtattaaatctcgttatgaagagcaagatgaaaccaatattacctatcgtttagggctcgatgctaaatattatttaaataaagagtcagaattagggctcagcttatctcatgatacatcgggtgattatgctgaagataatatgtggttatatctaaaatacaccccagactttttatctaaataa

SEQ ID NO: 305047 - DNA, 396 bp, Proteus mirabilis
atgaaagtccagcaggatagcaaagggaataaagtcattaccggcattggcttaggatttaatgcgcaaggaaatagccaatttctggttaatgcccaaaactttgcggtgatatcatcattaaatggcaaagtggtgacaccgtttgtcgtgaagaatggacaggtggttattcatgaagccttaatggataaagcgtggatacagaaactagtagtactcaattattttaaatcatcgggatttgataaagggaatggctttttattggatgcaaaaaacaatattttccgctttacgggtggtaatggggcattaaatatcaccaataatcaattggtcgtcaaagatgagaaaaaacgccttgtgatgaaaatcggttatctagggaattga

SEQ ID NO: 305048 - DNA, 1002 bp, Proteus mirabilis
atgtatggtcttgaaatttttcctgttgaaggcggtaaaccttaccgtttaacgcgtgatacgcaaattctctgttatttaacctcttatcagatagggccagaagattggccccattatcgacaaccgaaaaaaacacggagcaaagtcattcatgaagccatggggtatgaggcgttcgccatcccgagagtggcttctgtgtatatggcggtgaatgattatgcgtattttcagggaataacgcatatccgaatggaaggacctgtattacgttatgagtatgtttatgacaatgttcaggttcaagacccacagatggccaaaagagccaatatggtggtcgatatttatggtatcccgttaccggatagtacaaaaccaacgtatggtgtggagtggtatggcgcctttcagggatttcgaagtgcgattacacgtaatacacaaatgacttattgtgtgtttcgacaaaaaatccaccttgaaggcgggcgctattggtctttgccaacaacattaccgcatttagataagtgtgttgtgttttatcatgccaccaaccctcaagcggaagtgagctatttagcgcataaaaagcaattatacagttcagcccaaacagacatttatgtgtgtgttttcgtttcaggaatggttttgaccccgaagagacgttggggtttatcactgtacagtgaagatggaacactggtctttaatacggactatttgccttttacccgaggaaaatcaatggaattgttattacgggaggggagtgtagagactccatatagcttgcctttagtctgtgcaacaagtcagtttgtgaatgcgtcttatcaggatgaccctattgattgggccaagcgcaatacggggatacgttttcggggaaaacagatttttgtgagcgaacgaatacgtgatgctcatcggcaacatcatgtagagcaacgtattcccttttatgtccttaatggctcactttatttttaa

SEQ ID NO: 305049 - DNA, 1644 bp, Proteus mirabilis
atgaaaagtagactgaaaaacctatataaatatcttattgagaacaggaaacatgaagttaatggatggcacaaagcctatcgtgacttttacagtcaggtcgctcaaattcgtgagcgaatcacatctggagaaggcttgtctcaaaatgatgaagcttttctgaagcagttaatctatgagaagagcaacggtatcgcttctcgcggacagtctgtgttgagcaatgacaatttccagtcattcattaaaaacaagaatttcatatccgcattagaaaaatttatattgattccaaacagtgaaaacttcacgattttttctgatacgtggtctaaccaaggtaaatccaacaaccctgttctcgttaatcgagtggctgcagcttgtacactcgaagtctccacaacggttgactccggtaaattcaatcaggtttttagttggcttatacgcgaaggaataattccagtatacccaacagaagaaaatcaaagttggtttgctaaaaacatttttctattaaaaagcatcaaaagcgagtttgataatgagcttcgggaaggtaaaactgatgagttttatcttagtcagtttgtttgggtgctttacgagaatttgttaaacccattcagtttaaagaagcagattattaaatacggggcaccggggacagggaaaacttatcaagcacgcctgcaaacttcgctcatgtttgacatctggaaagaggaatttgcttccaatagccgtctcacacatgcaagtcagattgagttggttcaatttcatccttctttcagttatgaagactttatggaagggctacgtccggttttgggcagtaatgggaactctcaattaaggttgcaaaatggtgtttttaaagagttttgtcgaagcgctggtaagtgggaaatcgatgtatatgggcttggacttgctcagaagtgggagtctcttactatcaaggaacttctcccgtttagagaaaggttatcaggtgagcattggcgggatgttttcgaaatatcagatacatccaagcttgtatcggaagcagtaccaccatttttctttataattgatgaggtaaaccgggctgagttgtctcgcgtttttggtgagttaatgtactgtctggaataccgaggcactagaggttgcgttaaaacccaatatgccaatctgaacaatgaacatactggtatgcttaaggacgctaaagggtatttgttcttcattccaacaaacatctatcttattggaacgatgaacacgatagacagaagtgtcgaaagttttgacttcgctttacgtcgaagattccgttgggaagaagtggtgcctgatatggcgctattgaaataccatttgaaccaattttgcaaagcttggctgcccctggtggataaccttgaacgcttgaatgaattgatagctaaagagcctttgcttggtaatgattaccaaattggtcatgcctatttgatggacttgaagtatgcaaccagccttacagtttcggaagtacgagagcgtgtatgggatgattgtattcgtccgttattacaggagtatcttcgtggaacgggtaaggagactgaactgattagctccttcggaaaggcgtttggggtttaa

SEQ ID NO: 305050 - DNA, 1428 bp, Proteus mirabilis
gtgtggcttttcgatatcattaagaacggcacactggtcgataaccagtcctattttgtcagcgaaggcattttgaaaaatagacgtttaggaaagtcgataacccttagaaccaaatcaaaagggcagtggacctatcctcataacgacgagtctgcaatttggcactttttgaattcggtatctcgtgatgtcgaaaaaacgctgaatgataatatttccgatgctttaatactcttcaatgatgaagattacgaacacaatacagatggcggtttcatcgatgtctctggtacggatgccagaaattttaatctcgacacgggcaatttaatcggatttgttaagcgaggagattactctctgaagatcagctcacgttttggtgatgctttccttcaatacatcattgcagatgccgatggatttctcgaattagaaaacattggaggagaaagtcacacagacggttacgaatggcttttagcatatctatggaacattaagtttaagagagcctaccgcttgggcttgccaaagacttatattacaagaaatgatcgtatttcccgcgtaaggggaactataaatgctacagattatttccagaataaatcatctggaaaatatttatgctcgtaccgagagcacagctatgatagccctgcaacttcactttttataaaagcttatgaagcagttgcacattactcattttgtcaccaaacacgaaatatctatagtgcatttctgactgccaatcaggggataaaaaggtcacagcaagaaattttgaggacttctcatttcaccaatcctttctacaatgattataacgtgctcattgacttatctaagcaagttattggccggaagggctctgattttgattcgcagcaggattcgagtgctttctttttcgatatttcgatgttgtttgaatatttcattcgtaagctcatcaagcgagatgggttacgcctgctaggtaagttcgagctatgtcaggaaatagcatctggtgcgctcagcggttatatgagaaaacttgaacctgatcttgttatagaaatcgatgagagattattcgtatttgatgtgaagtataaagcatttgattcacaatttggggtgaagcgtgaagatctttttcagctacatacttacatagggcagtatggaaatattgccgcaatcaaggggtgtggatttatttaccctatatcagaagaacgatgggcttcacttaaccttgaaaaaacacagggggtgatttcagatattattcaccagcaagggcaagagataccgttccatgtgctttttctaaaaatccctgaagatacttatattgattttaataggaaaatgaaagagcagtgtagcattttcattgatgccctttattctaaggttcttaatcagtga

SEQ ID NO: 305051 - DNA, 1023 bp, Proteus mirabilis
atgcaactatttaacgacgatgcactctctgtattaaaagcactacctgataactgcattgatttaatcgcaacggatccaccttactttagagtgaaatcgtgtgcatgggataatcagtgggatagtgttgaggtttatttatcgtggcttgatggtgttcttgctgaattttggcgggtattaaaacccaatggcagtttgtatttattctgtggctctaaattggcatcagatactgagttgcttgttcgtgggcgatttaatgtattaagtcatatcatttgggctaaatcatcagggccatggcgacgacaaaataaagaaagtctacgcgcattttttccttcaacagagcgaatactctttgctgaacattatcaaaagccagtcacagctaaaggttctgaattttctttaaaatgcaaagaactaaagttagacgtatttaagccattgatttattattttagaaatgctcgtttagcactgcaggtgagtgcaaaagaaatagaccaggcaacaggtaagcaaatgagtagtcactggtttggtagtagtcagtggcaattacctagcgaagaagactataaaaagttacaaacactgtttacacacattgctgataaacaagaaaagctatcaccattatctcgtcactttagtgagttagaacgagaacaactcactttacaaaaagactaccaagaattaataaaagaatatggtttattaaggcgtccattcttcgtgactgcagatgttccttacaccgatgtgtggacttatccccctgttcaatactatcccggcaagcacccttgtgaaaaaccatcaaccatgatggagcacattatcaattcaagtagtcgtgaaggagatctggttgctgatttctttatggggtcaggagcaactctaaaagcagcactaaaacttaatcgaaaggttttaggtgttgagcttgagaaagaacgctttgagcaaacagagcaagagataaaattgttaacttatcagtaa

SEQ ID NO: 305052 - DNA, 501 bp, Proteus mirabilis
atggcaattaacacaataacggcaagtggaaacttaggtaaagattgcgaacagcgatggacgccaaatggtaaggcggttgcatcttttagtttgccagtgaaacaaggctacggagagcacgaaaaagtatcttgggttatctgcaagatgtttggccctaaagctgaaaagttacctccgcacctaaccaaaggaacaaaggttacggttactggtgagttcgttatggaagaatggacaagccagaacggtgagaaaaaatcagcgccggtaattatcgttgatcaattagattttggtggtaacggtggtaatcaggcaggaagccagaagccacagcagaatcaaggatggggccaaccacagcaaccgcaagcaccaaaacaagcatcgagtaatcaaacaccacaaagtgagccacctcaagattgggatgattctatacctttcgctcctatcggactcccctacccacgccacgctatttatgtgatttaa

SEQ ID NO: 305053 - DNA, 369 bp, Proteus mirabilis
atgcacgtccatttggtctttgtcacaaaataccggcgaaaaatatttgatcaggatgccattgaaaaattgcgaggctactttaccagtgtttgtgctgattttgatgttgaactggttgaaatggatggggaacgggatcacgttcatttactgattaattacccgccaaaactggcgatatctaatctggttaacagccttaaaggggtatcgagtcgattacttcgacgtgatcgtcctgatattgcccaacgtgattactacaagggggttctttggtcgccgagttatttcgcggggagttgtggtggcgcaccaatatctattatccgccagtacattgagcaacaggaaacacctagttag

SEQ ID NO: 305054 - DNA, 213 bp, Proteus mirabilis
atgagtaatagagttatctctgatgacaaccctgttaaacgagttgcttttgatatggcgctggcgttggcagcaaaacaagagtccatcaaaactccagagcaattaatggcggaaattgaatcgctttatcctgagtgtttagaagtagctaagaaacaatacaaaaaagaggctccacctcctgttggtttttttacaaaaaaacgttaa

SEQ ID NO: 305055 - DNA, 459 bp, Proteus mirabilis; identical to SEQ ID NO: 296276

SEQ ID NO: 305056 - DNA, 3081 bp, Proteus mirabilis
atgccaacttttagagatgaacaatatattccagcgtttttatttaatatggggctttggaaaagtaagaataatataagcttgatggctggtaaagatattgttagtcagggaataaaatattatagtaacaaagaaataacttttaatgcaggacaagatatttttcttgcctcaaaattaataaaagaagccgctccttttttcagtgatattcattacccccaactacaatctaaattattttcagataataaccttattttaaatgccgcgcgtgatattgatttaagttcaacagtattaaattcaaaagataaagttattgtattagcgggtagaaatataaaactgggtgcaaatgcttattccgccatcaaagatccccacgaagatgcgcaagacattcaatatgccaccacatccattatgggaaataaaggtatttctattgcatcatcaggctcactcacaacagaaggaagttcacttaaatcagagggggatattgctatttccagtggtggcaatatccaattgggatcagtaagaacacattttcgtaaagagtcggactcagagttagaagaacttcgtaaacaagtcagtactgaaattaatagcggtaatcatctaacactattatctgagggcagtattttatttcaggcctctcaattggctgctaataaaaagatggatattgctgctaaaggtggatttctttatgcacaggcaatggaagaatccagttactatgaagaagaaaagaaaaaatgtaattggtggacactgtgtgcgactaaaaagaaatataccaaaacatttaataacacaacgaataaagttaccgagtttattgctaatgacgatattaatttaattgctaaagatgatatcactttagaagcaagcaaattagagacagcaaagaatgccaaattaaccagtaaaacaggaggcattaattttaaagcggtgaaagatactgcttttaaacaagttattactcgttcaaaagatatatatatcactcaacgtaatcagggatacaccaagggaacatggctattacctgaactctatattggcggaaagctgactatcgatgcgccaaaaggcatatctgcagatattaaagccaaaaaagagcaatctttagagcaggcattaactgccttaagtaacacaccagaatatgcttggcttaatgcgctccaacgtcaagaaaatattaattggaatttagtgaaagacacttattccagttgggatgataaaacccagcagttaaatccagttgttggtgcggttattgccatcgcggtaggggttgcaacttatggtacggcaacagctgcctcaataggaggaatggcaagtaatgcaactattgctgctggagcctctgcgggggttgcatcaacggcatcagttgcggcacaagccggttttgcttctttagtttcgcaagctgcggtctctttagctgaaaatcaaggcaatatttctaaaacatttggcgccttaagtcgcagtgatacggtgaaatccattgtcaccagtatgaccgttgcaggcgccttgcaaggtcttgaccaatttatgggttgggatcaagcaatacaggggggaacattaccgacaacaggcaagttgcttgcgacggataatgccacatggactcaagttgctcaacgcgttgcctcacagtcagtagtgagttctacactagggacagccattcaaggtggcagttttattgataattttaaaactgcgctattaagccatatcggcagtcaatttcacgctgaaggtgccaatctcattggtgataacggtgcggtattagggcatgcaggaaaggttttaagccattctgttgttgcaggagtgagcgctgaaattgcaggaggcagtgtaacaggtgcagtagccggcgccttggcagcagaaatagcggcaatatcgctcaacgataatttaattaagacagaacagtggcgagaacaacaagctcaaaaaagtcgtttggtgggggcttttgctggtttagttgcaacaggtaaagcggagggcgttataagtgcggctaattcggctgaattagtagaacgttataatagacaacttcatttagaagaaacaaaagcaattaataaattagccaatggagataaaaataagttagaacgcttattagctgcatcttgtcggaaagtttattgtattgctcaggaatcattaaattcatcagaaagaaattattatgaatctttaatgaaaaaatacccacatacacatgaggaagattcattactttcagattattggataacaaaagaaagaacaaggattgggggaaactatccactatttagtggttatgaaaatattaagttattcacttatacagaaattgataaattaacagatagtgaaatttttgcaagaaatcaatggattgaaaatgcgagtgattttacaggatgggataaagtaacacttgaaaatttaacttcagtgattgcactaggagcgtcgataactaagcgtaatggtaatagaatttatggacctattagatttaatgccaataaaacgcaatttataccaagaaatgatatttattttattgacaaatcaggaaataaaatcacaatgaaatggatgtaccaaggtacaatagcagagcaaggaatgacatttgaaaattttattgggctatcaaataaacgactgaaacgattacatcttaacgctaaaacatttgactattatgatgataagacagatgaatatattagtgtaaagacattaaatacccaaactgaatcaaggcttaaaaatccaaaatcaatagaaaatacactaaatacatatatttcaactatagataaatattcgggagaaaaaaagggaggagttgatattttaccaagtgatattaaatcaaaaactctagaattaggtgttcctgcaagaacaaccaaacaacaatgggatgctattaataattctattaaaaatgcatcttcaaaaaatattaaggttaatattacaatagttgaggaataa

SEQ ID NO: 305057 - DNA, 993 bp, Proteus mirabilis
atgttagagcctttgaaaatgaatgtaaatataaatgatatataccaatataaattaaaaagtttttttaattcacgagttttatcaattaatgaagaaaaatttatatttatagattctgtaaaaaataaagagaaggttttatctattcatataaaaaataatgattttctttttttatctgagtggtgtgatttgtttgattttgaaaaaatatataacctgctatctagtagaactaagtctaattatttttacttttttcctttcttgaagatgtttttttcattatttatgattaatacaactgagtgttatagaaataaaaatttatttgtttcttattttattaatcaattaaagaatggacttgattttaaagataatcctgatgattgtaaatctgagttattcaattatttaatgtatgaaatgggaatagggtctcggtatgataaatattttcaagtgataaataataaactattttttaatataaaaaatagttcttatgttgaagtgaaaaaactaataaacttaatacactcttttgcgaaaagaacagcaagaaatagtaataggaaatatttagaagtaataagggagtttcagttgtcgacaatagattttttattagatagtactgataattactcgcttccgtatagtgatatatatataaaatatacttatccagatatattttataataattatttagaaaataaaaataatatttttagagtattgactgattgtgtaaaggaaggacaatcaaaatgtaatctttttgtttccgaaatgatttttatgaattatatatattatattctacgagaagaaccatctaacatattagccttggaagaattttgcaaagaaaataaagaagattttttaaaaataataagtagaattattaaccgtaaattttatcttaatattaatagttttaaaggccttaatcttgggcgttacttatcaaagatatga

SEQ ID NO: 305058 - DNA, 492 bp, Proteus mirabilis; identical to SEQ ID NO: 303115

SEQ ID NO: 305059 - DNA, 960 bp, Proteus mirabilis
atgaaacccgttgtaatactttatcaaccgcttccagaaaaactgcaacaaaaattatctgctgttgctgaggtaaaacagtttaacgcgctctctctcgattgtgccgattttaaagccaccctcgctcatgctgaaggattgttaggtgcaggcggtaatatcgataaacactttattgaaaaagcgccaaaactaaaagccgtatcaacgatttctgtcggttatgataatgtggatgttgccgcgctcactgaacgtcatatcaaattgatgcatacacctacggtattaactgatactgtcgctgatacaatgatggcgcttgttcttgccgtctctcgtcgtattcctgaactagccgataatataaaacaaggtttatgggtaaaaagtattacgccggattggtatggtactgatgttcaccataaaaccatggggattattggtatggggcgtatcggtaaagcattagcacaacgcgcccacttcggttttgatatggatattatttaccattctcgtactgaatataacgatgttaaccagcattttaatgctaaattttgttccctagagatgcttttacaacaagccgattttgtctgcattactttaccgctaacgccagaaactcatcatctgttaagcgcaaaacagtttgcattaatgaaagctgacgcctatttaattaatgccggacgcggtgccgtggttgatgaaaaagcattaattaacgcattagagcagcgacaaatagctggagccggattagatgtgtttgagcaagagccactgccaacctcttcaccacttttaaccatgaaaaatgttgtcgccttaccccatattggctctgcgactaaagagactcgctatgcaatggctgaatgtgccgttgacaatctgattgctgcattaaccgataatataaaagaaaactgtgttaacttttaa

SEQ ID NO: 305060 - DNA, 882 bp, Proteus mirabilis
atggctgagaaaacacaatctgacaaattcaaagcggccaagaaaagcacattggtcagtgtttttgttaatatctttttatccatatttcaaatcacaattggtttcttctcacattcccaaggcttaattgctgatggtattcattcactgtctgatttaattgctgacttcgtggtgttaattgcgaataaaggcagtcaaaagcaacccgatgccgatcatccttatggacattttcgctatgagaatgccgcttcattagtgttagggacgattttattgattgttggtttgggaatgatattttctgctatccataaaatgttagatccttcaatcattcctgatgttcatagcatcgcgctttatgtggctttattggcattagtggctaaagaagggttatttcgttatatgttagctgtagccaaaaaagtcgattctagcatgttagtggcaaatgcttggcatgcgcgctcagatgccgcctcttctttagtggttgcaatagggatcattggtagccttgctggatttaaattctttgacccactagcagcacttattgttgggctatttgttggccgtatgggatggcgttttacctatcaagctttgcaagatctcatggatagaggcgctgatgaagaaacacttgaacagatcaccaatacattaatcaccacaccaggagtacaaggggtacatgatttaaaaacccgtcgtgcaggtgattatttattagttgatgtccatttagaaattaaaggcgaattaacggtcaatcaaagtcatgatattgtggtcaatgcccatgatagagtacttaaacagcatgcacagattttaagtgtgatgatacacgtcgatcctgcttaa

SEQ ID NO: 305061 - DNA, 906 bp, Proteus mirabilis
atggaacaagataatagttcatcgcttacggagccagaagaggtgtttacgccagttcctctacaaagaggtgcttcaggggcaaccgagtggttaggtattggatgggatttagttaaagagcgcttttttatgtgggtaggcgctgtaattatttactttcttgttaacttaattatctcatctatccttggatttatcccacttattgggccgattatctccccgtttatttcagctgtattagttgccgggcttatgatgatagcccatcagcaatatgagactggtcagctaaatctggataatttattttctggtttccagaacaaacgctaccttagcatcatgggtgcttatggtattagtgtgcttattatcttagcaggctttattttagcactattaatcagtggttcattattgatggaagttgctcaagccgctcttaatgatgcaccaacctactatattcaaggcttattggctgataacctgacaccaattacgttttcttctatcattattatcatttttagcttaatcagtactgcctcttattggtttgcccctgccttaattttagtaaatgactataaagctatccctgccgttaaagccagttttatggcggttaaaaacaacttatttggtggctttctattctttgtgctgttaagcatcattattggcttgagtattatcccatttggattaggcttatttatcactattccactctcttttactgcaatgtatggatcatatcgccatattttctatcagaaaaatatgggtaatatgactaataaccatactgataacaatgacaataatggtgatggtgggaataaagtttctttaaataaaaccgcagaatcgaatatcggtaaattagtcagttaa

SEQ ID NO: 305062 - DNA, 864 bp, Proteus mirabilis; identical to SEQ ID NO: 296545

SEQ ID NO: 305063 - DNA, 1227 bp, Proteus mirabilis
atgtctttgaaacgtaaaattgcgctggggaaaaatgtattagaagctgctcaagagagagtccagtggatatttgatacttttgaacaaatcactctctccttttcgggagggaaagattctactgcgctttttcatcttgttgccgcacaagcgcgaaaacaacatagaaaatttaatgtgatgtttcttgattgggaagttcaatattctgcgactatagatcatattataaaaatgaaatctatctaccaagattgtattgaacggttttactggatagcactccctatcaccactgaaagtggcatttctcaatatgaacctacatggacagcatgggagtctggtaaaaaatgggtaagacaaccgccagaagatgcgataactgaccctcactttttccctttttatcacccaaatatgctttttgaagattttacccctgcatttaaccagtggatcacaggtaatcatcgcagttcgattatcctgctaggcataagagcggatgaatctttaaaccgatttattgccattagtaataatcgaaagttacgttatgccgatgatattccttggacaacggcatcagcagaaggcttttattatatggcctaccctatttatgattggcatgttaaagatatctggacttatatagcgcgtttcaatttaccctataaccctatttatgatctgatgcaccaagcgggcgttagtttaagtcaaatgcgtatttgtgaaccttttgggccagagcaacgcaagggactatggttatatcatgtgctagagcctgaaacatggagtcttgcttgtgaacgagtgagtggagctgatgccggaatgttatatacgaatcctcgtaataaatcaggtttctatgggcgacatcaaattagcaaaccttcccatcatacgtggaaatcttatgctcactttttattagccagtttaccagagaaaacagcagaacattatcgtaataaaatagcggtctatcttcgctggtatgccgaacgagattacccaaatggcatacctgatgcacaagaaggtgatactagcactaaacagataccttcttggcgacgaatttgtaagaccatcttgcgtaacgatttttggtgtagaacattagcatttagtcctactaaatcacactgttatgatcgatatttcaaacggatacaaggaaaacgaaaagactggcaacttatttag

SEQ ID NO: 305064 - DNA, 1173 bp, Proteus mirabilis
atgaaagcattttttcctttatttgccctcgctacaggagcatttgccataggagccaccgaatttacacctatgggattgctacctaatattgctaatggactgagtatttccatagcaaccgcaggtggattaattactggttatgctgttggggtgatgattggtgcacctattatgacattaagtcttggcaaattaaccaaacgtcatgcattgggattattgttattattatttattgcaggaaatctattagccgcacaagcagatagttattggagcttaatgatagctcggttgatcactagcctaaatcatggtgctttttttggtatcggctctgtcgttgctgccagtttagttgaaaaacataaacaagcctctgccgtcgctgctatgtttatgggattgactatcgctaatttagtcggtgtacccttagtcacttggattggacaacaatatggctggagattagcctttatattaatttcaggtctgggttttattaccctaatcggattattaatgtttttacctgttatgcctaaaggaaataagcctaatattaaatatgaactgggtgttcttactcgcttacccgttgtattagcactattaacaaccgtatttggtgcctctgcactttttgccttgtatacctacattgctccttttttaaccaataccgttcatatatctgaaagccatgtcgctgtggtattagttattattggtctaggatttactatcgggaattacttaggaggaaaactatcttcttacggtatcgaaaaaacattaatccttttcttcatcctacttatcggctctatgtcagttttgccgttagtttccaataatgtgtatctggcagtggcgactatttttatttggagtatctcaagctttgcacttgttcccgcgttacaaattaaaacaatgcaaatcgcccatgatgcacccgccttagtttcatcggtaaatataggtgcgtttaatttaggtaatgctatcggagccatcatcggcggtatcgcattaaaatacagttataacattgtgcctttaaccgcggcactggtaggcgttattggcctgcttctcgtctattcacaaatcaaaataaaaaaatcgttctcctcagaatgttgcgttaattctttataa

SEQ ID NO: 305065 - DNA, 159 bp, Proteus mirabilis; identical to SEQ ID NO: 302085

SEQ ID NO: 305066 - DNA, 270 bp, Proteus mirabilis; identical to SEQ ID NO: 302083

SEQ ID NO: 305067 - DNA, 336 bp, Proteus mirabilis; identical to SEQ ID NO: 300331

SEQ ID NO: 305068 - DNA, 399 bp, Proteus mirabilis; identical to SEQ ID NO: 302088

SEQ ID NO: 305069 - DNA, 1287 bp, Proteus mirabilis
gtgacttattcattcccaaaatgggaaggcaaatttaatcaatttggtaataagaatccttatgaatttaatgaattacaaaaagagcatgcaagaaaatctttagatgcatggtctgacattgcaaatattaaatttactgaagttgctgttgggaatgttgatggaatgaaggcttctgacgtaaaaacagatattacttttggtaatatctatgatcccaatggcacatttcaggcttatgcaacattgcctaatacctatgcttatggaaaagatctttctggccaagcatggtttagtgattatcattatgcaggtaatactacaccagaattgggtaattatggtcgtttaactattatccatgaaattggtcatacactgggtcttatgcatcctggtgattataacgcaggtcagaatgttccaggttatttaaaatctgattatgcggaagatagtcgccaatatacagtaatgagctattgggatgaatatgaaacaggcgcccacttccaaggtgcttatgccggagcccctctccttcatgatatttctgctatgcaatatctctatggcgcaaatacgactaccagaacaggtgatgatgtatatggtttcaattcaaatactgggattgattattatacggctactgatagcaatgataaattaattttctctgtatgggatagtggtggtaacgatacatttgatttctcaggcttctatcaagatcaactgattgatttacgtgctgggaacttttctgatgtggggggattacagaaaaatgtttctattgcacaaaatgttaccatagaaaacgcaattggtggttttggtaatgatattattcatggtaatgatgctgataatactcttattggaggcgaaggagacgatattatctatggccatagtggtaataacactatttatggtggtcgtggacaagatacattacatggtggcacaggaagcaatacctttatttataaagaaattacagattctttagtaacagccgcagataaaataatggatttcaaaaccggtattgataaaattgatttatcaacattaattcaagatacatttagtagcaaaattcttaactttgttgataactttacaggaaatgctggcgaagcaactcttagctataatgaagtaaccaatgcttctgaattagccattaatgcttatggctataattataatcctgattttaaaattgatatcgtaggttttgttaattacgaaactgattttattgtttaa

SEQ ID NO: 305070 - DNA, 159 bp, Proteus mirabilis
atgaccaaacaagaaaaagcaaacttatccattctctatcgtcaattacagcaatcacttgaatacttacactgtggaagagttgatgatgggagaatagttgctgaaatcgtcgagcgcgagttaggcaagttagtcaacaaacagaaaaccaaatag

SEQ ID NO: 305071 - DNA, 996 bp, Proteus mirabilis
atgcccaaaactcttatgagtcttaaacaaaatgattttacgcataaaaaaattatcgtaggtattagttcatgcttattaggggataaagtgaggtttgatggtgggcataaatgttgtcatcttgctgctgatgaattatctgagttctttgaatatcaatctacttgcccagaaatggctattggtttaccgacacccagaccagcattacgattagttcagtctaagacaggtgaagttaggttaaaatttagtaatggaagtgaaggtgacttaacccaaatgatgaatgattactctatcgaatatttgaggaggtttaatcaatttagcggttatatcgtgtgtgcgaaatcacccagttgtggattagaacgtgtccgggtttatgatccaataggcaacggcaataaaaaatcgggtacaggcatttttactgaaaatctgaaaagaataatgccgtggttacctatagaagaagatgggcggttaaacgatccctatattagagaaaattttattacacgggtgtttgcgcttaatgagctaaatcaattgaaaataaataactttactcgccaggcattaattgattttcatacaagatacaaactattgttattagctcattcacaaccgctttatcggcaactagggcgctttgttgctaacaataaagattgggattcattagagactttctttgttgaataccgtaatcgatttatggctctattacaacatcaagccacacgtcgtaatcacactaatgttcttatgcatgtgcaaggatattttaagcaagatttaacttctaagcagcgacaagcattaagccaattgatcttagagtatcgtcaaggaatacaacctttattggcaccattaacattaattaatcattacttatcagaatacccagataattatctgagtaaacaaaaatacttttatccttatcctcaatctttaagattacgttatggtttgtaa

SEQ ID NO: 305072 - DNA, 390 bp, Proteus mirabilis
atgttaaaattaaataaaattcatcatgtggcgattatttgttctgattataccatcagcaaacatttttattgtcaaatactggggcttaccctattaaatgaaaaataccgtgaagaaatacaatcttggaaagctgagcttgcgttaggtacagtctaccaaattgaattatttagcttcccagatgcgccagcacgtttaagttacccagaagcacgtggtctacgccatgtggcatttgcagtggacgatcttgatgcttcagttgcttatttacaacaaaataatattcaatgtgagccaatacgtatagatcctagtagccaaaaacgttttaccttttttcaagatcccgatggcttacctttagagctttattcaatatag

SEQ ID NO: 305073 - DNA, 429 bp, Proteus mirabilis
ttgattattgagaagcctcagaataaagtttgcgaacttaatattgaacaacctaatattgaattagcgcctgtagaaaaaaacagtttaagcgattcaatacccgctaatgaaacacatttttctattggtgttatttgtaaccaagatacattagtttcattaaagcttgatgcacctgctatttataaaagtagaaatactaatttattaacacttctaaataatggcaccccttctggggtaggtttatcaattaaacataatgataataaatattatttaggtaatgttatttataatagcgttcatagaacaccttcgacggaatatacttttcctttttcagtaggttatgtgaaaatgagtgaaaacatcttgcctggcaaggtaacatcacaaattaatgtaaacttagaatataaataa

SEQ ID NO: 305074 - DNA, 618 bp, Proteus mirabilis
atggctttttggcgatatcaaatagctggtgagcttttgatcacccttatcctaatttttagcattattatttactctataactttgaggttaaaaaaaacggcaatgtttagtcgaaaaacagaaacaccaaaagccgcggagcctattgctccagttatggcagaagaaaaaaagcctatgccggagcaaaaattgtataccattattgctaaaggcactgtatttcaaggtgatattaacgttgatggtgatattcaaatttggggtaaaatttcagggaatatcaatgtaaaagatggcgtgatccgtgttatgcatgcaggccaagttgaaggggaattaacggcgccagacatcattattgatggttttgttaaaggtatttgtgccgcaaacaatcttgatattctagagcatggtgaactacgtggcactagtcgttgtggcagtatgtcaattaaacgtggcggtgtctttactggacaatctgaacaggttgaacaccaagctaaagccgttgcacagcaacgtgttgtatctattaaagaaggtacagttaataccaataaagagtctgtaactgcagaaagtaaactaaaagaaaataaaaaataa

SEQ ID NO: 305075 - DNA, 351 bp, Proteus mirabilis
gtgactactcaacaacagaaggagaatcaaagtaagtttgatataccacttcttagagctcctcatgaacaggagaggaatgagaaaagaattaatattcaagatgatccacaatataaaatgacgacattttcactagaaaatgatgaagacaatactaagccttccttagcagaagaagaaccgaagaataataaaaaaaaagatgatcatcttgacgtatctgcacaacaaaattcatcattacctacttccggtcccgatcatttagaaaataaaaaatccaacaaagattatgattttttatttttacaattatcttaccagcatgttatacattggcatagatga

SEQ ID NO: 305076 - DNA, 1632 bp, Proteus mirabilis
atgttatacattggcatagatgatttaaaagaactttttaaatctggcttcaatgagcttgataaaaccaaaggtgcttttgttgattactggatggaagtttataaccaaataaaagaaaagaatttcaaaaaagagtctgaagttaaaagttttttaaataattgcaatattcctgattcattaattcaacagttattattaggaaatattcactctaaagcggatatggaaaaagcccttgaagatgttttccctttcttaagctttcctagtgatttttctaagctttcattagatgaactagataatttatctaaaaaattggatggtttttttgatgattcttttaattacctaccaaatatttctttaagtgaagataaaatcaataaaattacttcacatactgatgaattaaaggcattgatcaacaaaaaagaaagtgaatcaataaaaaaacaattagcagaaataagaggtctatttaaagaactgactatttcacaaagttccttggagcttgaaattgcatctaactctttatccggtatgtcattactgacatttctgttatctaagacacgtgagttgacgttaaaggtcatgttacatcgttcggaaagtgaacagaaactttttaatgaaatgcaagaggtgactgaaaaatcacttaaagataaagttgaagagcaaaaatcattaatcaaaaaacaagaagaaattcagttttgggctggtattggtttaaaaatattaggcggattattaacgcttgttgcaggtgtttcttctatttttaccgctggctcttcaatggtattagtaggagtcgcaacaaccttatttgttgctgatactgggttaactattgctgatgaggtgtatcaatctattcataataaatcttttatggatgagattatgcaacccatatcagatgcggttatggaagctatcgataaggttagtgatttcttagtgagtttagttaatagttctttggatggactcaaagaattagggctagataaaaaaatcatcgaagagatgaaaaattcaatacaagacaaattgaaaatggcaactaaaatacttgtcacagtcgttttatttgttgccgctacggcattgagttttgttattgggcctgccatgaaaggtatttcagatgcggttaataaaatatcgaatcagcaaattagacaaatactaaaaaaagtgctcaatgatggacttgaagcggtattggggaaaatgatcaaagatatcattattaaagcgcttgaagaagcactggaaaaaattgataagcagttagctaaagagatttctaaaaaagcaagtattatgttgaatagaacggtggttgcttctaagttaaccaattcagcagcaacaaatactgttaatatttatggttctgttatcgcgtcaaaaataatccagtctattgccggtagtaaaaaattaactgcagttttagatattattcaaaaattaatggataagataatggaaacttatcatgagaatattgattctataacagatattttaaaaaacctcagcgataaatcttcagtaagtaataaattaaaatcagacatgataagaaatatatctatttaa

SEQ ID NO: 305077 - DNA, 537 bp, Proteus mirabilis; identical to SEQ ID NO: 190836

SEQ ID NO: 305078 - DNA, 159 bp, Proteus mirabilis
atgaagcaatatggtttttattttgactccactaaatgcactggctgtaaaacctgtcaagtcagttgcaaggacgaaaaagatttagatttaggccctaaattccgtcgtgtttatgaatatggcggtggtagctgggcaaaacaagacggtatctga

SEQ ID NO: 305079 - DNA, 1251 bp, Proteus mirabilis
atggcaaataatacaaatctttctgaaacgttatttaaacctcgtgctaaacatgcggaaacctcaacgttaatacagtacacacaccctaaatctaatattgattcgtactctgtacttaatgggatgagccagcaaaattggtatcgcacaattcaacgtctacagtggatctggcgaggtatttcccccatagagatcgaagaagtattaagtcgcattgctatttttgatgcgccacgcagtgatgataaatttattgatacagttgttggttatcgacgtggcaactggtcatttgaatggtctcatcaagcaatgatttggcaacaaaaagcgttacgagagacctcagaggaagcagccgctgattgttggttacgggcggcaaacctttatagcattgctgcttatccatttattaatggcgattttcttgctgatcaagctgtagtattggcgatgaaagcttttgaaaatgccatgaaattctcttcatttgaagtaaaaaaactgacatttaaattaacaggtaaaggaactaccagtggatttttacatctacctaaagggtgtaaagggccttacccaacagtcattttttgtggtggattagatagtttacaaagtgattatgttaacttttttaggcgctacttatcaccaaaaggtatcgcgatgttaaccgtagatatgccatctatcggttattctgttaagcagaaactcagcgaaaatacctgtcaattgcatggcgatattttacagcagttgggagatattccatggattgatcacactcgagtgggcgtaatgggatttcggtttggtgccaatattgcggtgcgtttagcctatctttatccaaaattgattaaaggtgttgtggcattagggccattaattcatgccttttttactcaagcggaattacagaagaaaatccccattatgtatcttgatgtactggcgagccgcttaggattattaaatatagatgaaaacaatctcagactatcgttaagtagttattcactgaaaaaccaagggttgattggtcgtcgtatgccagtgccgatgatgagtgtttattggaaaggggatgaaattagtcctaaagaggattcgcagctcattgctcgctcttctatggatggcgatatagtagaaataaaagaaaaaccactttataaagggcttgaacaggcattaaccaaaagcgcagattggatctatgctaaattaatataa

SEQ ID NO: 305080 - DNA, 705 bp, Proteus mirabilis; identical to SEQ ID NO: 8686

SEQ ID NO: 305081 - DNA, 252 bp, Proteus mirabilis
atgggaatgttttattttgaagcattagaggggcaatcaataggagaggattatcccattggatatgaaggcaaaaccaaaatgggtgattattttcgttttattgttcctaccgtttatgcaacaatagcagatattccagaagagttaaggaaatatattgtagtctctgatagtcttgattttactaaagatagattgcttgataataataaaattagcgattattttactcatatttattcagaataa

SEQ ID NO: 305082 - DNA, 819 bp, Proteus mirabilis
ttgaccagcttatcccttgactctcgttcacttaaatgggttaaacaaggtcgcggaaaggggtcaggaaaagactaccaaccctggttgaccgtcagagacctgccttctgctggacgatctcaccgcatctggggattccagactcaacgaacccaccatctgttgtcagacctagagctggcggcgttctttctgtttgattggaatccatctgtcactgatatccgggagcaataccctctccgattagaggataccattgagcttgcagcgcaagcgcgtatccgtcatcccgaagtacgaggacaaattcaagtcatgtccacggattttctagtggacactaataagcctgagcttcccagaatggctattcaggtaaaaacctcttcagatctttctaattctagaaccatcgaaaaactggagcttgaacggcgttattgggcgttaaaggaagttccatggtatttgctgacagaaaaacaaattcccaagaccgtcaccaaaaatattgcctggctgtatccagcgcaattggttctggatgggatcgaagatactctgaatatggcttccctttacttgggcttctttataaatcatccgactttactgatttctcaagtttcgatgatgctcgatcaagcctattcactctctccaggcgagtccctgcaaaagatacgttcgctgttagccttgagggttttcttattcgatatcagaaagccttggtcaacgctggctgtaggggaattacaagcatcttcagacattgattcattgaggaattattatgttgcgaatcaatga

SEQ ID NO: 305083 - DNA, 2076 bp, Proteus mirabilis
atgttgcgaatcaatgatgttgtggcattcgaagaggctcggtatcgaattcttgatgtctcagacattcgatatacatggattaatgttgattccgacaaagctttccctgaacgggtttccctggcagaagtggaagacttcattctttctgagacgttaaaaaaaattgatgacccctattcccatcttgccgctcagctcccggaacacggctcagtagcacagcaaattcgggacaagcgtatggccgttattgagcctttaatacaccaaccggatatctattatcgcagtggtcgaggcgcactggttcagcaggttgtgaatgaatctggaacagctaaaaaaacactatatgcttatcttcgccaatattggcagcgaggttgcataccgaacgcgcttttgccggactacgataaatcaggcgggcgaggaaaaaaacgcacagcttcaggaaaaaaattagggcgtccgagaagtatagcaccgggtaccggcgccattgtagatactggcgttgaacgcatgtttcgcattgtgcttgatcgccactatctgacggagaagaatcattctctaccctatgctcatcgacgcttcgaggacatgtttgaaacggctcatcccgatgtaccgaaagagaacttcccgacagttgctcaactacgttatttctacgagcgggaatatgtccggcctgaacgtatccggctgagagccaataaaattgaatatcaaaaggacatcagaccgttacaaggaacagccacaactggggttcacggtcctggtgcacggtacgagatcgacgcgactattgccgatatctatctgctttccgctgacagacaaaagattattggccgaccaactttgtacgtggttgtcgatgtctatagcagattgattgctggtttctatgtgggatttgaaaacccctcctatgtgacggctatgttggcactggtcaacgccatgatcgataaatctcagatatgtcagtctttcggttatgacatcgagccagaggattggccgtcgattggactgccggacgccattttggctgatcgcggtgagttgctgggccatcaaattgaatatctggagcaggcctttggtgttcggattgaaaatacaccaccttatcgtggggatgcgaagggtatcgttgagcggcattttcgcactattcaagcagacttcaagccgtttgcaccaggagtggttgctggaaccaccatcaaaaagcgcggcgggaaagattatcggttggatgcaacacttacattggacgaattcactaaaataattatcggctctatcctgcatcgcaaccagagttcggtattggtcaagtatgaccgcgatccggatatgccggatacactcgcacctgtaccaattaatatctggcaatggggtattcaaaatcgtagcggacggctacgtaacacatcggagtcggcgctgaagctggcattgttgcctcgtcaaaaagtaacgctttccgattacggtattcaatgcttcggtgccttttatacctgtagggagctgctggcgtctggctggctccatagaaccgggcaacagcgacctggcccctttatggcggcgtatgaccccgcggtaaccgacatcatttatgtcttcccagatgcaacaaaatcagattattgggagtgctcgctaacagaccgctcaagggaatttaggggccggtcgatgtgggagttatgggacagccagcagcaacaacgaaaatcaacagcagcagctaaattgaaagagagggaaagcaaaagatcgctggaaaatgtgattcaggaaaccatccaaaacgcggaaaagctacgtccttcctactttggtgaatcaaaaacagaaactttggttggcatcaatcaaaaccgacgggaagcccgtgagcaggaacgccagaaacgtcgagcggataacaaggctactgagccgaaacccaaagcagatgtcaggtatttgactgatcagcccgaagatggggctttcccagattttctggatgacctgtttggagataatgaatga

SEQ ID NO: 305084 - DNA, 1656 bp, Proteus mirabilis
atgacgctacccaaaggcatggtgcaggcaatttataatgataccgggataagtcagtaccaaggaaacccgctcattgaagctttgccgccgattctggaccggcgtcagctaaaggacgggttatcgggtcaaattacgtttcgcccaaccgacgtttatcttgatggccagacccgtattcatgtcatatctcaattacttgataattttttccagccgctatcccgtcacattgaactggagtcaaaattatcagtcatgcttcgacaagggtatgttggcagaaatctggcgacaggcgaactgaatgcccacatccagaatggttatgagcgtgtcatgcagggggatttggctgttttccggttcgagcatgtggaatccaccgctaagagtctggctttcatcggttgttctggttcaggcaagacaagctcattgaaccgtattctggcaacctatccccagttgatatatcacgaagcctacaacttcacacagatcgttttccttaaaattgactgcccgcatgacggttcgttgaaaagcctgtgtcataacttctttcgggaaattgacgcggtactcgccacgaattacgtacgtcgctacgtggaaaaacgacatagcgtagaaaccttgattgcggtaatggcacacattgccaacacccacgcaattggactgttagtgattgatgaaatccagcatctgagtgttaagaattcaggtggtgccgagcgcatgctcaatttctttgtcacactggttaatgaaatttcggtcccggttgtcatggtggggacaccaaaggccagatctgtctttgaactggatctgcggtccgctcgtcgtggtgcaggttttggttcaatactatgggagcctttaagcaaaccatcaggcgagcaggaggtatcccgtaccgagtggggagccttcactggccgtttgtggaagtatcaatggctgactaaagcatcccctgaagtgaccgatgagattagatatacttggtacgagctttcacaaggcattatggatgtcgtcatcaagttgtttgttttgtcacagatccgggctgttgtcaccggcattgagcgcattacccccgccttgatgcgaaaggtctaccaggatgagctaaaacctatccaccccatgattgatgcgttacggtcgggtgatgtgacaaaaattgcgcgttactcagatctgactatccccgacgtggatagaaaaatactggaactgagccacctgctgcgttccaaccaggaaagcattgataccgtagtcaagtatgggggtaatgaacaagctgttcgtttgcataatatgctggttgatatggggtatgcctctgagctgcttgaacctctgatcaacagagcttttgaggatcatccaggccttgtgatgaaggatcttatgccgctgatcctctcttggtatcagagtgcagagatagaaaagccagcgtcatccacccccaaacttaaggcgatgaagaaagctgactggcataccctggattcagaagacttgcgctttctattctctcagtccgccaatgaggaaatcttccaggaatcacttggctgcaacggcttgctttttgatgcccaagactgggttaattcctttgggtga

SEQ ID NO: 305085 - DNA, 1506 bp, Proteus mirabilis
atgtatagcgccgtggcaagagcgggtgtccggcaagggctgaccagcccaaagcaactgttggatgaggtcttcgaatctcgcagtattatcgcaacgatagacttacctaaccatattgcaacgctctctcgctggcttccagaggagttcacacccgaaaaattgatctacagccatactttatttccgctttacgcaccttttgttccagaggctcgacggcttcagtgcatgaattggttgtaccagggttctcagggtgccgctcatctggcattaggagtttccgcctctcgcattaaatccccgcgttttgtcaggtactgccccggttgcatagccgctcaacgtgaacaattttgtgagtatttttggcgacgagaatggcaggttgccggggtggaatcgtgccccgaacacggtgtgttgatggatacgcggattgctcgccccctgattgaacgtcatcgctttatcgctgctgcacctgaacactgtcatgagactaaacagcaaaagggaatgggagtatctgattggataaccactcaggtgcgatggttgttagttcggccggcgcaagcgtcccccagttttgagcaatggacagagtattatcgcagccttgcttatcgactgggtttttatcggggaaaagcccaaattgaccactcggtgataaaaaataaggtattaaaggtgtggcctgccgcttggttaatccgaaaccgtctgatgcctcccagttccgatattgatgactcagactggctgaaagcaatcttccgcaagcatcgaaaaagtttcaattatcttcagcatattgttgttcatcaggcattgctggataaccactggcagatagacgatgtgcttgatgaagttagccggaaaccaacacgtaaaacgccacaacaagttaaggttgtgatgcaacagtcgagcagtcaaacgccagatcaggaagcttggctcgaattgttgtcatctcgtcaaccccttcaagccagaaaaaaatcaccggatttgtatgccaggctctatcggaatcatcgcgactggctgttggacgttaaccatcgttatgcacaagacaaggcaaaccataacgtaccacgtattgattgggacaaacgggatcgggaatatctgcaagcacttcgacaactggctacgtttttgaatgcaaatatacaagggcccaggcgctcaagaacctactaccttaagttgcttggcaatctctcaacccttgagaaaaacctccatcaaatgccatgtacatcggcatttttggtggctaattcggaaagcgttccccagtaccagatccgacgcttgcaaaatgcctatgacgatttacgggttctctttgagtcgccgccaaggtggcgattgttgcgaaacgccggattgagtgaagaacgaatgatggagcctgccaggcagtatttggaaaatttagtggatacggaacatgaagttcaaaggtatagaaaataa

SEQ ID NO: 305086 - DNA, 1596 bp, Proteus mirabilis
atgaagttcaaaggtatagaaaataacagtgttatccgggagattggctctttatttcgccgccatgatggccctgattggcacattaatgtcaaactggcaccaggccaaaagaaacaatattttggtgtctctcaaattccggtcttagcaagacgcagggtggtcaatgcaagcgaacaaccacgcccagccggattccagtcccgtattgtgatagaaaatactcgtcattggcgtactgaacctatcgaagcctgtccaattccggtggtaaatcggcaggatgatggacagcaatggtgctttaattttgaatttggtggaacgcagtattatcttcctcagctcgaattagcgcgagtgctgttcttccaccacgcctatataacgcgtttagctttgatccccaacggactctctcaggagtttgatgtccagcgcttagataagttgagcaaggcgctcgtcaatattctgccaacctgcactctgccgctgtacgtcagaggtgactatgcattaagacggttgttagcctggatattgctggatgaggaagctaagctgtcttttgaaagtgttgcccgctaccaacttcaaaacggttatgacacagacaagtaccgtctgtggcgttttcaatttgaaccaccaccgctcgcaggtgttgagctgacacttcgtggtcattacgatcaggaacgaaaagcgttttttgtgtatgagatttatggtgtttctaatctaacctgtgattgtcccgcctatgtcgattttgtcgatccccgattcgctgagaggcgagcaggccaggggtatgctgttcgacccggcccgcaatccggcccggaattggaaattgatgacgaacaagagccagatactgatcaaacagaaatccggattgaaacgccagccgtcgcatttgagtttgctaatcccattcggacaactcgcataggtaagggaaaaggacagactggctgtttgggccaggagggcgactcgtcagactctccagaaaatactggctttgaagtaagtacggatgaggccagtactcacggtacattaccttcagcagattatgatggcatggaagacaagagcgacgacgcacatctctatgcggataaatttgaagcctttaacgctatggtgctgcaattggttggcatgtcgggttaccgccacatccacagggaaatccgaaagctccccactattgatggttactccaaacacttgcttgtagatggtaacccacgttgtctggcttttcatcgaattgaaaaggatggtcaagagtacgcattgatagaagtggatacttccgataataagaacagactatcgacactcctgttgaagccgcatgtccaatttgattgggaacgcactcttcgagagttggaaatcaggttattaaaaaaatcactggcatggcctacaacgctaatcaaaaaactctttagtgatagatataagcgtgtgcctcatccaaaatcatcatctgaaaataaaggattccttgaaaatgagtcaattaaacattgggctgagcgagtttataaggagattagactatcgtaa

SEQ ID NO: 305087 - DNA, 189 bp, Proteus mirabilis
atgagtcaattaaacattgggctgagcgagtttataaggagattagactatcgtaacataactgtttttaacaatatagcaatcgagaagcttattatcctggactatgatagctactcaaggcaaagctctttacttgagctgagcgaaatcccatccgttgctctgtttggcttggcatttaattga

SEQ ID NO: 305088 - DNA, 1137 bp, Proteus mirabilis
atgatgtttcataaaaatgagagtgctttgaccgccataattcagttgagtaagcttgaacttagtagtgattatttaaacaaaaaatttaacgatcatcggttatatacagctgcgattttattgatactcattcctcttgggcttgcagagggtatttttgactacaaatcgcatcctgaaataaagagcgagttatttcagctgagacttcactttcttctattagtgatacctgcctggattattttaaaatcaagcagtttgaaattagctacggcaacaattttaataacgctggttttttctgcgtatctcggcataaaaataatagagaacactggcgaagacttagtgacaacagtgagtaatgttgcactctatcccttttttatcttttttgttctcatcggcttttcaatctacattcagattttttttcttactgttgcattttcctttgttgttctatccgaaaaccatggcgtactggatgagttgatacaaaacgtttattttcagatctcagtgcaatcgagcgtttcagcattatttattatgctcgttttttcatggagttattatcatcgttacaaccttcaactcgccttagagaaatcctctcagacagatccattaacaggtgttgcaaaccggcgttactttgatagcaaacttaaatcagaagcaagccgaagtgctcgctcaagcagtgattgcgcccttatcttacttgatatagaccattttaaacgcatcaatgatactttcggccatcctacaggagatcgcgttatttgtgcgctcgcggacttatgcgtaaaccaatcaagagaaattgacctagttgccaggcttggtggagaagaattcgccgttattttaccggacaccaacataactgatgcgaaaaatcttgcagagcggattcgaaagcacgtcgaggatatatctgtgactggtgatgccggagaaattgtaaagtggactatcagcttgggggtatcatccttgccagaaagtagaagcagtaggtatacaactgaaattgttatggagatgtttatcaagaaagcagataacgcactttatgaggcaaagagaaaagggcggaatcaaactgtattgtcgcaataa

SEQ ID NO: 305089 - DNA, 477 bp, Proteus mirabilis
atgaatgatttattactctatatcagtgtctttgtgggggcggcgattccggtgctcgaagtttggattgccgtcccattgggtgttattgctgggttaccatggtttcccgctgcacttgcaggctttttcggaaatttgctttcgctgttacccataatttatgccagtgaaaaagttaagttatttatgcagcgctggcgaaataaacccgaaactgagcaagctgcccccgacataacggatcgtaaacatgtaattatggaaaaatttggtgttccaggcctagcttttctggggccatttttgattggtatccatgccgctggggcattcgcaattgccatgggggctagtagaaaggttgttatgttttggtttaccttatcactgctggtctgttcgttattatttggatttttggcatcattggggatcactcaaataggagacgaaaaacagcttccctttatgtga

SEQ ID NO: 305090 - DNA, 3042 bp, Proteus mirabilis
atgtccattacaggcttctcacttgctaacagccgtttagtgctctttctgttttttatgcttacgagcatagggttggcgttatacccgagttacccatctcaggaagagcccacactaccgataaatgtcactgtgattaccgcctatcaccctggcttagatatttatcaaacggaatcgctattggcgcgcccggttgaacgtgctttgcgtgaactggaagaaactaaaaatatcacgacgtctattcgtgccggagagatccatatctctttggagattaaggacggaacaccagactacgcgcaatcatggctcagagtcagagcgaaaatgcaggatgtgcaaaactcacttcccgatggtgtgtctgggccttttgttaacgatagttatgacgccgttgccgtgatgactgttgcaattagtgcccccaatcacacgtttgagcaacttagaaataaagccagtgagctgcgggattttctttacgatatccctggtatggataaagtcaccttgcatggtgtcaccgaggagcaagtgactatcaatctaaagccttttgctgcgtccaaattttcgatcaagcctaatgatatctacctgcaattgcataaaaacaattcgcttgatgatattgccagagtgaattttagcgaccaggagagtcgtatttatgtcagaggcggctataactctatcgaggatattaaagcgatccctattgtgctgcaagacggcagccagttaccacttgacacactagctgatgtaataaggtcaacggcacaaccgcttaataccgccgcctatctaaatggggggcaggctattgttgttgcaggttatatgacaccaggcgttaacatggtcgatttcaatgatcgccttcgtacacaaatagcgcagtgggaatacgatttacccgctggctttcaattgaaaatcattaccgaccagggtgaagtcgtaagccgagtgatatcatcaatgatatcaacgctgttacaaaccattttggtggttacagccgtaacagtcattgcgctaggaatacgtgcgggttcactggtgggacttgctgtccccattacaggcattatgacgttagtcgttttacgtgtgcttggtgttgagcttaatgaggttagtatcgcctcgtttatcattgcacttgggatcttggttgataacccgatggtgattgttgaggatatctcaaaacgtattaatcaaggtgagtctgggaaatcagcagccttacacgccggaaagacactgggtacgccaatgctgattgctagcctaacggttatcctggcattcgccccacctatgttcaccgataatatcactgcgatttatatgcagacgctaaccatcgtcattggcgtaatgctgatcatttcctggtttgttgccattatgctggtgccgattttggcgcagtggtctatcaggaaagggaaaaacacatctgagcaaagtaagctctcgcgcttaatggtgatcatgtctcgcttttgggacaaagtcatcagctggccaaaagcatttttagcaggtgcgacagcaagcctgatcctatcgttatttttatctgcgactattccagaggcattctttccaccgtctgagcgctcacaaatgcaaatatcccttgagctcccagcgggcacgcctgcaaaccgcacagctgaagttgcacaagaaatgacgcgatggcttgcagaggaacaacgttttccgcagattacaggcgctactgcgtatgttagtgaaggaggaccacgctttatcctgggcctgaatccgccagatccggctccgcataccgcttactttgttgtcaatcttagtaaagaaaccaatgttgcggcctttgtaagccaacttagggctgagatgccccccgttttcccctatgccaagctcgggatcaacccgtttttcatgggctccacgcctccaggcgaagcagccattagaatcatcggcaacaaccatagtgatttattacaggctgctgcaacgattcaagaggcgcttagcaacgtacatgggacgattaacatcaaacaggactgggaacaacctatccccagcttagtggtaaatgtagaccaagccgcagcaagctatgccggagtcacacgagaagacattttttccgctcttaggaaaaatactctcggagagagtgcatctgagcttcgggaaggagagttcttgctgcctattatgcaggcaatgccaacagataacgcgacactgtcgcaattaaataatattcagattttctcacaatcttctgataaaaccgtttatttatcagaaattgctcgcgttgatacagagtttcatccgtcgattgtgaaaaagagaaacttacggccaaccctgacagtgacagcgcttaatccggcgatgacctctaaagagttggtttccaacatcgcagaaacgttggagcaagttcgcaatactgacaaagtgcaaatcgagtttggcggagaaattgaagagagtgaggtaaccgcagaagctatttttgctttcctaccactttgtgtacttatgatgatcattttgttcatccacaagtacaactcgtttcgtaaggtggcgatcattgtactaagtatccccttctgtgccattgggttacttttagcactgatcattttcaggctgcctttcgattttatggcgaatttagcgatattcgccctaataggcattattgtgtcgaatgctatgctaattatcgaacaaattgatatcgagaaagacgcaggaaaatctgagcttgaatcactcaaatcggctttaatgcaacggtttcgccctattatgttgacacaaataaccactattttagggctgcttccgttgcttatcgccaatgatccgctttggcgctcgtttaatgttgtgataatgggcggccttatttcaggcaccattgcatcctttatcgttgtgccaagcttatatgttttgttcttcacaaaaaaagcagcaagggcgatctaa

SEQ ID NO: 305091 - DNA, 1131 bp, Proteus mirabilis
atgagttcgccactttatatactcgaacgatcagttatgttattaaggaaattcagtaagtgcgcattggttagcctgcttgtcttattccaaggttgcagcagtgaaagtatacctgagcccactaagcagaacattcgagtggtaacactcaatgaagtaggcgcaaacgcgcattaccaagaatctcgcttttctggaataacacaaacagagagcagagcgcagctctcatttggcgttcctggcaaagtgcaaaaggtgctggtagatattggtagccggttaaaagcgggcgatatcatggcgacactggatcttgagccttatcaactcgcggtcgataacgcccgttctgaagcctcaaaagcgcagatcgcgcttgaagagcaccaagcaaactttgaacggcttaatcgcctcaaatcaaataatgcagtttcacagcaagatctagacgctgctagaacgctttttttaaccgctcaagcctctgtccgtgaagcacaaagtagagtcagactcacagaaagagaactctctcaagcagtaataaaagccccttatgatggtgttgtctctaccaggcaagttgaaccctttgaagaggtcgctcagaatcaggtcatttttactttcgacagttcagcccaacttattgttgaatcatcaatccctgtatctttggcaaatgctctacgttctacaaatgaacaggttatcagtattagtcatcaagggaagtcttttgaggctgaggtgtcccacatcgcagagcgagcaagtaatggtttaagcttgccggttaaactgcgtatacaagtgccagagggcaattttttaccgccaggtatcgtggtcgcagtgaactatcgactgaagaatagcgaaaacgttctcttggttcctcacggcgcagtttatgttgaagcaacaagtaacagtgctttcttatactcttttaacggtgagtccaataccgttagtaaaaaacccgtacaaattatcgatattcaacctacaggctacattattaattctgagttgaaactcggagagagatacgtagcagccggagcggcctttatcagtgacgggcaacaggttcgtgttttaggggagacgcgttaa

SEQ ID NO: 305092 - DNA, 591 bp, Proteus mirabilis
atgtctaatttaggtcgtccagtgaattatgcagctcgagaggctaaaatcgaggctattcttgatggtgctgtgcaatgctttgttaaaaaaggctttcatggcgctggcatggcggagatttctcgtgttgcaaaagtcagccaggcaagcctctatcaatacttttcctcaaaaaatgaactcattctggaaattgccaaacgctattcttctagagatctcgatgccttgagaagaattgaaagcgctagtgattttatggatgctttggagcaagaggcctatctcacaggcgataaaacaggaactattatgtatctggagatcctcgcagagtcatccagaaacccagaaattaaggaagcggtacaggattcaggtcaagagctctttgacacctgttgtgccatgattaagaaattacaggataaagatgaggcaagttatttgctcacacccgagcagataacccactatatctttgcctacattgatggtttgtcctgccagatagctactgcggatattgagtattcgcgtgagcgtttacgtcagcttgttcagacccttcttacaccaaaaaagtaa

SEQ ID NO: 305093 - DNA, 1248 bp, Proteus mirabilis
atgaagaatcactacgggcttaaaacatttgttatggacagtggcgagcgctactgcatagtgatgaatcgctcttctggccttcccgtgtattaccctactctttatttaacaacacaactccgcaataggggggatgctttttcaacgatgtcagcggcggctagcaacctaattgttttgctccgctttttagatattcgtggaattgaccttgaacagcgttttttgaccaaaaatttcttaaaaccacatgagctggacgacctgcgagattttgctcagcgtaagcaagcaaagaagtcattaaatacatcctctaccctttggcttgatgagccggagtccgatattgttgataacggaacacagcattctaggctgacaacgtgtgccaactatttacactggtatgcgatgcatattttaaagacggcagaactggaagtggtccaacagatcgacgctatggcgcaacagataaagaagcgcaggccttctaaacagcgcagaagcagtgagctacaagataggtcactgagtgatattcaattggattcactatttgaagttatccttcttggatccaaattaaatcctttttcaattgaagtgcagcgccgaaatcggctgatgatcttgcttctgttttatcttggtattcggggtggtgaattattgaatatcagaatacaggatgttgattttagtactaacaggatccgtattgttaggcgagcagatgagcgggctgactctagaaccaatgagcctaatgccaaaaccagagaacgactcttaccgttgtctgaatctttagttctagaactgcatagttatatcattcatgatcggcgtaaaatccgaaatgctaagaaaaatgattacttgtttgtgacatacaagtctggaccaactgtgggtaatcctatttcgaaggcgggatatcacaaaattttttccgtggtcaggactgtctcgccgcaattgtatgcagcgaccgggcattcgctccgtcatacctggaatcgcaagttttcagaaagaatggatgcaatggatgagaaagtcagcgaggaacgccaagaacagcttcgttcgtatttaatgggctggagggatggctcaggaaccgcagctatttacaacaaacgtttcattcggcaaaagggttttgaggccgctctggtattgcaagaaggcagcggtacccgtttaccagaggacatgaagaatgatgacgaatag

SEQ ID NO: 305094 - DNA, 1563 bp, Proteus mirabilis
atgatgacgaatagagctgtacctggagcatcatcagatcaaatccgtgccaaggccaatggctacttctttcagttgtatgatccatcgtgggttttggataaaaatacaactgttactcttgcagatattcaccaacacttgtcaggcgaggtacttgatggctgcctgcgtacactagcattttatgcttctagtctttccgcttctcatactatgaacattactatgcggtttcagcacatgctgcgtgagactgaagcggaagcaatcactgatacgacattggttaattatcgttcaatgttgacgcctgcaacagaatggtatctggcaactatacgtggctttcttcgaacttggcaccagctgggttatcccggtatcagcaaagatgtgatccgtttgctgtatggctggaggctaaagggtaatcgtaagggggatgcggttaagcgtcaggatcctcatgaagggctactgacagataatgagctgacagcgtttaacgagggggctgttcgggcttatgaaaagagcttaattaccatagctgagttggcgatggcacttagcatcagtcatacaggacgacggcccattcagatctcgatgcttcatgcggtcgatgtgctttgcggtgaaaatgaaaaaggtgagccattctatgttttgaatgtgccgcgagccaagcagtgcaacagctcttttcgtaaaaatttcaaaccttttgcgatatcactggaactatgggcaattctgagcgctcaggcaaggaatgcgatttcactgattgagaatcatctaaggtttgaattgcaggaaggtgaccgacagcaaatccctctgtttccagatcttgatgtgttagatgtcgtccaatctctttatgaattccgccagctacttgctactgacaaactccacattcccgcagcaaagataaccaacacacttcagtacatcatagaaaaatcggatatccggtcggaacgcaccggtgagctattacatatcaatgctcgtcgttttcgctataccacgggcacaagagcagctagggaaggctttggcgagttggttattgcggaactgcttgaccatacggatacccaaaacgccggagtttacatcaaaaacattcccgagcatgtgaaaaagcttgatgaggcggttggtttccaattggcaccatacgcccaggcttttgtcggggtacttgtcgattccgagaggggcgcgtatcgaggtaacgaccctgccagtcgtattaggaccgatatgggccatagtgttggtaattgtggggggtatggcttttgtggtgccaatgttcctattccttgctacacctgcatgcatttccagccttggctggatggcccccatgacgatgtctatcaggggctgctcaacgaacgtgaacgggtgaaagagataaccggcgacatccagattgctgccgtacttgatcgcagcattatcgcggtggcagatgtgatcatgcgttgtgcaaaacgtcgtgaagagcttcgtccacagggagcaatcgccaatggctga

SEQ ID NO: 305095 - DNA, 2034 bp, Proteus mirabilis
atggctgagattttccagtttaagccaaaggctacgctgacagcagctgaaaaccttcgagtattcatatccaagtgccgagatcaattgactgtattcggctccgatttaaattggggggcacctgtttggccaaacataattgtatttgccaagttaggcatgactacgcgaaaacctatacagggagaggtacaagaccctgctttcattgattttaccaaagcttatttccgttaccagcaggggcatcatcccacgggagcaaagaatgaaagtaaggctttccgtacagtcgaggcggctttacttcaagtcaatgggaatgcaaatattaatggcctttcgatttcagtactggatgaagcagccgagttggcaaggcagcactactccgatggctcagcatatcattgtggtcgagagattgagcggctggctaagtttgtcgtcgaaaaccagcttgtatcatgtgctgtgcaaaattgggtcaaccccattaagcgtgcagacgacaagaacaaaacaggtagagaggcgaataaaaatagggaagagaaactaccgagtgatatcgctctcaatgcgcttgcggaaatttttgccaatgatccaatagacggaagagacatatttacaacatcggtatttgccatgctgatgtcagctccttcacgcatttctgaggtgttagcacttcctgcggattgtgaggtgttcgaaacggacctcgatggtatagaacgctatggttggcgtttctttgccggtaaaggctatgagggagacatcaaatggatacccacagtaatggtcagcgtcgctaaaacagccgtagccagaattaaaatgttaactgagaatgctcggcaactagctaagtggattgagtcacatccgaatagattttaccgccatgctaactgccctgatgtcgccgatgatgagcctttgacgatagagcagtcatgtatggctctcggtcttgtctctgaatccaaaaaacaatgccgttcttctctttataatcgagggttggcccataaagatggtgttcatacactaaaaagcttgtgggagcatacgttggcgcgtttgcctgatgacttcccgtggtttgataaagacaagggaattaagtacagcaatgccttgtttgcgctgaatgcaaatcagttccacggtaacagaggatgcctaccagtagaattgcataagccaaccaataatttcttcaacagcgatctaactcctcgtcttgctttgaaaggaaaacacaccagtatctttgatcgccattgttaccatgctgtaaacggagaaccggtaaaactgacctcccaccaggctcgacatctactcaataccattgcccagcgcggcggtctgtcaaacctggaaattgccaagtggtcggggcgggcagatgtgaaacaaaatcgaacttacaaccacatgactgaatatgagctggttggcatggctgaacgcctcgattcctcaaaagctctatttgggccggcaggcgaggtggcgaagcactttcctatgactatgctggagttcagtaccttagagcatgccgcagtccatgtgacggagtatggctactgcgtacatgattacaccatcggtccttgcgagaagttccgagattgcatcaattgtaccgagcaggtttgtatcaaaggcgaggatacagaaatattggatcgaattaagaaacgtttggtgacgttagaacaaatgctttgtattgctgatgcagcggtagaaagctgcgagatgggggctgatcgctggtatcaataccacaagaaaactgtcacccggcttcgtgagctagtcgctattttagagaatccaggcattgaaaatggtgcccagattaagctccggggcaatgatttcagccagcttcgccgtgttgtcgcaaagacgtctattgaggccatcgagcaaaaaggcaaagaaagtgaagaagctgtgatgttagatgatttgacaactttgttaggaggtggccttggctaa

SEQ ID NO: 305096 - DNA, 261 bp, Proteus mirabilis
gtgactgcctatcaaacaaagaaaggggcgcttaaaggccgtggccccaaaaatccgcgtccagctagtttgaacattgcagccgctaggattgtgaatcttgaaagcgaaatcgaagagcttaaggaagagaaccggaggtacaaacaacagtttgtgatctggcaatacaatgcatacaaacatggaatgacagaacatcaacttaatacgcagctgacaaaaattgaccgtgagcgctctgatggagaaagaagatag

SEQ ID NO: 305097 - DNA, 2793 bp, Proteus mirabilis
atggtcaaaccaaactgggataattttaaagctaaatttaatgagaatcctcaagataattttgagtggttttgctacttgttgttctgtcaagagttcaaaatacccgcaggtatatttagatataagaatcaatctggtatcgaaactaatccgataaccaaatataatgaacttatcggttggcaagctaaattctatgacacaaaattgtcggataacaaagctgatcttatagaaatgattgggaaaagcaaaaaggcttatccaggattaagtaagatcattttctataccaatcaagagtgggggcaggggagaaagtcccatgaacctgaagacgagaagagtgctgataattatctggaaaatatcggaaatagtaacgatccaaaaataaaaattgaagttgatcagaaagcatatgagtcgggtatcgaaatcgtatggagagttgctagtttttttgaatcaccgtttgtaatagttgagaatgaaaagattgcaaaacattttttctccctcaatgaaagcatctttgatttattagaagaaaagcgcaagcacacagaaaatgttttatatgaaattcaaaccaatatagatttcaaagacagaagtattgaaattgacagacgacattgcatagaaattctatatgagaatctagttcagaaaaaaattgtcatcgtcagcggagagggtggagttggaaaaacagcagttatcaaaaaaatttatgaagcagaaaaacaatgcactcctttctatgtctttaaggctagcgaatttaaaaaggacagcattaatgagctattcggtgcgcatggcttagacgatttctctaatgctcatcaagacgaattacgtaaagtcatagtcgtagattctgctgaaaagcttttagaactgaccaatatcgatccttttaaagaattcctaactgttttaataaaggataaatggcagattgttttcacaacccgtaacaactacttgtcagatctgaactatgctttcatagatatttataagataactcctgagaacttagtaataaagaaccttgaacgcagcgagctaatagagttatctgataataatggatttagccttcctcaagatgttcgattattagagctaatcaaaaatccattttatctaagtgaatatctgaggttctataccgatgaaagtatcgattatgtgagcttcaaagaaaagctttggaataagattattgttaaaaataaaccttctcgagagcagtgtttcttagcgactgcttttcagcgggctagcgagggccaattttttgtcttcccggcatgtgatacaaaaattttagatgcgttagttaaagacggagttatcggctatgaagctgctggttacttcattacacatgatatatacgaggaatgggcattagaaaagaaaatttccgtcgattatatccgtaaagcgaacaataatgagttcttcgaaaaaataggagaatcacttcctgttcgccgtagtttccggaattggatatctgaacgattgcttttagatgaccagacattaaagccttttatcgccgaaatagtctgtggggaaggaatatcaaaattttggaaagatgagttatggatagctgtccttctttccgacaactcagatatgttttttaatttctttaaacgatatttacttggtaatgaccagaatcttttaaaaagactaactttcttacttaggcttgcttgcaaggatgttgattacgatctcctgagacagttaggggttagtaattctgatctgctttccattaaatatgttcttaccaagccaaagggaactggttggcatagtgtgatcaaattaatccatgaaaatttagatgaaatcggcgtcagaaatattaattttatacttccggtgattcaagagtggaatcaaaagaacaaagtgggtgaaacgactcgattatctagtttgatagccctaaaatattatcaatggactgtagaggaggatgtctatttatccggaaggggtaatgagaaaaatattttgcatgcgattcttcatggggcggccatgattaaacctgaaatagaagaggttttagttaaggttcttaaaaataggtggaacgagcacggtaccccatatttcgatcttatgactttaatccttacagacttagattcacatccggtttgggcatctctcccggaatatgttctacaattggcagatctgttctggtatcggccacttaaagaaaaaggcgaacgttatcaccgtatggatattgaagatgagttcggtctatttaggtctcatcatgactattatccagaaagtccatatcagactcctatatattggttgctacaattacagttcaaaaaaacaatagatttcattcttgattttacgaacaagacaacggtatgttttgcacactcccgctttgctaaaaacgaagttgaagaagttgaagtttttatcgaagacgggaagttaataaagcaatatatatgcaatcgtctatggtgttcatatcgaggcacacaggtctctgcctacttactctcatcaattcatatggctttggagaagtttttccttgagaaatttaaaaatgcagactcaaaagtactggaaagttggcttctctatttgctgagaaattccaagtcagcttctatctccgcggtagttacgagtattgtacttgcatttcctgagaagtcattcaatgtagctaaagtgctattccaaacaaaggctttcttctga

SEQ ID NO: 305098 - DNA, 1107 bp, Proteus mirabilis
atgttactaacagagcaacttcaaaaaattattgaaagattaccggatgaaccaaaaataaaatttaatgagcttgaaaaaataatagaaaaagcagatcttgtagggaaatcatggtctggttcgtggttaggctatcaatctagagtctattacgtaaatttttcaatgcctcctgccggagcaatattcagtagccattacggatttgaacaaatgttttcatctggaactagaggtgattggagacaatataattttgatgatgtaattaactatatatatcaaatatctggtgatgtagatatcaataaatataaaattcaatttgatgaatatgaagagttatttgatgaatctagaaataatatattatctttaatttatgccaataaggcaaaactaccaagtgatgacttatttcttcaaaagataatagaaaaaatagagaaatttaaaatatatactgagcgtgattttgtggatgttcatagaccgagaggtaaacttctgtcaacagatatggatgctatttctgaaggaataagaacgccaccacatatagcaatgatagctaaaatggcttgtctaagagaatcttactcacgctgtattgacctgaaaaaagaatcaataaaattatttagccatatcagcaacctacacgaaaaagagactaaggcatctagagttggaactaatatatttttgggtcatggacgctcacatttatggcgtgaactcaaagattttataaaagacaagttgcatcttccttatgatgaatttaatcgagtccctattgctggaactacaaatatagcaagattagctcaaatgttggatcatgctagttttgcatttttaataatgacagctgaagatgaattacaagatggtaacatgcaagccagaatgaatgttatccatgaagttggtttatttcaaggtcgtttaggttttgaaaaagcaattattctattagaagaaggatgtcaagaatttagcaacatcaatggattaggtcaaataaggtttcccaagggaaatatatccgctatatttgaaaatatacgagaggtattagagagagaagaattaatatga

SEQ ID NO: 305099 - DNA, 315 bp, Proteus mirabilis
atgagtaaaatagtaattagcgccgacacactccctcctgaattaaaattaattgatttgcatggttttgttcaatacacacataaggtagagatatcaaataaaggtttaatccgtagttttaccgaacgaaagaaaaatgaaagtcaagaagctttagatgcttttattgatagtactggaataaatggaaatatgatttatggtacgaaaatcagtaccacaacggcacaatttaaagaagcaacatatttatatatgacatactgtggaacacttgtaacggttgagcgaatcgatcaagttcccatttga

SEQ ID NO: 305100 - DNA, 1110 bp, Proteus mirabilis
atgaattcagaaagcccaattaagcatgtccgctgggcaatcatgtgttcggtaatcggatttgcattaacaggctgtgccgacacgccttatcgtcctgcaccgataacctctgtcaatgatagttcgtcaaatcgtactgtttctacatcacctgttacaactaacagtaatgcaggagtggcaacacctattgaaagaggttcaactccgttacaaacaacgcctcctccttctattagagtgaataacacaaccgcgcagcctcaaagccagcctcgtacgcaaaatgttacccctcaaaatgtcaatacggatggtagcggacgcattgtgtataaccgtaattatgacaatatccctaaagggaattacagcggtaacacttatacggttaaacgtggcgatacaatgttttatattgcgtggatcacggatagtgatgtaaaagatttggcctcaatgaacaatattccagagccatatagcttaaatgttggacaagtacttaagattggtaaccgtcaagttaataccggtaccaataccaatgtaaatacttcagtaattaataaaccaagtagtgaaggcgttcagacggcacaaactaagccgtcaaataataatagctcaatggggccgttgatcacgaaaccaacaacaacgacaccgccaaagacaacgacttcgacaccaacaacttcggcaacaaccagtaataacacaacggcaacctctaaacctgcagccgcaacaggtaaatgggtatggccagcacaaggtaaaattattgagagctactcaaatgcacctggtggtaataaaggtattgatattagtggcactcgaggctcccccattgtggcaacagccgcaggtaaagtggtttatgcagggagcgcattacgaggttatggtaatttagttatcattaaacataatgatgaatatctcagtgcttatgctcataacgatacaatcttggtacgtgaacagcaaaatgtaaatgcaggacagcaaattgcgaccatgggaagtactggtactagttctgttcgattacactttgagatccgttataaagaaaaatcacttaaaagagctaaataa

SEQ ID NO: 305101 - DNA, 468 bp, Proteus mirabilis
atggcaggaagacgcccgaaaccgacccacttgaaggtggtcaccggtaatccgggaaaacgaaaacttaacgataaagaaccccaacctaaacgtgaaataccaagcccacctgaacatttaactgattgggggaaaatggcgtgggctaaattaaccttattgctcgatggtatgggtgttttaaccgtggccgacacactggcattagaacggctgtgtgatatttatgccgatattcttcagttgcgagacaccattgctattgaaggtcggacatatacaacaaaaacccaattaggggattttttaattaaagcgaatcccgcagtagccatgctggctgatgcggatcgacgtttcaaaagttatttagtcgagtttggtttaacaccagcatctcgctcaaaggtgaaagtagatggtggagaagaagaggaagacccactcaaccaatacttcggttga

SEQ ID NO: 305102 - DNA, 1269 bp, Proteus mirabilis; identical to SEQ ID NO: 302788

SEQ ID NO: 305103 - DNA, 1719 bp, Proteus mirabilis
atgacagctgaagacttagtcgctcaaacgatcttacaaggctttgatgcacaatatgggcgttttcttgagataacgtcaggtgctcaatatcgttttgagcaagcagattggcatggtattcaattggcgatgaaagagcgcatccgcttatacgataatcatgttggattagttgtggaacaacttagatgtatccgacatgatattgataaagaaagtgttttcttacaaaaagtcaaagagcgatacacacaattattacctaactatccccgttttgaaattgctgaaagtttttttaattcagtctattgtcgtctatttcatcatcgagagcttaataaaaaaaacttattcgttttttcatcacaacctgcgtatcgttttgcgcaagcccctcgccctttatcaagaacgtttgttatacaaagtgatttacccgcattattgcaagatattttatcgcgcctacctttgcgtttaccgtggcaaaataaatcgcgagatattcaatttatttgccaaacgctctatacgcaatttagccatgaggaattacaaaatgcggtatttcacattgctaatgagctattttaccgtaataaagcggcatggatgattggtaagatagtgataaataatcaattcattcccctgttattacctattcataatattgaacagcacttagttattgatacctgtttaacgacaacagatgaagccagtattgtatttggctttgctcgttcttattttatggtttatgcgccatttcccgcggcattagtaacatggttacgggatattctccctgaaaagtctattgctgagctctatatgtcgattggttgtcagaaacatggcaaaactgaatattaccgtgaataccttgcttttatgaatttttcatcggaacagtttattgaagctccgggggtaaaaggaatggtgatgctcgttttcacactgcctacttacgatagagtgtttaaagtgatcaaagataggtttgcgccacaaaaaacaatgaccgcagagcgtgtcaaagagtgctatcgcttggtgaaagaacatgatcgtgttgggcgaatggcggatacgcaagagtttgagaactttgttattgataaaaagcggatcagtaacgacttaatggcgatcttagaacaggagatccccaacaaattagaagatctaggtgataagttactgatcagccatctgtatatggaacgccgtatgacgccacttaatatctatatggagcagtgtgacgataaacagttaaaagccgtggttgaagattatggccaagcacttaaagagttgattgccgcaaatatttttcctggtgatatgttatttaagaattttggcgtgacacgtcatcatcgagttattttttatgattatgatgaaataagttatatgacagatatgaatttccgtgccattcctcccgcccgctatcctgaagatgaactggccagtgagccttggtatagcgttgctgaaaatgatgtttttcctgaagagtttcgttactttttatgttgtgataagcaagtatgtcattattttgaagctcaacatcgtgatcttctttcacctgaatactggcaacaacagcagcaaagaattaaacaagggtatattgaagatgtttacgcctatccacaaagtaaacgttttattgataacgatatcggttaa

SEQ ID NO: 305104 - DNA, 1965 bp, Proteus mirabilis
atgaatcgaatgattctagacaaaacacataaaagttcattaatctcactgaggaatagctttggcggtgcaaattacaaaaacactttacacgaagaagataggattaaggcttgtgatgatgttcacagaaataattatcttgaaaatctagctttgcattatcaaatattcagaagtgaaaatataacggaggaagttgttaaggaaagacaacaagtactttgggatattttcgataaatactatagccagtttcctgatgaatcacaagaaacagaagtcgataaaacgtggaggctttgcttagcgagaatggatcggcggaagatgaagataactactaaggagaaagatgaagggattgagatattattcaatcctgagatcgaccctaagctaaaacagtatagtgatgaagcaatcaagaaaaattccgaacatatgaagtatatgacgctgaagctatgggtaagctataaaagagataaggatgaacgtcacaagctgtatgaaatgtatgagaataaaccgcaggttgttttacaagagactaaggaaataatgtgtaagcttaatgaaaacagtgatgacgatttccgccttttaaatagtaatataccagcggatgtttgttctatattgctattagagcattttaacgagctagcatatgaagaaagagaatactgtaaagatattgttttagcgtattcaaagttgcctttgtcggacggttataattatcaggctcttgatgggacaacctctgcaatttcagctttatctgtagtttaccataattacccaatggaaagggatactatcaaaataatattactattaacgttgtttaatgattatcctactggaatgttagggggacgttactccgtatttcctagtatggtgattcataaattatggaaagactattttgatgacatgcagtctttattgtttggttttttgattttaaagccaaagcatgtggctctcggaagggaaattattcatgaaaggtatcgacagggcgactatgatatcaaaaaaacgaatctcaatgagaggttcttaaatgattatggacaatgcatatcaaatgtcattggtaataaaatttctatagatcatttaggagatatggaaaaggttgaactacatattttgaatactgcttttcatttgatcccaattaatactgttaatattgagcataagcaattggtatcattgattgttaaacatttttctacaagcctattatcgagtgatcgggaggatagagtagattacgctgtacggcactcattcttagaaagatttgcctattttacacttcatacatctgcgagtgaactccctgattatttaaaaccctttcttgatggtttcaatggttctgaacctattgcagaattatttaaagaatttattcttgccgaagatcaattaaatacttatgccaaattttggcaggtttgggatttgttttttgataaggtggttactttgtgcaaagatggagataggtattggtatgttgataaaattctaaaaagttatctttttgctgaaacttcttggaaagaaaattctaatggttggcacacatttaaagatagcaacagtcaattcttttccgatgtttctaaaactatgggtcattgcccttcaactttatactctcttgctaaatctttgaataatattgctggttgctatcttaatcaaggtataacctggctttcagggatattgtcggctaataaagagttatgtgaaaagaaattggagaatgatacagtttattatttagaatgtttggttagacggtatattaacactgagcgtgagcgaattagacgaacaaaacagttgaaggaagaggttttagtaatattagagtttttggtggaaaaaggatctgttgttggttatatgtcacgggaaaatattctttga

SEQ ID NO: 305105 - DNA, 2475 bp, Proteus mirabilis
atgagcctagactttgacaagctgaatgctggtatcggtgcaaaacaaactgacccgagaaaaatctttacgacgcttaagcgagacgctcgtttcaagcggccattggatgaacaggcggacgtacttgacgtttggtatgcacggaggcaggccaaagatttgacgctgaagatgaataccggcggtggtaagactgtggtgggcctgctgtgcttgcagagctccctcaacgaaaacgtcaagcccgcagtatacattacgcccgatagtttccttgtcaatcaggtactagatgaggctaaggcgctcggcattcccgcaacagacgatgagaaggatccagatttccttgctggacgtgccatccttgttgccaatgtgtggaagctattcaatgcaagatcggtttttggggtcggacagaaaaagatcccgataggctgtgttgttgtcgatgatgcacatgcatgtcttagcgtggtccacgaccagttctcgataaaggcagatgttggcacaccggtgtacgacgaccttctgaacctttttgagaacgacttggataaacagtcccctactgggctgctcgacgtgcaggctctagatcctagcattgtaatggaagtgccatactgggcttggcagtctaaacaaaaggaagtaatcgcgttgcttcatgcacaacggaattctgcagagttggaatggagttggcccttgttgcgcgattgtatcccgctctgcacctgccttttcggcggcggtaaactagaaatcgcgccgcatttcattccgatcgaccgcattccatccttcgcaactgctcagcgaagaatctatatgacggccaccttagctgacgacacgatcctcgtgagtcactttggggcattggcggacgaggtagttaagccgatccgacctaaagggggcggagatattggagaccgaatgattcttgccccacaggagatcaatccggacttcaaaatggaggagatccgcgaacttgtgtcagatatcgcaaaggatctgaacgtagtagttatcgtaccctctaaagaacgcgcgaaattctggaaagattatgcttatcagatacttaataaagataacattcaggctggaatacagcgtctcaaggacggttttgtaggcctaaccgtactaattaataaatacgacggtatcgatttgccaggaaaggcttgtgagttgctcgtcattgatggcttgccggaggtttacggactcggtgaaaggcgtgaaatgttgctgctagacggaaccaaacgccaacttgtgcgccaagttcagagaattgaacagggaatgggtcgtggtgtacgttcaagtgacgatcattgtgtcgtactattgcttggtggcaggttgacgcaacgactccatcaacccgaagctgaaacgatgttttcttcagccactcgtgctcagattgagctcggtaaaagtgtggcggagcagttgcgtggacaatcgcttgagaagctgcagggtattatgggcctatgcctgacccaagatgacaactgggtacaggctggccgtaatgcggttgtaaatgcgccacctgtcgaagggggacggattgacgataatcaggtcctgttgcgggaggccttcgatgcggcccgtgtgtcgcgatatgacattgctaagaataaggctcagacagcggtgaatgcagcaagcgagcgtcagatcaaaggctatctgaagcagcagttagcggcgtatacgaatttcactgacccttcacaggcgcaggaactgcaactggccgcgctcagcgataactatcgacttcttaaacccttggcaggaacgacttatcaccgtctcagcgcacccgctagcggacaagcggccgcagccgttcagttcatgacgcgttttctcgaaggaaacgatctcatcatatgggtcaacgggttgttagacgatctacaatggggagaggaagggtcgaagcggtttgaggctgccattaaggaattaggcatttttctcggtttcggatccgagaggccagaagacctagtgggcagaggaccagataatctttgggctcttggcaactcgaggtatttcgtgattgagtgcaagagcggagctgttctggcagaaagaatctccaaacatgacacgaaccagttaaatgggtccatcgtctggtttgatgaaaagtacggtcacacttgtacaaggactcccatcttggtgcatcctaaaaccatatttgaacacgcggcatcgccccattccgacatccgaatagttaacgaacaaggactcaataggatgcgcaatgcgatacaagcatattcaatctcgttggcgagtaatggtgggtatgccgactcgcaaatcgttcataagcaacttaaacatcataaactttctgctgaagatattgaggctttgtgtacggtagcacaaggtgcaaagtga

SEQ ID NO: 305106 - DNA, 366 bp, Proteus mirabilis
gtggccgccgcgcgccgcagccgtgtggaatgggaaaacagacagcgcaaaaagcaggggctggataccctgggtatggatgagctgatagcgaaagcctggcgttttgtgcgtgagcgtttccgcagttaccagacagaacttaagtcccgtggaataaaacgtgcccgtgcgcgtcgtgatgcgaacagggaacgtcaggatatcgtcaccctggtgaaacggcagctgactcgtgaaatctcggaagggcgcttcactgctaatggtgaggcggtaaaacgcgaagtggagcgtcgtgtgaaggagcgcatgattctgtcacgtaaccgtaattacagccggctggccacagcttccccctga

SEQ ID NO: 305107 - DNA, 387 bp, Proteus mirabilis
atgcacctcccaccgcaagcggcgggccccgaccggagccactttagttacaacacacaaacacaaccaccagaaaaacccctgtcctgcgcagaactgaagccacaaagcccctccctcataactgaaaagcgccgccgccccggcccaaagggccggaacagagtcgcttttaattatgaatgttgtaactacatcttcatcgctgtcagtcttctcgctggaagttctcagtacacgctcgtaagcggccctcacggcccgctaacgcggagatacgccccgacttcgggtaaaccctcgtcgggaccactccgaccgcgcacagaagctctctcatggctgaaagcgggtatggtctggcagggctggggatgggtaaggtga

SEQ ID NO: 305108 - DNA, 663 bp, Proteus mirabilis
atgattcaaacacgtaatcaatatctgcagtttatgctggttatgctggttatgctggctgcatggggcattagttggggagccagatttgtcatggagcaggccgttctgctttatggatcaggaaaaaactatttgttcttcagtcatggtactgttctgatgtacctgctgtgtgttttcctggtataccgccgttggatagctccgctaccggtcgttggtcagctgcgcaacgttggcgtaccgtggctggtcggtgcgatggccgtggtgtatgtcggtgtatttctgctcggtaaggcgctggctctgcctgctgagccatttatgacgaaactttttgccgataagtccatacctgacgtgatcctgacgttgctgaccatctttatccttgccccgttgaatgaggaaacgctgttccgggggattatgctgaacgtcttccgttcacggtactgctggacgatgtggctgggggcgctgataacgtcgttgttgttcgtcgccgcgcacagccagtatcagaacctgctgacactggcagaactgttcctggtggggttgattacatcagtggccaggatcagaagtggtggcctgctgctgccggtattgctgcatatggaagcaaccacgctgggtttactgtttggttga

SEQ ID NO: 305109 - DNA, 258 bp, Proteus mirabilis; identical to SEQ ID NO: 5121

SEQ ID NO: 305110 - DNA, 333 bp, Proteus mirabilis; identical to SEQ ID NO: 5122

SEQ ID NO: 305111 - DNA, 3006 bp, Proteus mirabilis; identical to SEQ ID NO: 152274

SEQ ID NO: 305112 - DNA, 861 bp, Proteus mirabilis; identical to SEQ ID NO: 49032

SEQ ID NO: 305113 - DNA, 543 bp, Proteus mirabilis; identical to SEQ ID NO: 8085

SEQ ID NO: 305114 - DNA, 552 bp, Proteus mirabilis; identical to SEQ ID NO: 28363

SEQ ID NO: 305115 - DNA, 351 bp, Proteus mirabilis; identical to SEQ ID NO: 28365

SEQ ID NO: 305116 - DNA, 2109 bp, Proteus mirabilis
atgtccctttctcaatctgtaaaaatgcaaatcagccaatggtataaagcattacctgagcatattgaaggctttattccacgagcgcctcagcgcgaaatgattgctgaagttgcgaagacattttctgatgaaacggggcgacatctaattattgaagcgcctacaggagtaggtaaaacactctcttatcttattcctggtattgctatcagtcgggaagagaaaaaaccactgattatcagtacggcgaatgtggcgctacaagatcaaatttacagcaaagatctgcctttactaaaaaaaattattccagacctgacttttactggggcttttgggcgaggtcgttatttatgtccccgtaatttagaggcaatttgtgcaacagaaggtgagcaaattgatttaatgtttttgctggaagataaagttgatgtcgcaaccagtgcggaaagggagatttgccaagagttaaagcacgattttaccagctttggttgggatggtttgcgtgatcaccataaacgagcattaacggatagtttatggcgcaagattagcacagataaaatgaattgcttaggtcgtaattgccaatactatcatcgctgtcctttttttctggcccgtcgagaaatagacgaagttgatgtggttatcaccaatcatgctcttgtgatggctgcgatggaaagtgaatcggtgttacctgatgcaaaaaatatcttattagtgttagatgaagggcatcatattcctgatgttgctagagatgcgcttgaagttgaaggggaaataaccttatcggcattaaatatgcaacttgataatatgactcgtcatgtcagccaatatttagcacaatttatcccagtcaaaccacccaaattagccgatcccattcgttttgatgctcatattgcaaaaatgcgcgaagcctatcaagacgttgaacattttacccgcgcgttattgcctgagcgcagtgaaaatgatgaatatttatttccattaggtcaattacctgaacaattactgttatgttgccaagacttatttaagctaaccgatggtttaaaaatgttaggtgagtcgattcttaacgacttaactgagcgaacagcaaaagaagatgttgtacgtttacatcgcgcgattttaaccaccagcagaatggttggttatctggaaaatatggcaaaactatggcgacttgcgacattagagcagacatcaaaagcacccgtttcgaaatggcttactcgtcgttatgataaaaagcagtcacatctctatttacattgtgctggtattcgcgttagtgaacagttaacacaattattatggaaaaatattcctcatgtggtgatcacttctgccacactacgttcattaaacagtttttcgcgtattcaagagcttacaggactaagcgaacactttgatgatcgttttattaccttgtcatcgccttttacacatgaaaggcaagggaaactcgttatccctaaaatgcgttatgaaccgacaatggcgaatgaaaaagcgcatttaaaagagatggcacgctattttcgtcaaggaatggtagaaaaccaccatcgagggcaattagtattatttagtagtcaacgggcgatggaaggttttttagaggaagttaaagatctacgtttgagtctcttagtccaaggagatcaaccgcgctatcgtttagtggagacacattgtaagcgtattgatgcgggcgataatagtgtgttaattgggttacaatcttttgctgaaggattagatttaaaaggtgactatttaacgcaagtacatattcataaaattgcttttccacctgttactgatccggtcattgtgacggaaggggaatggctaaaatcactgaaacgttatccttttgaagtgcaaagcttaccaagtgcatcatttaatttgatccagcaagttgggcgtcttattcgtagccatcattgccatggtgaagttgttatttatgatagacgtttattaacgaaaaactacggctcacggctattaaccgcgctacctgtctttcctatttatcagccagatatacctaaaacagaataa

SEQ ID NO: 305117 - DNA, 1167 bp, Proteus mirabilis
gtgaaacagaacactactttggtacgcaaaggtgacagtacattagtacctgtcgcgggtttaacggtatttgctatcgcatcaggctatttaatgagtttaattccactatctatggatagttttggtattgatactttttatgctagctggttagcaagcatttactttattggattacttataggttcagtgatgatcgaacctattattgcaaaaatagggcataggctctcttttgtgctgtttttattgttgttagcattcaccgtgagtattttgccactgttaccttatttatcggtatggctagtatctcgctttttcggtggtatggcggttgcgggtatctttgttgtagtcgaatcatggttattaattggtgataatcctaaagagcgagctaaacgcttgggcttttatatgacatcactttatggtggcacaacattaggtcagcttgctattggtgccattggtacgcaaggggcaattccttttatcgcggtattggcattgctattaattgcagtgttacctcctttgttttttaaacaaggacaaccccaatgccacgagcataaaagtttgtcacttaaacagattagccggctgaataaagcttctttagtaggctgtatggtttctggcgttgtgatggggagtatttatggcatgatgccattggctttaaatcaaggacaatttaacaccgaccaaattggggtgttgatggcagcaattattttaggtggtatggttgttcagcctattattagcaaattgtcggtgatgatgagtaaaaccctattattagccatgatgtgcttagttggggtatttgcgatgggcatgacttacctgtctaatgactatgtggtgttaattattgcattagctttattaggaatgtcatcttttgcactttatcctattgctatcacattagcttgtgatcatgttaatgcgagctatattgtggcaattactcaggtgatgttattaagttacagcgtgggttcagcaatggggccattaggcgcaggtatgtttatgtcacaagcaagtaacggcattatgaactttttctttgtcgtgttattagcgacagctgtatatatgttatttgccagtttacgacgcaaaagccatattgtgcttaactaa

SEQ ID NO: 305118 - DNA, 1170 bp, Proteus mirabilis
atgaaaaaaatattattcataaatgataatagtctcaaaggcggtagcgcccaagtgactaatgatactaaaaaatgtttcgatgatagaggctggaaatcatatactttctttggtagtacctattttaatttcaatcctagaaattatatttttaatataaatgcatataaaaaattaaaaacaactttagaaaaaacaaccccagatgttgtacatatacataattatgacaacttacttagtcctttaattttattagctatatatctacacaagaagaaaaatacatattgtaaaataattatgactgttcatgattatcatattatatcaccaagcaattctttgagttactataaaggaaaagaaaaagctttttttgtaactccaccttcttttttaaaattgttaacatctaaactggatagacgttcctatattcatggcttagctagaattcttcaatggtatatttattactctttatttgatttaagaaaagttatagatacttatatatgtcctagtaatttcatttataacttgttgccatttgaaaataaaaaacttatttataatccaattaataatttaaatgcattcaacaataatataaaaaaatgtgactcacagattatgattacctttgctggtagattgacaaaggataaaggtatttatgattttcttgaatgcatttgtaattgtgatacttcttctcagaaattactgagtataaatatattcggcgaaggagaattaaaagaaaaaattattagattaaaagaaaaattaaaagaaaaaaacattgatataatattatatgggtttaaagataaaaattatatacaagaaatattaaacaaatctcactacatattattaccttcactatgctatgaaaacgctcccctatcattaattgaaggtattttttctaaatgtaaagttatcacaatgaactatggtggaatgaaagaaatagcagaaaaatcaaaaaactctattttattaaataatattactactagtgaaattaagaagatgataacgactataaataagcagtataaaaatgaagctggtttttactctcacagtcaatataataaatattcactagaatattattataaagaaataaatcatactttagaaaaaatatga

SEQ ID NO: 305119 - DNA, 1191 bp, Proteus mirabilis
atgttaatattaacttctttaattttattttttttacctattactttttataaaagtaatttaatgaaattattcctagttatatatgcttatcctattttcattatatttattatgtgttttaactacgatgtaggtaggataattaaacagataggattaaattactataataaacaggatatgattacttcaatcatccctctagtcattagttatatttttatcctaattatttcactaagttatagaaaaaccatttttagcctaaaaactatttctttagggattccagttcgctgtattttattttttttgtttttattaatttcttttattgcataccctaaagcaatgggaataagcgatacgatacgatataatttgatattcggttcatggggaggtgtatttaatgtattgagtatctttattttattcagtaaatccaaaaaatatgatgtaataaatattcttacttatactatattaataatatgcttcctttctggtgaaagagcagatacaataatcactattattttgttatttttattgaaaaaagatagtaatggtaatataacagaaagaaaaattaatataataaagcttttccttatattaatttctttctctatcttagctagtattattggtgctgctaggtctaatattcaaattcaagatatctcattatttataacaaaatccctattatctgtaggtactgtagttgatgtaattcatgtatatctttcctctatttggtatgttgagcataatggaaactcattcactccattatttaacataattaaatcttttatacctttggctggaggaggaggagttagttcagaagaaaacattacttggttcttaaataattatatacacaatgtcggtggtggacttttttattctccattttatattgcattctctagctatggtgttattttatttaatataatatattttctattctttacatttacatttaaaaataaaaataattatataaaatacatatttattgttttttacattatgcaatgtcgtatacaatggtatggaataacatatttttttacatcatttaaactaacattactatttctcataatcatctatttcttaaaaaaattccctaaaaagttaagcaatgaaaaaaatattattcataaatga

SEQ ID NO: 305120 - DNA, 1173 bp, Proteus mirabilis
atggaaaaaaactggtctaagcaagccttaatttttataaactcattaaaaaatgataatggttcatattctttttctaaaaaaagtagctgtgcaagctgtttatcaacgagttttgcattacttgcattagaagtattgcaacaaaaaaatttaataacagatgatagtgtatcatacattctaaaacatcaaaataatgatggcttattctatgattctatcattgaaaaaaataataaaaaccaacatgattataaatatataagccaccaaatcacttaccatgcaattatggtatgtgacatgttaaatatagaactacctcataatttagtttttctaaaagaatacaaagataaagcatatttaaaatcttggttagaaaatttgaattggaaaaatccatggttagtttctaacaatattatgtttattctctattttttcatatatgaacaagagaattatgagctagaaaatgaaatttatatacaaacgattatagaatggctcataaagaaccaatctaataacactggatattgggattgtaataataaatctagtttgcataaccaaatggctggagcttttcactttttattcttttttgattatttgggaattaatattcagcataaggaagaaataattaatagcactttattaattcaagaatatgacgggttatattcatatgcctctggtggaggttcatgtgatgatttagatggtatagatatattatgtagattatttaatagcggagcagaaaaaaataaaataagaaaatcgctattaaagtcttataactcactcactaaaaatcaaaattatgatggtggtttttgttgggctaaaagacgtaactttaactggaaaaacattattcatataataccactacgcttgattttaaaaagaaaaaacattgatgcaaaaaatagtttttttatgaaaaataaaaatataatttattcccttctatttaagcaaaaactaacatggtgctatagtgggattaaagattataaaatatatattgatgatagcgacattttttcaacatggtttagggttttatccttaactttaatagaaaaaacacttgataacaaaaataatattattagagaaaagtgtggtataggtttttttaaaaaatgttaa

SEQ ID NO: 305121 - DNA, 585 bp, Proteus mirabilis; identical to SEQ ID NO: 50795

SEQ ID NO: 305122 - DNA, 474 bp, Proteus mirabilis
ttgaaaatttctttaatcgcagctcagtcagaaaacggtgttattggtaatggcccagatattccatggtcagcaaaaggggagcagttacttttcaaagcgctaacatataatcagtggcttcttgtcggaagaaaaacatttgagtcaatgggtattcttcctaatcgaaagtatgctgttctttcaaaaaatggaatttcacaccttcctgaaaacgtactagttttttcgtctatagaaaatgcattatatgaactggctaaggtaacagaccatttatatatttctggcggtggtcaaatatataatagtcttattgaaagtgctgataccatccacttatctatcatccacaaagaggtagaaggtgaagtaaggtttcccaaaatacctcctaattacaagttggtatttgagcaatattattcttcaaatattaattacacttatcaaatttggcaaaaaggttaa

SEQ ID NO: 305123 - DNA, 432 bp, Proteus mirabilis; identical to SEQ ID NO: 28367

SEQ ID NO: 305124 - DNA, 756 bp, Proteus mirabilis
atgtttatatattctgatctaaagaataagaatgtgattgttacaggagctaatggtgatataggtattgcaatttgccagaaataccttgaacagcagtgtcatgtttatgcattatatcaccaaaatagaaataacttagataagctaaaaaaagagagtgaatattgtcaccgcttacatatattacaatgtgatatcaataatgataaatcaattcatgattttttagataaactaaaggcatatgctaatgctattcatatattaatcaacaatgcaggtgtgattaaagatgaattattttctgctataaatataagtgaatttgaatatgttattaaaaccaatttattaggaacttgtcaatttactaaacagttattgcttttattaagatcggcagaaaaagcgaccattattaatgttgcttctattgcagggattgttccaagtattgggcaaagtaactatagcgccgctaaggctggaattataggttttactcatacgttggctgcagagttggcaggtaaaggaattcgagtcaatgcggtggcaccgggtatgattgagtctgacatggtcaaaaaagtgtcacgccaagtcgtacgtcatattaaatcggttattccattacaacgattgggagcaagtgctgaagttgccaataccattgtatttttaagctccgaggcatcgagctatattgttgggcaaacattaattgttgatggtgggatggtgatgcgatga

SEQ ID NO: 305125 - DNA, 963 bp, Proteus mirabilis
atgtctattattcatcttgaatttgaaaagcctattgttgaattagacgagaaaatagatgcattacttgcatttaaacagtctcaagatgaaacaacggcagttgatatagacgaagaaatcgccaaacttcgccaaaaaagcctttcattaacacgctctatattttctgatttaggggattgggagatagtacagttagcacgtcatcctatgcgcccttatacattagattatatcaaagctatttttactgatttccaagagttggccggcgatcgtgcttatgctgatgataaagcgattgttgcagggttagcgcgtttagatagaaaaccagtgatgattatcggtcaacaaaaagggcgagacactaaagagaaagtaaaaagaaactttggtatgccatcaccagaaggttatcggaaagcattacgcctgatgaaaatggctgaacgcttccatttaccagtgattatttttattgactccgcgggtgcttatccgggggttggtgctgaagagcgggggcaatcagaagccatagcacgaaatattcttgaaatgtcccgattaaaaacaccgataatttgtacaataacaggggaaggtttttctggtggtgcattagcaataggagtgggggatcgagtaaatatgttgcaatatagtacttatgctgccatatcgcccgaaggctgtgcctctatcttatggaaaaatgctgataaagcgcctattgccgcccaaaccatgggaatgacggcacctaaattacaggcattgggtattatagactcaattattcctgaaccattgggaggcgcacatcgccactaccagcaagcggctgaatttgtaaaaaaacagcttctcgcagatttaacagaattgaatagttattctaaagaagaactgcttgagaaacgttatcaaaaattaatgtcctatggttattgttaa

SEQ ID NO: 305126 - DNA, 864 bp, Proteus mirabilis
atgtttttttctcgtaaattagaggcctttatggccgtcgttgaaaatggatccttaagtaaagctgctcgtgtgatgaaccgaacgacaccacctgtagcgaaatcaatcaaagattttgaagccgtgctagggaagcgcttgtttaagcgggaaaagtttggtatgagtttaacgcaagaagggttagaactctataatgatttaaaatcactttatctgcaagaaaaagagataacaaaaaaacacacatcgggcgttattaataatagcattcatgtttattatgattggggtaaaagtcaatatttaacagcactctatcaagcagccaataagaattgttcacatataaatatgatgagattttcgaaagataattttgaagagataccagattatgatggaaacacgttaatcttaagctcagataaaattattagtgaaaagtttagcttaatacatcaagttaaaaataaatatctaggaatatgttgccaacaaatgttagcacaaaaagcacaagagaatatcaatacattgctaaaagaaaatatttggttatgtgatcccgctttatataaaacagcaaaaataaagaaattagaaaatgaaatagcggatcagggtaaacctgtcagtattagattgatggatgatttaaattgttgtttaaactttattcaaactcaccattcgctattatttactgatgaaaacccgattaaaagtgaggatgaaaagcaactgtgctttatacctttaacacaaacggaactgatttataattgttatatctataaatctaaatatcactcgagtatattgaacaggtttgttgatttaataaaagaattggaatga

SEQ ID NO: 305127 - DNA, 546 bp, Proteus mirabilis; identical to SEQ ID NO: 297504

SEQ ID NO: 305128 - DNA, 708 bp, Proteus mirabilis; identical to SEQ ID NO: 297864

SEQ ID NO: 305129 - DNA, 204 bp, Proteus mirabilis
atgacaactgaaccaataatcatagcgccagatggtttcactaatgaagatatcgcaaagtggatgaggggcaagttgcagtgcatagattacctccctgttttacacggtaagcgagaaagactaatgagcgatgtaaaaaagctagatgccgaaatagcagagtacatcagtaaaagcgctattcagatacaaagtaaatga

SEQ ID NO: 305130 - DNA, 432 bp, Proteus mirabilis
atgctcgatatcttcttgggtcacttggtctcgtttctcaaaaccagcctcagtcttattactttcttttgggctattttttcctttttcttgggaacttggcttggtcattccctcgctcgcagaagagacaaaagaaaggaattcaatgccattgcagatccgttgttcttgcttcttgataaattcctcgacgattgtaaagacgggaaaagagacatgcctcgcatcactcgtgatgacttcagagccttgcgccctcacttgaccacaagacaatgcaacaactataaccatgccgtagacagcttttttgatactcttaaaagcaatgagctttatgagaacgattggatttatcctgttattaggaaccctgcagagatgatccccaatatcaataaccttatggtttttattaaacgacgttaa

SEQ ID NO: 305131 - DNA, 231 bp, Proteus mirabilis
atgcctgaaagccacttgtgtgaatatgaagccttttatcgcaaacaaccctttggtttgtggcgagaggattatcggatggcacaagtggcacatcttttagcgatgataaatcgtgatccgaaaacgtctccgcctgaattgatggattttatgccgatgtggaagaagaaaatcacggaagaagaggtgtgggataatgtcactgagagtgtattagctaatcgatag

SEQ ID NO: 305132 - DNA, 600 bp, Proteus mirabilis; identical to SEQ ID NO: 251940

SEQ ID NO: 305133 - DNA, 768 bp, Proteus mirabilis
atgctgggctcgtcaggatcaaactgcactatgaggcggcggttcataccgcgccaagggaacgcccgcctgggacgtcgcgcggatcgaccggacattcgcggagaccttcgtcctgagatccgagctcctagtcgcgagttgcagcgacggaatcgtcggctgttgcaccttgtcggccgaggatcccgagttctggcccgacgccctcaagggggaggccgcatatctgcacaagctcgcggtgcgacggacacatgcgggccggggtgtcagctccgcgctgatcgaggcttgccgccatgccgcgcgaacgcaggggtgcgccaagctgcggctcgactgccacccgaacctgcgtggcctatacgagcggctcggattcacccacgtcgacactttcaatcccggctgggatccaaccttcatcgcagaacgcctagaactcgaaatctaacgtccgttcgggcatcgaggtccatgtcggggtgggacgggcccgtggcttcaagatcacttgcagtccgaccgcgatgtcttggttgcgcgagaggttgtcgatatcctccacttccatcatcaaccctggataatgccgccgccgtcatcgccgccgacgcccgtgccgggcttttcgggcctgtcaggcttgctcggccttcagcctgcctgggcgagatctccggcggacggattaacggcggagcttcgccgcctttcgtgcgtgtgaaggccgaagatagttctctcaaaaacatccgtttatga

SEQ ID NO: 305134 - DNA, 753 bp, Proteus mirabilis
atggatattcctcgtattttcactattagcgaaagtgagcatcgtattcataaccctttcacaccagagaaatatgccaccttaggtcgagtattacgaatgaaagaaaactggcaaattcttgatctcggaagtggctctggtgaaatgctatgtacttgggctcacgattacaatattacaggtattggcatcgatataagcccgctgtttactctacaagcaaaatctagagcagaagagttaggcgtcagccatcgagtacattttatccatcatgatgcctcagattatattagtgataaaaaatgtgatatagcagcatgcataggagcaacttggattgctggtggtgtaattgaaactatcgagctactagcaaaaagtattaaaacaggtgggcttattcttatcggagaaccatattggcggcaaattccaacaacacaagagatagcacaagcttgtggtgcttcatccatatcagattttttaactttatctgagcttgttatttctttcgacaatcaaggatacgatctagtcgaaatggtactggcagatcaagagggttgggatagatatgaagctgctaaatggatgactatgcgccgttggcttgacaaaaatagtgccgatgattttgctcaagaaattcgaacagaattgactatagcccctaaacgtcatgttagttttacacgagaatacagcgcattaaaaccagctattcgccctaaaaggtcgaaatag

SEQ ID NO: 305135 - DNA, 258 bp, Proteus mirabilis; identical to SEQ ID NO: 7766

SEQ ID NO: 305136 - DNA, 591 bp, Proteus mirabilis
atgaagctgattatttttattctcattgttctgattattgcagcgttacttatccggattatcctcagaagtgtaaatcagcattctcctttgctgatgcagttgcatgcggcaggtatacggaccggtgatgcagagcgaatactgtccggcggtgaatactggcaacgtcagaagacgctgctgacagaaagggaagtcagttttatgaaaggactgttcagaattgtggatatgaagcggtggtatctgtgtccgcaggtacgggtcgcggatatcgtccagctgaacgggaatatccggccacgatcacgccagtggtggcagttattcaggatggtgtctcagtggcatgttgatgtggttatcgttgagcggcgttcgttcagtattgttgcagcagtagagctggatgatgccagccatttacgaccggaacgcagacgccgggatattcttctggaagaggttctgaggcaggctggtattccgttgctcagaagccacgatgccagaaaactgctgcagatgaccggagaatggctgaatacaacaggggctgatcagcagtccccggaacatcgtagctga

SEQ ID NO: 305137 - DNA, 210 bp, Proteus mirabilis
atggcaaaaacaaaacaggaatggctgtatcagttacggcgatgttcatcagtcaatacgctggaaaaaattattcataaaaacagagacagtttatcaaccagtgaacgtgaatcatttaattcagcagcagaccaccggttagcggaattaatcaccggaaagttatatgacaggataccaaaagagatatggaaatatgtaaggtaa

SEQ ID NO: 305138 - DNA, 459 bp, Proteus mirabilis
atgaaatatattccactggtattatttatcttttcatggccggtattgtctgcagatattcatggacgggttgttcgtgtactggacggtgataccatcgaggtcatggactcacggaaggcggtgcggatcatgctggtaaatattgatgcaccggaaaagaaacaggattatggccggtggtcaacggacatgatgaaatcactggttgcaggaaaaacggttaccgtcacatattttcagcgagatcgttatggtcgtattctcgggcaggtttatgcaccagacggaatgaatgttaatcagtttatggtccgggccggggctgcctgggtatatgagcagtacaacacagatcccgtgctgcctgtctttcagaacgaagccagacaacaaaaacgtgggctctggtcagatgctgatccggttcccccctggatatggagacaccgtaaataa

SEQ ID NO: 305139 - DNA, 1788 bp, Proteus mirabilis
atggagacatggaataaagagagattaataaataacagtgtaaatcactattactatctggactttgcagaaaagcatttttttgatatcacttggtttgtcccaacctttatgaaatatcgtatattatttcaaagtgtattattttactcgttaattcttcaactgctagcacttgcctccccgattattacgcaaataattatggataaggtaattatccatcaagccctatccacgcttgatgtgttaataataggtcttatttttgtcgccgtttcagaatctgtattaaaggggataagagagtatatttatcatcatacagcaaataaaattgatatgttgctaagtttgaaattaactaaccatttattcaaacttcctatcagttattttaaatctcgccaaacaggtattattgttacacgagtaaaagagcttgatatcattcgagagtttataacaaaaaccttattaatgttattggttgatttctcatttatctttattttcctatttgttatggcttatttgtcattaaagttaacattaatctttcttgccaccatcccactctattttatcttagctaaattaattgcccctaaaatagaaaaaaccgtacaacagctttatcaatattcagcaacaaatagtgcttttttaacagaaaccctaggaggtatagaaacaataaaaagcctttcattagagccacgttttacacaacagtggcatacgcaaatccatcaactgactaatgaaaatttaaaattacaaaatattgataatttatcgcaatacattgtttcatttttacaaaaaataacgacagcgatacttttatgtctaggtgcttttgaagtcatttcacttgcaatgacaataggtcaactcattgctcttaatatgctattaaaccactgtctacaacctttaagttctgcaatagaagtttggggaaagtatatccgagccaaaacggctatttataatttacaagacattcttaatctcccaatagagcaagaaaaagccaataagaaaataaccttacaaggtgaagtgagttttgagaatgtcagttttagttatcaacatgataccccccctgttgtaaggcaaatttcatttagaataaataaatatgaaactattggtatcgtcgggacgtctggatcagggaaaagtacattagcgcgcatcatcgcagggctttatatcccacaattaggtcaagttaagcttgatggcattccggtttgtgaaattccccccgcagtattacgtcaacaaataggttttgtcttacaagagaattttttatttcatttaaccgtgctcgacaatatccgtttaacgcagccatcagcctcattagatgaggttattcatgtagctaaattagcaggtgctcatgagtttattttaaaacttcctttagggtacgacacactcattgctgaaaatggcagatctttatctgggggacaatgccaacgtattgcaattgctagagccttactctcatctcctaaaattttaatttttgatgaagctaccagcgcattggatggtgagtctcaagccatcatcgaaaaaaatcttccccttattacccaagataagaccgtcattatgattgctcatcgcctttccacaataaaaaactgtgaccgcattattgtattagaaaaaggccagataattgaagaaggcaaacataatgaattgattagaaaagatggcgcttataagaaactttggcaacatcaacaaggataa

SEQ ID NO: 305140 - DNA, 177 bp, Proteus mirabilis
atgaaagataaatattatgctggcttggaaaattacaaagattgtattgagattgaacctacaacaaaagattgttttattttaaatactccatcttggaatatggatgtgacaaaacaagacttaattgacatcagaaatactattaatgaaatactaggagatgataatgaataa

SEQ ID NO: 305141 - DNA, 1833 bp, Proteus mirabilis
atggcaaatcacaaagaaacctgtctgagtgctgcagagcgtgtgtttgatacccgaaccgtggataccctaacatgttatcatcgagagatggtaaagatgttgatggatagtgagtccttttattctagtccaaataactcacagataaatactaatgagagattagagaacaaaataaaaagcaatactattgaaaataaagctgtgaagggatcttatggtgatattttaaataatttaaaccagcagctaatgaataataaacctgagattgagccttatttctcacattacaactctcccgtcatgcgattggcgaaattaggctacctttctgcactggcctataatgctgataatgtttttaacaaacattcacccatacaaaaacagcaagagcaaaaaataactcatgatttgtgtaaactaatcggttttgagccagataaagcatttggacatattaccaccagtcatgtttttgcttgttatgaaattttgtgggctttgagaaatttaaaaacactgccgatggcgattgcacgtcatccaaaatcaagagatctggttgcagataaaaaagcatttgagttatttaatatgtctatcactgatattttatccatcagtgaacagctatatgagcgagatatttttgatgatgtcagccatttaacttgtcgtggtacaggcatgacaagaacgatgcatttaggtaaattactagtaccgatataccgcttcgaattttggaagaaggcgatggatatcttggggttaggttatgataatctcattgccttaccaatagatgaagagtttaaaacagatatagctaaaacgcgtcatattgtgcttcgtctaatcgagcagggagagccgatactcggtattattggcgtgttaggctcatcgacatacggtagcattgacaaacttaagcctcttttcgaattacgtgaagagtgtgaaaaacaacataacaactcattctatattcacattgatgcatcccaattaggctatatgaaaagcctgtttcttgacgaaaataatagcatcatcccttataacatattgtgcgataaacttaagcaagaagcacctttacttgagttaacctcagatatttatgatagttttactcagctatcaagagctgattctgtttcttttgagccatttcaagcgggattttctccttatcctacggggattgtttgtataaaagatgctcgattaagccgttttctcgctaacccgccaaaactgtgcccagaagaggggaatattcccgatgaaatcgatgggatccaatcagcacctgcagttgcatcaatgtgggggatccatcagctatatgcttttaatcattttgggtatgggcaatgcgctcaaaatcaatgggaagctagagtaaaactggaacaacaattaaaacaagagaacgaatttgaaaaatcgggtatctcttatgctattcatattttgccagtttcagattttaataaacttacttttgccattgcaattaaaggcaaccaatgtttaaaaatacaaaatcagctaaataatgctatttataaaaatttagaaataaaaagccaatataagcaagatctcaacctattagtgctgtgtgctcgtaatagcgatgatatacctgctcagttttgtcaacaatgtcatttaggtaaagatgaatggaagcaagttaaccacttaagtcttttacaattaacgataaaaaacactgacaaatggggtgaagagcatattaaagcagggtgcgactatattaaaaaagttgtcctatctgcattaaaatag

SEQ ID NO: 305142 - DNA, 1497 bp, Proteus mirabilis
atgaataaaactattagtgaacatgtagatgtcgcgctcattggtgctggcattatgagtgcaacacttggcacacttcttaaagaactagagcctaatttaaaagtcgcaatgtttgaaagacttaatgattgtggtcaagagagctctaactcatggaataacgcgggaacaggacatgctgctaactgtgagctaaattatacgccaccaaatcctgacggcaccgttaatatcagtaaagcgttagaagtgaacaccgagttcgatttatcgcgccaattatggtcttatttagtaacaaaaggaaaaattgccgatccgcgtgattttattcatgcttgccctcatatgagttttgtttggggtgcagataacgttaaattccttcatcaacgctatcgccaaatgtctgccaatcactgttatgaaaatatgcaatacagtgaagacaaacagcaaattgaagattgggcgccattaattatggaagggcgtgatccgaatcaacagcttgctgtcacccgagtagctactggtactgatgtcgattatggcgcattaacacatctattagttaagcaactttctcaacaagataattttgagttgcactataaacatgatgttattgatatcaaaagaaatgagactggtggttggaatatcgaagttaaagatctcaccacccatgataaatacctcattacagctaaatatgtatttgttggtgccggtggacgcgctatcgatttactccaaaaatcaggtattcctgaaggtaaaggctacggtggtttccctgttagtggtatttggctacgttgtgatgaagataaaatcagctctcgccatcatgccaaagtttatggaaaagcagatgtaggctcaccaccgatgtctgtcccccatcttgatactcgtattattgcaggtaaacgctccctactctttggcccctatgctggtttttcaagtaaatttttaaaacacggctcctatttagatttatttgagtcaattcgccccagcaatattgaacctatgctagatgtcgcgaaagataactggtcattaactgaatatttaattggtcaagtattacaaacgtcagcacatcaatttgaaatgcttaaacagttctatcctcaggctcaacatgaggattggcaagaagctgttgcaggtcaacgagtgcagattattaaacccgcagctaaacatcatggcgtattagagtttggtactgagctaattagtagcgcagataaatcattttcagtgttattgggggcatcacctggcgcttctacagcagcatttattgccatcaatatcattaaatcttgctttaaacagcaacttgaaaatgagggttgggaagatcgtcttaaaacaattattccaacttatggtattgatctcaaaatagatgccgatgcttgtcgtaatattcgtgcatcaacggctaagatattaaaattagaaacaccttag

SEQ ID NO: 305143 - DNA, 498 bp, Proteus mirabilis
atgcatttaatatctaaacattttattgcgttattttttctcttcagtttttcatcgctatcatatgcgggaggtgttgcattagctgcaacacgcatagtctatcctatggatgcaaaacagacgtcaattactcttaataatacagataaaagattacgctttttagtgcaatcatggattgatgatagccaagatcaaaaaagtaatgaatttattgttacaccaccactgtttgtcagcaaaccagaaagtgaaaacaagctaagaataatttatgctggtaaggcattaccaaatgatagagaaagtttgttctggttaaatacaaaagcaatccctgaaattgagcgagaagaaataaaagataaaaatatattaaactatatttcatatttacctcgatataaaagtatgacctttatcaggtcatactttaaattaatccaatttatttattcatattgcattttgaaagttacatcagcatcagcatga

SEQ ID NO: 305144 - DNA, 543 bp, Proteus mirabilis
atgaaatatagtttaatatattctattgtcctattttttactctttcatttacagcctattctaatgacagggaaaatatttctttagacgatggtattgtgacttttaaagggggaattgtagagcctgcttgtacagtatcttctgaaagtgaatatcaaattgttgatcttggtgttattagtagtaaccaatttcatggagtaggaagtcactctataaaaatcccattttttattaaattaatgggatgtaataaaagtattacggataaagtcagtataattattataggtgatgtaaacaataatgataaacgattatttagcatcacagatcaacaaaattcagcttcaggattaggtgttgcattatttaatgatgaaggtgaaataattattcctaataaattcaataagtataaatttattgaagagaatgaattaaaactaaaatttaaagcaagttatctggcaacgaaagaaaacgttatcggtggaaaagctgacagcgtagtttggtttgttttcaattatcaataa

SEQ ID NO: 305145 - DNA, 171 bp, Proteus mirabilis
atgggaggcatgggaacgaaagctcatgacttatttactattccattatgtcgcattcaccatgacgagttacatcgtgatcccaaacaatgggaagtcactcacggcaatcaaatcgaattgttatttcattttttaaaccgttcattaggtatcggtgcatttatttaa

SEQ ID NO: 305146 - DNA, 195 bp, Proteus mirabilis; identical to SEQ ID NO: 298769

SEQ ID NO: 305147 - DNA, 525 bp, Proteus mirabilis
atgagtaagataagttttagactaaaaacatctttgctattgatattaaatgcataccctttcttttctattgctaacaataatattcattctctatataaaagtgtattgtcaaacattgataataaaaccatcggcaagttattaaataatgaacatcctgatggttattactcaacaaatatttatatcaacgaaaataaaaaagaaaccattattttatattatgaaaataaagacggtatattaacaccaaggattaatattaatgatttaattcgtttaaatattgatccatctttttataatattcctgttgatttaaattcggatttgttattaagcgattacaatattgattttaaatataatttttcctcgcaatcattatatttaactattccacaaaaagccttagataataaaaaaatatgcttgctagccaagttttatgggatgatggtgtcactgctttgtttagctcatattcttattttggcaaatataacaatcaaaataagatag

SEQ ID NO: 305148 - DNA, 183 bp, Proteus mirabilis
atgatggaacacattattcgctcaagtagtcgcgaaggggatctggttgctgatttctttatggggtcaggtgcaacactgaaagcagcactaaaacttaatcgaaaggttttaggtgtggagcttgagagagagcggtttgagcaaaccgaacaagaaataaaagcgctaacttgtaagtaa

SEQ ID NO: 305149 - DNA, 609 bp, Proteus mirabilis
atgaatataatcttttttgaaaagaattcaaacgagaaagtacaattacaacctcatgctaagcatactataacggcgaaagcaggggatgtgtatcagttaattgattcagatactcaactttctccattagatattcaagcgcatcgtaaatcggatgatcttattttatctagtaaagaacaaaatatagaagttgttattaaagatttttggcaagaatgccaaccaggggaacaacaatgttacgccactttaaatgttttagattcaaatggtgtaatgggacaagcaactattactcaagatggtcctgttttagaacatttagttgctggtgaaacaggtactctttctgataatgatgatggaattggtctatttttatgggttgctggttcaatcggtagtgcattagcgatctttttagctaatagaaatcatggtggtgacaataataaaggtaatgaggctgatattaccgcgccgagtaagccaggattaactgctgaagatgatggttctgtttctatcgatttaccaaaagatgccaataaaggtgattctgtagatgttacttttgaagatgaggatggtaattcaaattga

SEQ ID NO: 305150 - DNA, 456 bp, Proteus mirabilis
atggcaatgccgctaaataacgtatcaaaagttgatacaaaagaagaaccggaaatttatcaagaaaatatcactgaaactaataaagttgttcctttttcttcgcaagttacaccaataaaaacggtaattgcattaccaaaagtagccaaaatggtttcacagctacctgcttggcaagtaatagataaaaaaatatctatgttgactctaccaccaagcattacttatacatttacaaaatggaagagtcgttatcatcaggctaaaattcattttattgataaacaagttcagttaatttcctcctcaggacgcgtttatcaaacagcattagagaatttgaagcaatataatgggggattatccatagatctaactaatagccataaaaataaatcgtggtatatcaactctattaatgctatttatgaaagagaggatgaaaatgaatga

SEQ ID NO: 305151 - DNA, 615 bp, Proteus mirabilis
atggttggtgtagaaatttacacaaataataggctaatacaattaaccgataagctcgaaacaatttgtgttttaaaaaaactaactcctgatgaattaacgacagtctcaggtccttatgatagctatccgagaatctatgcattaaataatcaatgggtggttgctcctatttccaaggtaagcatacctcaacacggagttggtcttgaagtttatgatgagcaagggaaaatcaaattttcatctcttgctaagttggtctgctttgagaaatattatgatgtcaatgcggggagcgctggcaaaggctcattaagaatcgccggcaaaagtggtcatcggtatggcatgattaagactcgctctatggggtattttcataatacaaacatacgaagctacatagaccctgacacgtgggatgaagtttggacattcaaaagatatagcgagcgttatgtcttggttgatgatgtgggagggttaacatttgagtatcgatacgagttcttaggagaagaggatggttggataagtatgcctccgagtcgagaaggttctggattaatggaacaagggcttatgatagacgtttcaatgttagaagattaa

SEQ ID NO: 305152 - DNA, 504 bp, Proteus mirabilis; identical to SEQ ID NO: 52325

SEQ ID NO: 305153 - DNA, 177 bp, Proteus mirabilis
atgaaagataaatattatgctagcttagaaaattacaaagattgtattgagattgaacctacaacaaaagattgctttgttttaaatactccatcttggaatatagatgtgtcaaaacaagagttaattgacatcagaaatactattaatgaaatactaggagatgataatgaataa

SEQ ID NO: 305154 - DNA, 162 bp, Proteus mirabilis
atgcaaataattgaatatgtattactcatgctaatacagggttctactgtacctgtaacggaagatatatacacgcaatcggaatacaataaacgtgctgaatatttaatgtcagtaaggaatgttaaagttgtttgtggagaggtatggaatgaaagataa

SEQ ID NO: 305155 - DNA, 264 bp, Proteus mirabilis
atgcgcgtattacagcaaggggatcgcttaactgtgggtaatgaactcaaaatggtggtggcggatgtggtcagtgataatcaaggacatgccattattcttatttcgccgatgttaagaacatcacctaccgtcaatgaaatgctcgaggttgagcgtccttttggggtttttcggctcgttgataatgaacagggtaaatttcagcatcgtcgcttggggtatacctatatcacgttatcttttgaggaggtgttgtactaa

SEQ ID NO: 305156 - DNA, 246 bp, Proteus mirabilis
atgaaacgaattacattatcagaatggaataataaatatttcgccaaacctagaagtccacggcaattatctcgctatataaaggaaggtaggttataccctacccctgaaaaggttggcagagaatatgagttagagccgtggacaattctaacaaatgacaaaatggtaagggaaccgcaatatttaatggagaaaattaatgggcagaagcagaagtgcaaagaacaagggtttaccgcctaa

SEQ ID NO: 305157 - DNA, 258 bp, Proteus mirabilis
gtgcagcgcaatgggcaagtcaaaacacgtatttgggtaaaatcattatcgggtaaaaaagtgtctgcctttaaacaagcaacgggaaaaagtgcagcattgaacccaaatgatccgttttattggtggtttgtcgagtttggtaccgccaagatgcccgcacaaccgtttatgcgccccagctttgaagcaaaaaaggaagcgacggccaaagtgattgttcaaacactcaaagaggatattgaaaaagcaaggtag

SEQ ID NO: 305158 - DNA, 306 bp, Proteus mirabilis
atgcgtgaacaatacggtcggtatgtttttttattaaaagcggcaacaagtgaaagttggtggccagaaaatgcagatcacatctgttttatccgtgggcgtataggttttgacgttccgaagtggtttattccagctgatgaaaaacaaaaaccatcaggtgcaatgtttgccggggcaattgtcgtatttgataaaacatgggctggtaaagcatttgattacattagtagagaagaattagaacagcgtggtaaggcatttattgagcaaatgaagtggctggcatcgagaggtgttgcatga

SEQ ID NO: 305159 - DNA, 258 bp, Proteus mirabilis; identical to SEQ ID NO: 298416

SEQ ID NO: 305160 - DNA, 246 bp, Proteus mirabilis
gtgatccagtttgccagcatcacgcctaacagtgcgctggaggatgcggatttagataactatcgcgtgcaactcgatgtgtatgcgccccagccacaacccctgatggtcttgcgtaaaaaaatagaggctcagattatcgaggcaatcccatttgcacaacgggtgaatgctgtctttgggtatgaagcggatgtcaaattacatcggcttgtttttgaattgatgatttcatcagataaataa

SEQ ID NO: 305161 - DNA, 246 bp, Proteus mirabilis
gtgatccagtttgccagcatcacgcctaacagtgcgctggaggatacggatttagacaactatcgtgtgcaacttgatgtgtatgcgccacagccacaaccccttatggtcttgcgtaaaaaaattgaggctcagattgttgaagcgatcccattcgcacaacgggtgaatgcggtctttgggtatgaagcggatgtcaaattgcatcggcttgttcttgaattaatgatttcatcagataaataa

SEQ ID NO: 305162 - DNA, 1278 bp, Proteus mirabilis
atgaaaattgaacagattttttccaagaagttgacgcgtgacattaatggcgttgttaaagcggaacaaaaagacaatgacagtgtgtatgtcgagcttgatgagtatgttgttacccgagagttagatagacactttcgtgcattttttgaggcttacgtcccatctgtgacgcaaagccacggtgatatgtcaggtaaaattggtgtgtggatttctggcttctttggctcgggtaaatcgcacttcctgaaaattttatcttatttgcttgagaataaatctgttgaaaaagatggccaaggccgacaagcgtttgagtttttcaaagacaaaatcaacgacgccatgctgttggcggacatccaaaaagcggttaccaaagacactgatgttattctttttaacatcgattcgcgagccaatacggacgaccgagaaaatgccattcttaaggttttcctcaaagtctttaatgagcgtgtaggatactgcgctgactttcctcatattgcgcacttagaacgcgagcttgataaacgtaatcaatacgcatctttcaaggacaagtttgctgagttgactcaatcaacttgggaaaaggagcgtgacgcctatgacttctatcgagacgaactttcagaagcactcgctcatgccagtgagcaatcattagagtctgccaaagcgtgggttgagcaggttgaaaacaatttcccgctagatatccgaaacttctgtaagtgggttaatgaatacttagatcgcactggggatcgtaaccttcttttcttagtcgatgaagtcggtcagtttatcggtaagaacacacaaatgatgttgaagcttcagaccattactgaagatcttggcacatattgtggtggcagagcttgggtcgttgttacctctcaggcagacattgatgctgccattggtggtatggataagcgcgatggcgaggacttctctaaaattcaagggcgttttagtacccgcttacagctgtcgagctcgaatacctcggaagttattcaaaagcgattgttgtccaaaacggaagaagctcgtacatacctcatcgatgtctttgctgaaaagggcgacattcttcgtaaccagctgacatttgataaaacgacaaccgcgtctctaaagggctacaccgacgctccgtctttcgtggacaactatccgtttgtgccttaccactacacgctggttcaaaaagtgtttgagtcaattcgaacaaaaggcgcgacgggtaagcgcacttag

SEQ ID NO: 305163 - DNA, 804 bp, Proteus mirabilis; identical to SEQ ID NO: 298782

SEQ ID NO: 305164 - DNA, 1200 bp, Proteus mirabilis; identical to SEQ ID NO: 79256

SEQ ID NO: 305165 - DNA, 189 bp, Proteus mirabilis; identical to SEQ ID NO: 79255

SEQ ID NO: 305166 - DNA, 240 bp, Proteus mirabilis
atgctggcagaagaaatccgtgatcaattacctacattgcgcttaatgaccaatcacggtaaaggcaattttaaaaagcaattaggacgtgctgataaacatggtgctaaaatcgcgttaattttaggtgaagatgaaattaacgctggcacagtagccgtgaaagatttacgttcaggtgaacagaccattgtatcgcgtagcgaactggcccaacaattgacgctgttattaggttaa

SEQ ID NO: 305167 - DNA, 459 bp, Proteus mirabilis
gtgataacgacacagggaacaataaaggagcaacagggtgtcatcggtctgatggctgcagtaggttttatggtgataagtttatcgttactgacaagttttgcttatcattatcgtcaatgtcaattaatggtgatgcaagagttacaagcaaagcagacctttttattcgctggatctgcgttgtcatggggaatgaccttaacatgggatttatcgccttctcgtctttaccaatggcaatgtcgtacttttactgctgagcctaatatgaaaagctgtttctctttgagaggaaagacaagcgctttactactcggagaggctaaaagtcatagcggagataagatatctcattatcaatggattaatctggtgggtaaggaaaaactgcatattgaagcccaaccgaatggttggctagactactgtccactagttaaagaagactgtatttga

SEQ ID NO: 305168 - DNA, 1413 bp, Proteus mirabilis
  misc_feature (1370)..(1379): n is a, c, g, or t
atgttccatatttaccattcaaatcaattatcactacttaaatcactgatggtacattttatgcaaaatcggccactatcatcgccttttgagcaagaagtgattttagtgcaaagtcccggaatgtcgcagtggttacaaatccaattagcagaaagtttgggtattgctgctaatatccgttatccattacccgctacttttatttgggaaatgtttactcgggtattatcaggtatacctaaagaaagtgcgttttctaaagatgccatgacatggaaactaatggcattattgcctaattaccttgatgatccggcatttaaacccttgctacattatcttaaagatgatgaagacaaacgtaaattacatcaactagcggggcgtgtggcggatctctttgaccaatatctggtttatcgtcccgattggttgtcggcatgggaaaatgatcaactaattgatggcttgagtgacaatcaatactggcaaaaaacactgtggttggcactgcaacgctatacagaagatcttgcgcaacctaaatggcatcgtgctaatctttatcaacaatttatttctactttgaatgatgcgccagtaggggcgcttgcgcactgttttccatcgcgtatttttatttgtggtatttcagcattgccacaagtctatttgcaagcactgcaagcaatcggcagacataccgaaatctatttattgtttactaatccttgccgctattactggggagatattcaagatccaaaattcctcgctcgtctaaatagtagaaagcctcgacattatcagcaacttcatgaactaccttggtttaaagatgaacaaaatgcatcgacactatttaatgaagaaggggagcaaaatgtcggcaatccactattagcgtcttggggaaagttaggtaaagataatctctattttctttctgagcttgaatatagcgatgtgttagatgcttttgttgatataccaagagataatttattacatcaacttcaggccgatatactcgatttagaggatttttcacaaataggtcagacgcttgaggattaccaaagtagtgaaaaaaaacggatcatcgccaatgatgatcgctctttgacctttcatgctagccatagcccacaacgggaagtcgaggtattacaagaccaattactgcatctcctcgagcaagatgctgatttattaccgcgagatattattgttatggtggcggatattgatagctatacgccctatattcaagccgtatttggtaatgcgtccgcagagcgttatattccttttgccatttcagaccgaaaagctcgccaagtacatcctgtcttacaagcttttannnnnnnnnngttttaccgcagagcaagtgcttgcattacttga

SEQ ID NO: 305169 - DNA, 348 bp, Proteus mirabilis; identical to SEQ ID NO: 295830

SEQ ID NO: 305170 - DNA, 3822 bp, Proteus mirabilis
atgatgaagtggttgaaaaggataacactaacgctacttatcatcattttactggttttaggtgctcttgcatggattttagggacgcaatcagggctacattttgccattaatagtgcagctcgttgggtgccaggtttaaccattaacagtgttaatggcggttggcaagatttacgtttaacgggtgttgagtatcaaatgccgggtgtagacgtcaatgtgggggagttatcactaggcttaaatttaagctgcttgaaggataaacaactgtgtgttgaggccttaggcacacgtgatgttatcgtcaatgtagataccagtgcactccctccagcacaagaaacacctccttctgagcctttaactgagcttaatgcccctttacctatctatttaaactctctctcattagccaatacgcgtgtacaaattgatgatatggccctatcactcaatgagtttactacggcagcacaatgggaagggcgtcaagttaccttaaaaccgacagtcattaatgatttgttggtggcgttaccgaaaacacccgaagacggtagtgttgccgccatggcgcaagatgtaaaagaagttgcagcaacgacgcctcaagcggagcctaaaacaccgcaagagcaagagcaggcactagctgacactattaagacaattttcgccaagcctttattagcgcagttacccgaaattattattcctgttgatatcaatgtggaggggatagaaggtaaacagttacaagttagtggtgatacgcctgtgactattaatcaactctcttttcaagccaatacgcaaggtcaacaggttaatctcactaggctcagtattgatgcgccagaaggcaaagtcagtttaaacggtcaaattacactggataaacagtggccggttaatctagatatgcaagcgatgcttcgtgagatggcaggattggaagagtttaaagatcagcaagcgacactgtccttacaaggtgcgatacttgatgaattaaaactcgcactctctttaacaggaactgttaccgcaagccttgatgcacaagctgagctcgctaaagcacatcttccactaaaattaaccttagagagccaaaaagtgcgctggcctttaacgggagatgtgcagtatcaacttaatgatactcgactacgtcttaatgggcagacggataattatgatctttcattacgttctaatattgaaggacaagagatcccgccagccaaattgaccctagacgctaaagggaatgaagagaaaatagcactcactcgtttgcgtttagctgcattacaaggtcatgcggatattaccggtgtggcagattggagtaaggcgattagctggaatgcattattgactatctctggtattaatacagctaaacaatatcccgatatgccagcgaaattagatggacgtattgctacaacgggtagcctgtatggaggaagttggcaactacgagtgcctgaaattaccttagatggtaatttaaaaaataatcttattaaggcgcgaggaaacgcttatggtaatgattcggggcaatggaatattcctcaattaaccttaattctaggaaaaaataatctcgatattgcggggcacttaggtgatcagtgggcgcttgatgcgaacatcaatgctccggggttaaatggtttagtgccggggttagcgggcgttattaaagggaaagtgaatgttcgcggtgatattaataagccgaaaattattgctgatatcaatgcgcaagggatcaaatggcaagatcagctcagtgttgggtcagttgtcgttaaaggtgacattcagtcagatgacgtgatcagtggcaaactggcaattacagcacgtcagttaaaacaggctgatttgattattcgtcaattaacgctagatgcggcagggacagaaaaacagcataagcttaccttgaaaatggatggggaacccgtatcgggtggcctgacattagccggctcgtttgataaagaaaaacagcagtggcaaggcacacttaacaataccgcatttgatacgcctgtaggcgaatggcgtttaaataaagcgatggcgctaaatttattagcggaaaaacagcaagtgacgattggttcacattgctgggtaaatcctaatgcacaactgtgtgtacctaaagagatcactgtaggtgagagtggtagtgcggcaatcactttaacgcgttttgatttagccatgataaaaccattcttacctcctgaaactgcgctacgcggtgtctttacgggagatgctacggcaacttggaatgcgaaaggcggattacctaaagcgtcagttaaccttaaaggtcagggcgttggtgtaaaacaaaatgtcgatggtacggtattacctattgattttgatgcagttacgttaaatgcgggtatcaataatggtaaagcgaccttgcaatggttaattagtattgccggtaatggtgactttaaaggccatatcaatgttgctgatctagaaaaaacacgtcaattatcaggtacggttgatattgatagcctgacattagatctgattaagcctttcttgggtaaaggtgaaatagcgcaaggtagtgtaggggcacagctacgtttaggagggaatgcacaatcaccattgctatttgggcagtttggtattaaccagttaaaagtagttggtcactggatcccatttgacatcaccaaagggaatgtcgatattcgctttaatggtgcgacttctgatttaagcggtagaatcgaaacaccggaaggttatttaaatctgacggggaatgcggactggcgcaaactagatgagtggcgagccgtggtggctgcgaatggcaacaaattgcgtgtgtcattaccaccaatggttcgtattgatgttaacccagacttagtttttgaagctaatccacatttgcttaaattagatggtcgtattgatatcccttgggctcgtatcgtggtgcaggaattacccgagtctgcggtgtcggcctcttctgatgaagtgatgttagacaaagaattacaacctatagcaccaaagcagacttctatacctattcaaagtaatttggcgattaatattggcgatgatgtcacattagatgcctttgggttgaaagccagattaacaggggcattaaaagttgctcaaagtaagcaggggttgggattaaatggtcaagtggatattcctcgcggggaattcaaagcttatggacaagatttacaagtacgtaaagggcaaatcttgttctcagggccggttgatcagccatacttgaatattgaagcgatacgtaaccctgataatacggcagataatgtcattgctggggttaaagtcaccgggcttgcggataagccgaaagtggaaatattctctgagccggccaaaacacaacaagaagcattatcctacttgttaagaggtgaaggattagcaagtggtgattctgattcagcacaaatgacagccatgctaataggattaggtgttggacaaagtggacaactcgtaggacgtattggcgaaacctttggtatttctgatttagcgttagatacacaaggtgtaggggatagttcacaagttgtcgtcagtggtaagataaccgatgatttacaagtgaagtatgggatgggtatatttgattcgctagcgacgttaacattacgttatcgcttgatgcccaggttgtatttacaagcagtgtctggtatgaatcaggcaatagatctgctttatcaatttgagttttaa

SEQ ID NO: 305171 - DNA, 1743 bp, Proteus mirabilis
gtgccgagatactccgttatctacgttctctgtctgtcttctataacgtcttttgcttatggggcaaatttacgtttaaaagtagaaggtttagaagggcaactcgaaaagaatgtacgagtccagctatcaaacataacaacagaagaagttgcaccagacgggcgttttcgtgcgcgtgttgaaaaggcaattaaagagggcctacggcctttaggttattatcagcctacggtcactttctcttatcaagaaaatacccctccgacacgccctgtattaacagcaaaggttgagcttggtattcccgtactgttaaaaggggtcaatattgtactggaagggggagctaaaacagatgaacaatatgccaaagtgattaaagaaaacacccctcctcttgatagtgtgttaaatcatgccgaatatgaaaaattaaaaggctcgttaacagggcttgctattcgtcgtggttactttgatgcagatatggaaaaaagccagctcggtgtctctttagataatcacgcctcttattgggattttgtctttaatagtggtgaacgttaccgttttggtaaagtgaattatactggctcacaaattcgtgaagactacctacaaaatattgtgccttttaaagaaggggaatattactcttctgaagatttggcagagtttaatcgacgcttagctgccacaggatggtttaattcggcggttgtcacacctaatatcgctaaagcacgtagtgaaggcaattatttgctaccaatggatgccgttgttacccctcgttcacgtaactatatggagctagggggcggttttgccacagatgtcggacctcgattaaatatgcagtgggataaaccttggataaattctaggggccatagtttaacatcgaatatgagtatttctaagcctgagcaatctattggtgctaattataaaattccattaaaagttaacccattagaacaatattatggcattcaaggcggctataaacgtacagatttaaatgatactcgttcggataccaccacactgaacgtttctcgtaactgggatatgtcaacgggatggcaatacagtattaatacccgctggagtctgagccactttacccaaggtgatgtgaccaatacaaccatgttgctttatcctggtgcgaatgcaagtcgcgtacgccaacggggtggcatgatgccttattggggggatagccaacgttattcagtcgattattccaataaaatatggggatctgatgttgaatttctcgccctacaagctcagcaagtgtggatacgcacaccttgggaaggccaccgttttgtggtcagagggacgtttggctggattgaaacgaatcaatttgagaaagtaccacccgaattacgtttctttgctggtggcgatagaagtattaggggttataaataccaaagtatttcaccggaagatagcaaaggtaaactaacaggggcatcaagaatgctaacgggatctgctgaataccaatataacgtaactggaaattggtggggagctgtatttgttgatagtggtgaagccgttaacgattttacgaaaagtgattttaaaacaggtgctggtgcgggggttcgttgggcatctccagtagggcctgtaaagtttgatttagccgttccagtcaatagtggtgaagagcgtaagttacagttttatattgggttaggagctgagttatga

SEQ ID NO: 305172 - DNA, 561 bp, Proteus mirabilis
atgcacaaaataaccttggctgcacttttgcttagcacatctacatgggtatttgcccataatattactgaagatgccctactaccggcgatctctgtgagtgacaaaggggagcttctttatgatggtgccaaagataaatttagctatcaaaattggaatagcggactacttagtggcaaagtacgcacaattcaacatatcgctgggcgtagtaaggctaaagagatgaatgcgccactgattgaagccatcaaacaagccaaatttccacaaaatagttatcagacaaccactatcatcaatactgatgatgctatctttggtactgggccttttgttcgcggtagtgttgaagacagtaaaaaagagtttccttggtcacaatttattgttgatgctgatggtgtagcgcaaaaaggttggggactagaaaaagagagttcagcaattattgtgctggataaacaaggaaaagttcgttttgtcaaagaaggtgtattaagtggtgcagaaataacttccgccattaaccttatcaatgacttaattaaagaatag

SEQ ID NO: 305173 - DNA, 741 bp, Proteus mirabilis
atgttagaacaagtcagcgaattagcccgccaagcgggtcaggcgataatgcaaatttatcaacaatcagcgccaattgaagtacaggaaaagagtgaccattcaccggttactgcagcagatttagccgcccatcaaattattaagcaaggacttgccagtattgcgccagatattcctcaattatctgaagaagatcctcctgcgtgggaagaacgtcgccattggcaacgttattggctgattgatcccctcgatggtaccaaagagtttatcaataaaaatggtgagtttacggttaatattgcgttgattgaacagggtgtgccggtattaggcgttgtgtatgcaccagtacaaaatattctctactcagcagccaataaacaggcatggaaagaaacctgtggtcagcgtttaccaataaaagtcagccgtgctgaaccccccgtgattgttattagtcgttctcatcaagatgatgaattaaaagaatatttatcgcaattgggtgagcaccaaacggtggctgttggatcttcattaaaattttgtctagtggcagaaggaaaagctcagctttatccgcgttttggacctactcatacatgggatactgcagcaggacacgctattgcgatagccgcaggggcacatgttaccgattggaaaggggtgacacttgattattcaccgagagaatcactgataaatcctggttttagagtttctattttctaa

SEQ ID NO: 305174 - DNA, 390 bp, Proteus mirabilis
atgtctaaatcggcaaaaggtacgacagaacggcatggacggaacgtaaaagctaaatctggtttaaaccgctcaatactggagcagggctggtatgaaatgcgccgacagcttgagtacaagcagctctggcgaggtggtcaggtactggcaataccaccggcctacaccagtcagaagtgcgcttgctgtggtcatacagcaaaggaaaaccgccagtcacaaagtcaattcgagtgccttgaatgtggatatacagcgaatgctgatatcaacggggcacgtaacattttagcggcaggacatgccgtgcttgcctgtggagggagggtgcagtcaggccgcccgtcgaagcaggaacccgccgaggtgattcagacatcagtctga

SEQ ID NO: 305175 - DNA, 2994 bp, Proteus mirabilis
atgagccaacaaatagcggatctaacgattaatttaggggctgaaacagccgattttaaagagcaaatggggcgagttgaacgtcagctccaagaaaccgcagaaaaagccgaagccagtcaacgacgtatggctcaactggttgaacaacaagcgcaaactgctcgcagttcagcagagagtactgcgcagtctcttcaagaacttaacaatcaacaagaaatttctcaacaacaacgggctgattattatcagcggatcgcacaggaagaggcgcgctcagctattgaatcacgcaaacaagctgatgcttttttagagcaagctcaaagtgttgggcaaacgagagatgcacttgaacaactcacagaggttttaaataaatcaacaaaggcttataacaagctaaaaattacaggtgagcagttcgctgaaattcagaatgtcactaaatcaagaataaaggcgatacaagatcaacaagatgcaaatactgaaaaatattttaagcagattgaagcagttaaaggactttctggaggaacgtcggcattaagaaccattcaagctcagcttaatcaagaggtaaaaaagggcactatccatcaacaagactatcggacactgatttctgccattacctcagagtcaatgaagttgcgccgagaagaagagtctctaacgcaacaaaaaacgcgatttattcagcgactaaaagagcaaattgctactcaaaacttaagtcgtgaacagatgttgcgttatcaagcctctcaacttggtgtcagttcttctgcagaaatttatattcgtcgattatctgaatcgagcaaagaaaccaaagagtttgataaaaacagcaagtcattagctggtcgtcttcagggtattgccaactcatttaatatgggctcattggttcgtggtggtatctggggaggaattacggcaggtttaacaggcgttgcaaagctagcctatgatgcagaaagagaattttctcagtttaataaacaactgattttaaccggtaactacgccaataaatcagcgagccaattaaacgaaatggcgcgaaccctagcgggtggcggaattacgcgtggtgaaatggcattatccatttcaagtgtcgtcgggactggcgtattttcgaataatgagatttctcgtgtttcaaaagcggccgcacagatgaattacatcacaggccaggcgattgataccactattgatcagtttaaacgtctgcaagatgaaccgcttcaaatgtcgcttgaattagaaaaagcgaatcatcacctcactgcatcccaattagaacaaattcgaacactcgaattgcaaggtaataaaaccgaagcagctaagctggcgattgatgcttatgcacaatctattaatgacggtgctaatgatatatctgatagcctaggttttcttgaatcagcatggattaatattcaacgggaggcaaaaaaagcttgggacgcaatgcttgatataggaagagataaaggggttacagagaaactaaccacttataaagaacaactatatcaactgcaacttcacggaatggaaaatagctatgaagggagagaattacaaaaagtaattaaagagctggaaaataagaaatacgaacaagatcttaaaaatgcacaggctcaagcggttaaagatagtgaacaattcaaggttaatcagattagaaaccaagaaaaatggaaaagctatttcagttgggagactcagaggttacaaaaactagcagaattagaacaggataagcatagcctaactcaaaaacagtacgaagaagcaaaagcgatgattaattttcgtttaagagatcgccagatgccggggactgggaaaggtaaaggatatgtggtacccacaggtaatcgagaagaagaaaaagcttctcgtgatttacttgcattgcaagcccagttagaaatgcttaaaaagcatcaaagtgctaatgatgttattagccaacaacgcaaggattttcaaaaagagcaggcacaatttgcaattttagaacaagcgcaattgacacgccgattaactaacgccgaaaaatctttattatcaaataaagaaaatattctggctcaaaaggagaaactcgcattagtgggtgatgaagtcgccttacaagagcgcttaaataagatgcaagatcaggctgataaattcattgttcaacaatcggaaaaacgtaaagcgattgaagaaagtatgggcaagtcagcaagagagcaacaacgttacttagaacgcgctcaacttcttgcgggacaaaaagagaacccacagctaaataatatgttagctgagcaacaaaaaacctatgaagttgaagatcaaaaacgggctgattggttagcgggagcccaaacggcatggggtaattataaagatacggctcttgatgttaatactcaaatacaaaatgctacctctatggcgcttaatggatttagtagccagttaaccaacgtattatttgaaggtgaagccaatttcaaagactttacgaaatcgattcttaagatgctaacggatattttaattaaaatgtcattagttaaaggaatagaggcgatgggctttggttttggcgctccagtcgcgaatgctaacggtggtgtttacaactcagccagcctaagtgcttacagtggacagattgttcataaacctaccatgtttgcgtttgcaaaaggtgcaggcttgatgggagaggctgggccagaaggcattttccctttgcgccgtggtgctgatgggaagctgggtgttattgcaaaaatacccaatcagggaggaggcgttacccagcattatcacattactatacaaaatgatggtagtaatggtcagatagggcctgaagcattgaaaaaagtttatgaaattagtaagcgaggtgctcaggactatatcatgagccaacgtcgtgatggtggagctatgtag

SEQ ID NO: 305176 - DNA, 195 bp, Proteus mirabilis
gtgtctcgatcattagcacacggtgaaacgcgtgatattgagcaggtttatcatgaagtgctttcgcagtggccaccagaggcgcttggaaaagcagcaaaagaagtcctagtcattagcgggatggctcaaactgaaaacacggaaagcgaaaaccatcaaggtgatgttcaggcagagccactggaaaagtag

SEQ ID NO: 305177 - DNA, 513 bp, Proteus mirabilis
atggtgttatttgccgtcacttggccggatgcaatatcactcactttatcaaagtcatcgatattactgatgataaccggacttatcattgatttagcattagtgtttaaatactcaagatctagctctaagataggctggccgagtttaacctctgtaccttcttcaaccagacgtttaaagccttttcctcctaatgcgaccgtatcaatccccatatggacgataatctcaacaccgttatccgtttcaatgcaaaatgcgtggttagtatcaaagatttttactaccgtaccggcagcaggtgccatcacaatatttgatgtgggtttaatagcaagaccatctcccacgacaccgcttgagaaagcttcatcaggcacatcttttaatgcaaccacttcaccatcaaatggcgcgaccatttcaagaatgactttggcatcattattagtctgtttttctgatgttttttctgtcgataccgcgttatctgtatgtctaccagcataa

SEQ ID NO: 305178 - DNA, 504 bp, Proteus mirabilis; identical to SEQ ID NO: 52325

SEQ ID NO: 305179 - DNA, 504 bp, Proteus mirabilis
atgccgggcaaccgcccgcattatgggcgttggcctcaacacgattttccgccatttaaaaaactcaggccgcagtcggtaacctcgcgcatacagccgggcagtgacgtcatcgtctgcgcggaaatggacgaacagtggggatacgtcggggctaaatcgcgccagcgctggctgttttacgcgtatgacaggctccggaagacggttgttgcgcacgtattcggtgaacgcactatggcgacgctggggcgtcttatgagcctgctgtcaccctttgacgtggtgatatggatgacggatggctggccgctgtatgaatcccgcctgaagggaaagctgcacgtaatcagcaagcgatatacgcagcgaattgagcggcataacctgaatctgaggcagcacctggcacgactgggacggaagtcgctgtcgttctcaaaatcggtggagctgcatgacaaagtcatcgggcattatctgaacataaaacactatcaataa

SEQ ID NO: 305180 - DNA, 195 bp, Proteus mirabilis
atgagtaataagctacttaggcgtgtagcaataggtgatttacgggagaaacgccacgcggtaaccatattaatgattagccaaatagccatggcaataatcgcgacaccggcttcccaatactgcgttaaggtgcctaaatttgagctatcaaaagcaaggttaaaatctgaaaatagcagtgactctttataa

SEQ ID NO: 305181 - DNA, 2076 bp, Proteus mirabilis
atgagttggcagaccgtttattttcattatgatgaagatgcgcttaccgtctttgctaatgccggattattaagacgcgcaagaaaagatgttgataacgaaaaagtctctgttactgatgcaaatacagggcaatttagcagtgatgggcaaaaagtcgttttacatgaagcaggcattcagcaagccagttgtgattgttccgcagcaggttgttgcaaacatattttagccgctattttatggttacaagccaacaacaattcgactgatgatattaatactgataatcccattgaaacatcagcagaaaaaattatagcgcctgttgaaacaccgcctttattaccctctttatttacgcttgatcccgagttactcatcaaaaaagcaggtaaacccgcctgtcggactgcgattaacttaattgaacaatgggaagataaaactttagttctagaagacacaggaacccagctaaaaatccaactccctgatgttgatgaaccggtcattttcttacaagcaagtggttacgatggcatgttatcccctttttctagctctcagaaaaaagcttttcatcttgctattgtcgcgaaaatatttgagcaaaatacacagccttggacgtggcctgaagatttaattcccttaaaatcttcaaaacgcccactaaatgatgaagaaattgcccttattaatactattgaacaatttattgatgatctattacgtcaagggctatcacacattagtttaagtagcgcaacgcaattacatttacttaatatgtctgctcgtgccgagggtttacctcgtttagcctcttatttacgaacattaagtactcaagtcaagcggttagcagaaagacatttcactatggatgaaagcaatgtcttacgtctattagctcatatctcagcctatcttttccagctatcttatgcgacacctgaacaattaaaaacattacgaggacaacttcgccgtcaatatgatgataaaaaaaccagtctcgcgcttattcctattgatgcacattggtggacagcacaaagtggcgcattaggcacaacttttactttctgggataaagaagcaaaacaatttttacaagcgacacaagctcgccctaatcaacttgataccctatttaatcgctatagtgtttggcatagtttatcgttatggaaacaaactgcagataagctcatgcgccgacctttcttattacaagcgcctcgtatttctgatgaagggaaactagctactattggcgatagctttgcgcaaaatcaaaccgattttcttgatgtcacagattatcatcaactacaaacagaattaggtattcataactggcaagatttacccaattattttacggatcaaccagaaggatttctttcccctctggttttacatatcaaaagctataatcccttaatttggcatgaagtagagcagtgtgttatttgggaagtggtagataataatggaaattcggcctttttgcgcctttattgggaaggcgaaacgcaaaataatttagaagaattacgttttctcactaaacgagaattagaaatcgttgcgatcaccgtgcaacctgttcgacgtgatttcaatatcgatttattacccaccaccatttggatcaaaacagagcaaggcattgaaatgttttatctcgattttgaccaatttccacgtaagaaaaaacagtctggttttattagtcatattcaagaatatatggctaaacgtaagcgacaaacggcaatgcatcacagcgaacctacccttgcacaaaaattttgtcgccccattttatccgtattggaagcccaagcatgtacagggcgagaacaactttctgcaatgcaaaaagagcaattagagagaagcaaacaaattgctgacgatttaggtatgacattaatagctaaccaattaactcgttatctcgctttaactgctcgtgactctcaagctttattacagttaatttggctatgtgataatctgcaacaattacaaagcccgctacccattcaacttaatgaataa

SEQ ID NO: 305182 - DNA, 489 bp, Proteus mirabilis
  misc_feature (17)..(26): n is a, c, g, or t
atgcattacgttatctnnnnnnnnnnacgttatctaggttcgtatattgacgaaaaggccttagcggccgtgctaaatgcgacctttagtacaggcagcgctcccgaacatgccattggttattttgtcggtataatgcgcactgcaccagagctagtcattcgcctaccgttgttagtcaatcacttaaatagcttattacagcaatgggatgaagaacgttttattcagattttacctgatctgcgttttgcctttagccaacttaatcccaaacaaaatgcagagcttgcacaatatattgctaatgatattggtttagatacgcaagccttatcactatggcaatcagaatttagtgccaagcaaatgcttgacgccactaaactcaatcaaaaactgcaacagcgcattaagacacaaggcatgatttcttggtttgaggcgaagaaaacagagaaaggagaccatactcatggagaagcatga

SEQ ID NO: 305183 - DNA, 366 bp, Proteus mirabilis
atgaacgaatatcacttaaaattgccgtggccgccgagcaataatacgtactggaggcattgtagagggcggcattacatctcaaccaaaggcaccaactaccgaaagcaagtaacagattacatcaagcaacataacctagacgtcaaaaccacttcccgcatcaaaatagtcatcactgcaaacccccctgataaacgcaaaagagacctcgataacttgccaaaggcagttttcgattcgttaactcatgctgaattttggggcgatgatagccaaattgatgatatgcggatccgtcgaggtgaaaaggttactcatggctcattagatatcacgatatgggagatagatgatgttcactga

SEQ ID NO: 305184 - DNA, 228 bp, Proteus mirabilis
atgaaacaagttcaagcaatgacgacgttagttttaattgacggtgttacatatcaaatagtgctccctaaacatattatcgcattacaagctaagcaagcattaacgatggttaatgaatttgatggaatgctatttccctgtaaatttaccaatataaagccaatgggagctgatggactgccgttttatataagtgatagtggaactgagaatgaaaaagtatga

SEQ ID NO: 305185 - DNA, 204 bp, Proteus mirabilis
gtggaaagtaaatttaaagtcggtgatagggtttatattaaaccactgggggtaaagggtagcatttattttattgaagatgaagatagcaatctaccttatttagttgaattcaaggacggtcaaacatcatggtggcatgatgaagatttggagttaatcaatgaaacaagttcaagcaatgacgacgttagttttaattga

SEQ ID NO: 305186 - DNA, 174 bp, Proteus mirabilis
atgaaattaacagaacgtcaaattagcacattaaaaaatatatataaaggattaggccggctatgcaataaaagaagcctttcttcgcttgaaaagaaagggttagataaacaaagcataattgggtggtatttaacgagttcaggtattgaagaattaaataaggtggagtga

SEQ ID NO: 305187 - DNA, 321 bp, Proteus mirabilis
atggatagttttacacaccataatcaaattatgaaatttacattaccagaaccagatcctaggaatgtttgcaacttttgcggtggaagcggtagtaaggacaatttaatccaaggtaaagcagcaaatatttgttttgagtgttctgacttggcgaaagaaattgcagatgaaaagcgtaatgaagtggctgaaaaggaaattaatcaaatttctaacaccctatccactactcgtgacggtaattttgatgtagatatggctcgagctctagtttacgccaatcgtttatataaagctggatatagaaaggtggagtga

SEQ ID NO: 305188 - DNA, 177 bp, Proteus mirabilis
atgaaaactaactattacagcgctatgcgtgattgcatggcggtgcgtatcactacgccttttttacaactcgcacgtcaagcggcaaggatagccgtttcaactaataacaaggatgtctggcggttggcgagtcaactacagaagatggcttacgggaggaaagtatgtcactga

SEQ ID NO: 305189 - DNA, 231 bp, Proteus mirabilis
atgctagctcaaggcgctaggtttggttctgaattattaattacaaaaggtcagtttcatgagttaatggccgaggcgctttctgaggctagatatttatatggatatcactcagatgaaattgatgaatttgttcaaggtgacggatctagcttgattgaaatgcaagaatgtagctattttgatgaaagagccaaaacaataatcaagttcgcaaaagccctaggttag

SEQ ID NO: 305190 - DNA, 240 bp, Proteus mirabilis
atgacagataaaacaggtggtgcggcttttccagcaagcgggcacccagacatgcaatttgtagcgcaggaaggcatgagtttacgcgactatttcgctgctaaggctatgaatgctgatttatcaaatagtgatgaatctcttgctggatatggctctcaatttactgatgcgcagttagagagctttgcagcattctactaccgcatggcagatgcaatgttaaaggctagggggtga

SEQ ID NO: 305191 - DNA, 489 bp, Proteus mirabilis
atgattattcaagcattaaataatagagaattcttaatgaaaccaataactcaggataaatttaacgagttactggaagaattcggagaagaccaactagcaagagagttggactacttgcaaaaaagagggttagtacaagacggtgctgtgagaatcggcgttgtcgatgatgaaccctattcttttaatattcacaaaatggggttaaccgctgatggtgttgactgcgctaatgccgatactcttggtaacaaattaaacgttgttaacataaaaattcacgaaagcaccattaaaaacttagaagcaatgatcagagccgttaacctacctgatgaagataaaaaaacgcttctcgatatggtaaaggaaaagggcgctgaagctgttgttagcagaatggttgattatgcatttgctaatgcaagtattgctaccaagctattccttgaagccaccaaaacaaaacttggctttcatgactaa

SEQ ID NO: 305192 - DNA, 561 bp, Proteus mirabilis
atgtggaaccaagttgatcctaactcaactaaaccacaatacttaatcaactgggatggtttccgtacttataacttcgacactatcagtggcgtagagtataaagttgatttaactcagcctgctaaatatgacgttgattgccaagttgtcaataaagatgcaaaccgtatcaaaaatgtcacttaccaaggcaaacctatcgatcctaaagcaactttcttaattgcaaccaataactatcgtggatacggtggtaaatttgcgggtacaggtgaaagcaatatcgcctttgcatcaccagatgaaaaccgtgcaattttagcttcttatattgctaagcaaacgaaagaaaatggcgaagttgcaacaaaagctgcgaataattggtctttcttaccgattaagacagataaacaattagatgttcgctttgaaacttcaccaagtgaaaaagccgctaactttattaaagattttgctcagtatccaatgacctttgtggaaaatgacgatatcggttttgcaatttacaaaatcgacctaactgagaagaaataa

SEQ ID NO: 305193 - DNA, 150 bp, Proteus mirabilis
atgaatgaattaatcaagcaaagaaacaaatacaaattaagcagtgaatcttttactaataaaagtaaaaagtattcaaaagcggataaagcaacactggctttatgtgccattgttattgtttcgtttcttgtgaaagtttctatctag

SEQ ID NO: 305194 - DNA, 2169 bp, Proteus mirabilis
atggcgactcaacaaaggatacaaacctcatcagagaaatcaccggtattccagttttcagtgcgtcccgataaggtcggaattatcaccattaatgttgtagatgaaaaggtcaatacactgaaagctgcttttgttgaacagtttcaaaatgtattaaaacaggctcagcaacattcaggtgtaaaaggattaattatcacctcaggtaaacctgataattttattgctggtgctgatatatcaatgattgcagattgcaaaaccaaagaagaggccaccgcattagcaaaagcaggacaagatctttttactcaattagaaaattatcctttgcctgtcgtcgcagccatcaatggcgcctgtttaggtgggggattagaactagcattagcctgccatgggcgaatttgctccgataacagtaaaacacgtttaggccttccggaagttcaattaggattactaccaggttcggggggaacccaaagattaccacgtttaataggggttacgatcgctttagatatgatcttaactggacgacaaattaatgccaaacgggctttcaagcttggcttagttgatgacgttgtaccacaagctattttattagatgttgcagcccaatggattttaacagctaaaaaagctgctaaaaaacagactattatggagcgtttttgggcaaataccacattaggaagaaatatcctctttgatcaagctaaaaagcgcactttagctaaaaccaaaggtcattacccagcggcagagcgtattcttcacgttattgaacgaggcttagagaaagatattcaaacaggttttaaagaagaagctaatgcgtttggtgaattggccatgaccccggtttcatctgcattacggcatctcttttttgcctcaacagcattgaaaaatgaaacaggatcatctgcaaagccagataacttacaccatataggtattttaggtggggggttaatggggggcggtattgcttttgtgacagcaacaaaaggtaatttacccgttagaattaaagatattagtgataaaggtattgcgcaggcacttaactatagttggaaagcgttatcaactaaggtcaagaaaaaacggctctctgctcgtgaacgccaacgacaaatggggttattatcagggacattggattatagcggtttccatcaaactgaccttattgtcgaagctgtttttgaagatttggctttaaagcaaaaaatggtggctgatattgaagccttaggtgaaggcaagatcatctttgcttcaaatacttcttctcttcctatccataaaattgctgaaaaagcacaatatccagaaaaaataattgggctgcactattttagtcccgttgaaaaaatgcccttagttgaagtgatccctcatgaaaaaacggatgctaagacaatcgccacaaccgttgcttttgctaaaaaacaaggcaaagttgccattgtggtaggagataaacccggtttttatgtcaatcgaattctcgccccttatattagtgaagccttaacctgtttggttgaaggggaaacgatagagaatattgacaaagcattagttcaatttggctttccagtcggccccattcaacttttagatgaagtgggaattgatattggtactaaaataacgcctattttagtcaatgagtttggtgagcgttttgcatctcctcctgcggtggatgcgattattgcggatgacagaaaagggcgtaaaaacggtcgtggtttttatctctataatcagcatgccttacctttctctttaggaaaaaataaaaagcgtgcagatccgatgatttatcgcttattacaggttaaacctaaaaatcagttatcggcttcagaaataaccgaacgttgtttattgcttatgcttaatgaagctgttcgttgtttagatgaaaacattattcaacaacctagggatggtgatattggtgctgttttcggtattggttttcctcccttctttggtggaccattccggtatatagatagtatgggaacaacaaaaatagtcgataagcttaatcaattaactgaaaaatacggtgaaaagttccagccatgtgagcgattagcagcaatggccgagttaaatgaacgattctatagctaa

SEQ ID NO: 305195 - DNA, 1305 bp, Proteus mirabilis
atgaagtcatcagcgagcagtaccataaaagatcgtgttgcgattgttagtggattgcgtctcccatttgctaaacaagcaaccgcttatcgggggatccctgcggttgagctggggcgctcggttgtacaagaattagtgatccgtaatgaaattcctcctgaaattattgatcaactggtgtttggtcaagtagtacaaatgcctgccgcaccgaatattgcccgcgaaattgtacttggcgcagggctaagtgtaaaaacagatgcttatagtgtaacccgtgcttgtgcaacgagttttcaggctattgctaatgtggctgaaagtatgttggcaggtcatgtttcagtgggtattgctggtggcgcagattcatcttctgtattaccgattggcgtgagtaaaaaattagccgatgttttactcagtttaagtaaagcgaaaacattagggcaacggcttagttatttaagtcaactacgttttggtgatctgctacccgttgcacccgcagtggctgagtattcaacaggtttacgtatgggggatactgctgagcagatggctaagacttatcatatttcaagagttgcgcaagatgaattagcgcatcgctctcatcaattagctgccaaagcgtgggaaatgggaaaattaaatgacgaagttatgacggcatttttcccaccctataaatcaggttttcatcaagataataatatccgcaaaaattctgtacttgattcttacgcaaaattgaagcccgcctttgataggcgccacggtagtgtgacagcggctaatagtacgcctcttacggatggtgctgctgctgtgctaatgatgaaagagtctgttgccaaaagtttaggctatcaacctttaggttatctgcgtagctatgcttttaccgccattgatgtctggaaagatatgttactggggccttcttatgcgactccgttagcactatcaagagccggtcttactttgagtgatttaacactaatagatatgcatgaagcttttgcggctcaaacgttgagtaacttaaccttatttgcaagtgataaatttgctcaagagcaacttggactgtcaaaagcaataggcgaagttgatatggataaattcaatgttcttggtggctctattgcttatggacacccctttgctgcaacaggggcgagaatggtgactcaaacattacatgaactgaaacgccgaggtggtggctttggtttaacaacagcttgtgctgcgggcggattgggtgcagcgatgattttggaggtggaataa

SEQ ID NO: 305196 - DNA, 738 bp, Proteus mirabilis
gtgcaaaccgaacactttctgtatgatgcggcggccaatttactgccccgtccgcacagcgaagcaccgcataaccaagtacaaggcagtgataagtatgattatcgctacgacggttttggtcgcatggtctcccgctatgaaaaaggcagtagctcgggacaacgctatcactatgacagtgaccaccgcattatcgcggtggatatcgaccaagggcccttagggtatcagcgagcggaatactgctacgatatcttagggcgccggattgaaaaacggttatggaaagccagtgcgattgccaatacggtgacctatcaccaacatgagccggatgaagtgtacacctttggctggatagggatgcgactggtgtctgagcacagcagcgcagcgccccataccacggtttatcatgcttacaatgaccaaagttatacgcctctagcccgcattgaatgtacggataacccgcttaatccacaacgggcgatttattatacgcacagcagtttaagtggcttaccggaagcgttgaccaacagtgagggtgaaatagtttggcaagggcaatacagtgcttggggacatttacagcgtcaaacccgccccacaagcacgtttaatcgtgaacagaacctgcgttttcaagggcagtatttcgacaaagacaaatttgtcgggaacaaatttgaacagcgcttgcgctggcccgtagggcgagtatcaggatga

SEQ ID NO: 305197 - DNA, 954 bp, Proteus mirabilis; identical to SEQ ID NO: 295503

SEQ ID NO: 305198 - DNA, 2115 bp, Proteus mirabilis
atgcgttctctgtttgccagcacaggccgaggtctggaagaattattaaaaactgaacttgaacaccttggtgcccagtcttgccagattacgcaaggtggtgtctatttccgtgctgatgataaaaccatgtatcagtctttgctctggagccgtttagcttctcgcatcatgcttccgctaaatgaatttaatgtctacagtgatctagatttataccttggtgtgcaagcaattgattggagcgaagtatttacagttaatcatacttttgctattcactttaatggcactaatgatgtgatccgtaatagccaatatggtgcattaaaagcgaaagatgctatcgtcgattcattccaacgtaaaatagggcaacgaccggatgttgctaagcaatcaccggatattcgtttaactatacatctacataaagaaaaagcgtcattatctttagatctcagtggcgatggattacatcaacgtggttatcgtgacttaacagggcaagcaccgctaaaagagaatctagccgcagcgattattatgcgttcaggttggaaaaccgatacaccattaattgatcctatgtgtggctcaggtactttacttattgaagcggcaatgatggcgacggattgtgcccccgctttaaatcgagtccattggggttttcgtcattggttaggacataatgaagcgctatggaaagaagtcactcatgaagcatttgcccgcttccgtgaaggtaaaaagaatactcaagcgcgtttttatggtttcgatgtggataaacgtgtattagatatggcaagagccaacgcacgtcgtgcggatgtggccgatttaattacttttacccaaggtgatgcagcaaaactgactaatccagtatccacgggtgttaaagggacgattattagtaacccgccttatggtgaacgtttagaaagtgaacccgcactcattgccttacatagccagttaggacgagcggtaaaagcccatttcccaggatggcgattatcactttttagtgcttctcctgaattgttaagctgtattcagttacgtgctgagcgtgaatttaaagctaaaaatggtccgttagattgtgtacaaaaaaactatttattatcagaaacaccttcgacgattaatacacgactggcggaagattttgctaaccgtttacgtaaaaatgagaaaaaactcgcaaaatgggcaaaacaacagcaaattgagtgttatcgcttatatgatgctgatttaccagaatataatgttgcggtagatcgctatggcgaaaaagtggtgatccaagagtatgcacctccaaaaactattaatgaacataaagcacgccagcgtttatttgatgtgattagtgccaccatggaggttttagcattacgctctgatcaactaattttaaaaactcgtcaacgccaaaaaggtaaacaacaatatgaaaaaatggcagagaagggtgatttctttttagttgatgagtttggtgccaaattctgggtgaatttaaccgactatctcgatactggactgtttttagatcaccgcattgcccgcaaaatgttaggtgaaatgagcaaaggaaaagactttttaaatctctttgcttataccggtagcgcgtcagtccatgctgggttggggggagctaaaagtaccacaacagtagatatgtcaaggacttatcttgaatgggctgagaaaaactttcaagcaaatggattatcaggtagacaacatcgtttaatgcaggcggattgcttacagtggctaagccaaagtaatgaacagtttgatgtgatttttatcgatcctccgacgttctctaattcaaaacgcatggaaaatacctttgatgtacaacgtgatcatattgaattaatgaaacatctaaaacgtttgttaagaaaagacggaacaattatgttctcaaataataaacgtggtttcaaaatggatcatgaagcattagcgaatattgggttaacagcaaaagagataacacaaaaaacgttatcgcaagattttgcacgtaaccgccaaatccacaattgctggctattaaatcatgctggtgaggaataa

SEQ ID NO: 305199 - DNA, 1284 bp, Proteus mirabilis
  misc_feature (1269)..(1278): n is a, c, g, or t
atgctgactcaattaactattagtcattttgccatagtccgtgaacttgaaatcgacttttctggtggcatgaccacaattaccggtgaaacgggcgcaggtaaatctattgcgattgacgcattaggcttgtgtttaggaaaccgtggtgatgctaatatggttcgccctggtgccactagagcggatttatgcgcacgattttcactctctgataccccttccgcccagcgttggttagaagaacatcatcttgacgatcataacgaatgcctattaagaagaaccattgcagcagatggccgctctcgtggttttattaatggtacttctgtccctttgtctcaactaagagagcttggctcattgctgatccaaattcatgggcaacatgctcatcaacaactgttagagcctcgctaccaaaaacatttacttgatatctatgctaatgaacctgctttattaaaaaagatgaaagcggcttatcaaacctggcatcagagttgccaaaccttagcgacttttcaacaacaatctttagaaagagaagcaaggcaacaactgattgattatcacttaaaagagcttaacgagttccaacctgttgcgggggaataccctgaattagatcaagaatataaaaggttatctaattgtggtcaatttctgaccttgagccaaaatagtttgcagatcttaagtgataacgaagaacaaaatattttaagtatgctgaatgtggccaaacatgagatcagcgaactttccacaatggagagccaatttaattcactgttagatatgctggaagaagcaagtattcaaattagcgaagtgagtgatgaactacgccactacagtgatcgtttagaaatggatcctaaccgtttattcgaattagaaaaacgtatttccaaatatattagtctatctcgtaaacatcgcgtcacccctgaagagctatatgaactgcatcaacaattaattgaagaaaaagaggcactattacgccaaaatgatgactgtgatgcattaatggaacaagttaaaattgatcatgcagccgcattggacgtggcaaaacaacttcatcaaattcgtcaacagtatgcacacgaattaagtcagcttattaccaatagcatgcatcaattatcaatgcctcatggctatttaactgtagatacattgtttgatgaaaatgtcttacaaattgatggtgcgacaaaagttgagttcaatgtcaccaccaacccggggcaaccnnnnnnnnnnctctaa

SEQ ID NO: 305200 - DNA, 2292 bp, Proteus mirabilis
atgaatcacagcctgctcgtcacaaaacgtgatggtcataaagaacgcattgacttagacaaaattcaccgtgttattacttgggccgctgaaggtctagaaaatgtctctgtttctcaagttgagttacgttctcagattcagttttatgatggtatcaaaactgccgatatccatgaaacactggttaaagctgctgcagacttaatatctggtgaaacacctgattatcagtatcttgctgctcgtcttgctgtctttaatttacgtaaaaaagcctatggtcaatttgagccaccggcattgtatgatcacgttaaacatttagttgaactcggtaaatatgaccgtcatcttctcgaagattacaccaaagaagagttcgaacagatggataagtttattgttcatcaacgtgatatgaatttctcttatgcagcagtgaaacagctagaaggtaaatattttgttcaaaaccgtattaccggtgatatttacgaaagtgcacaatttctctatgtgttagttgccgcttgcctattttcgcgttatccaaaagagacgcgtatggattatattgagcgcttttataacgcggtatccacatttaaaatttcactcccaacacctattatggcgggtgtaagaactccgacacgtcaatttagctcctgtgttctaattgagtgtgatgatagccttgattctatcaatgcgacctcaagtgctattgttaaatatgtatctcaacgtgcaggtattgggattaatgccggtcgtattcgtgcattaggtagtgctattcgtaatggtgaagcatttcacaccggttgtatcccattctataagcacttccaaacggcggtaaaatcttgttcacaaggtggggtacgtggtggtgcagcaacgctattttatcctttatggcatttagaagttgaaagcctactggtattaaaaaataaccgtggtgttgaagataaccgtgtacgccatctcgattatggtgtgcagttaaacaaattaatgtatgaacgtttaatcaaaggtcaggatattacattatttagcccgtctgatgtgccgggtctctatgatgcattctttgctgatcaagacgaatttgaacgtttatatgtacaatatgagaaagataagagtattcgccaaaaacaagttaaagcggttgaattattctcactcatgatgcaagagcgtgcctctacaggtcgtatctatattcaaaacgttgaccactgtaatacacacagtccgtttgatccggcgattgcacctatccgtcaatcaaacttatgtttagaaatagcactaccaaccaaaccattaaatgatattaaagatccaaatggtgaaattgccctgtgtacactttcggcctttaatcttggggcgattgaaaatctagacgatttagaagagctagcacgtttagccgttcgcgcgttagatgctttgttagattaccaagattatccaattttagcagctaaacaaggtgctatgggtcgtcgtacactgggtattggtgtgatcaactttgcttattatctggctaaacacggtgttcgctactcagatggtagtgcaaacaacttaacacaccgtgcctttgaagctattcaatactatttattaaaagcatcaaatgaattagcaaaagagcaaggggcatgcccatggtttaatgaaaccacctatgcagaaggtatcttacctattgatacttataaaaaatcattagatgtactgactaatgaacctctgcattatgactgggaaagcttacgcaaagagatcaaacaatacggtttacgtaactcaacgctctctgcattgatgccatcagaaacatcatcacaaatatcaaatgcaaccaatggtatcgaaccacctcgtggttatatcagtattaaagcttctaaagatggcatcttacgtcaagtggttccagaatatgagcgcctaaaaggggcttatgaattactgtggcaaatgccaagtatcgaaggttatttgcagttagtcggtattatgcaaaagtttgtcgaccaagcgatttctgccaacactaactacgatcctactcgtttccctagtggtaaggttcctatgaaccagctgctaaaagatttgctgctcgcctataaatatggtgtgaaaacactctattatcacaatacccgtgatggtgcagaagatgtacaaggtgatctggaagaagtcgttgaaacggcagattcagattgtgaaggcggcgcgtgtaaaatttaa

SEQ ID NO: 305201 - DNA, 738 bp, Proteus mirabilis
atgaatgataaaacaacctctttgcatgctaacgtagatcagcatgaaatcgacaaatttgagagtgtcgcatcaagatggtgggatcttgaaggtgaatttaaacccctacatcgcatcaatccactaagacttaattatatccaagaacgtgctgatggcttatttggtaaaaaagtacttgatgttgggtgtggtggcggtattttatctgaaagtatggcccgtgttggtgcagaagtcaccggacttgatatgggtaaagagccattagaggtcgcacgtctccactcactggaaaccggtatccctgtcacctatatacaagataccgttgaaaaccatgccgcagaatatccacaacgctatgatgtggtcacttgtatggaaatgttagaacacgttccagacccttcctccattgtaagatcatgtgccaaactggtgaaaccaggtggacatgtattcttttctaccatcaaccgtaataaaaaagcgtggtttatgctggtggtaggcgcggagtatattctgaatatggttcctaaaggcacccatgatgcgaataaatttattcgtccctcagaattattaagctgggtcgatgaaaccaatttacgtagcaaaaatatgattgggttacattacaatcctattacagacaaattccgattagcgccaaatgttgatgttaattacatggtgcacactcaagcgaccgataattcggatttgtga

SEQ ID NO: 305202 - DNA, 780 bp, Proteus mirabilis
atgtcaaaaattttaaaagatttagagtttacttttacaggaaaacgttatggtacagatggaaatgacgatattgatgccataggttttggagggatcatttatgcaggaaagggacacgatacaatcacagtcggaacatttgcagttaccgcttacaccggagacgggcacgattttgtcagagggggaagtgcttatcttaagattattgatgagaacggtgatttagatgtcagaggattaaatgcatggggagaaattgaaaagtccggtcatggcgatctgaaatatgttggtgcttctgccgcgattaagattaatcatactggatatgaatatggaaatatcaattattcaggagctgctattgcaaatatcatcacccgtaaaggcgcaattagtaatatcaactaccaaggtgctggcggttacaatcaaatttggcatgaaaccaatactggcaatatgacgtttaaaggggggggaggctataataaattggttcgtacttggtttaatagctatcaaaattcaaaaggaaatattaattttgaaggattaggcggaggcaacggaatcttctctcgcgttgaaacaggtgatattaaatttaccggaggtggcttagaaaacgtcttaatacgcgaaggtaaatcaggcgatatctttatgtatggagcaggagccaataataggcttacacgtatcagccgaaatactgatacctataaagaaacaagtggcaatatctatttttcggggggggggaggttataa

SEQ ID NO: 305203 - DNA, 1242 bp, Proteus mirabilis
atgatgacacattccattgaaaaagcgcgggatgactttcctattctttcccagcaagtgaaagaaaaacctttagtctatctcgacagtgccgcaagtgcgcaaaaacccgcttgtgtcatggagcgtgaaaaacagtttgccttaacacaatatgccgcggttcaccgcggcattcacacattaagtgcaaacgccaccaccttagtggagaatgttcgtaagcaagcagcacatttcttaggtgcaaagagcgaagaagaaatcgtttttgtaaaaggaacgacagaagggatcaatttagtcgcttacagttatagccatcgtttcctaaatgatggtgataacattatcattactgaaatggaacaccacgcgaatatagtgccgtggtatatgttagcaaaacagtatggttttcatgtccgtgttattcctctgcttgctaatgggcaactcgatttagcgcaattaccccaattaattgataacagaactaagttactggcgatcactcatcagtctaatgtactgggaaccgtcaatcctattgctgaaattatttgccaagctagagagtattcggctcagcaagggggcgagttacatattttagttgatggggcacaaagtgcgatgcatcaagctatcaatgttagtgcgttagattgtgatttttttgtatgtagtggccataaactttatggtccgacagggattggtttgctatatggcaaaaaagcgctacttgatgaattacctccatgggaagggggtggcgctatgataaaacatgtgcatatcaatggtgatattacctacgcggatgcgccgtggcgatttgaagctggaacgcctaatattatcggtatcattggcttaggggcagcattggaatatcttgctcaatttggtatggataagattgctgcatatgaaaatagcttaatgcaatatgcacaacaacaattaaccaaagtaaaatcattaacgctttatggtaatgaagcgcgtcaaggtgtgatagcatttaatttaggtaagcatcacgcttatgatgtgggaacttttcttgataactatggtattgctattcgtacgggtcatcactgtgcgatgccaattatggactattatcaggttcctgccatgtgtcgcgcttcgttgggattatacaataataaagcggatattgatgcactggttaatgcgttgttacgcattgaaaaactattaggctaa

SEQ ID NO: 305204 - DNA, 759 bp, Proteus mirabilis; identical to SEQ ID NO: 296415

SEQ ID NO: 305205 - DNA, 147 bp, Proteus mirabilis
atgtctcatgcacaaagcggtattttagtcgcacatagtaaattcggtctatttattgaagcaatggtggtgggggaaattgatcaactacgtcaaggctgcaatcccttagcgaattacaaaaacagtatcctgatgcgtcattag

SEQ ID NO: 305206 - DNA, 429 bp, Proteus mirabilis
  misc_feature (396)..(405): n is a, c, g, or t
atgtctgaagcaattcgtttaacacaatacagtcatggtgccggatgtggctgcaaaatttcaccaaaagttttggaaacgattttacatagtgaacaggctaagtttcacgatccccatttattggttggtaatgaaacgaaagatgatgccgctgtttatgatttaggtaatggcactggaattatcagtaccactgatttttttatgccaattgttgataacccctatgactttgggcgtattgcggcgactaatgcgattagtgatattttcgctatggggggtaaacctattatggcaatagcaattttaggttggccaattgataaacttgcgcctgaaattgctcgtgaagttatcgaaggtgggcgagccgcctgtcaagaagcgggnnnnnnnnnnccttgctggtgggcattcgattga

SEQ ID NO: 305207 - DNA, 1524 bp, Proteus mirabilis
gtgattaaattattatcagcagcacaaaatcatcgtcctatttttgttgttatggctgtttttaccggggctattttatcaacactctttgtacgtatgttttctatctcgttagcggatttaagaggcgtgtttggtttagatgttgcccaaggatcttggttgaatgtggctcttaatatagctcaattgatcagtatgactcttgtaccttggtttatggtggtttatggcgcagaaaaaatattaatcagtgcgagttttatccttttttgttgtggattagcggttcccataataggacaacagattggttttggcggactttttattgctcattttatgattggattttgtatcggagtctatttgccgatgacgatttcattagccttaaaaagtttaaatcccagtgtttggctaatcgttatggcggcttatagcttacgtgtttctgtaggaatggatgcgggagtggggatctcaggagaatttgttgacatattgaattggcgttggatttattggttatccgctattttcaccttagtcatcctattttttacctggtggggaatgccactctcacctattaataaatcattgctcgctcaaagtgattggggaggaatggcgcttaaatgcttaggattaacgctattatatattggtgtcgttcaaggtgaattgttaggttggtgggattctgggctggtcgtgtcttgcttaatcggtagcgctatactgatggggacatttattattagagcttatatttataaacaaagctttggccacttaaattggatcaaagatagtaatttacggctctgctttattattgcctgtttatatggctttttgatgttacctaattcgttatttataccttcatttttgagtgttgttggtgggttgaaaccactacaaataggtcaagttaccaatcttgccttctttatctatctattatgtagtccaatagctatttttcttgcacggcgtttagagccacgattaatgatgttaataggtattatgattattggaggagcatgtttaatcggtcatcaaattgattatcagtggcgagctaatgatttctttattgtcatatctatgcaacaagcaatgggggaatgtttgctacttatcggattaattgcctcatttgttactaatatcaagccacaagaagcgttacatttaggggcatatatttcgatagcgagagtattaatgccagcccttgcaggagctattatcaatacttatttgaggatctcatatgatactcattatgatttgttaagaggatacatacaaactggtgagcaaaaattagcagggaatattgctgaacattatcaaacaacgatggcattagtaataagagaagcacatgttgcctcttttattgatggttttgatttgattatgctcttggttattttaggtgctctttgtatgtcatttttaaaatcgtcaccagaaaatccggtagtcccaaggctagtaaaataa

SEQ ID NO: 305208 - DNA, 2220 bp, Proteus mirabilis
atgtgtataagagacaggtttaatagcgttgcttcacaaagcacagaaaaagcatcacaaactcaacaatctgaaactgtggtgcttgatcctatttatgtttccggaaaattaaattcgagtgttgaagcaggaagcacggctttgacattaaaagatatcaatagaattcagccaaataatatcgctgaattggtagataaattaccagggatttcctcatctggctcgccaagacctggcgggcaaactttaaatatttggggaatgggcaatccggaagatgtgaaaatcactcttgatggtacaccgaagacgtttgaaaaatatcgtcaaggttccatatttatcgatcctgaattaattaaacgccttgatgtcgataaagggccacataatatcacccaaggaaatggaggatttggtggctccgtacggattgaaacgaaagatccggatgacttactgttacctgatcagcatattggtatgtttttaaaatatggacatcatactaatgataggcaaaatcgttatagtggtgcgatatatggcaagttaatggatggaacggctgacggcctattttattttaatcgtcgtaaaagcgatgatttacgtcgtcctgatggcactaaatttggttattcacaatcagaccaagattcgtttttaattaaaaccaatgtctatttaacagacgcacaaacattaactttatcagcatcaagatctgtcagtgatggctggacgccttgggctgccaagcgagatgaactggcaaaaccgagtcaatatgatgttgataaatatggttttgatggagcgatgaaacgtaagttagtttatcgtgaccaaaaagatgacactgtgagtgtgaaatggaatattcagccaattgattctgacctgattaatttcacattgacttatggttattcaaataccaaacagaatgataaacgccctgataatgcgagttcttatctaagtagtagtatgggtaaccaaagttgggtcaactataaaaatcatcaaattgaagtgaaaaatgaaagtaccgtgatgcaaggagctactgaacatgtgattttagtgggagcgcgttggcaccgtaatgatcgtaatgtgttaatgtttacgcgggataaagcgaaaaatccaaattataattatggctattatgcaccaccttatatgccagaagggacgcaaacaaccacgagtttttatcttcaagattcaattagttatcgaacactaaccctcacgcctggtgtgcgttatgatatagtgaaaaatcaaggagtagggagtcgagcgaaggtttatcaagatcctaatccctattacggtcatgattatagtgatgtaacttatcgtggcattacacctcatttgggtattttatggaaagcgagccccaatattagattttttggtgatataactcatacatggcgtgcgccgttaattgatgaacaatatgaagtgcaagccagtatctctagtttgacaggcacgagtcgccatttagataaagagaccgttaccgcaacacggattggcgccattgttgattttgaaaatgttttccaacaagaagatcagctgcaacttcgaagtacattttttgatactcgtgggaaagatgagatattccgtcgtcgcggtgtctattgtgaaagcggaaaagtaaccggaaacaatgggagttgtcctccttcccttggaaattatcgcaatttacctggctaccatattcaaggtatggaaatagaggcattttatgacagtgctaatctctttggtcgcttagcgtattcgacaatgaaaggtaaacgcgatcaatctcctcgtgatccgtggtttggacaaaaaacatggattgcagaaattcaaccggatgcattacatgccacccttggaatgaaaatcccacaaataaatatggttgctgggtggacaggggactttattggcgctcaacgtcgttcaccgatggatgctgatccggctgctacttattggtcattaccaaaaagtaaaggctatgccattcatggactatttgctaattggaaacctgcttttatcgataataccgagatacgttttactgtcgccaatttatttaaccgtgattattacccttatttaggtgagtcggtatctggtactgggcgagattatcgctttactgtggttaaaagtttttag

SEQ ID NO: 305209 - DNA, 2535 bp, Proteus mirabilis
atgaattttaataaccaattacacctcatttcctatcgttattctcttccgttttgtgtcgctttagggattggggtgataacaatttcttcattcgctgctgaagaagctgaatttgatcctagctttttgcattcagtacaaggaaagaatgcgattgatatacgtcgctttaattatggcaaccctattcctgagggcaagtattacgctgatatctatctcaataatgaatggaaaggaaaagctaatgtacagtatttatatactgacaatgcgaatacgtcgacgttatgtctaacgccggaattactttcattaattgatgtcgtcaaaggcactgttcctgaaaacagttataaagccacttgttatcccgcctcagaaggactcccctcagcaaaatttcattttgatttatccactttaaagctgaatatagaaattcctcaggcacaagtgaatactcgacctcgaggatatattgcccctgcacagtggcaaagtggagtccctgccgcatttgtcaactatgatgttaactattatcaatacaatactccggatataaataatgagcagacttaccttgggttaaaagcgggactcaatttatggggatgggcttttcgtcaccgtggtggtgaaagctggaataatggtcattctaccggatatcagaatatcgaaacaaatgtgacgcatgatattgctcggttacgggcacaattcacattaggtgatttttatacgaatggcgagttaatggatagccttagcttacggggaattcgattagcatcggatgaacgaatgttacccaactctttacgtggctacgctccgatcgtgcgaggcattgctaatagtaatgctaaagttacgatttatcaaaatgctcacatcctttatgaaacaactgtgcctgctggcccctttgtcattaatgatttgtatcccagtggatatgctggcgaccttcttgtgcaaataaccgaatctaatggacaaacaagaacatttacggttccttttgcttctgttgcccaacttattcgtcccggatttagccgttggcaaatgtcagtgggacgctatcgttatgcaaatgagacatatcatgatttaattgcacaaggcacatatcaatatggtttgacaaatgatatcactttaaatagtggactgaccacaagctcaaaatataccgcaggattggctggtgttgcttttaacacgccgattggggcaattgcatctgacattacattgtccagaacaacatttaatcactctaacgtaacgcgtaaaggctacagtttacatactagctatagcgtcaatattccgaccacgagtacaaatatcacgttagcagcctatcgttattcatctaaagatttttaccatttgaaagatgcgctattggctaatcacagtgaatttattgatgatgtttccataaaaagtgccgcattttatcgccctaaaaatcaattccaagtttcaattaatcaagaattaggtgaaaaatggggaaatatatttttaactggtaccacttataattactgggagcataaaggaagtcgtaatgagtatcagatgggatatagccatttttggaaaaaacttggttatcagattggcttttctcaatcacgagataatgagcaacaacgccgagatgacagattttatgtgaactttacgcttcctttgggagagcgtgttcaaagccccattttttctactgtcttaaattataataaaggcgagaaaaacagcattcaaacatccatcagcggtatcgctggggaagataatcaattctcttatggtatttcaggtaatagtcaggaaagtggaccttccggctatgcgatgaatggaggctatcgttcaccttatgtaaatgtaaccgcaaccgtcgggcaagatactcaacataatcgtcaaatgtcattgggggcgtcgggggcggttgttgcacacccttatggagtgacattgagtaatgatttaagtgatacttttaccattatccatgcaaaaggagcacaaggtgcggttattaataatgcaccaggtagccgattagatttttggggtaatggtattgtgccttatgtcacaccctatgaaaaaaatcaaattagtatcgaccccgctaatttagatttaaatgttgaattatcagcaacagaacaagaaattattcctcgtgctaatagtgccacgttagtgacatttaatactcaaacagggagaagcctgctgtttgatattcgtatgccagatggcagtactcctccaatggcttccgaggttttggatgatcatgaacagttagtcggatatgttgctcaagctgggcgcttatttacccgaggtcttcccaaacaaggtcaacttgatgtgatatggggaccaaatcatgacgataaatgctcatttacatatcatgcgacacacaatgaaactgacatgcggcctcaaatcattcctgttcagtgtataccgcactctaattag

SEQ ID NO: 305210 - DNA, 966 bp, Proteus mirabilis
atgagtacaaaaaatttatcaacacccttgctgatggtagcaactgtgttagcagggatgctatcaccaatgcagtctgcggtgaatgggcaactgggacatgtattaaaagacggtaatgctagtgcagttatctcttttgccagtggtttagtggtcatgttttttatcattatgtccaaaaaacaatatcgtcagcaatttgcttctattccgacattaattaaaacacgtaaaattccattatggaactggtttgctggcctctgtggcgcaatggtggttttttctgaaggagcatcagccagtgcattaggaatagctacattccaaacagcattaatttcagcactgttattatcaggtttattatgtgaccgctttggtataggtgtggatgagaagaaatacttcaccccatatcgtgtattaggtgccgtattagctgttgttgctactctttttgtcgtttctccacagtggcattcaacctcttttatttacttagctattctaccttttttagcgggtttattagcgggatggcaaccagcaggtaattcaaaagtggctgaagcaacaggttcgatgatggtttctattacttggaactttattgttggatttactgttttaacgattgcgttagtagtacgtatggcgttagggcatataacactggagcttcctgctacatggtggatgtatttaggtgggcctttagggttaatgtctattgcattaatggctattttagtacgaggcttagggttactgatgttaggtgttgcatcaactgcgggccaattactgggttcggtattaattgacctattattaccttcgttgggaaatactgtttatttagtcacaatcatcggtacgttatttgccttagtcggcgccattgttactaccattcctgagtttaaagcgactaaatcagtaaaaagagcaggggcataa

SEQ ID NO: 305211 - DNA, 345 bp, Proteus mirabilis
  misc_feature (326)..(335): n is a, c, g, or t
atgattgagcggatttggtctggtaaatcgtggtgttaccttcttttattgcctttttcatggctctatggggcgatcagcctttttaggcgttttgcctataaacaaggctggttatcctcatggaaatcccccgtacctgttgttgtggtaggtaacttaacggcgggaggtaatggtaaaacaccagtggtgatttggcttgttgagcaattaaaagcacaaggctttaaacctgcggttgtttctcgtggttatggcgggaaatcagaccaatatcctttattattgtcgccagaaacacagccggccgtcgcaggagatgnnnnnnnnnncaggagatga

SEQ ID NO: 305212 - DNA, 675 bp, Proteus mirabilis
  misc_feature (615)..(624): n is a, c, g, or t
gtgaataacactgctataaataccgcctctttaagttggaatgaacttggtactccgatttcaaaacagtttgatgatatctatttttccaaccaagatggtcttgaagaaactcgacatgtattcctacatggaaatcattttccatctcgttttggtacacatgtacgctctgagtgtgttatagcagaaaccggatttggcacaggattaaactttttaacactgtggcaagccttcgagcaatttcgtcatcactcacctgatgcgccattaaagcgtttacattatgtcagttttgaaaaatttcctctgactaaagctgatttgcaaacagcccatagccattggccagaactagcacaatattcaacagcgctttgtgcacagtggcctttacctattgccggttgtcatcgtcttattcttgctaatggcgcgataacgcttgatttatggttcggtgatatcaatacattactgccacaaactcgccaagctttacataataaagttgatgcgtggtttcttgacggctttgcaccaagtaaaaacccacaaatgtggagtgaaacattatttcaagcaatggcagactcgatgcgtgaaaatggnnnnnnnnnnctttaccgcagctgggatagtaaaacgaggattgcaacatgttggttttga

SEQ ID NO: 305213 - DNA, 303 bp, Proteus mirabilis
ttggtcagaaaagataaatttactcagcgctataatctggctgatgtagacaaagcgaaaagcatcacaccgataaggcaaggctatcaagtttttatccctaaagggattgaaatgaattattttattgttccaaaacaaaccgctgagtttgcaatggaagcgccttggggagagctacaacgttttcaagccggtgatgcagttgtacaatctaccaccgataaacaagatatttatcggatccaacaggccgcttttaaatgcacttatactattttaaaaaccgccaaagagatttga

SEQ ID NO: 305214 - DNA, 708 bp, Proteus mirabilis; identical to SEQ ID NO: 10371

SEQ ID NO: 305215 - DNA, 1470 bp, Proteus mirabilis
ttgacagggctaattaactttgcaaataacattttatggggatatgtacttatttacttactccttggtgtgggtatttatttcactattcgaacaggatttattcaaatccgccattttggtcatatgttttctattttaaaaaatagtcataagtcagataaatcaggtatctcttcattccaagctttatgtacaagtttagctgcacgtgttggaacaggtaacttaaccggtgtagcaattgcgctgaccgcaggtggccctggggccattttttggatgtgggtagttgcaattataggcatggcgacttccttaatagaaagtacattagcacagttgtataaaactaaagatgatgaaggtaactatcgcggtggccctgcttattatatgacaaaaggtctcaatatgcgttggatgggcgtattattcgccattttcctcatcattgccttcggacttgtttttaatgcggtacaagctaactcaatagcgcaagcagctgcatcagcatttaatttcgatccattatatgttggtattggactggtggtgatgagcggctttattatttttggcggtctacgttggattgcgcgtgttgctgagctggttgtacccattatggctatcgcctatttattattagcattttgggttgtcgcagatcattttgaacgtttacctgaagtgtttatgctaatttttaaaagcgcatttggtttacaggaagccgcagcaggggcaattggctatggtattagtcaagcgatgacccaaggtattcaacgcggcctattttctaatgaagcaggtatgggatctgcacctaatgccgccgcttctgcaacaccttacccacctcatccagcatcgcaaggttatattcagatgttaggggtatttatggataccttggtgatttgtagtgcgactgcagtgattattttatcctcaggtgtgttagataattatcaagatggtattaatggtattcagttaacccagctagcattatcgtcaactgtcggtggttgggggagtacttttattgctgttgcgatttttttctttgcctttacatcgattattgcaaattatgcctatgctgaaagtaatatgatttttttaggccgcaatcatatgacagggctattcttactcagatcagccgtactggcgatggtgatgtttggtgctttggctgaaatgccgttagtgtggaaaatggctgatctctcgatgggattgatggctgtcactaacttaattgccattattttactttcaggcgtcgctttgaagttaattaaagattataaccaacagcgacaagctggtgtattacccactttcaatattcgccaataccctgaattacaaaatgatatagagcaaggtatttgggataaagagcctttacctaatgaaccgttagtccgctgtgaaaaggtgaggcaataa

SEQ ID NO: 305216 - DNA, 318 bp, Proteus mirabilis
atgctacgtcgtatttatgatggttgggaagatatgtggcaaaactttattgctactcgttggttatgggcaagtggtgatcaaaattgggcatcatcacatcaaacattttctgatgtcgtacaaaatatactcaaagcagaaaataccttagcgacagaagaaaactgggtaatggagctacccccattagatttaatgtcttttacacgagccgtagctggattaggttttatgaaaaatgatgtgcctatgacactggctgaaatagaagaaatgatcagcgaacgcattactttaaaaacacttaatagctaa

SEQ ID NO: 305217 - DNA, 1647 bp, Proteus mirabilis
atggtgtttagccaatcccctaatcttacccaacaaaaagcggcgggaatactcgcttcttggtttggtacacaagtcgattggcgccagcaacactaccctgtgtattacaatcagttgcccaatcaacacagcattgtatttgccactaataaacagcgccccgactttcttaatacacatgccaatgtcaatgctcccaccattgaattagtctcacacccaacggatccttatgtaaaactgctgttagtaatgggtcgcgatgacaatgacttaattaccgccgtcaatggtattgcccggggacaagttatttttagaggggataccgtcaccattaatgatgtcaatctattggcaccacgtgagccttatgatgcacctaagtgggtacaattaaataaaccaatctactttaataccttgcaagattatcaaggtcagttgcaatctcgtggactagagcctgctcccatcacactcaatatgaccttacctcctgatttatttatgtttaataatacagggctacagatgcaattgcgttatcgttataccgctccggcatttcaagatgattctcgtatgtcgatttcagtcaacgatcactttatcaaagcctaccctttagagagagataaaaaagagaactttattgtggcttatctaccgttaattcaaggttggatcgaaaacaaaaatctcctcaatatccccgcggtaaaattaggtgaacgtaatcagatccgtttctcttttgactatacaaatccgatccccggaggctccgttgatcaatgtattacttatcacccagtccctaacacggtagcattagatgaattatcaagctttaattttactggtaactatcgccactatattgctctacctgatttgcgtgtttatagtcatgctgggttcccatttagccgttatgccgatttgtcagaaactcttatttatgtcaaccaatccccttcacctgagcaattaacaacgttattgatatcattaggtaatattggtgcacaaactggctatcccgcgttaaatgtctctttaactgcatcattagaggaattatcaaaacaagaagctgatttattattaatcgggacaattcctccagcactcaataatgataaacagatgaatgtcttgattgataaagcacgtagcgaaattacactgccatcacgtgaaatcaccatttttagtcataccaattatcaagatctagataagcgcccagatagcagaacatctttaacatcaaccggatcactcggcactattattggttttcaatctccgttcttttcacagcgtagtgtagtggcgctattagccgatagtccccaaggttatcgattattaaatgaagcgataagtgatagtggtaaacgtgatgcaatgcatggctctgtagtattagtcagagagtctggtgtccatagtttacgtgttggtgatacctatttcgtcggctatttaccttggtgggaagaggtttggtatgtttttgcttcacaccctatttggctggggttagctgccattgtcggtattgtgcttatttctcttcttatttggcgagcaatgaaaataagaagccaacgtcgtcttgcggataaggagtaa

SEQ ID NO: 305218 - DNA, 987 bp, Proteus mirabilis; identical to SEQ ID NO: 294020

SEQ ID NO: 305219 - DNA, 1689 bp, Proteus mirabilis
atgcgctggctgataaaaagtttggtatctctgatacttatcgttattttatttattattgtgatttatgcctttcttcagacacaatggggtgcgcaaaaaactagtgaatggttaacacagtatagtgattatgacattcgcttttccggtattgaacatgatttaactcaaccagaacaaattgttgtttatgatctgtccattaaccccaaacaagataaaaccgccgtattagcccaatcagcacaacttagatttaactggcaattttttactacggcgtctcatctgcaaaaaattactttagagaatggtaaaattattttagctaataaaatagctccccttcctgttagtgcagatattctccagtttaaaaatatgcagttagatagcatgccaacatctagcacaacattcacctttagcgctaacaaaataacggggggtatcacaccttggaaacctacctcgaccgatcctattggtgcggggcattttcagttttccattgctgatggcatgataggaaaaaatagctttaataattttattgttgctggcgaatatcaaccaaatcgtattttgattgaaaaattagccacccagttccttaatggctcactctctttatcaggccaatatcaagataaccaatggcaacttaatgatgtttacttaaccggactgcgttggcaatccacaaaaaccttagaagagttacaacaatcattaagtcaatctccagcaatgactatcaagcaattgaacattgttgattttactgccgaagggaaacagtgggcaataagtggatttgctgggcagttttctcaagttgcgtggaataatagcctatcactgacatccggtgagctaaacaccgatgatattgtgtataaaaatcaacatgtcactgatgtgatcgctaagttaaatcagcaagataatttatttaacatagataatttaagcttacgctatgaaaaagggctaataaaactagcaggacaatggaacagcgagacaaagactttaaatattgaagatgcaacactctcaggtattttatataccctacctgagcaatggctctccttctttgctaaacctattgagcaagatgtgaaaagtatcaatattaagcagttatcattaaaccaatctatcctcattgatattaatcccctctttccttttcaatttaccggcctaacaggccaactgaaaaatttaatcatcgccaaagatgggcaatggggattatggcaaggcaccgcgacgttaagtgctgatagtggtacattaaatggcgtagagcttcgccgccctgacctaacattaatgacacaacaagatactgccattatcccacagttttctgctttcgtagataaaggcattgtacgtggctctgctgcattagaacaaaacaataaccaaagactattttctcttatcgtcaatgggctgaatgtgcccctctctttgcctaataatatgggttggaaattatcgcaacctaccgatgaaacaggacaatttaccttaaagcttaaaggtaacttagccgctgacgctgttataccgaccttaaatggtacattaataggtaaaaaagatgaccaaacgcctatcgatgacaagatgcaagacggcgaaataataaataatttatccttttga

SEQ ID NO: 305220 - DNA, 2151 bp, Proteus mirabilis
  misc_feature (2086)..(2095): n is a, c, g, or t
atgaacaaagaaatagctttaagtcaccatcccattaatcagaaaaaaaataccacaaactctctatttcaactctcccttattacttcggcacttcttttttctggctatgctgttgcatattcagaagttggacaattaggtaataaacaaagttgggaaagccctgaatatcaaaaagactgggggcttgcagccatgaatgcctctagtgcttatgctctgggttttcatggtcaaggtgctaaagttggggtgatggactctggtgcactgctctcacatcaagagttgagtggatcacgctttcatgcagtaaaagccaaaggtgaatatggctctacgggaatgcgctatccacaagaaatgggcggacattatgaaaaaggccaagtctttgatgttgatggtaattggatcaaaggggtgaatgatacccatggcacacatgtcactggtactgtgggggctaaccgtgatggtaatggtatgcatggtgtggcgtggggggctgatatttatttagggaatactggggcaacagacagcaataactatggcccttatcaagactacacctatttctatactggctggaaagcgatggtcgatgcgggtgcgcaagtgattaataatagctgggggactaacccgcgtattattaatacagataaaacagaggggcctgatggtggtgataccacgatacatatgcctgttaacaccacggcacagacagaatacgaatatttctactttaaaaaagtctatggtgataaaccttcctttgttgatgctgcttatgatgcagttaaaggaacgaatgttgttcaggtctttacaacgggtaatcgcgactttgctcaaccttattatcgtcctctttatccttattttaatcccgaagccgaacagcattggattgcggtggcgggattgaagcaaaatgcggataacaccggttatgtattagaaaaagtcttcaatgaagcgggtaatgcaaaatggtggacagtggttgcaccgggtcgaaatatctattctacagtggttgatgaagagggaaatccaaactggaaagtctttagtggtacttcaatggccgctcctcatgtgacgggggcgatgggagtattaatgtctcgttatccttccatgaacgccattcaagttcgtgatgtcatgttcactaccgctaaccatcgtgatcctgatggctctttatatgagagttggacagccgcagaaggtactcctgatgtacgttatgggtggggaacaccagatttagataaagggatgtatggtccgggtcaattgctaggtaaatttgaatataacctaaatgcgacaccgcttgatgtgtggactaatgatatttcccaaacagctttagatctacgtaagcaagaagatctcgcatggttgaaagaatataccgaaaaaggtattgcggcaggaggtgattatcatctcggtactgattttgtgattaatgatggcaatcctgatcctacatcgcatattgttagccaagaagatgctgaaaaatggcgtcaagaatattaccaaaaacgcgctgatgctattcaagctaaaattgatgctggcttatatgatggtgctttggtgaagcgaggcgaaggtacgttagtcatgacgggaaataatagttaccgtggtggtacaactgtcgaacaaggtactttatatggctttagcggatcttttgggacacaagccgtcaatgttaatggtgggaaattaggtattattgagcgttataacgatacttttactcaaaaaggccaattaacctcaaaccaaaaccataaagtaaacattaatattaatgataaaggtcgttatttagtgaccgcaggacacaatgttaatattggtaacttagtgcttaatcaaggagccgatattgatgtgggggcggataatgttgggcaactaaaagatatttatcttaataatagtgttgttgtcggtgaggtgaatacagatagtttagttgataatcgcactaaaacgaaaatgttagccagtaaccgtgtggttgcagatccagccacaaccnnnnnnnnnnaaccactactgtcaccaataatgattatgctttatttgataaacatatcacgataa

SEQ ID NO: 305221 - DNA, 1089 bp, Proteus mirabilis
atgagtattgaaattaatcatgtcacaaaatattttgatcgcactgaagtgttgcatgacgtgaatttaacggtcaattccggtgagatgatggcgctattggggccatcaggctcaggtaaaactactctattacgtatcattgcaggacttgagcatcaaacggaaggtaaaatctgttttgcagggcaagatgtcagtcgcttacatgcccgcgagcgcaaagttgggtttgttttccaacactatgcgctgtttcgccatatgacggtatttgaaaatattgcctttggcttaagcgtattaccacgtcgcgaacgtcctaacaaagccgcgattgataaaaaagtcacgcaattattagagatgatccaactgcctcatttagcacagcgttatcctgcacaactttcaggagggcaaaaacagcgcgtagctttagcgagagcattggctgtagagccgcaaattttattactcgatgagcctttcggtgcgttagatgccaaagtgagaactgaattacgcagttggttacgggaattacatagtgagcttaaatttaccagtgtttttgtcacccatgatcaacaagaagcaatggaagtcgctgatcgcatcgttattatgggaaatggcaaaatcgaacaagtgggtacaccgcaacaagtttggcatacgcctgaaagtcgctttgttttagaatttctcggagatgttaatcatctccaaggtgaaattaatggtgcgcaattacaaattgctggctatcacttacctttatcggttacgccgctctatcaaggcaaagttgatgtttttttgcgcccttgggaaatttcacttaacccgcatagtgatagcttatgtaaacttcccgtcaaagtaatagaagtgactcctaaaggacactattggcaattggttttacagcctattgagtggggaaatacgccaattagcgcggtatggaatgatatgacatcaataccccataaaggtgatatttactatatgggtggtgcaaaagcgcggttatatgcacaagatcgtcccttaacaacagtttcactggcatacacagcttaa

SEQ ID NO: 305222 - DNA, 342 bp, Proteus mirabilis
atgatgatgagccaaggaagccaagaggatgaagctgctgtgttattaggtgccagtagttggaaaatgttttggcgagtgacattacctaatattcgttgggcattgctctacggtgtggttttaacaaatgcacgtgctataggggaatttggtgccgtctctgttgtctcgggggctattcgtggtgaaacctattcactgcctttacaggtcgaacttttgcaccaagactacaacactgtgggggcttttacggcagcagcattacttgccatgatggcaattattacattaatggttaaaagtgcgttgcaatggcatttagaacgtcagcaataa

SEQ ID NO: 305223 - DNA, 1674 bp, Proteus mirabilis
atgaagaaatcgcttgtcgctgttggtgttattgttgcactaggtgttgtttggaccggtgcatcatggtacatgggcagtaaaattgaaagccgcttacaggaagaaaccaaacgcactaacgttcaattagcgcaacttgctaaagaaagccaattaggtgcggatattaaacttgaaattcgtgactataagaaaggcgtctttacttctactgctgatcttgcggttgtgatttcagagcatgccaaatcagatgaagataaaaaagtagaagaagtgctctttaagacggatattgaccatgggccattccctctttctgatattgctcaatttaatctagctcctaagttagcagcaatgaataatactttagtgaataatgagaccactaaagatctatttaagttgaccaaagagccatcatttattgatatgcactcttctttatcgtttgatggcagtgtatcgggtaaagttaacataaatcctattaattacagcaaagaaggtagccagttaacaacatctgcgtttcagattgatttttcttccgataaaaatgcaacaaacatctcaacagcagtaaaaggtgatgaagtcattgttaagaaaggtaatgatgaaacctttacgctgaaaaatattgcaggctctgtcgaaggaactaaagttaaagacgatcaatatctatttgatacacaaacactgaactttggcgatattacctttacgagccaagataagtcatctaatttcactttaaaagatacttctcttgctactaagagccaaattaaagataaattattctttatcactcaagattatagttttaaatctcttaatgttggtggttttgattttggtgcgggtaaatttgcttactcaattgataaagcagacccagatgcgatgttgctattaacaaaagtttataacagcaccttcttaccttggaatcaaaataaatacgataattcagcgatgattgagcaagctgtacgtgatgttttggaaaaaggtttagtattccgtatcgatgaagcatcgcttaccaatagcagtggcgcaagcaaactaaactttaagttagatttaaatgcgttcaatgctgatgcactgaaaaaagaagacaaggcgccttcagttctgtttaatgaattgtttaataatatcaattttaatatcgatctttctgtaccaatgctaacggagttccgtagtaccacacaataccttgatgttatgcgttattctgaaaaaggcttaacagacgaagataaagctgaaattcagaaaacaaccgctaacgacatggcacagttaaaaactgaattacagcaaaatatcaatcaaatttctcaagacgagaaagatgctctgccattgatgctgttatcacaagacggtaataaactgtctttaaacctgaactatgctgctgataaatttactatgaacggtaaaacttacagctttgatgagtttatggaagtaacacaagcccctcaaatgttaggtttagcggctatgttatttggtgcaggtgcttcttcttatgattatgatgactctgattatcctgaatattcagaagagccagatcaaaatgatgcaatagaagagccacaagttgaaatcccagcggcacctgctgaaaacaattaa

SEQ ID NO: 305224 - DNA, 960 bp, Proteus mirabilis; identical to SEQ ID NO: 298697

SEQ ID NO: 305225 - DNA, 492 bp, Proteus mirabilis
atggcgcataaattaggctctgaattccatattcctcatggtcttgccaatgcgttattaatttctaacgttattcgttataacgcgaatgataacccaacaaaacagactgcatttagccaatatgaccgtccacaagcacgtcgtcgttatgctgaaattgctgatcacttagaactgtctgctcctggtgatcgcacagccgctaagattgaaaaactgttagcttggttagaagagatgaaatcttcattaggtatccctgcttctatccgtgaggcgggcgtacaagaaagtgatttcttagcgaaagtggataaattatcagaagatgcgtttgatgatcagtgtactggtgctaacccgcgttatccgctgatctctgagttaaaacaactgttattagattcttactacggccgcgaatttaacgagcaccctgttgctgaggtaaaagaagcgaagcctgcgaaaaaaagcagtaagaaataa

SEQ ID NO: 305226 - DNA, 798 bp, Proteus mirabilis
ttgaaaaacaacgaattagaatggcaggcgttacgcccagattacgcctcctaccagactttctttcaaacagcatcgcaattgcctgcatcttcacttcgtgaggttcaacctcgcttatatgaaagcttacagtggctaaataatgcagaagcaggccaatttatgctgttaaaagcagaagattctactgcttatttcgaaacactcgctgatacattacaacaagcagagataaaaacttatcctgttgtaggtgcctatcaagctgagtctaatcaaatttattggcaagataatgtagaaggttcattttcatcatcagaatctattgcttgttgccaatggatagagcctgaacaactttttggttcattttattatcataaagataagctcctcgttaacccaggactgctgcataaagtcaatggtggtattttagtcttatccattaaaacgctcttagcacaacccttaatgtggttccgactgaaaaagatggttgaagagcaacgctttgaatggttagtgtggaatgaccatcaagcacttcctttgcctattgaagccatgccccttcacttgcgtgttattttagtgggcgatcgcctaagcttagaagagcttgagtttatggagcctaatatcagcagtacggcgctatatggcgaatatgaatacgatatgtatttagaagatgaaaccgccctgagccaatggtgtggttttgttaatggactttgccaaaaatatcgtcttccttcattatctgctgatgcttggccatatcattaa

SEQ ID NO: 305227 - DNA, 1206 bp, Proteus mirabilis
atgggtattttaatcatgaaaagcttaaagcctttagcagcgctggtaggtttattggttctgtcgggatctgcaaacgcagtaaatgtgtacaacgataaaggtacacgttttgatgttaacggtcagttccgtttaaaaacgcaagtgacaagtaaagatcatgaaatgcgtatgcgtgatgatggtagccgtatcggtttctttggttcccatgaactgactaacgatatcaaagtgtttggtaagttagagtggggttcagatactcaaaaaaccaacagtgataatgagaaaacaaactttgatctgtacaaccgcgtaggctatgtcggtttttctcatcgtgattatggacaaatccaatttggtcgtacttatatcccaattgactgggtaaaaaaatcaagctacggctatggtaatacaggggtattttactttagtgatgtattaggccgtgcagtaggttattcaagtaaaggggttggtaaaaacaactttatgacccgtttaccacaaactatctttattgaaacaaaccgttatgaaggctttaaattagcggcaactttaacgggtaaagatggtaaagataatgatggtgatggaaaaaatggcgatcgcagaaccggtgatatccgtcatgcctattctgtcgttggtttctataaatcaactttcggtttagagtttgatgcgggttactcagcagctgtaggtgagcctaatctatacccagatagtgttgttggtaataaaaaaccagaaaatagtatcttagcattcggtgctgaatacttcttccctggtcgcgaattctctatcggtatcgactatggtcaatctcgcggtaaaaatactggcttaaccttaagagaaggtgcaactgagaaagactataaatggaactcagttaaaggcgattggaaagcgaatttatatggtgttggtgtgaaatggcactgggatcgtatcgaaagtggtatgtatgcgggttattacctgcgtgatggcgatgctaacactttcaactacaaaaaagaaacctatactgtgggtgtagataaacgttttgcggtatctaaatacaacaacttacgtttattcgctgaaatggcatatgatgatgctcgtagtgaaaacccagcttatgaagataaaaaacaatatatctttgaaactggtatgcgtctgtacttctag

SEQ ID NO: 305228 - DNA, 231 bp, Proteus mirabilis
atgaacctcgcaaacctaactcaagaagaaaaagacaagattaatgtcgatttggccgcaagtggtgtcgcatataaagaacgactcaatatgccagttgtcgcctcagaagttgaacgacaacaaccagcacatttgcgcgagcactttaatgaacgattagcgttttatcgtgagagaagtaagaagttgccagatgcgaattctgtgcagtatttgaagacagagtag

SEQ ID NO: 305229 - DNA, 651 bp, Proteus mirabilis
atgcttagcttaagtgaaaacgtccaagcggtgaataaagaaaaacagattgtcggtgttgatcagcaaatggctgtcgccagccaaaaaaagcagcagcaagagattgcggagaaacaacccaatcttattattaatgaaaatgcagatattttgcttgaaaagccgaaaaaagtgctacaaaaccagacttcagttaaggttgccccttcaattgcaccaaccaaaccttcacctattgtcagtgaaaatgtatctagcctatccgcgccctcaacaagccattctgttgcgaaacaacaggctaacgatgtttctgcaaattatgatagtgatgcaaataaagaagcagatgccttggcattatggcaagctaaggccaaaggtcatttaaatcgttataaagcttatcctgaagaagcgaaaagaaaagggcgtacgggagcacctaaagtgcgttttattgttgatggacaaggttatgtcatagcctgcgaattgattaatagcagtggtgtccgctcactagataaagaggcacaaagtgttattaagcgtgctcagccattaccaaagcccccagaagaactgctttttaatggtcaaataacaattgaaatggcaattgaattttccacattgactttataa

SEQ ID NO: 305230 - DNA, 1254 bp, Proteus mirabilis
atgaacattgttgatcggtttatttcttacaccaaggtgaatactacaacaaatagagaaaatggcgccgcggggattatgccttcatcggaaggtcagcgagtcctcgctttacaattagtcgaagagttaaaggcgttaggtgttgaagatatcaaaattcgcgatactgccattgttaccgcgacactaccttctaaccttgattatgaggttcctaccgtggctttctttggtcacttagataccagtgcagaacaaactaatgatactaaagcacaaattttaccttataaaggtggcgacctttgcttaaacaaagaacttgagatttttttacgtcaaagtgaattccctgaattagaaaactatattggtgacgatatcatcgtaacagatggtactagcttattaggcgctgacgacaaagcggctatcgcctctattatggatatgttgcaatattttaaacaacatccagaagtcaaacacggtacagttaaaattggttttgtacccgatgaagagcaaggtttacgtggtgcaaaagcctttgatgtaacagaattcggcgcagactttgcttataccttagattgttgtggtattggtgaacttgtatatgaaaattggaatgccggtgatgttgaaataacctttatcggaacctcagcacacccgatgtcagcaaaaggtaaattaaaaaattcactgttaatggctcataaatttattgcgatgttaccgggcggtgaagcaccggaatatactgaaggtcgtgaaggttattattgggtaaaacaactggcgggtaatagcgcacgtactgtattaaaaatggatgtgcgtgatttcacagaagcaggctacgcccatcgtatggcatttttaaaacaactttcagagcaatgtgaagcgttatggggtgaagggactgttgtttgtaagcaagccgatcgttatgcaaatgtctttaatagtctacaaggtgaaaatcgatatcctatcgatattgctattgatgcttataaagccaatggtattacccctcgtccaatccctatgcggggtggctatgatggagcagcattatcgcaaaaaggattaccttgccctaatatctttaccggggcgcacaatttccattctatttatgaatatcttcccgttaaatcgctttatgctgccagcgatgtattgaaatctgtcgttaagatcaccgcagagcgttttgcccccggagctaaagcatga

SEQ ID NO: 305231 - DNA, 468 bp, Proteus mirabilis
ttgattcatcatgttggtagtaagaaaatcataatacttgaaaattttcactatcttcctgaggaaatacaaagagcatttgcttttgatctccgtacatttcatgatttgaaagtacggtttattatattgggagtatggaaagaagctaatcgacttacccaattcaacggagaactacaagatagaattagtgaaatacctgttgaaccttggctagaggccgattttaggagtatagcaaaaaaaggtggggatcttttaaatatagacattacacctgcgattattgaaaaatgtatctccaactcattcggaagtgtaggtgtttttcaagaattattaaagggatcatgtattgcggatggtattctcacaaaacaagaaacaacaaaacacttcattaatatagatgcagttaatactgcaatagcgatgaaaacaaatgaatattctggacgcggttga

SEQ ID NO: 305232 - DNA, 1647 bp, Proteus mirabilis
ttggtagagggcgattggcaaactcggcatgcttttttccgtgaaaatttaaaattacgtaccgaggttgaagagctagagcataaatcacgtcgtcgcgatattttagtagatgatgaaacgctgtttacattctacgatcaacgaataccacaagatgttatctctacccgccattttgataaatggtggaaaatagcgcaaaagaattcacctgatttgctgagctttgaaaaaagcatgcttatcaaagaagatgctaaacgtgttagtgcattagattatccaaattattggcatcaagataatttaaaattacgcttaacttatcagtttgagccaggtacagcagcagatggcgtcactgtccatattccattaccgattttaaatcaggttaaagatgaaggttttgattggcaaattccgggtattcgtcatgaattagtcgttgccttaataaaatcattgcctaaacctatacgtcgtaattttgttcctgcgcctaactacgcttcagcttttttagaacgagtggttacccctgaaggtgaattactcgataaattagaaaaagagctacgtagaatgaccggcgttacggtcgaacgtgatagttggcaacttgagcaagtggccgatcacttaaaaatgacttttcgagttgttggtgacaacaataaaacccttgcggaaggaaaagatcttaatcagttaaaagcacgtttaaaggacaaagttcaagaaacattatcagcggtagcagatgatggtattgagcagcaagatttacatatttggagttttggtgacttgccacaacgctacgaacaaaagcgtggtagctattcagttaaagcctatccggcattagtggatgaaaagaatagtgttggtatcaagctatttgaaacagaaacagagcaacaagcggcaatgtggcaggggataagacggttattactacttaatattccttcacccattaaatacttgcatgaaaaattgcctaataaagcaaaattaggtctttattttaatccttatggcaaggtgctagatctgattgatgactgtatcgcttgtggggttgataaactcattgcttcttatgggggattaatatggcaagaagagcaataccaaaaactccaagattatgtccgtgctgaattaaacgatgttgttgtcgaaattgctaaacaagttgagtctattttaactcaagtatttgcgattaataaacgcttaaaagggcgggttgatattagtgtcgcttttgcattgtctgatattaaagcacaacttaatcaattagttttccccggatttgtcacatcccatggctggaaacgtcttgcggatattcctcgctatctcagtgctattgaaaaacgtatggagaaattagcgattgatcctaaccgtgatagagcacaaatgagccgagttgaaaatgtcattttgcagtggcaacagtggttagctaagttaaccgagaagcaaaaacagcaagaagaggtacaaaatattcgttggatgatagaggaattaagagtgagtttatttgctcaacagataggaacgccttatcccatctctgataaacgcatcttacaagctattgagtctatctcattaagttaa

SEQ ID NO: 305233 - DNA, 1050 bp, Proteus mirabilis
  misc_feature (1024)..(1033): n is a, c, g, or t
gtgatcacccaaaaaggtgaaaaagagcctttaaaaatagagttaacagacagtcaaacttctattattgaattacgtgatgctatcaataaaaaagaaggcaacgtttctgccactattgtaaaagcccaagatggcgttaaccatttagttctgacttctcgtaaagaaggtacagattctcaaatggaaatcactgttgaaggtgatagtaagcttaacgattttattagctactccactaaaacaaacagtggtgcaatgacagagatcgttaaggcaaataatgcaaagttaacgattaatgggattgaaattgaacgtcaaactaatgaaattaaagatgcgcctgaagggatcacgttaaatcttaagaaaaaaaccaatgataataaagatggcgtagataagcctgaaattattacggttgcgcgtgatattgagccaatgaaaaaggccataaaagcctggaccgatgcttataatgaattaaataaaacctataaagatttcaccaagtacacccaagttgaaaaaggtgaagatgcctctaaagacaatggtgtgttattaggtgataccactagccggatgattatgtctgagctaaaaagctttatcactcgttctcaatcttcatctgagattgatacccttaataaaatgggcattaaatttaaagtagatggcacattagaagttgatgataaaaaactcgataaagcattaaaagaaaaacctgctaacgtcaaagagttttttatgggtgatggtaaagaaacaggatttggtactcaaacctataattacctgaacaaatctcagggaactttaggaagtgcaatcgagcgtctgtcttctggtctacgtatcaacagtgcaaaagacgatgcagcgggtcaagcaattgctaaccgtttcacttcaaacgtaaatggtttaactcaagcttcacgtaatgcgaacgatggtatctctatcgctcaaacaactgaaggtgcattaaacgaaatcaacaataacnnnnnnnnnnaacctataattacctga

SEQ ID NO: 305234 - DNA, 303 bp, Proteus mirabilis
  misc_feature (288)..(297): n is a, c, g, or t
atggctggtattagtgcactaggaataggcgccaagatgccacttggcgagacattaatgcaattagaggctgcggaaaataagcgccttgaacctttagacaaacagatgaaaagctacgatgcacaaattactgcatatggaaaaattcgtagccaattagataaattacagaaagcatctgaagaattaaaaaaattcgataaaatcgtcgccaccaaagttgatgatgagtttgatgcttttaaagtaaccactgatggtaaagcaagcattggtaattatacnnnnnnnnnncggtaa

SEQ ID NO: 305235 - DNA, 153 bp, Proteus mirabilis
atgagtagctcaaaacaatggttggaagaattacgcaggaggcgtaaagaatcgcaggaacgcgaacacgatgaatttatgtatcaaacggaagtgttaggacgacaaggattgtcgataccaacaaaggatttttcaggagattttcaatga

SEQ ID NO: 305236 - DNA, 1134 bp, Proteus mirabilis
atgcttcataaaaaattacatagcgaaatgtcatgggaacaacttggtgagtactataatgaaattagtgatatgtccggtgttcgacaagatccgatccaccatgctgaaggtgatgtagctattcatacacaacaggtgatccacgctataaaatcactccctgaataccaagagctgtcagaaagagagcaacaaattctatggattgcagcacttttacatgatgtagaaaaacgttcaactacccgtgaagagaatgggcgaattatttcgccaggccatgctcgtaaaggagaattaacgacaagacgttttttatatgaaaaagtgccggttagctttattgatagagaacagattgcggcattagtacgctatcacggattacctttatggttaatggataaacccgatcctaaaaaagccttattagcggcttcgttaagagtagattgctatttattggcattgctggctaaggcggatgttctgggacgaagctgtgaagataagcctgctttattggataaaatagcgttatttacactttactgtgaagaattaaattgttggagaacacccgcacgatttatttctgatggcgctcgatttcactattttcatagtgaaaataatgtcgatcctcactatgaaccttatcctgagcaaggaagtgaagttattgtgctttgtgggctaccgggaatgggcaaagatagttatattcgccaatattgtgcagatatgcctgtagtaagtttagatgcattacgtcagcagcataatataaaaccagatgatcgtgatgcgaatggatggattgcacaacttgccaaagagcaagcgagaatatatttaagagagcataagtcttttgtttggaatgcaacaaatattactaaacaaatgcgtaatcaacttattgctctgttttatcgttatcaagctaaagtgacattggtatatattgaagtcccttatttgcaatggaaaaaacaaaacagcgcaagaaaggaagcggttcccgataaagtgatggaaagaatgttgagcaaactggaagtcccaacaccagaagaagcgcttaacgtgatttattgggttgatggggaagctcaaaatttgatttaa

SEQ ID NO: 305237 - DNA, 267 bp, Proteus mirabilis
ttgtcacgattatcaccagaaatggtcactgcaaataccttagcaggtgatcctattactgcgcgtttaactcacgcatctggtaatggtgctgctattggtggtttaaaagtgatgaccgattatggttggtttgctgctcgtccttctgggacagaagaagcgtacaaaatttattgtgaaagcttccgtggccctgagcatcgcgaattaattgaaaaagaagccattgaaattgttaataatgtttttgccagtaaacaataa

SEQ ID NO: 305238 - DNA, 606 bp, Proteus mirabilis
gtggcaacaacggttgccgaatattttcgtcaacaaggaaaaaatgccgttttatttattgattctatgactcgttattgtcgagcgttaagggatatcgcattaacagcgggtgagttgcccgtacgtaaaggatatccagcatctgtatttgataaacttcccgctattttagagcgtccaggggtaacaaaaacaggctccattacggcattttatactgttttattagagagtgatgatgagccagatgcgatcggtgaagaaattcgttctattttagatggacatatttatttatctcgaaaaatagcagcatcagggcactatcctgctattgatgtattaggtagtgtgagtcgggtttttcaacaagtcactgatagtaaacaacaaaaatctgctttaaaaataagacaaatattgatgcgattacaagatgttaagttattgcaagagttaggagaatatcatgaaggagataacgaattaaatgatatcgcggtaagaaaacaagccaagatagaaagctttcttactcaatcctttaaagaaaaagccgattttcaacaaacattagaacaaatgtatgagattaccgcttaa

SEQ ID NO: 305239 - DNA, 396 bp, Proteus mirabilis
atgtctattgcaaaacgcaccaaagacaaacgtattgcgttaggtttaacacaatctgagcttgctaccttggcgggtacaacgcaacaatcaattgaacagatgggaattgctcatttagcaacacgttatccatctcaaatatcagggggagagcagcaacgagttgcattagcaagagcactcattagccaacccaaactgttattaatggatgaacccttttcaagtttggattgggaaacacgttatcagctgtgggagcttattatctcattaaaaaaacagcagataacgatgataatagtcactcatgagcctcgtgaattgcaagcattagcagataaaacgctgttattatctaatgggaaaattgtgcaagaaagtaaaaactaa

SEQ ID NO: 305240 - DNA, 507 bp, Proteus mirabilis
atgatgagattttcgaaagataattttgaagagataccagattatgatggaaacacgttaatcttaagctcagataaaattattagtgaaaagtttagcttaatacatcaagttaaaaataaatatctaggaatatgttgccaacaaatgttagcacaaaaagcacaagagaatatcaatacattgctaaaagaaaatatttggttatgtgatcccgctttatataaaacagcaaaaataaagaaattagaaaatgaaatagcggatcagggtaaacctgtcagtattagattgatggatgatttaaattgttgtttaaactttattcaaactcaccattcgctattatttactgatgaaaacccgattaaaagtgaggatgaaaagcaactgtgctttatacctttaacacaaacggaactgatttataattgttatatctataaatctaaatatcactcgagtatattgaacaggtttgttgatttaataaaagaattggaatga

SEQ ID NO: 305241 - DNA, 1203 bp, Proteus mirabilis
atggagcctgcattacctgcggaaatagaagcattttctaattcagaaatgaatattctacctatctcttggttgcaatctagggataaaattgctcctcgtacaacaaccaaaggcgatacctttactactcaattgactaatattgctaaaaaatatcagagcataatttataagtcttcaaaatcaactaaaatagctagcgaatctttttctcaatcggtagaaaacatcaacttacctttaatcgtatatttagggacaggacgactgtggtatcaagggcgatatagctcagaagctcaagatcaaaagttggataacagtgtttattctcgattttggggatatcaaaattgtttaactgcaacatcaagttataagcaatttcaatcttggtatagttgggtatatcgtagtcatcgtgagttacaaattacccaattagaagggcaattaaaaccacaagatgaagaagcgcagagaaatttttctgcagcaattaaagtggtacaaacttctattaataagttaacgcaaaagttaacgggatggcatgacttacaatatagggccagtatggggcagcaacttgtaatggaacatcctgaacaaggctatattcctctttcattgttaagtgatggcttgcgtaatatggtggcaatgatctctgatattgcatttcgctgtattaaattaaatccgcatcttggagagaaagccgctattgaaacatctggaattgtattaattgatgaagttgatatgttccttcaccctacttggcaacaaagggttttgtcttctcttatggaagcatttcctaagctgcaatttattgttactactcatagtccacaagttatcagtaccgtacattctgatagtatccgggttattggtgagaattataaaggtaagcttattgcatcaaaaccgttagctcatacatatggaaatccaagcaatcaagttttagaaagtgttatgctcgtagatcctcaaccaccaattaaagaaaaagagatgcttgaacaattaactgaattagttgatcaaggaaaaggaaatactgaattagcccaatctttgctgacagagttaacggctcttttaggtgatactcacccacaattacagcgcttacataggagccttaatagacaacaatatttgtctcatttagagggccgcaaatga

SEQ ID NO: 305242 - DNA, 165 bp, Proteus mirabilis
gtgtcgcttctgttctgcttttttcacttgcgggttgttcaagcagcaattggtgccggtgctggtgccataggtggtgcaattttaacagatggtagtccattaggaaccattggcggcggtgtattaggtggtgttattggccatcaagttggtaaaaaataa

SEQ ID NO: 305243 - DNA, 366 bp, Proteus mirabilis
atgactaactgtgatattgcaaaagaagcttttagagattctggttctataattagtgatacttttctttttggtatgaatagtgatgggaaaccagctgaatataattactatcatacatggtataaaaattactaccctaaaaaaattggcgctattaaagataggtatgattcatatacaaaaaaagtagatagtaataatccaatatttttaggccttacctctattatccaagccaataatattgcaaagggaatggatttatatttagaagacaaatctaataaagataagctcaaagaagcgcaagaattatacaattcaatgtaccaacaattagtgaaagactgtggaaaaatttag

SEQ ID NO: 305244 - DNA, 1014 bp, Proteus mirabilis; identical to SEQ ID NO: 304434

SEQ ID NO: 305245 - DNA, 939 bp, Proteus mirabilis
gtgagctgtgtcagtggttgtaatgcgaatgaatattccacgcttagtggacaactatcaaagacggaaaataaagtcggtgttactaaagatgcttctgatattactttgtccaatcgaattacattaagatggaatgcgggacaagcgcaaacatgggcgacatattccaatggtaatattcctagtgcaaataccagcaataatgactggatttattctaagatagatgactatatttctgttgcgttaagaatgactaataattgtagaacaatttatgtcccttataatgtacctacgctaagctctacttgtggttcccgtacttatactgaaaacgaagaaagcgtcgtttctgtaagaaagtatcaaaccagaataaaaattgacaaggctattatttctggtacctatgtaaaaaatatttttgtaggcgaatttggtttttgccaaccacagaattgtgcgactaaacaaactatcattacaaagctatttttaaatctttcaatgacagttccacaatcttgcgttattaattcagggcaagtgttgaatattgattttgacaatattcctgcatcaagttttaaagtagcagggaaaaaagccgaaggagttaatacggtttctagaaacttaagtattcaatgtgacaatatagatgccagtgctgatttaacaatgcgattacaagcagattcagttcaaggtaatgctattgtttctaataataaaagtgttggctttgtggttgctaattcaagtggatctgaattaacacctaatgatttatcaagttttattcctttcagactcaaccaaaatgctgatgctaatgtcacgattaatgtttatcccgtaagtattgatggaaaaacaccaactgaaggcgctgtcacatcaagtggctttctaagagttgatttcccttaa

SEQ ID NO: 305246 - DNA, 792 bp, Proteus mirabilis
atgcatccagatatcgcaaacttaatctctagcgtattttacgataaaaagcttaaaacagaaccttcaaaagaaaaattctatagagatgtaaatactattaccccttttacatttaaacctaactctccattacttaactccccagcaattatttggattgatacccccgatgttcaacaaactaaaaataattatgccgcagaatctcttcctgcttggacaaataacctagaaaaaaatactcttttatccgtccttgaacatttgaggctgaattcaaaagcagaaaaattaccaaaactagcaatcatgtcaccttatgcaaaacaggtagatttaataaagagaagcctagacaaaaaactgcataaagaaccaagttccttagaaatagagtattttcaaaaaccagatgatcattcttcattttgtagcactgttgatggttttcaaggggctgaggctgacatagttattgtatctatggttagaaataatcatcattcttatgttagagcatctctaggatttctccttgatagtaggcgcatgaatgtcctactaagtagagcaaaatataaaatgataattattggttcattcgaattccttaaatattggtctgatttaatcgacaaaaaagaaattaaaaaaggagatttaagtaatcaatttttagtcgatcttgtcaataagctcatcgaatatgagcgtgaaggactattaaagaagattaactctagagaattcaaacacgtaaagcaagataaaaataaaaaaaggacttaa

SEQ ID NO: 305247 - DNA, 789 bp, Proteus mirabilis
  misc_feature (752)..(761): n is a, c, g, or t
atgcgcttagaagttacctgtaaagatcgcatcgggttaacccgcgaattactcgatctgcttgtattaaaaaatatcgatttgcgtggaattgaaatctttcctattggtcttatttatctaaatttttcgcaaatcgattttaatatatttcaacctttaatggttgaaatcagaagaattgagggggttatcgatgttcgtactgtggcttttatgccatcagagcaagagcatcgagctatgtggacactattagaatcagtacctgtccctgtcttttctattaataccaaaggtcaaattaagttattaaacccagctacacggcatctgtttgaattagatgaaaatgataaaaatgaaaaatcttttaaccaactgatacctaactttaatatccatcgctggttagaacaaaaagatcctcatgctgaaattatctccatcaaattaaaaaaacaacattttgatatggagattgtgccaataaaactgactgatgataatcagtttaatcattgtgttggtgcactcattttattgaaatatcgcggaataattcatgagcatccgaaattaattgttaatgataattcggggtttgaacaagttattgctgttagcacccccatgaaacaattagttgaacgcgctaagaaaatggcaaaaatggatgatcctttattattagtgggggatacggggacgggcaaagatctatttgctaaggcttgccacttattaagtcnnnnnnnnnnagtcctcgagccagagagccatttttag

SEQ ID NO: 305248 - DNA, 1230 bp, Proteus mirabilis
atggcagtggcaagcgaaacagcaaaagaaccaacggtactttctcgtcgtaaattgttatgtattgccggaatggggtggactttcgatgcaatggatgtggggcttctcgcctttttattaacggcgttaaaagaagattggggattaacagcagcgcaattaggttggattggcagtattaattctatcggtatggcagtaggcgcttttgtctttggcattatggccgatagaaaaggtcgtaaaccggtatttatcttaacgttgctgctatttagccttggttgcggtttaactgcattagcaagttccttaatggtggtattaattttacgcttttttattggtatgggattaggtggagaattacctgttgcttccacattggtgagtgaaagtgttaaagcccatgagcgtggtcgtattgttgttttattagagagtttttgggcggtagggtggttaattgccgcgttaatagcgtattttattattcctgattatggctggcgtatggctatgttattgagcgcactacccgcagtttatgcactctatttgcgttcaaagttaccagaacccagttccacacagtcattattacaaaatcgtttatctcttcgccaatcaatggcattgatttggtcacctcaatatcgccgttcaacactgatgttgtgggtattatggttttgtgtggtgttctcttattatggcatttttttatggctaccgagtgtcgcaatgttaaaaggctttagtttaattaaaagctttcaatatgtgttgatcatgacactcgctcagttaccgggctattttaccgcagcatggtttattgaacgttatggtcgtaagtttgtgttaatcacctatttagcaggcaccgcgattagcgcttactattttagcgtagccgattccacaaccacactattagtatttggtatgttgttatcattttttaatttaggtgcgtggggggcattatatgcctataccccagaacaatatcctgatggtatacgagctacaggcgctggaacggcgacggcaataggccgtattggcggaatattagggccactgatggtaggctatttagtgcaatatcaatttgacataagcactatttttcttatttttagcctttccattgtgatagcgatactagcggttatgttattaggtaaagaaaccaaaaatagaccacttaattctatttaa

SEQ ID NO: 305249 - DNA, 972 bp, Proteus mirabilis; identical to SEQ ID NO: 298854

SEQ ID NO: 305250 - DNA, 1257 bp, Proteus mirabilis
atgaattatgcttcaatggcaatccagcgtagagcatcaataacagcgccacagcaaagctggcttgctatcgctcgtggttttagtcgttatttagtgggtaatgaaagttatgagaataacaaccgttatggtcgttacttgcaatatgggcaacttgaaattattcctgcggatttaactaaatctggttttagtcatgcaggttgggattggaatcgatatccaggaacgactacgatccaccttccttatgatgaactagaagcaaaactaagccaattgccaagtgcaggcatagaagaaatgttgctttcaacacaacgttattctggtgccaatacactaaataataacagtatgtttgccatgaaattacatggtcacagtaaatatcaacaacaaagtctaagagcgaataaatcctatttcttatttgataatagagtgatcgcattaggctctggtattgaaaataatgataaacaacatacaacagaaacgacactgttccagtttgctgttcctaagttacaatcaattataattaatggtaaaaaagtgaaccaactcggtactcaattaaccttaaataatgccgatacattaattgatccggcgggtaacttgtataaattagctaaagggcaaacggtagaatttagttatcaaaaacaatactctgttgatgacagaaattcacagcaaacagaacaattgtttgcaacagccgttatctctcacggtaaagcccctaaaaatgcaaattatgaatatgcaatagccatagaagcacaagataataaagcgcctgaatacaccgtattgcagcataataatcaacttcatgcagtaaaagataaaatcacgcaagaagagggatatgctttttttaatgccaccgaagtcaattcatctcaagctttattattatcaagtgattcccccactatggtaatggtaaaaaaacaaaaacaacaattaacgctaagtattgttaatcctgatttaaatttatatcagggtattgaagctgaccaaattgataataagggtaaccaggttgaagtgagtgtttattctcgccaatggcttacagccgatcctcaaccaataagtagtacagttactgtaaaagggatttggaaattagccacaccacaattaggtgttaatattagatatcaaaataataatacgctaattacaacaacgactatacaagcaataccaataacagtttatttaattaagtaa

SEQ ID NO: 305251 - DNA, 423 bp, Proteus mirabilis; identical to SEQ ID NO: 298890

SEQ ID NO: 305252 - DNA, 1101 bp, Proteus mirabilis
atggcacaagttattaatactaattatctgtctttagtcactcaaaataatctaaatcgttcacaaagcgcacttggtaatgcaattgaacgtttatcttcaggtatgcgtattaacagcgcgaaagacgatgcggcaggtcaagctattgctaaccgtttcacttcaaatattaacggtttaactcaagcatctcgtaatgcgaatgatggtatttcagtgtctcaaaccactgaaggtgcattgaacgaaatcaacaataacttacaacgtattcgtgaattaactgttcaagcgaaaaacgggactaactctaactcagatatcacttctatccaaaatgaagttaatcaacgtttagatgaaatcaatcgtgtttcagaacaaactcagtttaacggtgtgaaagtactgagtggtgaaaagtcaaaaatgaccattcaagtcggtactaatgacaatgaagtgattgaattcaatttagataaaattgataacgacacattaggtgttgctagtgataacctgtttgatgctaaaacagagaaaaaagggattaaagaagctggtaaggctatcgatgcaaacgctctgggcatttcgggcggtacaaaatatgcgaatggtattacagtaaaagagtataaagtagatggtaaggtttctgctaataaagttgtcttaaaggatggtagcgacgagtacgtagtaagtaaatcagactttcaattaaaagcaggttctactgatgaagttgagtttactggtaataaaaccactaaatttacagcagatgcaggtaaagatgttaaaattttaaatgttaaggatgacgctttagcaactttagataacgcaattagtaaggttgatgaaagccgctctagattaggtgcgatccaaaaccgtttccaatctactatcaataacttaaataacactgttaataacttatctgcttcacgtagccgtatcttagatgctgactatgcgacagaagtgtccaatatgagtaaaaatcaaatcttgcaacaagcaggtactgctgtactggctcaagcaaaccaagtaccacaaactgttctgtctctgttacgttaa

SEQ ID NO: 305253 - DNA, 912 bp, Proteus mirabilis
atgtattatggttttgatatgggcggcacaaaaatcgagctcgccgtttttgataaagatctgactcaagtatggcaaaaacgtgtaccaacgccaaagaatgattatcaagctctattaaatgtttttaaaacactcactttagaagctgataatgatttaggcagtaaaggaaaaataggtatcggtgttcctggcatcgtcaacgcaaaagaaggaactgtatttaccaccaacgtgcctgctgccaaatataaaccgatgatccacgatctggctaatattcttgaacgccccgtcaaagttgagaatgatgctaactgttttgccttatcagaagcatgggatcttgaatttcgtcattatccttcagtactgggtttaatattaggtacgggtgttggcggtggttttgtcattgatggcaaagtactctctggtaaaaatggtattgccggtgaaataggtcacatgaatcttaatgtagatgctgataatgtgattggtgagaccatgccaaaaatattgtgtggttgtggtagaaaagcctgctttgagacttatttatctggtcgtggttttgaacgtatgtataaagcctttaatggctcaccacaaagagcggtagatatcgttgcacaatattatcaaggtgatgaacagacccaacagcatgttgaccgctatatgaaagtattagccatttaccttagtaatattctgactgtacttgacccacatttaattgttattggtggcggtttatcacaatttgacgcactgtataccttattaccggattatctctcacattgtgtatacggtaatacacaaattccaacaatagaaaaagcacgttatggtgatgcgggtggagcaagaggagctgcctgcttaaatttattagactga

SEQ ID NO: 305254 - DNA, 444 bp, Proteus mirabilis
  misc_feature (30)..(39): n is a, c, g, or t
atgcggccattgtcgtctcattacaatatnnnnnnnnnnttacaatatatcgtcggtaaacaagtggttgctgaaagactacgtaaattaatgaccttaggcacactcttttttatcttaggattagcgggctttatgctggcgggtgataatttaattttctgggcaatggcgatagcaatatttacctttggtgaactgatttatgcacctggtgagtatatgatgatcgataatattgcgccgttaggaatgaaagcaagttatttctctgcacaatctttaggttggttaggtgctgcattaaatccacttgctagtggttatatcctgacaaccttgccccctatttcgttattcgctattttaatggggatcgcagtactagcttggctttgtatgctgcaaggtatgaactacagtgaaaaaagaatagctgcttaa

SEQ ID NO: 305255 - DNA, 351 bp, Proteus mirabilis
  misc_feature (322)..(331): n is a, c, g, or t
atgtatggtactcaattacctttttggttagcggcaatatccgccagtattcctttatttatgatccaatgttttgtgcaacgttcagtggtagaccattccacagaagaaaatagtgtaaagtgggatccgaaaataatgctaaaagataaagcattaggctggtttgtgctttcaactttttttggcacattaacttttggtacatttgcttcgtgtatttcgcaataccttttagttgtttatgatgctaaattggctgaatctgctattgcggtgatcctccccgtcaatgcggccattgtcgtctcattacaatatnnnnnnnnnnttacaatatatcgtcggtaa

SEQ ID NO: 305256 - DNA, 471 bp, Proteus mirabilis
atgtggagtatgaatagtgctaatatatctgcaacaatggttgaacctgtttgtaatatacgtagtgaaaatggtagtgctccattaaaaattggttttgatacattgacgatatcttcactgactaaatctcctgtggtaaaagatttttcactttatatatcagactgtaattttaataatacattagccattgttttaaacccaaaaggaggaagtacgcttttatataaaggaaaaaatatattagcaacaagtactgatgggttaggtatagatattaatgaagtgactggtggaactattcgttcactggaaacaagtaaaaagcataaaatcaatccagaacgaattaattcaactctttatcgtgttgacttacaagctcagttagtaaatacagtgcctattaatcaattaaaactagggaagttcaattcaatagttactatttcagtgacttataactaa

SEQ ID NO: 305257 - DNA, 963 bp, Proteus mirabilis; identical to SEQ ID NO: 304657

SEQ ID NO: 305258 - DNA, 996 bp, Proteus mirabilis
atgtcatccaatgccaaacaggcgattattgatgcacttccccatgcttttcgctatccagatgatgcgcgaagcgcacttatcagtgcattaggtgaagaatttaagctatcagacaaacacatcactctaggtaatggctcctctgaaaccatacaagcagccgtacaatatgtggcgaataaagcgcaaaaagcaggtaaaacagtacaactgattgtgcctgatccaacatttaattatgccgaactttatgctgaacctttaggtgttaatatcgtaaaagtgccggttgataacacattggcttttgatttaaccgccatgcagaaaaaagcacaagcatttgatggtattagcatggtatatctgtgcaatcctaataacccaaccgcaatgctgacaccaacagcggcattaacaaattggatcacctcagcaaaagaaaatgtcttttttattattgatgaagcttacgctgaatttgtgacaacacctgaatttaccagtgcgatagcattagttgctcaaggttataaaaacttgattgttacccgtacattttcaaaaatttatgcattagctggattaagggtaggctatggtgtggcagtccctgaggtaattagtgaagtagatagtttcgtttctattgataataccaatactgccggtgctgttagcgcattagcctcgttaaaagatcacgcttttgtggcatatagtcgcaagtcaattgatgtatcacgacaaatggtggttgatactttaaacgccttaaatatcgagtatgcaccttctcacgccaactttatttttcataaagtcaaaggtgatgtgaaaacttatcaagagagaatgaaagcggcaaatattatggtaggacgtgagtttcctcccgcattaggttggagccgtttgaccttaggaacccctgaggagatgagttattttgtcgcgacgttaaaagagtttagaactaaaggatggatataa

SEQ ID NO: 305259 - DNA, 882 bp, Proteus mirabilis
atggctgagaaaacacaatctgacaaattcaaagcggccaagaaaagcacattggtcagtgtttttgttaatatctttttatccatatttcaaatcacaattggtttcttctcacattcccaaggcttaattgctgatggtattcattcactgtctgatttaattgctgacttcgtggtgttaattgcgaataaaggcagtcaaaagcaacccgatgccgatcatccttatggacattttcgctatgagaatgccgcttcattagtgttagggacgattttattgattgttggtttgggaatgatattttctgctatccataaaatgttagatccttcaatcattcctgatgttcatagcatcgcgctttatgtggctttattggcattagcggctaaagaagggttatttcgttatatgttagctgtagccaaaaaagtcgattctagtatgttagtggcaaatgcttggcatgcgcgctcagatgccgcctcttctttagtggttgcaatagggatcattggtagccttgctggatttaaattctttgacccactagcagcacttattgtcgggctatttgttggccgtatgggatggcgttttacctatcaagctttgcaagatctcatggatagaggcgctgatgaagaaacacttgaacagatcaccaatacattaatcaccacaccaggagtacaaggggtacatgatttaaaaacccgtcgtgcaggtgattatttattagttgatgtccatttagaaattaaaggcgaattaacggtcaatcaaagtcatgatattgtggtcaatgcccatgatagagtacttaaacagcatgcacagattttaagtgtgatgatacacgtcgatcctgcttaa

SEQ ID NO: 305260 - DNA, 450 bp, Proteus mirabilis
ttgcttgataataattctgatgattttaagttttttgatatttctattccttttgactttaagtcaaatattgcaatagaggggctaggctataaaaataaaaaacagattgaaataataaaaagtcttgttgattcatcaaatgataatttgtgtgtatcttataattatttccttagtagtaaagttaaaaataaaatcactgtaaaatataatataaaatatattcatgattataatttttcctttaataaggaaggtctaaagtattatctgttttcatttttaggctcttgggaagattatatgattttatccaatattatctatatgagagaattaccgctattgcaagccaagagaagagatggctatgatatagaaatatttacttcaggtaaattagataaaaacatttgttctttaaattatcttatccctataatttag

SEQ ID NO: 305261 - DNA, 300 bp, Proteus mirabilis
gtgcatgaaagcactctgcaaacttattttgtgagtggcggtaaaattgtgcttgatgcggggacagaaatcacccttaaagtgggagagagttttatacggatcactcccaatatgatatttacttcgaataatttggtcgtcggtggtggtagtgcaggaagtgggacttctatcgatttggagctaccgcaaggcgtccctcctttagagttatctccgtatcctgtaaaaaaatactgtgcagtagcagcacagcactcagggggaataattataaaaccaaatgaggatgaataa

SEQ ID NO: 305262 - DNA, 387 bp, Proteus mirabilis; identical to SEQ ID NO: 301411

SEQ ID NO: 305263 - DNA, 492 bp, Proteus mirabilis
atggatcaggacattaccttgtcaaatttatgcccctgcaatagccaattgccttatagtgagtgctgtgagccttacttattagggacaaaaaatgcccctacagctcaagcgttaatgcgctctcgctatagtgcttttgtgactcataatgcagatcacctaatcaaaacatggcacccttcgtgtcgtacaccttctttacgggatgagttaatcgccacgtttcccaatacacaatggctagggttacatattatatcggcacaagaaaaccctcgtgataacgaagcctttgttgaattctcagcttgctttattgaaataaatgctgatgataagcagtatctacatgaacgctctcgttttctaaaaatagacgactgctggttttatattgatggtgtacagcctaaagtaggacgaaacgatccctgtccttgtggctcaggccgtaaatacaaaaaatgttgtgaacacaatagaaaataa

SEQ ID NO: 305264 - DNA, 381 bp, Proteus mirabilis
gtggcaaggggaacaagtaaagcagtcggttattatcttgaacacttattgtttgcactgggcctgcattgcttttttattaatgattataacttatcagattcgtttacacgtttagtgaatgaagatgacacggttatttttatctctctttcagggggaactaaaaagatcattgaaacggcaaaaattgtgcagttaaaagaggcaaacattatcagtatgacagcctttaataccaatgagttaaccagttatgcgacgcatacgctattttgtttcgcggataatcatgatacgaaaaaagatgataccaagtcacgaattggtttttttattttggttgatttgttaataaatgaaatagaaaatctactttaa

SEQ ID NO: 305265 - DNA, 435 bp, Proteus mirabilis
atgggcacgctcgcggataccgttttacaggaagggggtaaagttattggtgtgatcccaacgctattagaagggcgtgaaatttcacataaaaatctgacagagctccatgtcgttgaaactatgcaccaacgtaaaagtaaaatgattgaactcgcggacggctttgtggcactgccgggcggttttggcacattagaagagttcagtgaagtgtttacttggagccaaattggccttcatcaaaagccattaggtatatttaatattaatgatttttatcagccattactggctatgatagataaaatggtagatgaaaaattcttacatgaaaaatatcgtcatatggcgattgttgagcaatcacctatccagttattagataaatttgaaagttatattgccccttcgattaaaacctacgataaataa

SEQ ID NO: 305266 - DNA, 384 bp, Proteus mirabilis
gtgctccatagagatgatgggtggaaagaatattatgcagaagaaatgaataatttaaatattgaaggagaaaaaaaagacatatatgacgtaataaaattagaatacgaggcagagtggcaattttccattggagaataccccaaagcgtgcgaaaccatacaaaaattgtgtgataaattttctaattttccatcagaaagaggatggtatttacaacagttagctagatataaatatagaacaagtaaagttgatgccaatcgaatacaaaaatctgcatttcaaagcaaccttcatttattaaaaccaaaggaaggcataagctataataaaattgaatttgtgccatcaagattaccaggagatgatgatatctcttga

SEQ ID NO: 305267 - DNA, 483 bp, Proteus mirabilis
atgaattttgatggtactttgattgatacgccatgtagaattgatcagccaagtttaaatcaaaatgtggtttttttaaatagcacaccaagggattattggaaatatcctgcggttagacctgcagaaaaatttaccattaaactgatccaatgtgatgcaaaatcgttatggaaatcagtgaaaattaaatttaatgggcagccagagccagagatgggggctgaacaacaaaagtaccttacactttcttctggcgttaataaaagtaagttagccattggattaattgatatagatggaaaccaacgtattactttaggtgaaaaccataacggtggaaatggaactcaacttaacgatggcacgatgttgctaacctttaatgcatttgttgaagcgacaccaaaagcaatacaggaaaaaagtgttgtacctggagtttataatgccacggtagaatttgaggtttcttatgaataa

SEQ ID NO: 305268 - DNA, 306 bp, Proteus mirabilis
atgcacattctttccctaggatatcatggggtaaatggtggaattagcaaagaaaacatccttcatgcattaaaacaagtacatcatagaaaagatgaactaaaaggacaccagttagttactgctttgaagagtctaactgggttgcaggctagtaaaggaataactcctcctgtaattgcgtatgattcaaattctcgacaactaaagattgtagattccactttttacttctttttaaaaaattctgatttagaggaagttaaatcagagataccttgtccaatggatgggctagatgtataa

SEQ ID NO: 305269 - DNA, 303 bp, Proteus mirabilis
atgaattctcattcagcttggtttgaaagcatttatggaaatgctaaatgtaagagagtcatcataattccaactttaaaattatcttatcacgctgactttacccatgatgttgaagtaatgcgaaaaaacatgcttaaaaagcttaaaaataatgtgaaaggattctttaaagaatttgggcaatatgatattcacagtgttagtgatcaaaaaatccaacagttaattaacattcatgaattagatataccaagcttaataaataaatatactgaacgttataaaagaatgtctaagtga

SEQ ID NO: 305270 - DNA, 300 bp, Proteus mirabilis
atgctaattaactttacctccagttcatttactcgaggaaggcctaattatagtatttactcatcaacaaaagctgctattgttaattttactcaagctatagctgaagaatggttacctttaggtattaaagtaaactgtattaatcctgaaaggacagatacaccgatgaggcgtagtaattttgggattgaaccacctaattcactacttagtgcagaggctgttgcaaaattcactctatcagcaatgtcatttgaacatacagggcaagtatttagcataaagaatgatttatag

SEQ ID NO: 305271 - DNA, 210 bp, Proteus mirabilis
atgaaaattgatagctataaagtgtctcctgaaaaaatggagccggttgtaatggcattaaaaccttacttagatacgactattgcgacttattttgataatcagcctgtttatgtgctcaaccctgaaaaaaatagtgcagaagcggctgcctttaaattagcaaaagggattgaagttaaaccgggtaagtttgtgatccaactttaa

SEQ ID NO: 305272 - DNA, 252 bp, Proteus mirabilis
gtgattaccaacacctacggactcagaaacgattggtacgaacgccaaatggaacgagaagcgtttgttaattctcaggaagagaaaatatcagttgatgaggttatggatagcctgccagaagaactgttatgtatggatttagcaaggaagttaaatcctgtatttgaaattagtccccaagcactggatgcggttttagatggaattagaacagcgatacagattgggatagataaggagatattgtga

SEQ ID NO: 305273 - DNA, 480 bp, Proteus mirabilis
atggatatgcggactctgttaccgaccagccttgcggctgaattacacggttttaacggctgtttatggaaaacaccggaggtcatctggcggcaggcgcgctggcaggcgtttgcccccggtaacagtacatatcacctttatcagtgccgttatggtgtgaaatggccgaacggcagtggttttcactgtattgatggcgggtatgcgacggagttatccgcagagtttgatactccgtgggggccgccgtcagcagcggttttgtgtgctctgtctgcgcgtttccgctgtcaggtccgtcatgtctatgccgaagaaggctgtggtttctgcggatacagcgagtatgaccatggccggttaaccgaccatgaatctgatgagattgagttcagtgatgaagagaatgaggacggtttccaggatgtgacgggaccggactatattcttgattcattgccacattacggagggtga

SEQ ID NO: 305274 - DNA, 792 bp, Proteus mirabilis
atgagccttttttcggtcggtaaaatgattgtaatgaagaaatttctatcgggaataatatgtgtaatcagtattagcctagtaggctgtaccctcttcattccatcgtctattcagttggggtctgagaatgtggctttacaaagtaatggtaagaccacatcagccaagatctatgataataaatatacatcacaatctaatagtggttcatcgttaaatttctttggttcagatatgcttagtgtttgggaaagcaaagaaaatggagttgtttacactataattaaaccactcgagaataagcccgactcttctgcaactattatttccatttttgctattatcttttcaatactaataccagtaggacaagcgatatacaatcattatgtagatagtaaaaataaagttattgcagtaaatgaaggtttttggatgagggaggtttttattccaaagataaattcgtcattaaataatattgttagtcaagcacaaagtagtttaacacttagtgatgatgaatatttaagggcttttagagataatatttttcctagcttagatgaattacgtgattcgatcgatttactttcaactataagtgagagcatagacttaggaaaacacatagaaaatttatttgatatctgtgaaaaatttgagaatgatatgcaagagaatcaactagaaagtataaatataagaaaagatgatatggttaatttttattttaatttcactaaagaaatgttaagaacacacacatttttaactagtaatcagtaa

SEQ ID NO: 305275 - DNA, 348 bp, Proteus mirabilis
atgaatatggccgatattattgtcaatttcaatgagttagctagagatggcaaaaagttatttgctggaagagcaaatggtaaaatggcttatgaaaaatttaatgtggggaacttcaggccaaacactgaggatatcctatctttccaaatacctgatgacatagttgtttcaagctcatactttttgggaatgctggaaaccattttacctcaatttaagaccccgagtgaactatttaagcaagttaaagtaaataaccaaatttatagtgatggtaggtttgtagagttagaaagggctgttaaaagaggtttacataggaatgagccttttttcggtcggtaa

SEQ ID NO: 305276 - DNA, 1128 bp, Proteus mirabilis
atgccaaaaatatttagtttatatactgatcctgaaaaagcattatccttcatatgctctgttacaaaaattgttgccagaggaaagttcaaggcggtaacattaaattatagtaatgtagatacgtattgcttaggggctgagtgtctgcttggtttagctcttattgaagccagaaaagttaactcaaattttgatagcaatattgcgataaacggagtttaccctaaaaataccgagcatttagagataataagggatgtagggttagttaaagaacttagcgaatccaaagaaagtaaaatagaggattcatcagttaaaagagataaccctaaacagaggatttttaaaggggagagcataggtaaggaaaaagcgtcagcgtatgcagaagatactaaaaataaagctgcgcagggttttactaattacctcagtaaatgcttgggtgatcacaaactatttttaaatgaaaaagcagctgaacaccttacatcctgcatgggagaattgcttgataatgcagaaaggcactgcggtattgatgagagaccaaggtggtatttgagagggtacgttgataatagctccaagaggccggtttgtgagctttctatttttaattttggtcgtacaattgctgaaactttcagtgacctacctctagaacatttttcaatgtctaggcaaatcacaccttatgtagagaaacataagaaaaaaaatggcatgtttgaggaaggtttaataactgttgctgctctacaaggtagagtaagctgtaaaaatatgcatgatactgatagttctggtactggcacgattgagttacttaagtttttccaagatatgcacgaccaacttagaaagatcagagaaggcatttctgaaaagccgatgatatcgttgatttcagggagaacccatatagtacttgatggtagttatgatctgaaagttagtacatcaaatgatggggaaagcgagaattacacttatccatttaatgagatagggcttgagcaagctccagacaaagagtatcttagaaaaatgaaaaaagctcttttccctggtgtcatggtaaatatccgctttccacttgaagaagtaacaggtaattga

SEQ ID NO: 305277 - DNA, 1122 bp, Proteus mirabilis
atgaatataaatgaatttatagggcaataccgtaaccaccccgtattattcataggtgcaggtatgagcctaagatacctagataatgcctttacatgggatggattgttaaaattcatttcatttgagctgaaaggtaataatgagttctatttagatataaaagctgagtgccaagataatggtaaatatgattatacaaaaatcgcaacaaagcttgaacatgaattcaataaagatttaggaaataacaggaatggaaagttcaaagaaatcaatgatattttttatcatgaaatggagcgagaaaactgccttagtcgattcaaaatttacatttcacatttagttagtaaactttcctataaagaagaaaaaaaggaagaactagctgagctaaaaaagattcgtaaaaatataggttcagtaattacaacaaattacgactctcttatagaaagtatatttagctttgaacctcttgtagggaatgatatattattaagcaatccttatggttcagtttataaaattcatggttgttgttcagatccatctaagataatcattaccgatgatgactactccaaattcaatgaaaagtatgaattaatacgtgcgcagttactttctatttttattcataacccaatcatattcatgggatatggaattggtgatgataatattaaaagtttactaaaaacaatatttacttatgttgaaccaaactcaaatgacgcaaaaaaaatcagacataattttttattagttgaatacagtgaaggctctagttcacatgaaattagtgagcatgatatagatttagaaggtttttcaacaatacgaataaataaattaaaaacggatgatttcaatgagatttataaatcattgtctagtttaaatttaccagtttcagctatggatattagaaaagttcaaagtattgtaaaagatatatactctggtgcaagagaagatggcagcagtgttacagttaacataactgaagatattgactctcttaataataacgataaaattctagtaataggttctagaaaatcaatcagttatgaacatagaatcgaaccatccattaattcgactaatagataa

SEQ ID NO: 305278 - DNA, 4293 bp, Proteus mirabilis
atgttagaggcggcaagggttggagatattatcggtcactcaaaatccatgtgggggatgctcgttggtactatattaggcgctgctatcgccatcggtggcgccatgatttctggtgtattaatgggtgcgggtattgctgcaagctgcattggtattggcgtgcttgccattggtgcttccatcgccgtcggttacggaactaccctattagccgactgggttcgggataaatgtgttgaaacaggttcaaaatctttaagcccctgtggggaaatccttgacggctccaaaaatgttcgtattaacggcaagcctgccgcaatgtccacccgtagcaacgtcaaatgtgataaagaaaacagtgaacgccaaatcgctcaaggctccggtagtgtctatatcaacggttttccagcctctcgggtcggtgataaaaccacctgtgacgccactattatggaaggctcccctaatgtccggattggtggtggtacacaagcaaccgaagatattgaacctgaaattccctcttgggttaccaccgcatccgatctcacgatgttgtttgccggtttcctaagttttggttcagcggcagccaaaggccccggcgcagtagcgaagttgtggagcaaattaccgggtagtgccaaaataagtcgctttgcttgtcgttatggcaagatttttactgggcttagtctcgctattccggccattggcatcttaacccgccctgttgaagtgattggtggacaaaaaatcctcaatgacgaagatgaattggattttagctatgaggcggaattaccactttattggcaacgcaattacttaagtagctattgctatgagggtgcactcggtcgaggttggagtttcttttgggaaagccagctaattaaaagcgaagatggctttgtttggcaaaatctatccggtgatatccttccatttcctgacattccactcggacaccgtaactttaacgaagctgctcaaggctggatcatccaccatgaggatgacagttggacgtttcaagattctggtgagctacgctatcattatcccccttttgatgacaaaggttatagtcgtttaagtcatatcgttgataatgtgggaaacgagcagcgcttccattacaacgagcaccaccaactgatccatattacgggatgtggtgatctcaatatcgagtgtgaatatcaatcttttcaacttgctgaaaagaccgtatcgcgtcttactgcagtctatcaagtaaacccccatcagatacgccgtcgtctatgtgcttatttttacaacgaaagtgcccaattaatacgtgttgagcaacagacaaatcacccttatcgccaatttgggtggactgatgccggtgttatggcgtggcatagcgataaatatggcttacgcagtgaataccgctgggcactttcagaagataatctttggcgagtgattgaaaacaaaaccagcgaaggcgaaagctatcgtcttgaatatgatgatatcaacctcacacgaaccgcttattggcacgatggttcaacctcattttggcaacttaatcatgatcaccaaattattcattatatcgaccgtacaggcattaaaacggcgctaatttgggatgagtttggattaccttgcggttgtcgcaatgcgttgggtcatacacatattagtgaatgggacgcattgggccgactactcagcataacggatggtaatggtaaccaaacgcgttggcaatatcagaatgaacgcgagcgccttatcactgtattttggccggataacacagagtcgcgtttagcgtatgacagttttgggcgactgattaaggaagtttctccccttcatcagatcaccgaataccgctatgactttaaaaccacattgcgccccactatacgcattgatgccaagcaaggacgcagtgagcttctctggaacaaacgtgggcaattactgcgccatactgattgctcaggcaaacaacatatttggtgttatgatgatgaaggccgtgttgtttctcaaaccaacgctttacaggaagccaccgagtaccagtacaatgaggcgggacacctcactcgcatcatattgcccgataattctaccgtgcaactggcatggaatgcagcaggattacttactcatcatcaacgcaatgacaataccccgcgtcaatggcaatacaacgcctttggtcgtgtcaccacagaaattgataaactcgctcggcatatctactaccattacaatgcacaaggtgcattaatttcaattgaaaatgccaatggcgggcgttatctcctcaatcgtgatgccgaagatcggttagtcgaagaaatacgtcctgatgagacgctactccaatacacctataacgtcgctggacgactggttgaagaagctcacttaggcgaccgagtcttcacatctgcaccacgcacaatattactcgactatgatgcggcgggtaaccttgtcaaacgtgagaccttaactgatcgctatcaatatcaatgggatagtatgaaccgcctattggtcgccagcaaacaacctaatcaacgtggtcttgaaatgggtttgcaagcgaatcaagtccactttacctacgatgcacttggccgcattattcgtgaacaaacaggcgacgatatcgtcgaatttaattatgatgaactcaataacctaagccgtctgacgttacctcaaggtgacagcctcaactggctctattatggctctgggcatgccacggctatcaaccaccttgttgatagtcgctctcagttaattactgaatttgaacgtgacgacctacaccgtgaaatcagtcgaactcaaggagagctcacccaatatcggcaatacgataaactggggcgaaccattagcactttcagctcgcgtgataagcaacatccattaaatggtattactttatggcgtaagtggttttatgatccccaagataatcttggtgccatggaagacacctatcgaggttgggtagaatacctgtatgactcagagcaacgtttaaaaaaagtcgccagtagtgaaaaccttgatgctatgctgttttacgatcgcgcggataatctactcgaacgcccacaatccgaaatggatgctgaacactcccctactttagcgctgagtcctcaaggagataaattacgtcaatttcaagggtggcactatcagtatgatgcctatggtaatgttattgctcgccgttaccgtaaccaatcaccacaaacctatgcttatgatggtgataatcgtctggttatcgctcataatcaaggcataaaagcccaataccactacgatgctctgggccgtcgtattcacaaaaccgttgaaaaccgagaaagtggccaagttaaacgacaagagacgcattttatttggcaagggctacggttactgcaagagcaggatctcaatactggtaaacaccaaacttattgctacgaagagcacggcagttatacccctcttgccgttatcgtgaaacaatccagtggttttcattattactggcaccactgcgatattaacagcgccccacttgaagtcaccaatgcacaaggcaatacgctatggtcagggaaatatgaacgctttggttttgttcgcaatagcccattaagtttctactctgaccctgaacgtgtgatggcgtcctttgagcaaaatctacgctatgccggacaatattttgacaatgaaacggggctgcactttaataccttccgattctacgacccacagataggccgttttatcatgcctgacccaattgggttattgggtgggattaatctgtatcaatatgcgccgaatccgttgggctgggttgacccttgggggttaactgctgttgatgctcccggatattatgtttatggcttgttcgattcaggcgcaaaagagccttattatgttggtattactgatgacccgatgagacgatcaggtgagcatcgagttagtggtcgattaacttcaggtgcaagcatgaaaactttagataaaaatgtcaactacggccaagcccgcggctacgaacagtattatattgagaagtatggtacgagaactggaactatcggtgaagatatatcgtcaatcaaccgagggaacaaatacaattcatttgaccataaccgtgctgatacgcgtgccgatgcttttagagaagcttatgacagtaaaacaagaagttctggaaaagtcggaggaaaatgctaa

SEQ ID NO: 305279 - DNA, 168 bp, Proteus mirabilis; identical to SEQ ID NO: 298470

SEQ ID NO: 305280 - DNA, 2598 bp, Proteus mirabilis
ttgtatctttatattgaaacactgaagcaacggctggatgcgattaatcaactcaggctggaacgtgcatttgcatcgatgagtgatgtgtttaaacaggtgtatggtttaattcctgttttactgcattaccaccaccctcagttgccaggctatattcaaggaaatgtccctcatggtacatgtttctttgaacctgatgacgtgcaacgtcaatgggtcaataagctgactaatgcatcatgtgatgagccaatgaatggatacaccagcggagagttacctattacgggtatctattcgatgggaagtacttcctcgattgggcaaagtcactgctccgatattgatatttgggtctgtcaccaatcttggctggaccaagatgagcgtgcacgtttacaacgtaaatgtttactgatcgaacaatgggcgggagaattaggtattgatgttacttttttcttaattgatgagaaccgcttccgtcatcatgcaagtggtagcttaggtggggaagattgcggctcaactcagcatatcctgttacttgatgagttctaccgtacagctgttcgccttgcaggtaaacgtttgttatggacgatggtaccagtagaagaagagtaccattacgatgaatatgttaattcactctatgcccaaggtgtattaacgcccaatgaatggcttgatttaggtggattaggtgagctttctgccgaagagtattttggtgcaagcctgtggcaactctataagagtgttgattcaccttataaagccgtattaaaaagtattttattggaagcctattccgcggattaccctaatggcaaattgttggcattagaaatgaaacagcatcttcatcgtggtgaaatcgtaaattacggtttagatgcatattgtatgatgcttgagcgcgtaacccgctatttagtttcgattaatgatttaacccgccttgatttaatccgtcgctgtttctacctgaaagtttgtgaaaaattatctaatgaaaaaaatgagaatgaacctgcaggttggcgacgccaagtattatctcagttagtcacgcagtggcagtgggatcacgaacgtttagcgatattagataatcgtgatagctggaaaatagagcgcgttcgtaacgcacataatgaattattagatacgatgatgcaaagctatcgtaatcttattcgttttgcgcgccgtaataacttaagtgtcagtgctagtccacaagatattggtgtattaacacgtaagctttatgccgcttttgaagcgctaccgggtaaagtaaccctggttaatccacagatttctcctgatttatccgagcctcatttaacctttatctatgtgccaccgggacgcgctaatcgtagtggttggtatctttataatcgggctcctgattttgcacatattgttggtcatcaaccgttagaatataaccgttacttaaataaattagtggcgtggtcttattttaatgggttacttactaaagattcacaggtttatattcatcaaggtgactcctcttgtgatgaaattaaacttcatgaattagtgcgggatatctcgagtcattttcctattcgtttacctgccccgacgcctaaagcactgtatagcccttgtgaaattagacatttagccattattgtcaatttagaagtcgacccaacagagcgtttttctgatcaagtggtgcattttgattttagaaagttggatgtatttagctttggcgaggaagagcaatgcttaattggcagtatcgatttgctctatcgtaactcttggaatgaagtgagaacgctgcattttaatggtacgcaatcgatgttggaatcgttaaaaactattttaggtaaaatgcaccaagatgcggccccacctgcatcggttgaagttttttgttatagccagcatctacgtggtttaattcgcacccgtgttcaacagttagtctcagaatgtattgaattgcgtttatcaaccaatagattagagccagggcgttttaaagcattacgtattgcagggcaaacatggggattgttctttgaacgtcttaatgtttctgtgcaaaagttggagaatgccattgaattttatggggctatttcatacaacaaattgcatggattacccgttaaattaggtaaagatgcccgttatctgcccgcggtgattgatggttttgcttgtgaagggattattcagttcttctttgaaacaacagaggataataatgtctttaatatctatatcttagatgaagctaatcgagtggagatttattctcactgcgaaggcagtaaagaagagctagtaaaagatgtcagccgtttttactcttcatctcatgatcgctttacttatggctcaagctttatcaacttcaatttgccacagttttatcaaatcgtgaaagtggatggagcaacgcaagtactgccttttgctgggggatcgtttggtaagctaagtgatctaggtaaaacagcgccaaaagaagagatgagtactaagcctattcaaggatttaatgactatcaggctgtacatcatcactga

SEQ ID NO: 305281 - DNA, 4935 bp, Proteus mirabilis
atgtctgatattcatgatacgaatcgcgaacaggaaatacttgatagcgctgttgcacaaggtggcgcatatgaaatattgcgtaaacgccttaccgagcaaggtcagcagttacatgtaaaagccactgaactcaatcagcatcgattagctgaatttggtcaaagccaaatggatatcattggccgtattcgtattcgaacagagaataattgccaagcaagagatattgttcgcgttggtgaatggttactatttggttataacgttttcctcggtttaaaacgagaaacgcatcttgaagatgttttttcactttatcgcttaattgataatgatggcgagtttgatgttgaagcggttgcttatgaaggcacttttttaaatgataatcgctttatccaagattttaccgagctatacacttactataaaaatacgcaactactacagctagttgagcgtgatggtaaattactcgctagttttcaaattggcgatcgtattaccgatgtacgcgtcttccgttggtcgatatccagtgacaaacaacgtattgaatatattgataatcgtggcgaacgcgatatagcactcccccctgcttacgattttgattggataaaaacacaacgtgaagatacggtaaatgggcgttttcctcatatcaacattttagatacagtctttgtagaaaccaccggtggcgatttgactgtcaaatgtgaaaacaataccgaagatggtttaggaatttatcgtgaagcggtcttagataaaaaccagtcccttgatgatgcacaaattgaatatgcacaaactggcagtttaattttattaaaagtgcttccttaccgcgaagagaattggcgttatttagtctataacacactaacacaaagtgttcagcgtattgatgccattgggcaagcttgtgtgcaacttccggaagatcacggtatcatttttcccggcggctactatctacaaaatggcgattacaaaacctttgatcaaccaatggaaggtatgtattttcgtcgtttgcgtcgttcacctaacggtgaagatgtgctgtatgtcttctattcaccgacacaaggtcgtctcgcgctatttaattacaatatgattgagcgtaaattggcgacaccattggtcggtcatggctatgccatgctagaagatggcaaaatggtgctatttgaaggggaaggcgaagaagctacccgtgttcacccgatgcaagtttggcaaacgcccttctattctgaagaatttgccgataaacaaccgccacgaaacggcttttatgggcgtattggtaatgccgatttagttcgcgggatctcagaaattttacatgtcgctaaagaaattgaaggtagccaagtttccatcgctcgttatgagcaacttagccaacaaccaaaaagcttattagatctctattactggtttaatgatgaacactgtctaggtattggccccttactaaaagagatcgctcaaacaagtgaattagtgcttgatgaatatgaaaaagtcgaaagtattcgtcaacaatcagcgaaatcaatgcaagaagcgatcaaccgtcagaaatctctgttatcactgacactgcctgatagttggaccgatattcaacaatttgttgatagtttaaattcgctcaatacacaccatggacaccttatttctttgcgtgaattccgttatatggatttaacgcaattaaataaaatggaaacggaaataaccgaggcacagcaacgtgtttcgcaagccacagcccaatttcttgccagcgacaaagcgatacagccttttaaaacacagcttactacttttgaacaacagatagaaaaagcacaaaacagtgctcagcttgatgtaccaatgaatgagatggcgcagatgtcagaagatttagacatgctgtcaaatctgatggcatcactcacctttgaggatgtgacgcaacaaacacagattattgatgccatctcccaaatttatgcacaactcaatcaatcacgagctcgcttacagcaaaaaagaaaatcacaaagtagcgtagaaaccgtcgctcaatttggtgcgcaattccgcctatttagtcaggggatcaccaatgctttatcactggcaacagatccggaacgttgtgaagagcagctttcacgattgctagtacagctagaagaattagaaagccaatttagtcagcatgatgaatttcttgatgatatcttgtcaaaacgagaagagttattagagacttttgaggcgcataaacaatcgttacttgatgatcgtcaacgtcgttcacaaagcttattaactgctgctaatcgtctcttagaaaatctgcaacgtagaacaactcggttgcaatcacaagatgaattaaatgctttttttgcctctgatcctttagcattaaaaacacgtgaaatcattgaaaaactaagagaaatcaatgacaacgttaaagcagatgatattgatgcccgtcttaaatcgtctcgtgatcaagccatccgtatcttacgtgataaaacggatatctttgaagagggtggcaatgttattaaattgggccctcgtcaccgttttagtgttaatacacaagagctagatcttactattttaccgaaagaagataagctttggttatatctaaccggtaccgatttccaagagccaatcgaccatccagagcttgaaacactgcgcccttactggaatgcgacattaagttcagaatctgaaacggtgtatcgtgcggaatatctcgcctattcaattatctatgctgcatcaaaacgtcaagatggattaaccctagaaatcttaaaagaagcactgagtgtacctgaaaaattagaaaagttagtacgtgatttcgcaacacctcgctataacgaaggctatgaaaaagggatccacgatcatgatgctatcgccattctaaagaaacttctacctgtaggtgaaagtgctgatctgcttcgttataacccaacagcacgggcaattgctgctattttctgggaaaaagtacaaactaatgaatacccagcattatggccagagcgcgcacgaacggcagtgaatattcaacaactgtttcataatgatgatgcattaattgatttacaggcagaaatagaagcggatatccgcctattccttactgataatccgattaaatgtggatcttatgttccgatccaagccgctgaatatttaagttttgcactagcaagaacaccaatagaattggtttacagtaaatatgccaaagagctcgttgttgccttacaaaaccgattagaagccgctcatatgtggattgattttaatcgttcacaacaaaatttagcctcacgttatgcacaacgttgggcattgattcaaaattggctacaaggattgtgctctcaagccgattatgctcatctaaccccttatattccgggggcaattgccattattatgttagataaaatcgcctctgcacgttatagcgaggttgatttatactttaaggtaaacggattattaggtgagcatcctactattgaaaatcaaacactttcattgagtttagatgattatttcagtcgtatgcgcggacagcgtaaaacctttattcccgcctttaatcattatctgactttacgacaaaaaattgttcttgaagagcgccagcgtttaaaactggatgagtttaaagcaaaacctctcagttcatttgtgcgtaataaactgattaacgatgtctatttaccaattattggtgacaatatggcaaaacagatcggtgcattaggtgaagggaaacgcactgacttgatgggattattattaatgatctccccaccaggttacggtaaaacgaccttaatggaatatgtagccgatcgtttgggactgatctttatgaaaataaatggccctgctttaggtcataatgttttgtcattagatcccgaacaagcgccaaacgcaacagcaaaacaagagctagaaaaactcaatcttgcccttgagatgggcaataatgtgatgttgtatgttgatgatattcagcatacacaccctgaattcctacaaaaatttatctcgctatgtgatggcacacgccgtattgaaggggtttggaaagggaaaacccgaacctatgatatgcgtggtaaaaaattctgtgtggtgatggccggtaacccttataccgagtctggtgaactatttaagatccctgatatgttagctaaccgtgctgatatctataatcttggtgaggtattaggaggaatggatgacgcctttgcactcagttatattgaaaatagcttaacctctaactcagttcttgctccccttgctttacgtgatctaaacgatctctatcttttggttgataaagccatgggtaaatcagtttcaaccaattccctcagttatccttattcggatgcggaaattaatgaaattgtgatggtattaaaacatctaattactttgcgtgatgtgattttaaaagtaaatcaacaatatatagcaagtgccgcacaatccgataaatatcgtactgagcctgcattccgcttacaaggcagttatcgcaatatgaacaaattaagcgaaaaagtctctgcggttatgaatgagaaagaaattgaacgcttactcgacgatcactatcttggcgaagcccaattactcacaacgggtgctgaagagaacttattaaaactggcggaaatacgtggcacattaaccgaacaagatgctattcgttggcagcaaatcaaaaaagattttatgcgtaacaaagcattaggtggcgataatgctgatattggcgatcgcgtagtgtcacagttggcgaatttagtagaaagtgtgcagagtttgcgctaa

SEQ ID NO: 305282 - DNA, 267 bp, Proteus mirabilis
atgtttttttctcgtaaattagaggcctttatggccgtcgttgaaaatggatccttaagtaaagctgctcgtgtgatgaaccgaacgacaccacctgtagcgaaatcaatcaaagattttgaagccgtgctagggaagcgcttgtttaagcgggaaaagtttggtatgagtttaacgcaagaagggttagaactctataatgatttaaaatcactttatctgcaagaaaaagagataacaaaaaaacacacatcgggctattattaa

SEQ ID NO: 305283 - DNA, 519 bp, Proteus mirabilis
atggttgataaacgcgaatcttattctaaagaagacctcattgcttcaggccgtggtgaattatttggccaagatggcccaccactgccttcaggtaatatgctaatgatggatcgcatcattaaaatgactgaagatggcggctcccataataaaggctttatcgaagcagaattcgatatcaagccagacttatggttttttgattgccactttgtcaatgatcctgttatgccgggttgtttagggcttgatgcaatgtggcaactggtaggtttctacctaggttggttaggcggtgaaggtaaaggccgagctttgggtgtgggtgaagtgaagttcactggacaaattctaccaacagccaaaaaagtcacctataaaattgatttcaaacgtgttatcaatcgtaagcttattatgggtattgctgacggtgaagtttatgttgatggtaaactgatttatgaagccaaagatttaaaagtcggcttatttaaagatacctccgcattctaa

SEQ ID NO: 305284 - DNA, 777 bp, Proteus mirabilis
gtgtatcgttgggcactaataccacttttattattattatttttgatattgggatcacttattgcattaatttgccaactctcttatcacgaactcaccatggttattactgatgctgaatttcattttgccgtattgatgtcactgagcaccgcgttaacatcattgtgtttagccgtgctcttagctgtacctgcagcttggatgatggcaagatcgtcatttaaaggacagcgttttattgatgcgttactcgatttacccttagtcacgcctcctttggtaataggtattggattattattattgttaggtcatcaagggcctttaacaggggttttccctcaattatctcgcgcccttttttctcccttggggattattattgctcaaacatatgtggcaagtgcaatcattatgcgtaatagccttgcggcgtttaaagccattgatcctgcttatattcaaaccgcacagaatttaggattaacaccaacaaaaacgcttattttggttgagatcccactttgttggtctgtattaatcagtggttgtattgtggctttttctcgagcattaggggagtttggggcaacattaatgttggcaggggccacacgattaaaaacagaaaccttaccaatggcaatctatttaaatatagcgagtggtgatttctcgcttgcgataggttgcgctttagtactgatagcaattgcaattactctattgtttgctttacaccgtttacagcgtgataggaaattagcatgttaa

SEQ ID NO: 305285 - DNA, 756 bp, Proteus mirabilis
atgaaacgccaagttttggtaggtttaggttttgcgctaggattattttgccataatagctttgctgtagagcttcatctttatgctggcgcaggattaaaacagcctgtagagcaagttgttggtctatttgaaaaagaaaccggcaatacagtgactatcgaatatggcggttcaggccaaattcttacacgctttaatctcactcaacaaggtgatctgttttttcccggctctcaagagtatgtagagaagttagcgaaacaaaatcaggtggttagccaatatcctattgtgcgtcatattcctgttattgctgtcagaaaagataaaatcggtgagatcaaaactattacagatcttgcaaatagttcattgaaattaggtatgggagatgcaaaagcaattgcattaggtaaaagcggtgaacaattaatcgaagcgtcaggccaaggtgagcagttacgaaataaagtggttgttcgtacagcaaccattaaacagttacttatgtatttattaaatggtgaggttgatgctgccattattggttacgctgatgcaatgaaaaatcaagataaattagttttattacccatacctgaaggaagccccgaagaaattgcgacattagcggtgttaaaaacttcaacaaatcccacacaagcacaacaattggctgattatttttctcgtcccgaaggaataaaggcttttactgattatggttttcttcctgttatttcaaaaccatag

SEQ ID NO: 305286 - DNA, 882 bp, Proteus mirabilis; identical to SEQ ID NO: 297936

SEQ ID NO: 305287 - DNA, 537 bp, Proteus mirabilis; identical to SEQ ID NO: 300641

SEQ ID NO: 305288 - DNA, 444 bp, Proteus mirabilis
atgcgttttttaaaattaccttttatttattggctgctactcaattgcatcccatttattggctttgaactacactcaggcaatataaaacccggtgtttttttctatttaggtgccctaacgatcatcacttcagggatttggctatttttctgcctttacttttttatcaaacataatacatcccctaaccctcaccagacaccgcgccagttagtcaccacaggtccatataaaataagtagaaatcctatgtatcttggctttctcgatattagtattgggctgttttttatttttggtaactggggatttttaggggctgcgcttgccttctactttattaccgatcgctatactattgtgcaagaagagaaaatattaagtgagcggtttccacaaacgtggcgacaatattgccgccacgttcgacgctggatataa

SEQ ID NO: 305289 - DNA, 354 bp, Proteus mirabilis
gtgacaataagacacagtgaaagttactggcttatattacatctgattagttatttggatgagaaaaaaagcaatattgcacaaataggtgaacgatatggtgtatctgggacacattttagacggctgtgtaaacgttatttaggtaattgtggtaaaagtcaattacgttcatggcgtgcggcatcttctattttgacaacgctatcaacagatgaatcattgactcagattgcagtcgataatggttttagttcagcatctcatttttctaatgaaattaagacattatttggtattacaccaactgaatttcggcgaattggccaatatctttatgaacataaaaaataa

SEQ ID NO: 305290 - DNA, 1716 bp, Proteus mirabilis
atgaacataaaaaataaaatttactgtatcattggaattatcattttttatagcttctttttgccaactcaagcggcagaaggaaaggttatttatacacatcaggttaaaaaacctgatgtttttgttgcggtaaatacacatattgaacagtttttcctagtgctatcagataaattaaataaaccttttattctaagcagcgcagtaaaaaaagagcggatcagtggaaaatttgatatttcttcacctgaagacgcctttgaattaatggtaaagcgtttgtcattactttattttaatgacggagaatctatttatatttatcgcgataatgagatacagcaacagctatttcaagtgaaaaatatcagcttgagtaaactgaaagagtatctacaagatgttggattatatgatctccgctacccattacgtgcaggtcacgatcagcgtactttttatctctcaggtcctcctatttatattagcttagttaaggctgctgctgagcttttggataatgatgtacaagaacaaattaatgaaaatatcaataatcaagttccaaccggaagctctcgttatggcgatgagtttgtgcagatatttccattaaaaaacacttttgtacaagatagaacctatatattacgtgatgaaaaagtggttttaccaggtataacaacggttttgcaacagctatttatgccatcgggagagaaagaaaaaacagtcagaagagcgcgtgagattatcgaagataatgataaatatcaggatgataaaattaccaacgatatacaagatactcattcaccgattatcactcaaatgggcaaatataatgttgaactcgttcctttacctggatcaaatagcctgttggttaaaacgagtcgagaaggtttagctttagttagctcacttatttcacaattagataaaccgaaaagacaagttgaattgtcattatggataattgatatttctaaaagtaaagccgatagtttgggggtgaattggcaggggagttatggctcgggtaaaaatacatttttctttaataccgctagtttaagtgctgtatctggttttagttttttaagtaaaatcaaagcactcagtgaggaaggggaagctaaaatggtttctcgtcctattttgttaactcaagaaaatacccccgccatatttgataataacaccaccttttatacacaaattaaaggtgagcgagttgcttcattagaatctacaacattcggcactatgatcagtgtattgcctcgtattagtaatactaaccaagagattgagatgattatcaatcttgaagatggcgccgagaaaaaaagtgatgatgaagatagagaagaagggattgaaaaattacctgttattaatcgcacaaatatcagcaccgtggcccgagtttctgaaggcggtagtttattaattggtggatatacacgagaagataacataaaagcagaaaacaaaattccttttttaagtgctatacctttagttggccgagcatttagctatcagtcagataataataaaaaaatggtgcgtatttttatgttacaaccgcgtttattagataaaactgatacgcacggattggactctttaactgaacacccatttttaccgatggataaaaaaacatctcaagcgctaaaacaaattcaggcatttatgaggtga

SEQ ID NO: 305291 - DNA, 1575 bp, Proteus mirabilis
atgcagtttggttcgaagccactgtttgaaaacatttctgttaagtttggtggcggtaatcgctatggtttaatcggtgctaacggcagcggtaaatccacctttatgaaaattctcggtggtgatctcacgcctactagcggtaacgtattccttgatcctaatgagcgcttgggtaagctaaaacaagatcagtttgcttatgaagagtttaccgtgcttgatacggtaattatggggcacgctgagttatgggaaattaaacaagagcgtgaacgtatttatagcttaccggaaatgagtgaagaagatggtttacgtgttgccgatcttgaagtgaaattcggtgaaatggacggttacaccgttgaatcacgtgccggtgaattattattaaacgttggtattccacttgagcaacataatggcccaatgagtgaagtggcgccaggatggaaactacgtgtgctccttgcacaagccctattcgctgatcctgacatcttattacttgatgaaccgacgaataacttagatattgatacgatccgctggctagaacaaacattaaatgaacgtaatagcactatgatcatcatttcccatgaccgccattttttaaatatggtgtgtactcatatggccgatcttgactatggtggattaacagttcacccaggtaattatgatgagtatatgttagcggcaacacaagcgcgtgaacgtttactcgctgataatgcaaagaaaaaagcacaaattaatgaattacaatcctttgttagccgctttagtgctaatgcatcaaagtctcgtcaagccacttcgcgtgcaaaacaaattgaaaaaattcaattaaccgaagttaaagcttccagccgacaaaatccctttattcgttttgagcaagagaagaaattatttcgtaatgcgttagaagtagagaatattgctaaaggttatgaagcaaatacgcctttatttaaagacgtaaatatgatgctggaagtgggcgaaaaagtggcgattttaggcaccaatggtgtgggtaaatcaaccatgatcaaaacattagtgggtgaattaacgcctgataatggacgcgttaaatggtctgaaaatgccactataggttattatgcacaagatcatgccactgattttgaagttgatatgaccgttttcgattggatgagtttatggatgaagccagaagatgatgaacagtcggtgcgtagtgtattaggtcgccttcttttctcacaagatgatattaaaaaatcagtcaaagtattatctggtggtgaaaaaggcagaatgctgtttggtaaattaatgatgcaaaaaccaaacgttctgattatggatgaacctaccaaccacttagatatggaatctattgagtcactgaatatggcgttagaactctatcaagggacgttaatttttgtttctcacgatcgtgaatttgtcagctcattggctaaccgcattattgaaattacgcctgaaaaagtgactaatttccaaggcacttatgatgagttcttggctaagaaagggattgatggttag

SEQ ID NO: 305292 - DNA, 969 bp, Proteus mirabilis; identical to SEQ ID NO: 300883

SEQ ID NO: 305293 - DNA, 639 bp, Proteus mirabilis
ttgtcacaaagtcgcattatattttctgagggagataaaagtcaaagtgtacaaataaataatgatacagataatctttatttatctcaaaatatgagaacggctgatttagatggcaaaaaagatgagcattttattgtattgccaccgttaaaacgattagagcctcagtcatcggtttctataaaaattttaccacgctctttagatacattaccaagtgatcgggaatcactcttttttttcactgcatatttgatacctgaaacaaaaagagggcaacaaaataatagtggtgatttatcactaaaaattaatatggtaacaaaaattatcataaaaggattttatcgaccaaatgaattagtcataacatcactagatagtcatgctaagaagataacctttaaaaaagtaggtaataatgtgcaagtcaataacccaacaccttattattttacggtatcaaatttaaaattcgatggcaaaagttatcaatcagcaaatgcacctatggttgcgccattttcgtcactcaatttagctatagataaatcaattaaacaggttagttggcaatatattgatgattttggtggattatcaaatacatttgaaaataaaataattgtggagtga

SEQ ID NO: 305294 - DNA, 321 bp, Proteus mirabilis
  misc_feature (299)..(308): n is a, c, g, or t
atgcgtgaatcaggtcgtttattagcccaagtttttacaatgcttgatgattttattgtgccaggtgtttccacattagaaattaacgataaagtagatgattttattactcatgatctgcaatcgagacctgcaagcaaagggcaatatggctatgaatatgtacttaatacttcaattaatgaggtagtatgccatggtgttcctaaagccgatgagctattaaaaagtaaagatattattaatgtcgatattacactagaaaaaaatggttttattgctgattctagcaagatgtnnnnnnnnnngcctcacctatag

SEQ ID NO: 305295 - DNA, 378 bp, Proteus mirabilis
atgtgggaaggtatcaaagaagttaaacctggtgcaacactcggtgatatcggtcatgcaatccaaagctttgcacaaagtcatgggtatagtgttgtaagagagtattgtggacacgggattggtcgagaaatgcacgaagcccctcaagtattacattatggtattcgaggacaaggtgttgtactaaaagaagggatgacctttaccattgaaccgatgattaaccaaggtggacacaaaataaaaaccaaaaaagatggttggactgtagtcacccgtgataaaaaattatcggcacaatcagaacatactattttagttactgctgatgggtatgaagtactcactttgcgtccagaagaaacacttccataa

SEQ ID NO: 305296 - DNA, 318 bp, Proteus mirabilis
atgaccccagaagaatctattaacaatgtgacgccaccttataactatcaactaacgtgtgattatgatgcatcagtatccgtttcattaataggaagtgcacctgtttctggaaaaacggaaaactatacaaaatgtggtaatggtggctcttgtgagttgaaatataacgataccgaatataaaggtaaatttaaacttaacgcaggtgctgcaaaaacattttctatcacatcaacctttcatcctaatgatataagaaaccctgttgaaggtagttttcaaggaagtgctattttgcgggtattggttgactga

SEQ ID NO: 305297 - DNA, 318 bp, Proteus mirabilis; identical to SEQ ID NO: 305296

SEQ ID NO: 305298 - DNA, 483 bp, Proteus mirabilis
ttgggtattgaggcccggtcagacgaagagcgccgccggctggctgaaaagtgggtacagcaggaatttgccagggcagaaaaagagctggcgtttcagcgggaagtagatgctgcctggaagcggctctatggtcaggtattaccggtcagtctgggaacattcggcaggatggaacagggaacagcgcagcgccggcaggcactgtttgtgcaggcggaaaattgtagcgcgtgtgatgcccgtctggctactctgctggccggcaaacagccgtttgatatttatgtgctggggacaaagggggatgataaccgcctgagggcttgggccagacaaaaaaatatcccggcagagcgcgtcagaaagcgggaaattacgttaaatcatgatggcggtctctcgcttcagtacggactgaccaccacaccggtggtgatgcaacagttaccggatgggcggtggcgtccgctcacaccttaa

SEQ ID NO: 305299 - DNA, 381 bp, Proteus mirabilis
gtgaaaaggttattattatcttcttttttggttttatctgccctaattatttctggttgcgcacaagaaaagcaaattaactacaaccaaaaatcatccatgctttcattaggaatggataaagatcaagtaagaacagttcttggtgaccctagaagaactgaagttaatacagaaagagaaagatgggtatattggggtaaagtttattatggatttactccggtagataacgagcagttatctcaggataggttagttgtgacatttcaagagggtaaagtgaccaagtggggacagcaaacgctttctgatgatgcattagagatgtcacaaaaaacaattgaagctactactaacgcaataaaagcatcacattaa

SEQ ID NO: 305300 - DNA, 411 bp, Proteus mirabilis
atgaaaggtccaatactggcatcagttaaatttgataccagtcgattagataaaaaaattgaagagcttaaatcaacgttttctgatggcgttcttgagcatcttctcagcgtactccctagcttgtttagcaagatcatccttacggataacccttccacaggaactacatttagcatcaatgaggtcgtctattttctcgaccttgacgctggagcttacaacgagatccttgtgacagctagggcacttgaagctaacgttactcatactaaaaaatctcctattaacgggaaaagtcccgaggaaatattagaacattttaagaaatataacttcgtggatgatcacggacacagactggagttctgtcaggactttattgatctggtgaccttagccacaaagtaa

SEQ ID NO: 305301 - DNA, 1368 bp, Proteus mirabilis
atgcaaaaagagaataaactttcacgaggactatcagggcggcatattcgtttcatggcgctaggctctgctattgggacagggcttttttatggttcagccgcggcgattgaaaaagcaggccccgctgtacttcttgcttatcttattggtggtgccgcagtatttatggttatgcgcgcattaggggaaatggcagtccatcatccagtggcgggttctttttcacaatatgctagccattatatgggaccattagccggatttttaactggctggaactacgtttttgaaatgcttatcgtttgtcttgcagacgtaaccgcatttggtttttatatgaaactttggtttcccgatgtcgaccaatggatatgggtattaggcatagtctgttttattggtgccttaaatttatgtcatgtgaagatatttggtgaaatggaattttggctctctatcgttaaagtgactgcgattattgccatgattatcggtggtgttgccataatgatctacggctttggtcagcaaacagaacatccaattggtatttctaacctatgggagtttggtggctttatgccaaatggtatagaaggcattattgcctcactcgccattgtgatgtttgcctttggtggtattgaggttattggtattaccgccagtgaagctaaagatccagaaaaaacgatccctaaagctatcaatgcggtgccatttcgtatcttactattctatgtactgaccatttttattttaatgtgcatcttcccatggcaacaaattggccataacggtagtccatttgtacaaattttttccaatctgggtatcaattcagccgctaacattcttaatcttgtggtgatcaccgccgctatctctgccataaacagtgatattttcggtgctggtcgcatgatgtacggcatggcacaagaagggcaagcacctaaatcctttatgaaactgacgcgtaacggtgtgccttggatgaccgtattagtgatgtcagtagtgctattattaggggttgtgcttaactatcttattccagaaaaaatcttcgtacttattgcctctatcgcgacatttgccactgtatgggtctggttgatgatcttactttctcaagtggctatgcgtcgccaaatgagtgctgaagaggcgaaaaaactaaaattccctgtaccattttggccaatagcacccgccattaccattatttttatggcatttgtgatagcaattttaggctactttgaatcaacccgaatggcattaatcgttgggttagtatgggtggctattttaactgttggttactatattggtatcaaaccaagaataacgcagaaataa

SEQ ID NO: 305302 - DNA, 909 bp, Proteus mirabilis
atgaatgaaacacaattaacccatcttcagcaattagaagcagaaagcatttatatactgcgtgaagttgtcgctgaatttgaaaatcccgtcatgctgtactcaataggcaaagattcttcggtgatgttgcatctagcacgtaaggctttttatccggcgaaattaccttttcctcttttacatgttgatacgggttggaaatttcgtgagatgtatgagtttcgcgataaaacggccaaagagtatggttttgatctcaaagtttatcgtaatccccaaggggcacaattggggatcaatccctttattcatggtagcgccaagcatacagatatcatgaaaacagaaggtcttaagcaagctctggataaatatggttttgatgccgcatttggtggggcgcgtcgtgatgaagaaaaatcgcgtgctaaagagcgtatttactcatttagagatagatctcatcgttgggatccgaaaaatcaacgtccagaattatggcaaaactacaacggccaaattaataaaggggaaagtattcgcgtttttccattatcaaattggacggagctagatatttggcaatatatctatttagaaaatatcgatattgtgccgctctatttcgctaaacaccgtccagtcattgagcgggatggtaccttgattatggttgacgatgatcgaatcgacctaaaagctggagaggtgatcacacaacaaaaagtacgctttagaacattaggctgctggccattaacgggcgctattccttcacaagcagacacattacccgccattattgaagagatgttaatttccaccagtagcgagcgacaagggcgtttaattgacagtgatcagtctgcttcaatggaacttaaaaaacgtcagggttatttttaa

SEQ ID NO: 305303 - DNA, 1731 bp, Proteus mirabilis
atgaaatcacaaactcaagcgcccttagtggttgaaggaaaactatctgatagtgaacgtatgaaaaaagagagtaatttcttacgaggcactattagtgatgatctacaaaatggtctaaccggtggttttgagggcgataattttttattaattcgttttcacggtatgtaccaacaagatgatagagatattcgtgccgagcgtgcccaacagctactagagcctcgtcatgccatgatgttacgttgtcgtttaccgggcggtgtcatcacaccaaagcagtggctaagtatcgataagtttgctagtgaaaatacgctctatggcagtattcgtattactaatcgtcaaacttttcaatttcatggcattttaaaaggtcatgttaaaccggctcaccaaatgctagcgtcaacaggccttgatgctcttgcaaccgccaatgatgttaatcgaaatgtgctatgtacctcaaaccctgaacaatcttcattgcatcaagaagcttatgaatgggccaaaaaactatccgagcatttattgccacgcacccatgcctatgcagaaatttggttagataaagagaaagtggcgacaacggatgaggagcctattttaggtgaaacctatttacctcggaaatttaaaacatcggtggtgatccccccttataacgatgttgacttgcatgccaatgacatgaattttattgccatcgcagaaaatgggcatttggttggttttaatgtgctagtcggtggcggccttgcgatgacccatggtgataaaaaaacctttccgcgtttagctagtgaatttggttatattcctattgataaaacattagcagtcgctgaagcgattgtgacgacgcaacgagattggggcaatcgtactgaacgtaaaaatgccaaaaccaaatacaccttagagcgtgttggtattgaaacatttaaacaggaagttgaacgtcgctcaggcgttatgtttgatatgatccgaccgtatcaatttactcaccgtggtgatcaaattggttggttaaaaggggttgataacaaatggtatctaaccttatttattgaaagtggtcgattaatcgataaacctaatgcgccgttaaaaacgggggttgctgaaattgccaaagtgcatcttggtgactttcgtttaacagctaatcaaaatttgattgttgctggtgtaccagaggcacagaaagagcagattgaggcgatagcgcgtcaatatggtttaattaatgatgaggttacaccgctgcgtaaacatgccatggcgtgtgtttcatttccaacctgcccattagccatggcagaagcggagcgtttccttcccgcatttaccgatacccttgataatatcatggctaaatacggagtcagtgatgagcatattgttgtacgtgtaacagggtgtcctaacggttgtggtcgtgcgatgttggcggaagtcggactggtgggtaaagcccccgatcgctataacttacatctaggaggaaaccgcatggggactcgcattcctagaatgtatcgtgaaaatatttcatcacaagaaatcattgaaattcttgatactttaattggtcagtgggctatttcacgtgaattaaatgaaggttttggtgattttcttattcgcactgatgttatcaaacccgttattaattcagccattgatttttatgaagtgcaggaggtgatatga

SEQ ID NO: 305304 - DNA, 2145 bp, Proteus mirabilis
gtgtcccgtacaattatgctagtcccaactgatacacgcgtaggtttaaccagcgtcagcttgggtgtaatccgttctatggaacaaaaaggcgttcgccttagtgtattcaaacctatcgcacagcctcgtgttaaaggcgcattagatcaaaccactgcgattatccgctctcactccacaattcaatccgcagaacctttaaatatggattacgttgagtcattactcagctccaataaaaaagatgttctgatggaagaaattgttgctagatatcacgaaaatactgctgatgcagaagttgtactgatagaaggcttagtgccaatgcgtaagcacccttttgcacaatctttaaactatgagattgccaaaacattaggtgctgaaattgttttcgttactgcattaggcaacaacaccgctgagcagttaaaagagcgcattgaatttgctcgtgctgaatttggtggtgtaaaaaatcaaaatatcacaggtgtgattgttaataaattaaatgcccctgtggatgatcaaggtcgtactcgccctgatttatcagaaatttttgatgactcaagcaaagcgattatctctaatatcgatttaaataccatcgaaaaaaatagcccacttcctttattgggttgcattccatggaacttcgatttaatcgctactcgtgctacagatatggcaaaacacttaaatgcgactatcatcaataagggtgatattgaaactcgtcgtattaagtctgtgactttctgtgctcgtagtattccacatatgttagagcatttccgcccaggttcattgcttgtcacttctgccgatcgcccagatgtgttagtttcagcatgtcttgctgcaatgaatggcgttgaaatcggtgctatcttactcacaggtggttaccaaatcgatgcaccaattaaacaattgtgtgagcgtgcatttgagactggtctacctatctttatggttaattcaaacacttggcagacttcattaaatctgcaaagctttagcttagaagtgccagcagatgaccatgagcgtatagaaaaaattcagaactatgttgctcaacatatcaataaccaatggattgattcactgacagcaaactctgaacgtcctaatcgtttatcaccaccagcattccgttatcaattaacggaattagctcgtaaggcgaaaaaacgcatcgtattacctgaaggtgatgaacctcgtaccgttaaagccgcgtctatttgtgctgaacgtggtatcgcaacctgtgtactattaggtgatcctgaagaaattcgtcgtgttgctgcggcacaaggtgttgaattaggtacaggtattgaactcatcaatcctaaagaagtacgtgaaatttatgtacctcgcttagttgaactgcgtaaaaacaaaggtatgacagaagttgttgctcgtgaacagttagaagataacgttgttctcggtaccttaatgttagaaaaaggcgtcgttgatggtcttgtttctggcgctgttcatacaaccgctaacactattcgcccaccactacagttaattaaaactgcacccggtagctcattagtgtcttctgtgttctttatgctattaccagaacaagtctatgtttatggtgactgcgcaattaacccagatccaaccgcagaacaactggctgaaatcgctattcaatctgcagactcagcaaaagcgtttggtatcgacccacgcgttgcgatgatctcttactctacaggtaactcaggtgctggcagtgacgttgaaaaagtgcgagaagcaactcgtttagcacaagaaaaacgtccagatctgattattgatggtcctttacaatacgatgcggctgtaatggctgacgttgctaaatctaaagcaccaaactcacctgttgcgggtaaagcaactgtgtttatcttccctgatctaaacaccggtaacactacctataaagcagtacaacgttcagcagacttggtttccattggaccaatgttacaaggtatgcgtaaacctgttaacgacctttctcgtggcgcgttagtcgatgatatcgtctacactgttgcattaactgcaattcaagcaagccaacaagaaaatgcctaa

SEQ ID NO: 305305 - DNA, 336 bp, Proteus mirabilis
atgagcaacaaaaaagatgaagcaatatcagtaatgcaggaatattttcccaatggtggtcgtgattgggatgctatctgcgagttatacgatgctattaagcaaggtaaaattcctcatgtacaaattacacagaatgaatcaagagctgaaatgattgaatacattcagcaagcaatccgtgaaggttatgattcatactatgggttatctgagaatggcataacttggttatcagatgaatgtttaaaaatagattatggtcttgcttgggaatactacaatctagctgttgatgaaaatggcaagtatcccaacagagatctaggcgaataa

SEQ ID NO: 305306 - DNA, 663 bp, Proteus mirabilis
atgggaactgaagattgggctttggttgttgcaattatcgctgttatcgttggcgttggctcattagcattgacttggcaatcgacaagggcggctaaaagatcaattgatacatcaattgagttatacgaaaaacaaaagaaagatgataatgagaaaataaaggctataaacgagaaaaaactaatagcaaaaataaagataattgagaatgaaatagttagttgttatatggaatacatgatgttttttaatttgtgcactgcaattaaaaccagagatagtttttctgtaacgataggtaattactctaactttacaggtgtggcgatagatgctgaaaaaaccgatagtgtcagtggtttgatacaaccgtcaaaacttgattttactaatgatttcattaatgaattgtatcttttagatgaaaagcttgctggggatatagtctcattgaaaggttgcatgaatcgaagttcgcatattatgaatcacatggttttatgcaaggataatttaggtggtcacgttgaactaaaaagatatgtggaaaggttctatacagatattgaactattcaaatataccatggaaaaagttcatgataactattcaattactggggtatcactaatgaataaatatcaattagctcacatgtga

SEQ ID NO: 305307 - DNA, 342 bp, Proteus mirabilis
atggctaaatcaccctctgaacgtaaggcactacaacgtaagcgccaaaaggaacttggtgtaacaaagattgaattgctggtggataatcaagagatggaaatgttacagcgtaattgtgttctacgtatgcctggtcgtgaaccatacgacgaggctgagtatattcagatgctgatacgcaacgacgatgcacggcttaagcgtgagattgcggagctgtcacagcgctgctgtggtaagtgtggtgaggcgctgccggttgctgagtgttgcctgtccggtgatgctgaatgctggaacaccagagggtggcatgagataaaattgaaggtagaataa

SEQ ID NO: 305308 - DNA, 165 bp, Proteus mirabilis
atgactattgaacagttacaagaagaaaataagaaattgaagaaagccatcactgatatctaccgcaactgtgaagaatgtgaatttgacggaagcggaacttattatgcagtagaacaagaccacgttaatgatgcgtatgaattagtggaaccaacggaataa

SEQ ID NO: 305309 - DNA, 315 bp, Proteus mirabilis
atgaaggttgaacaatctcaagttactaagtttgacattacctatgtagaaaaacacgacccgattagagtatatctggaagatgataaccaaggtcatggtcgattaactataactgaatggggagaggcttggactgcttattggcctgcaatgtcaggttcgttaattgattttattatcagagctgataatggatatctaattagttacctttcttcaaaaccatcaggcgtgagaagcgttgcatataagcgactcgattctagattaaacgctgttcgtgaggcattaaagcaaataaaggtggagtga

SEQ ID NO: 305310 - DNA, 228 bp, Proteus mirabilis
atgaaacaagttcaagcaatgacgacgttagtattaattgatggtattacatatcaaatagtgcttcctaaacacattatcgcattacaagcaaagcaagcattaacgatggctaatgaatttgatggaatgctatttccatgtaaatttaccaatataaagccaatggaagcagatggactaccgtttaatataggtgatagtggagcggagaatgaaaaagtatga

SEQ ID NO: 305311 - DNA, 423 bp, Proteus mirabilis
atgtcaaaagagataagcgaattacaatttagtcttcactatgcctcagaaacagacagtgaaaagaatacctccgtcattttaacggcaaatatccatacagctgatggtgaaactcaacaactgacacaattaatttgtacaacatctcccgcaggtaaaaagcaatatcgaatcggcttgcaaaaaattagtgatgctggtgacccattgctggtggcgattgaatcttattggcgtaaaaacacacaagagagttgtgtttatttgttagagaaagcaaagcaatttattcaaggacatttacaacaaacgaatacatggatatctatgtatggtcttgtcattgtttctgaggcgtcacttgaagagcaattgcctgaaggtttatcaaaggcacttaaagtatcaatgcccgcctaa

SEQ ID NO: 305312 - DNA, 1716 bp, Proteus mirabilis
atgcgtactagccactatttgctctctactttgaaagagacgcctgctgatgccgaaattgtcagccatcaactcatgcttcgcgcaggtatgatccgtaaactcgcatctggcctttatgattggatgccgaccggtgttcgtgtcctgagaaaaattgagaaaattgttcgtgaagagatggacaacgcaggctcacttgaaatttcaatgccggttgttcagcctgctgatctatggcaagaaagtggccgttgggaacaatatggcccagaattgttgcgttttacagatcgcggtgagcgtccttttgttttaggtccaacccatgaagaagtggtgaccgatattgttcgtaatgaaatcacctcttacaaacaactaccactcaacctttaccaaattcaaactaaattccgtgatgaagtacgcccgcgctttggtgttatgcgttcacgtgagtttatcatgaaagatgcctattcattccatatctctcaagagtctctacaagagacttacgacagaatgtatcaagcctatagcaatatctttactcgtattggtttagacttccgtccagtattggctgatacaggctctattggtggtagtgcctctcatgaattccaagtattagcagatagcggagaagatgatatcgtattctcaacagcatctgactatgctgctaatattgaattagcagaagcggttatgccagcaacacctcgttcaccagcaacagaagagttacgtttagtagatacaccaaacgcaaaaactattgctgaattagttgaacaatttaatctgcctattgaaaaaacagttaaaacacttattgttcatgcaactgaagaaagtggtcataaattagtggctttattagtccgtggtgatcatgagctcaatgaaataaaagcagaaaaatgtagcattgtcgcttcacctttagttttcgcgactgaagaagagatccgccaagctgttaatgcaggtccaggctctcttggtccaattaacttgccattaccaatcattatcgatcgcgctgtatctgttatgagcgattttggtgctggtgcaaatattgatggtaaacactactttggtattaactgggagcgtgatttacctcttgctgaaatggcggatatccgtaatgttgtcgaaggtgatccaagcccagatggtaaaggtactttacttatcaaacgtggtattgaagtcggtcatatcttccaactaggtaagaaatattctgaagcattaaaagcgacggtacaaaacgaagaaggccataaccaagttgtgactatgggttgttatggtattggtattactcgtatcgttgcagcggcaatcgaacaaaaccatgatgcccgtggtattatctggcctgatgctatcgcacctttccaagttgccattttaccaatgaacatgcatcgttcttatcgtgtaaaagaagtagcagagaaactctatgctgacttacgtgcacagggtattgatgtattatttgatgatcgcaaagagcgcccaggtgtgatgtttgcagatatggaactgattggtgtaccacacaccatcgtgattggtgatcgtaatctggataacgaacaagttgagtataaagcacgccgtagtgatgataaatcgctggtcaatgtgaatgatgttgttgcctttattaaagagcaactagcttaa

SEQ ID NO: 305313 - DNA, 972 bp, Proteus mirabilis; identical to SEQ ID NO: 297117

SEQ ID NO: 305314 - DNA, 423 bp, Proteus mirabilis; identical to SEQ ID NO: 10327

SEQ ID NO: 305315 - DNA, 393 bp, Proteus mirabilis
atgatttttgatgatattgatggttattacaattatcgggagttgcactccattgctgatgaaaaaagagtgctgaataaagtcaatacttttcgccaagaattcaccgctcttgctaaagaatggtctcctgaacgtaattctcagtgggtttgccgtatctatttttgtacaaaaatgattctaaatgcaaccgtggttttaaaacaggcggaatttgccgaagaaaaaaatttgagggctgccattccttattttcactattatgccatgctctcaatcttgcgttgtgtggttctaactttgccgactgatactcaggatatcctcgttatcccagtcttcagtcggcaaagcgagagacaaaaccagagagtggttggctcgatatga

SEQ ID NO: 305316 - DNA, 678 bp, Proteus mirabilis
atgaatgatcatattgttgtacatacaataccaaatattatacaaaaaatgaaaaatgaaggtattgcgtgtactgaggatagcattatcggtatatggaaaaatcatcatatcgagtttgtattagattggcgaggaaaagggtatagcaatactacaggaacaaaaaattacgatgaaattgtctacccaagtagaaatcatattttgaatatactcgagtatgggcttgaaagtagagatggaatgattaccgaaatattagtaaaaccttattcatcaaaacaaattgaaatagcttctttagaaatcactcacccactatatggcagttgcattaattccaatctattagatgagctttctgttgaggataaatatttaaaaataataaaaaagtcactcaaaaacttaaagattgcaccccatggtaataaaaaacgctttgaacaagagaaagaaaaatttttaatcaaggccaaacacgtactaacctttcacactgaaaaatgtagaggtattcggggaaaaataacacaagaaaaagttgcggaagcgactttaagtagccattgcccagagtgttcaatggtgttgttaaccagcagtattgataccgcgaaaaaatatttaagaggcgacactgatatcatgaatgaaataaaaaagctaggttag

SEQ ID NO: 305317 - DNA, 2433 bp, Proteus mirabilis; identical to SEQ ID NO: 297648

SEQ ID NO: 305318 - DNA, 654 bp, Proteus mirabilis
atgatgagaaaaattgaagaactgttagccaacaataaacaatggtcaagttctgttacagaagaaaacccgcaattttttaaagagctgagtaaaggccaaaaacctcatttcttatggattggttgttcagacagccgcgtccccgctgaaaaattaattaatgccgcccctggtgatttatttgtacaccgcaatgtggcaaaccttgtgatccacaccgacttaaactgtctttctgttattcagtatgccgttgatgtcctacaagttgagcatattattgtttgtggtcattatggctgtggtggtattgaagctgctattgaagggactgaactgggcttaattaataactggttactgcatatccgtgatatctggtataaacatagctccatgttaggtgaactcgcaccacaagatagattaaatttactctgtgaacttaacgtgatagaacaagtttataaccttggtcactcaactattatgcaagccgcatggaaacgtggacaaaaagtgatgatccacggttgggtttacggtttaaacaatggtgaattacacgatttagatatcacctcagacagtcgtgaaaaactagaactctcttatcgccaagctattgcaaaattaagccatccacgttga

SEQ ID NO: 305319 - DNA, 492 bp, Proteus mirabilis
atgaacttttctcattttaataaggtaatgtttgctgcctctcttcttgctactggcttttcttatgcggatagcgatcgccctctgctctctttaagtgtaagccaatccggcggcactgcgttaaatagcgaaggttcgttagatacccgtactcctgcaagccaatctcgcgtattacctatctggggtgatgaagctcgcgcccgaggttatgatttaccagagccatttggtgcaagctatagctatatgaatctacgtcaagatattgttgtggataaaattgggtttattatgccgaaaaatccagaaacagcgaatgctctaaaaatagaagcaggacatactcgtgaaaaaagtgaaacccatatgctaaaactcgatagctgggttttcccttttatgaatgtgtatggtttatatgggcgagaactaaaggtaaatcaaaaacaacacttaaaggtggtagttttggtggttttccattaa

SEQ ID NO: 305320 - DNA, 657 bp, Proteus mirabilis
atgaataaccttaatattattattgccgatgatcatccaattgttttattcggcattcgtaaatctttagaacaaattgaatgggttaatgttgttggtgaatttgaagattccacttcacttatcaataacttatctaaattaaatgcagatgctcttatcaccgacctatctatgcctggtgataaatatggtgatggtattacgttgataaagtacatcaaaagacattatcctaatttgtctattattgtactcactatgaacaataacccagctatcttaagtgctgttcttgaccttgaaatcgaaggtattgtattaaaacaaggtgcgcctgctgatctacctaaagcacttgcagcattgcaaaaaggcaagaaatttatgcctgaaagcgtggctaagctgttagaaaaagtgaatgccaatggttatggtgataaacgcttatctcccaaagagagtgaagtgttgcgcttatttgccgaaggtttccttgtcactgagattgctaaaaaactcaatcgtagtatcaagactatcagtagtcagaaaaaatcagccatgatgaagctcggtgtcgacaatgatatcgctctgcttaactacctatcatcagtcactattgataaggaaattaacggagaaagctaa

SEQ ID NO: 305321 - DNA, 831 bp, Proteus mirabilis
ttgattattgatgatacgcatatgttgatctcttcttccgttaaccaaatggcgcaattacagccttgtcgatattcaggctttattttatcaatagtatttcattttactttagttattagttatttctatatcacgcaacaacgcccggtgataatccatcaacctgcaccggctgttatgcttagcttaagtgaaaacgtccaagcggtgaataaagaaaaacagattgtcggtgttgatcagcaaatggctgtcgccagccaaaaaaagcagcagcaagagattgcggagaaacaacccaatcttattattaatgaaaatgcagatattttgcttgaaaagccgaaaaaagtgctacaaaaccagacttcagttaaggttgccccttcaattgcaccaaccaaaccttcacctattgtcagtgaaaatgtatctagcctatccgcgccctcaacaagccattctgttgcgaaacaacaggctaacgatgtttctgcaaattatgatagtgatgcaaataaagaagcagatgccttggcattatggcaagctaaggccaaaggtcatttaaatcgttataaagcttatcctgaagaagcgaaaagaaaagggcgtacgggagcacctaaagtgcgttttattgttgatggacaaggttatgtcatagcctgcgaattgattaatagcagtggtgtccgctcactagataaagaggcacaaagtgttattaagcgtgctcagccattaccaaagcccccagaagaactgctttttaatggtcaaataacaattgaaatggcaattgaattttccacattgactttataa

SEQ ID NO: 305322 - DNA, 354 bp, Proteus mirabilis
atggatataatggcagcttacgagcaggttttgaaattaagtgagcaaatgttaacgcttgccaaaaatcagcagtgggatcagctgatagaaatggaaatggattatttaaagagtgtagaaattatcactaagatgataaaacccactgagggtgagctgataatacaacagcagctcaccaatatgttaaagaaaatactcgaaaatgaaaatgagacgcgaaatttattacgagcaagattagataagctcgctgttttaataagacagactgaacaagagcagagggtacaaaatagctatggtcagttttcagagcatagttattatcctgatctcaatctaaaataa

SEQ ID NO: 305323 - DNA, 1032 bp, Proteus mirabilis
gtgatatgtgttgttgcgtttattggtatagcgactgcagattgggatcgctggtggagtgatgctcgttatcaaacaacagataacgcttacataaaagcggactcaacgatattgaaatcacgaatgactgggtttatttctcagattaataaagaggattaccaagtagtaaaacgtggtgaggtcattgctgaaattaataagaaagaacaaatattaaatcggcaagcggcattagcagagtatcaaaaagcccaattagctttagataatctcactgaagaaattaaagaatatcaattaaatattgagaaattagctaatcgttatcaagcatcagttattgatgttacccaagctaagcgcagcccaatgttgcgtaaagatttaattaatagtggggcaatcacacaacaaaattatttagatgctcaatctgatttgcaacgtttaatgaaattacaaagtgctgcgaaaaatgagtgggatcaggctaaacaagcactggtattactaaaatctcaagaaaaaatacgtctggcacaaaaagatatcgctcaaacacagtatcagcaggctgaaacggagctttcatacgcgactattaaggctcctttcgatgcgcaattaaataaaataaaagtcaatatcggtagccttgtgactgcgggtagcgaaattgtgactttaacaccgattaacgatgtatacattattgccaatttaaaagagacacaaataaaaaaagtacagccagaacaatctgttgctatcaaagttgatgcttttcctaccgatgttttttcaggaaaagtgagatatatcggcgcacaaagtagtggtgaatcagcacttattcctgctgataatgccagtggtaattttactaaagtagtacaacgtattccggtttatatcacgctcaatagtgataaccgacacttagctaaattaagagcgggtatgtctgtgcaagtgaaaattgacacagatagccttcctatagaggagggggagcgcagtgattaa

SEQ ID NO: 305324 - DNA, 2202 bp, Proteus mirabilis
atgcatgagatacatgctacagatcataaattcaggttaacaccttatgtgccttttattgctcatatttatcgacctggtaatgaagtgccaaatacatctaatcgtaaccgctcttttttagtaaaaggaactctatttccacaacaagcgcatcgtttctccattaattatcgatacaccgatttattatttggcgacattatgccattacgtttaagttgggctcgttatgaagaaaatttagttaatcaatggcctttggcaaatattacacaacaagcaggcatattaacttatcaatataaaccagaagataaaaaaacagatttattactgcgtttatggggcaatttaacgacaggaaatactaatactcgaggaggagcacctcgacaacctaagaatagagatataactaatgattttgatcgatatttatttatgaaatcaaaatctgaaagtggtatgagttatgacactgatactcgttttttagatacagcttctctatatcaagataataatcgttatggtgttgatttttcatcgttatttaaattatcacctcagttttctatttctttttccggtcaatatcaattggaacttcctatgggttttgatttcgtgaccgaggggcgagcagggcaacgtcatgaagtcaatttagcgttagccacagattggaaaccattatcctggtttgcgatgaatattggcggtaaatatcattactatcatctgacggatacctttttaaataataaacggaagaatagggttaaaaattacgagaaaacagcccctatccgcggttatctgatctcttatcgacgagtattaaccccagaagagtatttactctatcgtgcggttaacaaaattgatgtcgatactttacctgacgagttaaaaaattaccgaaattctgctgagctgagtaaaaaaattagagactttcaacaagcggatttagtttaccctgaaggtggcgctttgctagaggaaatcaaggagcagattgttaggccatatcttcagagaatacagcatgatatggagcatgaagattttattcgtaataaccatggaaagatgcaaataaaaaacgctaaagccatcccgatgaaaagagagtttagcctttggttatttgatgaaaatggcgtgctatctaagagtaagaatattttacttaatggttttcttgatatggaggaaaaagtccctcatccagtgacgggggagttagtctatcgctttgaaaaagatgttattaatcctcaggcattttctctatcagaagatattcaagatccctacgcactggagcctagctatcagcatggcgcattttcccctttaatctctgccaccctttatgccaacgatatggtgcgtttttatggccgttatactgagcaattgcgtttacctaacttatttgaagataccagtggtttttcaggctctaaagctcgctattatggttttaagttaaagccagagcgtgccaaaagcagtgagtttggtgtggttgttgattttacgcattggttgaatatagagcgccatgctgatattaaaattaattactttaaaacgaacattgaaaatgtatttgatagagatgctaattggcaaattagacagttagaaaaacaaatattagaaggtgtagagttacaagcccggtttgataatggatttattttctttgataccgcattagtgtatagccataaaaataaagtctgtgatgaaaatgctttttatgagcttgatgcatcaggattatcgggtattaaaaactgtatgacagggggataccctggcggatttttgcgcacctcaatgcagcctaaatactcagttaacctacatttaggcacgcgctggctaaatgataaattagaattaggtagtcgctggctctattcatcagaagttgaaaataaagatgagaaatggcttaaagaaaatttacctaatagctattttggcataaataataatccgatgcgttgggcaaaagtatttactattgatgcttatgcaacttatcaatatagccccaatttatcttttgaaataacaggaagtaatttattaaatgaatattacattgatccgctgacccgttctggtatgccggcaccaggaagaagtttgcgattaggtgtaacagcccaattttaa

SEQ ID NO: 305325 - DNA, 1527 bp, Proteus mirabilis
atggggaaagtgttacttattgtattaacgatgcttggttggttggataaaaatgaccaaacctattatatccttaactttatctttaatacggccttctattttatgccggtatttattggtttctcggcggcgaaaatatttaattgtaaccaatatttagctgctatggtctgtttagcgatggtcagccctgaatggacaagcttagttaaagccggtgagcctgtcgaatttatgcatattcctgtcgctttggttaaatattcatctcaactgatccctgccttaattactgtttggatgatgtcttatattgaacgctttattgttcgtattgtgccagaaatggttaaagtatttatggtgcctttattggtgattttagtttcgacacctattgcgttgattgcggtcggtcctgtcacttcatggttcgctcaattaattgctgatggggtgatcttaatccaagagcacactggttttattgctattccattattagtggctatttatccatggttagtatctattggtatacataaagcacttagtcctgtcagtattatgttagtggagcaaaaaggttttgacccgattattcgtgtgatggcgctatgctccaacatgtctcaggctgctgcttctttagctgtttctgtacgtactaaaaataaaaccttaaaacaattagctttttctgccagtattaccgctttttttggtggtataactgaacccgctatgtatggggtgaacctcaaactgaaaaaaccaatgtacgcttgtatgattggtggtgctattgcaggattatttgctggtattgttaagttaaaagcgtttgtctatgtcactccggggttattaagtttaccaatgtggatatctgatacagataaccaagtagtaaatgcaataatcaccttattgattgccagtgtagccacttttattgcaactcttattattggttttgatgatcctactgatgacccaatccgtgacgaagaagaaaataataaacaagctgcatcaaccaacaaaaaaccacaaatagcgaatagtaaattacctgttgggttaatttcacctctgcaaggtaaaacggttgcactttcagaggttaatgatgaaacatttgcctctggcatcatgggacctggcatggcaattatccccacaacaggaaaagtgattgcacctgcagatggcgttgttgatattaccttttcttctggtcatgcgattggcttaacactggttaacaatattgaaatgctgatccatgtggggattgataccgttaacttagcgggacagcacttcacatgctgtgtcgttaaaggtcagaaggtgacaaaaggtgatacgctaattgaatttgatttagatgcgataatagccgcaggctatgatccaacaacgatgatcatcattactaatgatgatcataaactagacgttgttcagaccgataaaaaacatgtcgaccaaaatacagttttactaaccgtgggttaa

SEQ ID NO: 305326 - DNA, 906 bp, Proteus mirabilis
atgaagtatgatctaaatgacctctattattttgttaaagtggtggagtttggcggtttttcacaagcggccgaaacgttaggtattcctaaatcaaaacttagtcgtcgtattgctgatttagaagagagactaaaggtctcgctgatctatcgttcaactcgtcaatttcatgtcactaagatagggcaaactttttaccaacagtgtaaaaatgtcgttgaacaagcggagattgctcaagaggttatttgttcagcacaagggcaccctcacggtacgatcaaactctcttgcccagttgcattactgcaaatttatattcaagatattttggtggattttatggcaaaatatcctgatatcaatatacaaattttagcgatcaatcgccctgtggatgtgatcagtgaaggtcttgacttagctttacgagttagaacattacctttggatgattctggcttaacgatgaaaatattaggctattctcgccgtgttttagttgctaatccgctattatttgcaaccaacagtgcgcctgattctccagagcaacttgctgattatcctattttagctaatagcgaacattcgcagcagtatacgctaacgcttacccataatgatggtaccgtttcaacgcaacatgttacacctaaattagcgacaacggatgtgatgaccttatataaagcaacattaaagggacttgggatcacgcgtttaccattgagtgtcgtagagaaagagttaacagatggctctttggtggaagtcttaccacagtggcgttttcctaaagatgttattcatgccgtgtatccgtcacgaaaaggtttattacctgctattcaagtgttattagattatttagtgcagaatatggctccatataaagagtaa

SEQ ID NO: 305327 - DNA, 234 bp, Proteus mirabilis
atggctgttatatcagcaatgaatagaagtcaactgaaagctgcttatgtaagagaagaaaaaccaacaggaagatgtggtgaagtttattatcgcgttgatggcaatgtgctaattataggaggtaaaagctacaataatggtacgtctactgtatttattaactttagtatgtctataactattgagtccagcgaagatggaatgtctggagttatggtatctaaaatgtaa

SEQ ID NO: 305328 - DNA, 996 bp, Proteus mirabilis
atgattagaatagtattgtttacaataatagccattatttcaaataatgcagtcgctgtgagctgtgtcagtggttgtaatgcgaatgaatattccacgcttagtggacaactatcaaagacggaaaataaagtcggtgttactaaagatgcttctgatattactttgtccaatcgaattacattaagatggaatgcgggacaagcgcaaacatgggcgacatattccaatggtaatattcctagtgcaaataccagcaataatgactggatttattctaagatagatgactatatttctgttgcgttaagaatgactaataattgtagaacaatttatgtcccttataatgtacctacgctaagctctacttgtggttcccgtacttatactgaaaacgaagaaagcgtcgtttctgtaagaaagtatcaaaccagaataaaaattgacaaggctattatttctggtacctatgtaaaaaatatttttgtaggcgaatttggtttttgccaaccacagaattgtgcgactaaacaaactatcattacaaagctatttttaaatctttcaatgacagttccacaatcttgcgttattaattcagggcaagtgttgaatattgattttgacaatattcctgcatcaagttttaaagtagcagggaaaaaagccgaaggagttaatacggtttctagaaacttaagtattcaatgtgacaatatagatgccagtgctgatttaacaatgcgattacaagcagattcagttcaaggtaatgctattgtttctaataataaaagtgttggctttgtggttgctaattcaagtggatctgaattaacacctaatgatttatcaagttttattcctttcagactcaaccaaaatgctgatgctaatgtcacgattaatgtttatcccgtaagtattgatggaaaaacaccaactgaaggcgctgtcacatcaagtggctttctaagagttgatttcccttaa

SEQ ID NO: 305329 - DNA, 996 bp, Proteus mirabilis; identical to SEQ ID NO: 301348

SEQ ID NO: 305330 - DNA, 1650 bp, Proteus mirabilis
atgacaaacacagttattaagtacgttttagaccgattatatgatttaggtatcaaagatatttttggtgttgctggtgattacgccttccctattgaagacactgtttgcaacaaccaacaacaacgttggattggtaactgtaatgaattaaatgcggcatatgctgcagatggctatgcccgaattaaaggtatggcagcattatccactacctttggcgtaggtgaattaagcgcgattaacgctattgccggtgcctatgccgaaaatttaccgattttccatttagttggcatgccagcaagtggcgtacaaaaaagtaaacgtcttgtgcatcatactttaggtaatggtgattttgatgttttttatcaaattgctcagcgccttgcttgcgctcatactattttaacaccagaaaattgtgtggaagaaatggagcgcgtaatagaagcggcattaaaagagcgtcgtcctgtttatattggtataccttcagattatgctaataagcaagtaatagagccgttatctgttactacaccacaaaagccaacaagtgataaagcaacattagaaaaagcagtatcaacaatcgttgaaaaactcactgacagcaataatgtctgtgtattaccaggctttttatctgcacgtttaggattaacagataaaatccaacatcttattgataaaacaggtttaccttatgccactatgtttatggataaaagcatattaagtgaatctaacgctcaatatgttggtatgtatgacggacaattaatgacaccagaggccagagaatttgttgaaagtagtgaatatatattagggatcggtacattaatgactgactttaatacaggcagcttcactgctaatattaaatcagaacaattaatcagtattatgccagattatgttgaaattgattctgtgatctactcctgcgtttatatgacagatattctttctgaattaacccaacgactaccaaataaaacttatcataaaataacagcgaaaggattaggtgaagcggttgcatctgataatgataaaattacagcacaatatctctatcctcgtttagaacaattctttaagcctaatgatattattattgcagaaacaggaacctcatccatgggattaggcttcgctttattacctgaaggtgcacaatttcataaccaaacactatggggctctattggttgggcaacaccggctgcattaggcgctgcattagcggcaccagaaaaacgtattattttaattaccggcgaaggctctcatcagttaacaatacaagaaattagtcaatttgttcgtttcggtttaaaacctattattctagtattaaataacgatggttatttaatagagagattattatgtgattaccccgaagcttattataatgatttagctcagtggaactatcatcagttaccgcaagcctttggtgcaacagattggtatagtgaaaaagtaactacagcaagtggactagataatgcgttaaataaagccgcactaacaaatagcgcatcttatattgaggtggtcacagagcgatatgaggcctctgaattagcgcaaaaattaaaagaatcaaaaagttcattatattcattctaa

SEQ ID NO: 305331 - DNA, 267 bp, Proteus mirabilis
atgaaaaaaataattttattatctattgcggtatttatttcaggctgtgctgatagaaaacctataaattatcagacagtggagtgtgttggtttaattaaaattcagactattgaaaaatatcagagttttaaattaagtcgctataataatgataataatatgtatttcggatacggtaaagcaggtttatggcaaggcggttgggttcaccctgatatgtttgacaaaatatattgcaaagataattcacctataaaaaaataa

SEQ ID NO: 305332 - DNA, 1374 bp, Proteus mirabilis
atgacatcacaatcacactccactcagccgttgagtcaacctacggcaagacctttaaaccgcaacgactataaaacgttgggtttatcctcactaggaggaacattggagttctatgatttcgtgatcttcgtgttctttacgaaaacattgagccatttattctttcctggtgataacgcttttatcgctcagatgcagacattaggtatttttgctgccggttatcttgctcgtcctttaggtggcatcattatggctcactatggcgatattatcggccgtaaacgtatgtttaccttaagtatctttttaatggctgtacctactttggtgattggcttattacctacctatgccagcatcggtgtggctgcaccgttattactgttattgatgcgtattatgcaaggggcggctatcggtggtgaaatgcccggggcttgggtatttattgccgaacacaccccgaaacagcgttatggcttaggggtgggtaccttaacatccggtattactggtggcatcttattaggctctatcgtcgctattattgtacaacgcagctatagcgctcaagaagtgaatgattttgcatggcgaattccctttattttaggtggtatatttggcttgatctcggtttatttacgtcgttttttacaagaaacacctatctttaaagagatggcggctaaaaaagccttagcacaagaaatgccggtggtttcggttatcaaaaaccataaacaagcctgcttaattactgcagcattaacatggtctttatctacagctattgttgttactattttgatgacacccagtgtcattgttgaagggatctacaaaatagacagaacaacatcgttagaagcgaactgtgttgccaccttaacgctgaccttaggatgtatcttctggggctggttgggtgataaattaggaacccgtgcatccatgaccttatcatggggtggattaattgttactgcattccatttttatggaagcttagatgccaatatgtctggtatccaattagcatttaactatggtttgatgggcttttttgtcggtgcaattgccacaaccccaattgtgagtactagagcatttcctccttcaattcgtttttctggcctctcttttgcttataatatggcctatgccgtatttggtggcttaacgccaatgttaacgggcgcttggttggaaaaaacggcaatggcaggagcttattatgttgcagctgtttctgcattagccattgttatcgcattcttacctttagcttataaaggctggatcgcggtaaacaccagctcacgggaaaaagagatagcgttgcaagttgataaagtcgctagttaa

SEQ ID NO: 305333 - DNA, 387 bp, Proteus mirabilis
atgggtggtgtttcagatctatcaaattcaactgataactattctgttgataaatgtttaatgttgtatcaaatagatgaatctagaaaagggctttatgtttacagggtcagcaataaaggagtggtagcgttcgataaattggtggagttttcagccagtgaagataaattactaattgatttttctttgaaagaaaacaatatatacataagcgtttcaacatgggataaaaaaacaaatcacaccacttttacaataagtagcggtgatgtgttaacaataccaacttctggatattttggaggactgtatctaaacggaagcgctcagggtgatagtgggagtatattaataaataaagcgtttactgtagttagtaactaa

SEQ ID NO: 305334 - DNA, 447 bp, Proteus mirabilis; identical to SEQ ID NO: 297382

SEQ ID NO: 305335 - DNA, 1038 bp, Proteus mirabilis
atgaaaaacattaactataagctcgctacacttaccctttgtactctttttgcctcttctgcgttagctaataatacacaagcccctatccgcctcgttattcatggtggtgcaggtacaataacgaaagataccatcaccccagaacaagaaaaagaatataaagccaaactgaccgaagcattaaatgctggatatgctgttttaaatagtggaggcaccagtattgaagccgtacaaaaatcgattaatgttatggaagactctcctctttttaatgcaggtaaaggtgctgtttttactcacgatggtagaaacgaacttgatgcttctattatggatggtaaaacgcgcaaagcgggtgctgttgctggtgttaccacagtaaaaaatccgattaatgccgctattgcggtaatggaaaaaagtccacatgttatgatggtttctcaaggggctgatctttttgccaaagagcaagggttaaccatcgttgatccgagttattttcgtactgaatatcgttggcaacaactacaaaaagcattagaaaaagaacaagttgtattagatcatgatggtaaaactgcggctctttttgctgatccgatgatgtatgattataaatacggcactgttggcgctgttgcattagaccaacatggtaatttagcggcgggaacatcaacaggtggaatgaccaataaacgttatgggcgtgtgggcgattcccctattatcggtgcaggtaattatgcggataatgaaacggttgcggtatcggcaacaggatcaggtgaaatgtttattagaacgctgaccgcatttaatattgcagcccaagttaaatatcaaaaactaccactagagcaagcggcacaaaatgcacttgatgaagtaaaagcgataaatggaagtggtggtgttatcgtattagacaaatctggaaactatacgatgagctttaactctgagggaatgtatcgaggcaccattggtaatgatggcaaaccactagtcgccatttataaagattaa

SEQ ID NO: 305336 - DNA, 237 bp, Proteus mirabilis
atggaggacggttctatcctcgtgagaacgtatcatcgaactcaccctaacgcacctaaatttgcccgtaatgatattgatgattacaaagacggcgacccgattgatatccctgatggtcgtttcatttccgttcgtgtacagatgccagagcaatccatctataacgtgagaatgcgagagatggaagaggcacagaaagcggaagaggaatgcagacaaaaagaagaggattaa

SEQ ID NO: 305337 - DNA, 963 bp, Proteus mirabilis; identical to SEQ ID NO: 304657

SEQ ID NO: 305338 - DNA, 666 bp, Proteus mirabilis
atgttaccggatagccaaagaggttttgctccgattattcgaggtgtcgcccggactaatgccgaggttactatacagcaaaatggttatgtgatttaccgtaactcttttccaccgggtccttttattattgatgatctctattcaacaagtaacagtggcgatttagaggtaaccattactgagtctgatggttcaacacaaacctttactgtgccatattcatcagtccctttattacaaagggaagggcataccaaatattcagtgactgtaggtagttaccgttcgggtaatgatgagcaggagcggccttattttctacaaggatcagtgatccacggcttacctgcgggttggaccatttatggaggaacccagttatccaaaaattaccaagcggcaagtattggggtaggtaaaaatattgggcgttttggggctttatcatttgatattaccgaagcgagatcaatactacccgatgactctacacaccgtgggcaatcgatacgtattctttataataaatctatcaatgaattaggcacaagggtgcaacttgccggttataaatatagtgagattttatctttttaccagttttgttacaaaaaaagaagtgaaataaaataccttattatttgtaaaagtacaaatgtctaa

SEQ ID NO: 305339 - DNA, 423 bp, Proteus mirabilis; identical to SEQ ID NO: 298890

SEQ ID NO: 305340 - DNA, 621 bp, Proteus mirabilis
atgcttgatatggggatagatagagagaatatatttactatttataatcccataacagaaaataatataattataccaagaaatgataagataagatttctatatgttggaagattggttgcgtatgctcctaaaaatgttaatgaattattttatgcgctttccaaattgaatggcgattggacgcttgatattgttggggatggagaagataccgattttttaaaaagcttagcactagaattaaaaatagccactaagatcaactggcatggttggcaaaaagatgtttggtcatatattaagaggaatataaaatatacgtctacattagtattgacatcaatatctgaagggtttcccatggtgttatgtgaagcttcttcttatggtattttttgtattagctctaattgcccaaccggtcctgaagatattataacgcctgaatcgaatggattactgtacccagtaaaggatgtagctagtttagctaatcacttacaaagtattattgatgggcgtttattgcctacgcataatgaaataaaaaatgctattactaaatttaatgatgaaaactttgaaaatcgtttattatctgcattaaagttgagttga

SEQ ID NO: 305341 - DNA, 423 bp, Proteus mirabilis; identical to SEQ ID NO: 298890

SEQ ID NO: 305342 - DNA, 732 bp, Proteus mirabilis
gtgcttattttacctgatgaagaaaagaataaatcgcaacaaacatcaaatatgaatcgagaaagattagctaaagcaggggctatgtatctttctcagataatcagcaatgatgatattttaggtgtagcttggggaagaacaatccataaactagggcactatctccccactaaaacactagaaaatgtcaccgtgttacaaatgattggggctgtagccccacaacctgattttactactgcggaatctgccgctttgatcgccaataagttttcaggttgcagtattaatttgcatgtaccggctgtagtgtcaaatgcacgtttggcaatggagctacaagcagaacccataatacggcgtaatttctctgctttaaatcaatgtaataaagctttgtttgtagtgggtaatactcaagatgacaatcctttgattacaacaggcgtactcaccacaaatgagatggcacaatatcgcgatttaggtgctgttggtgtcatttgtggtcgattctatgatgcacaaggtaaccctctgctttctgatatcgaccttagaattatgggaattagtcttgcacagttaagacagatcccacagcgtatttttattgctggaggcgttgaaaatgttgctgcaaccataggcgcaataaaagggggatatgctacagatattgtcatcgatgaagtgacggcattagcattattggaattgagtatttaa

SEQ ID NO: 305343 - DNA, 579 bp, Proteus mirabilis; identical to SEQ ID NO: 295853

SEQ ID NO: 305344 - DNA, 390 bp, Proteus mirabilis
ttgcaaccttcacaagcggtgatggtgatagtgcccgatactcagcataatgttgctgaggtgaatattctcaataaagatattggttttatctatccgggtcaaaaagcggtgattaaaattgatgcttttccttatacccgttatggcaccattgaaggcaccattgtcaatatagcaaaagattccatacaacatgaacaattaggcttagtttatcccgtcctgattgaacttgataagcaagtgatgggtgaagatgaagcacaatataaactggctacaggtatgtctttagttgccgatataaaaattgaaaaacgtcgagtgattgattatttactcagtccaatagaagtttatcaacatgaagcattaagagaaaaataa

SEQ ID NO: 305345 - DNA, 645 bp, Proteus mirabilis
atgctattaaaaaaaatatttttagtgtcttttttattccctactctctcttacgctaataccttaccaacatcaaatatagataattcactaactcccaaccatgataatcttgcccgtttttcactcggtgacaatagtcaagcatccggcagcggtgccactgctataggtatcaatagccaagccaccaatactcgttcggttgctattggttatggtgcattagccaatgaggaaaatacggtttcatttggtaatagtgaagagaaacaaacagcacgactcaccaatgtcagtgaaggtaaaaataatactgatgcagtcaatctggcacaaacaaaagcactacttagtaaaaataaaaggttaactgatagccaaataaatgtttttagaaatcaaactaataataacttaaacaccatcaaaaaaaccattcatgagtttgatgattattatcgaagacgccaagcatcaattaccgatgcaattgaagcactggataaaaaagttatttcattagaaaaaaaagtctatgcaggtattgcttcctcaattgccatgaccaatattccttatcttactcatcatacttctgtctcttatacacatctgacgctgccgacgatactccttgtgtag

SEQ ID NO: 305346 - DNA, 306 bp, Proteus mirabilis
gtggcattaaacaaagccgttcctctgctgtataacgcattggcttccggcgaaatgctgccaaaagttgagttaaaatggtatcgcacctcggtagaaggtaaacaagagcacttctttaccaccacactgactgacgcgacgatcgtgaacatcgattgccaaatgcctcattgccaagatccggctaaagccgacttcacgcaacttatcgaagtctccctctcttaccgcaaaattgactgggagcacactgttgctggaacgtctggtgcggatgactggcgtgcgcctctcgaagcgtaa

SEQ ID NO: 305347 - DNA, 252 bp, Proteus mirabilis
atgctgccaaaagttgagttaaaatggtatcgcacgtctgttgaaggtaaacaagagcacttctttaccaccacactgactgacgcgacgatcgtgaacatcgattgccaaatgcctcattgtcaagatccggctaaagccgacttcacgcaacttatcgaagtctccctctcttaccgcaaaattgactgggagcacactgttgctggaacgtctggtgcggatgactggcgtgcgcctctcgaagcgtaa

SEQ ID NO: 305348 - DNA, 252 bp, Proteus mirabilis
atgctgccaaaagttgagttaaaatggtatcgcacctcggtagaaggtaaacaagagcacttctttaccaccacactgactgacgcgacgatcgtgaacatcgattgccaaatgcctcattgccaagatccggctaaagccgacttcacgcaacttatcgaagtctccctctcttaccgcaaaattgactgggagcacactgttgctggaacgtctggtgcggatgactggcgtgcgcctctcgaagcgtaa

SEQ ID NO: 305349 - DNA, 417 bp, Proteus mirabilis
atgaaaaatgaaactaatattcgccgtggcagacattgtgtattcctgatgcacgtccatttggtctttgtcacaaaataccggcgaaaaatatttgatcaggatgccattgaaaaattgcgaggctactttgccagtgtttgtgctgattttgatgttgaactggttgaaatagatggggaacgggatcacgttcatttactgattaattacccgccaaaactggcgatatctaatctggttaacagccttaaaggggtatcgagtcgattacttcgacgtgatcgtcctgatattgcccaacgtgattactacaagggggttctttggtcgccgagttatttcgcggggagttgtggtggcgcagcaatatccattatccgccagtacattgagcaacaggaaacaccgagttag

SEQ ID NO: 305350 - DNA, 309 bp, Proteus mirabilis; identical to SEQ ID NO: 300341

SEQ ID NO: 305351 - DNA, 1371 bp, Proteus mirabilis
atgaaagataatactgcaacaccttcatcaccttttactatcgccaaatttggtggcactagcgtggcaaattttgcggcgatggaaaagtgtgcagatattatcttaaaacagaaatcagtccgtgtggtggttctttctgcttcagcggggatcaccaatttgcttatcgaacttgcgacaggtgttgacgcaacacaacgagccgctttattggctcaagttcgtgatattgaatacgccatcatcaatcaactatcacatgcagaaattatttctcaagaaataaaccgcttattggaaaatattgaaatgctgtcagaagcggcagccttggcaacttctgatgcgttaaccgatgagttagtcagccacggtgaattgatgtcaacgttattgtttgttgaactgttacgtgaaaaaggaataagtgcagattggtttgatgtcagaaaagtaatgaaaaccaacgatctgttttgtcatgctgagccagatatggcgcaattaactgagttaacacaaagtttaattcagccccgcttaccagaaaccgtgattgttacccaaggttttatcggacaagagcctaaaggaaaaaccaccaccttaggacgtggcggaagtgattatactgcggcactgattggtgaagcattagggatgtcacgtgtcgatatttggactgatgtgcctggtatttatagcactgatccaagaatagtcccgcaagcacatcgtattgatcatattgcctttgatgaagcggctgaaatggcaacctttggtgctaaaattctccatcccgcaacgttattacctgcagtgcgtagtggcattcctgtgtttgtcggctcaagcaaagcaccagaagaaggtggtacattggtttgtgcacaaactgataatcctcctgtgtttcgtgccattgcactacgtagaaaccagacactacttaccctgcatagtttgaaaatgcttcatgcccgtggttttttggcagaaatatttaccattttatcacgccaccatatttcggttgatgtgataaccacatcagaagtcagtattgctttaacattggataccacaggtaccactagctcatcaggcagtctgttaactaatgctctattaacagaattatccgcattatgtcgcgttgaagtagaagaagatctggcattggtcgctatcattggtaattcactatcgcaagtcaatggcttaggaagccaaatttttggcactttagaggattataatattagaatgataagtcatggtgcgagtacccataacttatgtttattagtggatggcaaagatgcagataatattgtcagaaaactacacgacaccttattttaa

SEQ ID NO: 305352 - DNA, 627 bp, Proteus mirabilis
atgttaagtcggtcaatgaaagacttactgacaatgttaaaacaacacggcatcaatgatgagcgtctgttggaagctatgagcaaagtaccccgagagctatttattgatgaagcgctctcccataaggcttatgaaaatacggctttacctattggtaatggtcaaactatttcacagccttatattgttgctaaaatgacatcactgcttgaattacaagcaacggattctgtgttagagattggcacaggctctggttatcaaactgcagtattagcaaacttagtgcatcatgtaagttcagttgaacggataaaaatattgcagtggcaggcaaaacgacgctttaaacaccttgatttacataatatatcgactcgtcatggcgatggttgggaaggttgggtatcaaaaggcccctttaatgctattattgttactgcctgtgcaacagaagtaccgcaacgactcttgatgcaattagctgatggtggcaggatgatcattcctgtcggtgaacagcagcagatgcttaagtttattcgtcgtttaggtaatgattttcactatcaatctatcgaggctgtacgctttgtccccctaattgcgggtgagttagcataa

SEQ ID NO: 305353 - DNA, 1053 bp, Proteus mirabilis
atgagtgatttaccagaacttcattggctacatggcaaaccgacagcgacagggcgattaaaatcgacaccagaagattttaaggtcagcgaagatctcggctttaccttagatggtgaaggcgaacatgtgatggttagagtcagaaaaacaggttgtaatacggcttttgtggctgaaaagttagccaaatttgccggtattcatcctcgagatgctagttatgctgggctcaaagacagaaatgcggttacggaacaatggttttgtttgcgtatgccgggtaaagagatgcccgactttagtcaatttacgttagaaggttgcgaaatattaacaaccacccgccagcaacgtaagctacgaattggtacattaaaagggaaccatttcaccttagtattacgtgatatctccgatgtgacatcggtggaaactcgtctagtagagatacaaaaacaaggggttcctaactattttggtgtgcaacgctttggtcgtaatggcgacaatttacgccaagcatggcgttgggcaaccaatgaaattcgggtaaaagagcgtagcaaacgtagcttttatctctctgctgcacgtagtgcgatgtttaatcatctggtgagccaacgacttgagcgtcatatttatactcaagtgctttgtggtgatgcgatgcaattgcacggtaaaagaagttggtttgtggcagaagaagcggaacttgcccaaacacaaacacgctatgaagagcatgatatacatattaccgctccattgccgggtaaaggtgacttaggtacacaagctcaagcactgatatttgaaaccgacaacttagctgactacgaagcattatggtcattagcacaacaagagcgagttgataccactcgccgtgcgattaatttgctaccagaaaatatgtcatggcattggctagatgatactacggtttctttatcgttctttttgccagcaggaagttttgccactagcgttgtccgtgaattgatattattagggaatattgatgctgaaaatattagtgagtaa

SEQ ID NO: 305354 - DNA, 483 bp, Proteus mirabilis; identical to SEQ ID NO: 302931

SEQ ID NO: 305355 - DNA, 204 bp, Proteus mirabilis
atggataagcttagccaagagctgaccgccatcgaaaccgagctttctgatagtcaaatttatgaagcgaagaacaaggcgacgcttaccgattgcttaagccgtcaaagtattgccaaatcggctttagaagaagttgagatggcgtggatggaattacaagaaaaactagaagagatgaccaacgtttttgagtctcaataa

SEQ ID NO: 305356 - DNA, 537 bp, Proteus mirabilis
gtggcgacagcctgggaggatattcagtaccttcgcagtaccggagaagccataccgatggatatgcggactctgttaccgaccagccttgcggctgaattacacggttttaacggctgtttatggaaaacaccggaggtcatctggcggcaggcgcgctggcaggcgtttgcccccggtaacagtacatatcacctttatcagtgccgttatggtgtgaaatggccgaacggcagtggttttcactgtattgatggcgggtatgcgacggagttatccgcagagtttgatactccgtgggggccgccgtcagcagcggttttgtgtgctctgtctgcgcgtttccgctgtcaggtccgtcatgtctatgccgaagaaggctgtggtttctgcggatacagcgagtatgaccatggccggttaaccgaccatgaatctgatgagattgagttcagtgatgaagagaatgaggacggtttccaggatgtgacgggaccggactatattcttgattcattgccacattacggagggtga

SEQ ID NO: 305357 - DNA, 519 bp, Proteus mirabilis
atgacacaaaatcagttaccgctattagggatcaccgcttggagtggtacaggtaaaacaaccttactaaaaaaacttattcctttgttgcgtaacagaaatattcgggttggtatgataaaacatacccatcatgatatggatgtcgataaaccaggcaaagacagctatgaacttagaaaagccggagccgaacaaacattagtcgctagtcaacaacgttgggcattaatgaccgaaacccctgatttagctgagctggatttgtactatctcgcttctcgttttgatgcgagtaaactcgatatgattttagtggaaggtttcaaaacagaggctatccctaaaattgcactttaccgtcatatcaatgagcgaagtgttaatgagttattggatgagcatgtgattgcactagctagtgatagtgatttagacacatccctcccactgctagatattaattcgccagaagctattgctgattttattattcagtggctaacggaaaaaaaatag

SEQ ID NO: 305358 - DNA, 804 bp, Proteus mirabilis; identical to SEQ ID NO: 296342

SEQ ID NO: 305359 - DNA, 228 bp, Proteus mirabilis
atgggagaaccaatagggaatgtacttaatgcctcaatatcttcaattcgtgctaaagtgcctgactttccatccattgggtgtttaatatcacccatccactcgccattccgcctagcagatattcccacattatcactagatgccgcatacaatattgcttctgagtcattactagatttggctattacccatcttttagctaaaaaattagcatttatttcttga

SEQ ID NO: 305360 - DNA, 921 bp, Proteus mirabilis; identical to SEQ ID NO: 297638

SEQ ID NO: 305361 - DNA, 1290 bp, Proteus mirabilis
atgtttattgctgcattaatttttgttttaacgatcaccttggttatctggcagccgaaagggttgggtattggttggagtgcaacagccggcgctatattggcactcctttttggtgtgatcagttttcaagatattccgactgtttggaacattgtgtggaatgccacagcgacatttgttgcagtaattattattagcctacttttagatgaaagtggcttttttgaatgggcggcattacatgttgccaagtggggtggtgggaacggaagattactattcagttatatcgtgctacttggtgcaatggttgctgctttatttgctaatgatggtgcagcattgatactaacgcctattgtgattgcgatgttacttgcacttggtttcaacaaaggtacgacattagcctttgttatggctgctgggtttatcgcagacacagcgagcttgccgctgattgtttcgaacctcgtgaatatcgtttctgcggacttctttaatattggatttactgaatatgcatcaattatggtgccagtcgatattgcgggaattgttgcaacgcttgtgatgctacattggtttttccgtaaagatattcctaaccaatatgatgttaaaaagctgagtgagccagctttagctattaaggatatgactacgtttaaagcaggttggcttgtattgttgttattgctcattggtttttttattttagagccattaggtattcctgttagtgcaatagcggcaattggcgctttaattctttggataattgcagccaaaggccgtacgattaatactaaaaaagtgttgcgtggcgcaccgtggcaaatcgtcattttctctttaggtatgtacttggtggtttatggtttaagaaatgcaggattaactgattatctttctgaaatacttaattaccttgctgataaagggttatggatagcaacaattggtacgggatttattaccgcctttttatcatcaataatgaataatatgccaacggtattaattggtgctctatccattgaaggaagtgacgcgacaggggtaattcaacaagcgatgatttatgccaatgtgattggtgctgatttggggccaaaaattacaccaataggtagcttggcaacattattgtggctacatgttttatcacaaaaaaatatgacgatcacatggggatattatttcaaaacagggatcatcatgactatccctgtgctcattgttacactcgttgctttagtgcttcggctttcactgtttaattaa

SEQ ID NO: 305362 - DNA, 1053 bp, Proteus mirabilis; identical to SEQ ID NO: 301500

SEQ ID NO: 305363 - DNA, 1479 bp, Proteus mirabilis
atggataaacccgctaaagtcggtttattacaacagcctaaaccattctttatgattttctttgtggaattatgggaacgttttggttactacggcgtacaaggtattcttgccgtttattttgttagtaaactcggattctctcaagaacaagcttttattacttttggtgcattctccgcattagtttatgggcttatttctattggtggttatgttggtgaccatctattaggtactaaacgaaccattgttttaggggctatcgcattggctatcggttattttatgaccggcatgtcaattatgtatcctaatttaatcttttatgctttagccactatcgcagtaggtaacggtttatttaaagcaaatccagcaagcctattagctaaatgctataaacctaaagatccccgtcttgatggtgcatttacactattttatatgtcgattaatgttggttcattaatctccttatctattgcccccgttcttgccgatcgctacggctatgcactgacttataatatttgtggtatcggcttaataatggccatattggtctattttttctgccgtaaaatggtcgtgaatattggttctgagccagatcacctgccaatgaatttcaacaaactgctattagttattgcaggctctgtcgctatggtctttatttgtgcatggttgttgcacaatgtgatgattgctaacatcgttttaatcagcttgtctattgttgtggttatcatttattttcgtgaagcctttaaacaaaaagacagagtggcacgtaataaaatgtatgttgcatttgttctgatgttagaagctgttattttctatattctctatgctcagatgccaacctcacttaacttctttgctatccataatgttcaccataccctgttaggctttgatattaacccggtgagtttccaagcattaaatccattttggatcattattgccagccctatcttagcaatggcttatagccattttggcgcgaaaggcaaagatttatccatgccggcaaaatttaccacaggtatgcttttatgctcattaggcttcctaaccgctgccgcttcaggtatgtggtttgctgatgctcaaggcttaacatcaccttggtttgttgtactgatttatctcttccaaagtctaggggaattgatgatcagtgcattaggcttagcgatgattgccgcttttgtaccgcaatatatgatgggctttattttaggtatgtggttcttaacacaagcgacggcttacctgttaggaggccatgtagcaacctttaccgctccacctgaaggtattaccgctccactacaaacactgcctatttatactgatgtgtttggcaaaatcggtatcgttaccttagtggttggcttgattatgtgggcaacagtacctttactaaaccgcatgatgaaagaagagagtaaaatgattaagtaa

SEQ ID NO: 305364 - DNA, 414 bp, Proteus mirabilis
  misc_feature (385)..(394): n is a, c, g, or t
ttggaagccatcacctttattagaagaagatgcatatttaatgaaacaacgctttcacgtacaatagaacgcatcaaagccattttacaattaggccaaattacatctaatagtgagttattagatagtgctgatgtgaatggttttcaattatattcagatagtagctatcaaaacagtaagttgacagttcctattactgggatgtctgaaaaaccggctaccgttgaagtcacacaaaataatcgattgttatatagaacgataatacctgcaggccctttccaattaaataacattagtggtgtatcatcaagtcaaccattacatgtcaaagttattcaagatgatggtactattcaagaatttgatgttattacatcannnnnnnnnntacatcaaataaagacttaa

SEQ ID NO: 305365 - DNA, 1263 bp, Proteus mirabilis
atggcttatttgtcattaaagttaacattaatctttcttgccaccatcccactctattttatcttagctaaattaattgcccctaaaatagaaaaaaccgtacaacagctttatcaatattcagcaacaaatagtgcttttttaacagaaaccctaggaggtatagaaacaataaaaagcctttcattagaaccacgttttacacaacagtggcatacgcaaatccatcaactgactaatgaaaatttaaaattacaaaatattgataacttatcgcaatacattgtttcatttttacaaaaaataacgacagcgatacttttatgtctaggtgcttttgaagtcatttcacttgcaatgacaataggtcaactcattgcttttaatatgctattaaaccactgtctacaacctttaagttctgcaatagaagtttggggaaagtatatccgagccaaaacggctatttataatttacaagacattcttaatctcccaatagagcaagaaaaagccaataagaaaatgaccttacaaggtgaagtgagttttgagaatgtcagttttagttatcaacatgatgccccccctgttgtaaggcaaatttcatttagaataaataaatatgaaactattggtatcgtcgggacgtctggatcagggaaaagtacattagcgcgcatcatcgcagggctttatatcccacaattaggtcaagttaagcttgatggcattccggtttgtgaaattccccccgcagtattacgtcaacaaataggttttgtcttacaagagaattttttatttcatttaaccgtgctcgacaatatccgtttaacgcagccatcagcctcattagatgatgttattcatgtagctaaattagcaggtgctcatgagtttattttgaaacttcctttagggtacgacacactcattgctgaaaatggcagatctttatctgggggacaatgccaacgtattgcaattgctagagccttactctcatcccctaaaattttaatttttgatgaagctaccagcgcattggatggtgagtctcaagccatcatcgaaaaaaatcttccccttattacccaagataagaccgtcattatgattgctcatcgcctttccacaataaaaaactgtgaccgcattattgtattagaaaaaggccagataattgaagaaggcaaacataatgaattgattagaaaagatggcgcttataagaaactttggcaacatcaacaaggataa

SEQ ID NO: 305366 - DNA, 1206 bp, Proteus mirabilis
atgggctggaacagtgatctgatgtgcggcaattttgatatcaaaaccacggtgggcaaccagctgaacggggtgacggccggctttaagaatctgatgagtgaggtgatccagaatgccaccggggcggtggccagtctgccggcgatggctatccagcgggcgaatcccggcctgtatgaaatgctgaccaacggggtgttgcaggctaatgtggcgtttgataaggcgcagctgaactgtcagaacatggctaaacggatgatggacttttcagaaaataatcagtggacgcaggcggcgatcctcgaagaagcaaagaatatcatcaataacagtgacggggatgcggtaaaaactgaccagcaaattcagcaaagcagtggcgataaaggggttgtatggataggcgggaaacagcgcggtggggttggtcagcctgcgattcagccggcgcaggattttgcacaggccggctttaatatcatgaacggtctgccggcaaccagtacggccccggtgccggccggccagtgtaacggagccgcttgcaggcgctttgccaacagtgaggaagccgctcaggtggtcacacaggtgctgggcagcaaatcggtccgcacctgcaccaatccggcggattgtcagagcggcggtgaggcggagcaaccgggcagttcccagccaggaaccgggctggcaccggtgctggagaccaccacccgggaaaatttggaacagctgcataaactggtgaacagccggggcgcggtcggggcggcagagttggcgaaactgaaaaccggcagcctgacggtctcccggggggtgattgaagcgctgcgccgggatccggataaaacggcattaacacagcgtctggccggtgagctggcgatggcggacacgatggagctggcgctgacgatgcgccggatgctgatcaccggccagggggagccgaatgccggtaattttccgaaagcccaggagatcggtaaccagtcggttgaccagctggatcgcgaaatcgggatgctgcaaacggaaatggaagtgcgtaaatccattgccaataacgcgatgctgacggtgattgagcgtgatcagcaacggacacaggcgaaccctgccacccagaccccagataatacggatgtgcgtgtacagggactggagcaaaacagtgacaccggaggacgttaa

SEQ ID NO: 305367 - DNA, 1056 bp, Proteus mirabilis; identical to SEQ ID NO: 301630

SEQ ID NO: 305368 - DNA, 741 bp, Proteus mirabilis; identical to SEQ ID NO: 190889

SEQ ID NO: 305369 - DNA, 399 bp, Proteus mirabilis; identical to SEQ ID NO: 302658

SEQ ID NO: 305370 - DNA, 465 bp, Proteus mirabilis
gtgactaatgattggaatgggcaaatagaaacttcactgtttaatttaaaagcgacactgcctaatgaataccctaacatgataaagagtttaaattactttttttcagataaaagaattgatagtgaaattcttccaggtacacgtcaacagattattttatcaaatggaaggcaacatacatttgatgagttaagttctggcgaacatcaaatacttattatgttatttacaatccaacgttggctaaaaccaggaggaattgtattaatagatgaacctgatctacatctacatccttctgttatcgcacctctcttagcggctatcgaaaatattgtgactaataagaaagggcagttaattttaacgtcacactcaacagaagtttggcaacgctatgaaaaatttggttcacgtattgatcttactttgctaaaaggatcggtgaatgtcgaaaattga

SEQ ID NO: 305371 - DNA, 234 bp, Proteus mirabilis
  misc_feature (219)..(228): n is a, c, g, or t
atggctcatcaatacaataaaaatatttcagcatggaattatgataagaaaaaatttagaaaagaattctggaagaagtttttaaaagaaatacataccatccctacagaaatgtatgccacacatcgtgcttctgcaggctcgctagatgatacgacttatatttatacaacagcagtaagtaaagaacaattaacaagctctgctaatatttccacnnnnnnnnnngtctaa

SEQ ID NO: 305372 - DNA, 309 bp, Proteus mirabilis; identical to SEQ ID NO: 301124

SEQ ID NO: 305373 - DNA, 912 bp, Proteus mirabilis
atgaaaatagaattagccaaaagccttgaattaaatagaaatattacagcagaagaagctgataatttattttcaaaaaaaataataacatcaaaatatctttttgaatgtactgaacctgattgtcatgcccaagtaacttgtgccaatcttgataaaccaaaccgattacgaaaaagagttcctcattttaaatttgtttctgaacatagtgatacatgtaaaatagggatcaatgaagaaaatgaatttcgtagaataaaaaaaatgaaagaagatccagaggctcttccttttattctcgatgatattgttgagcttgatctctcaacaccttataaaactaaatttcatgatatctcttcatcaaaagaggaagatggcatcaacaaacgcttaaaaacaaaaaatattgatgacgaaaatagtaataaaacacgtcattcaaaaaagcgtttatcaggactcgttaatgattttatcgataaaaaaaatttctttctcaatattgcagaaggaaagatccatttaagagatttcttcatttatattaatgataaaaaagatctaagcgaatatgtagatgaacctcgaatatacttcggtaaagcttgggttaagcgtatagataattattaccttgtccgttttgataaaaaaatgaaaaaaggtgacttaatttgcaagccaacattttttatttctgaacgtcttgtaaataaatcagagtataaaagaacctctcggcaagaattagataaaatagcactatcaacaccgccaaaacctctttatttatttatatttagtgaattaccacctgtaaaaatgaataatggtgattttatcaatttcaaattagatgacttaacatacttatattacaaaacatggggtaaaaaaagtgaatga

SEQ ID NO: 305374 - DNA, 756 bp, Proteus mirabilis
atgaaattaattgccagaggaagagagcttaatttatcttcaccccaagtgatgggcattttaaatgtgacgccagattcattttctgatggcggaacgcataactctcttaatgatgctattaaccacgccgctaaacttattgctgaaggggcttctatcatcgatatcggtggtgaatcaacaaggccgggtgccagtgatatttctgtcgatgaagagttacatcgtgttattcctgtggtcgaagctatccagcaacgttttgatgtgtggatttctgttgatacatccaaagcacaagtgatcacggagtccgctcaagcgggtgcctctattatcaatgatatacgttcacttaccgaacctggagcacttcaggcggctgcaaaaacggggttacctgtttgtattatgcatatgcaaggtttacctaaaacaatgcaacattcgccgcagtataagaatgtgatgatagaagttgatgcttttctggcagagaatattcaacgttgtattgatgctggtatcgagaaaaatcaaattattcttgatccaggcttcggctttggtaaaaatttagcgcataattatcaattattagcacatctaagtgattttcatcactttggtttaccgatactcgccggaatgtcacgtaaatcaatggtaggacagttactcaatgttccgccacaagagcgtgttgctggtagtgttgcttgcgcagttattgctgcaatgcaaggggcataa

SEQ ID NO: 305375 - DNA, 924 bp, Proteus mirabilis
gtggcaaagcaaaagttcaaaatcaccaactggcccacctacaataaagccctcatcaaccgtggctccataactttctggctggatgatgaagctattcaggcctggtatgagtcagcaacaccttcttcacgaggcagacctcagcgctattctgaccttgccatcaccaccgttctggtcattaaacgcgtattcaggctgaccctgcgcgctgcgcagggctttattgattccattttttctctgatgaacgttccgctacgctgcccggattacagctgtgtcagcaggcgggcaaagtcggttaatgtcagtttcaaaacgcccacccggggtgaaatcgcacacctggtagttgattccaccgggctgaaggtctttggtgaaggcgaatggaaagtcaaaaagcatggccaggaacgccgtcgtatatggcgaaagttgcatctggcagttgacagcaaaacacatgaaatcatctgtgcagacctgtcgctgaataatgtgacggactcagaagccttcccgggtcttatccggcagactcacagaaaaatcagggcagcatcggcagacggcgcttacgacacccggctctgtcacgatgaactgcggcgtaagaaaatcagcgcgcttatcccgccccgaaaaggtgcgggttactggcccggtgaatatgcagaccgtaaccgtgcagtggctaatcagcgaatgaccgggagtaatgcgcggtggaaatggacaacagattacaaccgtcgctcgatagcggaaacggcgatgtaccgggtaaaacagctgttcgggggttcactgacgctgcgtgactacgatggtcaggttgcggaggctatggccctggtacgagcgctgaacaaaatgacgaaagcaggtatgcctgaaagcgtgcgtattgcctga

SEQ ID NO: 305376 - DNA, 234 bp, Proteus mirabilis
atgaaaaatactgatctagaattaattattaatgaaaagctaagtattgagaattttcacgactacgcacctaatggtcttcaagtagaagggcgccctcatattcaaaaaatagtgacaggagtaacggcttgccaagctttacttgatgaagcggtacgtttaaatgcagatgctgtattagtcaccatggttatttttggaagaatgagccagttgttatccgttcaatga

SEQ ID NO: 305377 - DNA, 1335 bp, Proteus mirabilis; identical to SEQ ID NO: 298263

SEQ ID NO: 305378 - DNA, 948 bp, Proteus mirabilis; identical to SEQ ID NO: 34943

SEQ ID NO: 305379 - DNA, 381 bp, Proteus mirabilis
atgtctattgcaaacgatctgaacgatgttgttgaggcatctggcgacatgctggctcggctggccatttttgccgaccatattcccgacgaatggattactgccgctgccgccttgtctgaaaaggccactatccgccgacgccgcttaccttctgatatggtcttgtggctcgtcgtggggatggcctttttccgcaatgagcccatctccgaggtcgctcggcgcctcaacatctgtgcagaagggttggccaatgatgccttgctcgcggacagcgcgaattcaacttcgaagtgcgacactcgcctatgccgcctgacggtactcttcgaataccttgacaggctgcctgaatccgagacatttccgaggtcgtag

SEQ ID NO: 305380 - DNA, 1236 bp, Proteus mirabilis
atgaataacaacaaaaagaccaaaaaaagattttctcttattatcaccctgcttattgttatcgctggcgctatcgcctattggcaatactcttcaaacaacagcgcacctcctgtgagtaaagatacccctactgcgaatacaccaaatagaagtacagctggctcaagacgaccaccgatgcctcctgtacaagtggcgacatctgcacaagaagatgtgccgcaatttttaactgctttaggtacagtgaaagccgtcaatagtgtgaccgtgacaagccgtgtggaagggcaattaatggcgttgcatttcaccgaaggccaacaagtgaatcaaggcgatttgttagcagaaatcgacccacgtccttttgaagtgcaattagcgcaagctaaagggcaattggcaaaagatcaggccacactggcaaatgcgcgccttgatttagctcgctaccaaaaactggcaaagacccatttggtttcacaacaagaattagacaaccaagcggctttagtcaaacagtctgaagccagtattagtatcgataaagcagcaattaataatgcacaattacaattaacctatagcaaaataacggcccctatttcaggacgggtgggattaaagcaggttgatgtcggtaactatatttctggtggctcatctacgccaattgtcgttattaaccagatggatcctgttgatgtactctttacattaccagagcaagatctatcacaggttatcttagcccgtaaaaatagccctacattacctgttattgcattagacagaaataataaaattgaattagcacaagggactctatttagtgttgataatcaaattgatgccactacagggactatcaaattaaaagcccgttttcctcaacaagaaagtacgctatttcccaatcaatttgtcaatattcgtttatatgtcactacattagaaaaagcggtagtgatccccaatgcagcattacaaatgggaaatgaaggacactttgtttgggttgttgatgaggaaaacaaagtcagcaaactcgctgttgaggttgcatcacaaaatgcagataaagttgtcattgcctcagggttatccgctaatcaacgtgttgtcaccgatggtgtggatagattaacgcaaggtgccaaagtcgagattgtaacaccgctggcacctaaagctaaaaccactgatcccgttgttgcggagaaagcataa

SEQ ID NO: 305381 - DNA, 243 bp, Proteus mirabilis
atgaaaaattcaggtgtaattgtttatttacaagcttcacttgaaactttagttgagcgtttatctcaagatcctaatgaggcacaaagacctagcttgacgggaaaaacattagtttcagaaatacatgatgttttaattaagcgtgagcctttatatatgcaatgcgcagatattattgttgatgctggattatctattaatgatattattgaggtcattctcgcaaaactcgctaaataa

SEQ ID NO: 305382 - DNA, 1302 bp, Proteus mirabilis
atgtccaaaatcgttaaagtacttggtcgtgaaattatcgattctcgtggcaacccaacagttgaagctgaagttcacttagaaggtggttttgttggtatggcggcggctccatcaggcgcatcaacaggttctcgtgaagctttagaattacgtgatggcgataagtcacgtttcttaggtaaaggtgttctgaaagcggttgaagctgttaatggaccaatcgctaaagctcttttgggtcaagatgctaaagaccaagctaatatcgataaaatcatgatcgatttagatggtactgaaaacaaatcaaactttggtgcaaacgcaatcctagctgtttctttagcaaacgcaaaagcagctgctgcagcgaaaggtatgcctttgtatgagcatatttctgatctgaacggtactcacggtcaatactcaatgcctttaccaatgatgaatatcatcaatggtggtgagcatgctgataacaacgttgatatccaagagtttatgatccaacctgttggcgctcctactctgaaagaagcggttcgtatgggttctgaaatcttccatcacttagcaaaagtgctgaaagcaaaaggcatgaacaccgcggtaggtgatgaaggtggttatgcgccaaacttagaatctaatgcggctgcattagcggctatcaaagaagcagtagaagctgcgggttatgttttaggtaaagatgtaactctggctatggactgtgctgcatctgaattctataacaatgagactggtaactacgaactgaaaggcgaaggtaaaactttcacttcacaagaattcactcattacttagaagagctgactaaacagtatccaatcgtttctatcgaagatggcttaaacgaatctgactgggatggtttcgcataccaaactaaagtacttggtgacaaaatccaactggttggtgacgacctgtttgtaactaatactaagatcctaaaagaaggtatcgataaaggtattgctaactctatcctgatcaaattcaaccaaatcggttcactgacagaaacgttagctgctatcaaaatggcgaaagacgcaggttatactgctatcatctctcaccgctctggtgaaacagaagatgcaactatcgctgatttagcagtaggtacagcagcaggccaaatcaaaacaggttctatgagccgttctgaccgtgttgctaaatataaccagctgatccgtatcgaagaagcattaggtagcaaagcacctttcaatggtctgaaagaagttaaaggccaagcataa

SEQ ID NO: 305383 - DNA, 1374 bp, Proteus mirabilis
atgtcagaacaaacaattatttgggatcttgacctgatccataagtataactattcaggtccgcgctacacatcatacccaacggcattggaatttaatcagcaatatagtgatgcggatttcgaacaagcaacaaagcgttatcccgaacgacctctgtcactgtatattcacattcctttctgccataagttatgttatttctgcggttgtaataaaattatcacgcgccataaacataaagctgatgaatatcttgatgttttagaaaaagaaattattaatcgcgctcgctattttaaaaatagaaaagtgacccaaatgcattgggggggcggtactcccacttttcttgataaacagcaaattagtcgcttagtcgccttattaagacaacattttcattttgtggaaaatgctgagctctctattgaaattgatccccgtgagattgagttagatgttattgatcatttacacaatgagggatttaaccgcctaagtatgggggtgcaagattttaataaagaggtgcaacaaaaagttaatcgtgaacaagatgaagcatttatcttttcattagtagcaagagcgcgtgaagtgggctttcattctaccagtattgatttgatctatgggctacctaaacagactaaagaaagttttgcttttacgttaaaaaaagtgattgaattgtcccctgatcgcttaagtgtgttcaattatgcacatttacctaatttatttgccgcacaacgtaaaattaaagatgaagatttaccacttgcagaagaaaagttagagatcttgcaagagactatcaccacactcaccacaaatggttatcagtttattggtatggatcactttgctaagcctgatgatgaattagcggttgcacaacgccaaggtattctacatcgtaatttccaaggatataccactcatgaagagtgtgacttattgggaatgggcgtttcagctatcagtatgctgggtgatcactatgcgcagaacgaaaaagtgctaaaagagtattatgctcgcgtaaatagcgaagggcatgcgttgtggcgtggactctctctaactcatgatgattgtattcgtcgcgatgttattaagaccttgatttgtaatttccatcttaactttactgagattgaaaatctatatcagcttgatttccaagattattttaaagaagacttagcattgcttgcaccaatggcagaagatggattggtggagatcagcgcagaaaaaattcaggtcactccaagaggacgtttattgatccgtaatatttgtatgtgttttgatacttatttacgtaatcaaatgcgccaacgccaattctctcgagtgatttag

SEQ ID NO: 305384 - DNA, 2634 bp, Proteus mirabilis
ttgttaaagaaaacaatcaaatggacagggatgatactactgggtgtcggcgcagttagcacgaccttgtggctcaccattccacgttggttacctgttgtggctaaaacctatttacctgaaggtgtttcactctctttaacacaacctaggttacaacaatggggtgtttttattgatgatatcgcattaaaaagtgatagctgtaccttggctaatgtgcagcaatttacgtttaactatcaaaaacagcaaattgatagcctatcatttaatagtcaacaacttactattaacgaagggtgtttttcacaattatcttttgcagataaaaaagagaccgcaacagttcctctcgatattcatgcgttattagctactattcctcgcttatcggttgatattaatcatgtttctttaatggataatcagcgctataacggccattttcagcttaaaagtgatacaaatgggcgattaatcagctatcagggagataatacgcagatacaagcgctgatccgtgataatcaatggttagatattaaacaattaaagattaatttacctgacgataatcagatagagctggcggctgaaatcgcgttaccccttaatgttgattcattaccagaaaatggttctatcagcacaacattgttaacatcccattatgcttacccattagtctttattgctcaatggcaagggaatagcggtaccatttctattgctgaacaaggtggagggcaagcgttagctgtgttgccttggaatgtaactgcagaaaatatcacgatagaaaaagggcgttgggaatggtttgggcttgatcaacccttacgtggtggtgtgaatatcaacattgcccagtggcagcaaggattaacgggattacgcttaactgcgcgcttaaatgttatgacgcaagggcatgcaggaaaagggaatttagtgatgacgatacctgaaacggcgattaactggttagatgctgatatacctattcaattgacaggcattgtaaataaagatctcatgcaagccagtgcacaacttcccgttaaagtgactggtatgttgacagatcctactatcgaatttcagcccggttcactattacgctttaaagggcaactaacagaaacgctgacggtaaaagatgctcgtttaccactggctggctcaacattatcttccaaaggatttaatggtcacctaaatgcgattgtgttagctgaagatactatttggggagattatcgggtccattttgctggacgttcgaccgatttcttacctgatcagggcaattggcaatggcgttattggggagagggcaatttattgccattaaaagcgcgttgggatatcgctggaactggctcttgggtagataacatggtgagttttgagacattaaataccggatttgatgttttaacttatcagcataccagtatgttagcacccagattgacgctcttaacgccatttcgttggttaagagacgataaaaacccattatttgaaggaaaattgaagttaaccagtcaacgaatcgattttcctgcggggggattcttagatagagctgactttattgccagtgtaaaaggtcaatctccttttcgttttaatatgaaaggcgagctcaatgccaagccaaatattggaccgataacgattaatacacgttgggatggtgaaaggctaagagggcagatgcgttggcctgcacaaccaatcaatgcctttcaatctttattgccagaaaaattaggcatcacattagataatggcgaattttatacacaagctgacttttctattgcccctcaacaaggtttagttgctggtggacatttagtagttaagcaaggcagcatgtggctaaaagatggcgtattagaaggactcgattttattttaccttggcgtttaaacggtgatgaatggcaactaggtgtaaagcagccagtgcaattacggattaagcgcgtcaataatttatttgaaatgacagacattaccgccgatctgcaaggattttaccctattacagaagcaaaacctttagtcttatctaatgtcaaggttgctatgcttgatggcactatttctatggcaaaattagcattaccacagcatgaagcggcgattatctcattagataatctagagttaagtcggcttttcactttattgaaggtgacccaatttgccgcatcaggtaaagtaagtggcgaattacctttctttatcaataacaatcagtggatagtgaaagatgggtggctggctaattcatcgtacttaaccctcaggcttgataaagattttgttgactctattgatgatagcaatatgacagccggtgtcgctatggcatggttacgatatttagagattagccgctcttggacgcgggttaatttaagcaacctaggtgaattagtgcttgaagcggaaatccaagggaaaaatccattggaagacaaacggcgacaagtaaatcttaattatcgccatcaagaaaatatttttcagttatggcgcagcttgcgatttggttcgcaattggaagagtggttagaaaagagcctatccgatttagggagtgagtcagaatga

SEQ ID NO: 305385 - DNA, 627 bp, Proteus mirabilis
atgtggacgtttgcggctataaatgaaaattataacaagaatgataaaaattattcacagcacatttacactaactcatcgtataataaattttgtttatcatttttatctcaattaagtatagataatgatgctaattcactaataagaaatatatccacaatgcatttccttatgggagaaggttggggggagaaagattattataatgaatctctgatcgaattatcaaaatttaattggcataaaacattatatccattttgtgatttgtttttatttcatcaagttaaagaggttctgttcagacaattatcagtaccctatcatgttaatattgaacaaactcaacgatggacttataaagctaaagatactcaaatgtatatggatttgtttgttttggatgagtgtcgttatttatatgattggatgccttcttttgatatgttttattcagggatgcaagatgtcgaaagacagtacagctttcgatttatattggatgccgttgcgaaacataggatgatatataataatgaattctttttcggaacagcatccgtttgtcgaatggaggacgggttcctagaaaaaatattaaaagttagagatgaaattctttag

SEQ ID NO: 305386 - DNA, 798 bp, Proteus mirabilis
atgagtgcaataaatatcatgccaaatgcagcacaatttcaagcctcactcaaacagtatgtcttaatctatacaccggactatttgccactttggttaattgttgccggcgtattatttgtcggcatgctacttgtactcgcacttcatggttttttacgttaccgcttcgccacaccccatggagagcatcatcaagaagagaaactctatctttactcaaaagcggtacgtttatggcattggagtaatgcaactttatttatcttactccttctcagtggcgggattaaccatttcgccctactctcggcacatgacacggcgttactcgtcaatgtgcatgaaatttgtggttatctactcttagtatgctggttgtcctttgtgttaattaatcttgttggtggcaatggtaaattttaccgtattgacagtaaaaactggttgcaacgagtattaatgcaaacacgtttttatctttacggcattattaaaggggaagatcatccttttccagccactcccaaggttaaatttaatccactgcaacaaatggcttatttaggtgtgatgtatgcattagtaccattacttttaatcactgggatcttactgcaaaatcccatgtttatccctgctgatgctgtgctatttaaagcttggttattaataattcaccaaatactagccgtgtgtagtgtcttttttatctttggtcacctttacctgtgtaccaccggaagaacgccattccaaacctttcgcagtatggttgacggctaccatagacactaa

SEQ ID NO: 305387 - DNA, 459 bp, Proteus mirabilis
ttgtctaaaatcatggtagagcgtttagaggcttctaataaaacattggtcacttgttcactattgcaatcagctggcgcagggatggtcattacgatacgtgtaatagagtctgataatgaccagttaataaattgctctgtaataaatgctttattaggcacaatgatctcttttctatcccaatcggtgagcgtggtggctcgcgtattgattttagaaatattcccagtcaagttacggatagtaacggtatcaccaatacgaattggcttttcaaacaagatcattaaccctgagataatgttggcaaaaatttcttgtaagccaaaaccaagacctacccccatagcggcaattaaccattgtagttttgaccactcaatacctaataatgagaaaccaacaatactgcctattagggtgatgctgtatttcgttaaagtggtaatggcataa

SEQ ID NO: 305388 - DNA, 306 bp, Proteus mirabilis
  misc_feature (199)..(208): n is a, c, g, or t
atgtcattagaagaaaaaaatatcgataaaccaagaacaaagccagccgaagttcgtttagaagagttaatgaacgccgcagaaacactatttcttgaaaaaggatttgatgccacaaccgtcagcgatattgtaaaacaagcgggggtcgctaaaggaacgtattatcactattttacggcaaaaacagatattctcnnnnnnnnnntctcgacgcactgcgaactcgatatatggattggtatattgataaaattgagcaagcaatggcaagctgccaaattcaagattttcgcgctaaattaa

SEQ ID NO: 305389 - DNA, 1413 bp, Proteus mirabilis
atggaagagcaaacagaagttactcagcccgttagagtgaaaaatgccactctacaacgcgggctaaccaatcgtcatatccaattaatcgccattggtggtgctatcggtactggtttatttatgggttctgggaaaaccatttcgctagctgggccatcgattatttttgtttacatgataatcggctttgtcctgttctttgttatgcgagcgatgggagagctattattatcaaatttagaatataaatcgtttagcgattttgccggggatttattagggccttgggctggcttttttgttggatggagttattggttttgctgggttatcaccggtatcgctgatattgttgccattacctcctatattagttattgggcgcccaattttcctgaatggggaacgtcttttatttgtgtgctgacactacttattttgaatttagccacagtaaaattatttggggaaatggaattttggttttcgatgatcaaaattaccgctattgtctctttaattattgttggtatcgtattgattagcataaattttcaatctccagccggccacacggcaactattgaaaatatctggaatgatggcggtatgttccctaaagggatcagcggattttttgctggttttcaaattgctatctttgcctttgtggggattgagctggtaggtacagcagcggctgaaacacgtgatcctgagaaatcattacctaaggcgattaacgctattcctattcgtattattactttttatgttttggctttggcgattattatgtcagtaacgccgtggcgttcgattttggcagacaaaagcccgtttgtagaactctttgtcatgattggtattccagccgcagccagtttagttaactttgtggtattaacggcagccgcctcttccgcaaatagtggtatcttctcaaccagtcgtatgctatttggcttatcgaaagagggggaggcaccaaaacagtttagccagctatcaaaacgttcagtacctgccaatggtttactctttacgagtctctgtttatcttgcggtattgtactaatttattttattccagatgtgatgcgggtatttacgttagtaacaacggtctctgcgttattatttatgtttatttggagtatgatcttatgctgctatttagcatatcgtaagaaacgtcctcaattacatcaacaatctatttataaaatgccattagggatagtgatgtcatggctatgcttagcattttttgtgtttatggtcgtgttattggcatttgaacatgatacccgtcaagcactgatggtaacgcccatttggtttattgctttaggaatagggtatcattttgtgaaaaagcgtaaacaaaaagcacaattaaaaaattaa

SEQ ID NO: 305390 - DNA, 231 bp, Proteus mirabilis; identical to SEQ ID NO: 67167

SEQ ID NO: 305391 - DNA, 657 bp, Proteus mirabilis; identical to SEQ ID NO: 147166

SEQ ID NO: 305392 - DNA, 753 bp, Proteus mirabilis; identical to SEQ ID NO: 67165

SEQ ID NO: 305393 - DNA, 552 bp, Proteus mirabilis; identical to SEQ ID NO: 164714

SEQ ID NO: 305394 - DNA, 723 bp, Proteus mirabilis
atgaaactttctactgttaaacaaaaattgtctcttatcttgctgttaaatttggttggattgactctttttttatcttggtatcttcccgcacaacatggcttttggctttcaatagatacacatatcttttatttttttaatcggcaactattgccagactcttcttttgctatgtttgtggcttatgtcaataatcgagcattcgatgtgattattctgctggcgatgggagggttgtattaccatacctttcgtcagaaagattatcagggcaaacgccatctcattattgtgggaatagtcatggtgctaagtgcaatcgtaattaatcagattggacaaaatattcctatcgaaagacctagcccaacacttcattttcacgatgtgcaccgtgtaggtgtagtgacaggaataccgactaaagatgcatcaggtgatagctttcctggcgatcatggtttgatgctactgatcttttgtagctttatattacgttatctttcatttcgctcttttttatgcgctcttttaattacggtaattttttcattacctcgtgttatggctggcgcacattgggcttctgatatcttagttggttctatctcgctcactttagtcacaacaagctggttattaataacccctgcatccgatatcatcattcattggctagatgaacatctcccttttaaaggcaaaaaagcatttagctaa

SEQ ID NO: 305395 - DNA, 1062 bp, Proteus mirabilis; identical to SEQ ID NO: 296634

SEQ ID NO: 305396 - DNA, 540 bp, Proteus mirabilis; identical to SEQ ID NO: 297523

SEQ ID NO: 305397 - DNA, 465 bp, Proteus mirabilis
atgaaaaagacaaagaaattttgtgccaccgcattgctcttcagtactttcagtgttgtattttatgtgcttccagtgcaaagtcagccagtggagaatactctggttgttgcaacctataatattgatggtaaagtttatggtcgcgctgcagagcaaagtcgcctactagaaaatctgaatgttgatcttgttggacttcaagaagttaatcatcacaatcgtcgttttaaacaattaaaaagctatgacgcattggaatattttaacaaagaatattttaagcatcagttctttggtgagatgtcgatctttgctcatggtggctggggaatagccctactttctcggtataaaataagtaatacaaaaatatccacttggtcagtgacgaaacctctgtttataaggatgaagttaaccaaatttttgccaactacgatcctaataatgcggagagtgtga

SEQ ID NO: 305398 - DNA, 963 bp, Proteus mirabilis
atgtcagctattacaacgacattaatggcttttacacaacctggcgatgttattttacattctcaaccactttatggtggaacagaaacattaatagccaaaacattcgctaagttcggtattcaagcaacaccatttacagatggtttaaatttagcacatatccaatcgcaagctgaaatggctagccaaaaagggagagttgcggtgatatttgccgaaactcccgccaatccaactaattcactggttgatattcaagcgttaaaaatcgttgcggataaattagaaacaagccaaggctatcgacctattattatttgcgataacaccttattaggacctgtttatcaacatcctatagagcaaggcgctgatatttcactctattcattaacaaaatatgtgggtggacattctgatttagtcgccggtgctgcaatgggatcacgcgagcttattaatcaagttcgcctattaagaggtgcaatagggacacaacttgatgcgcattcttgctggatgttaggccgctctttagaaacattgcaaattcgcatggaaaaagccaatcaaaatgcgctattagttgcacaatttctacgtgaccatgaaaaagtgaaagtgatccactatttaccttttgtagatgaaaatagtattgaaggtcaagtatttgctagacaatgcacaggcgcaggatcaacattctcctttgatattgttggtggtgaagcagaagcttttcgttttctcaatgcgatgaaaatatttaaattagcggtgagtttgggaggaaccgagtcattggcatgtcatcctggctctaccacacattcaggtgttcctatggaattacgccacaatataggtattcaagaaacaaccattcgtttatctattggtattgaaaatccttatgatcttattgctgacttatctcaagcattagatcatgtttaa

SEQ ID NO: 305399 - DNA, 1473 bp, Proteus mirabilis
atgaataaattaactccattacgacctatacctaccttaattgctgttgctattacccttatcatttggtttgttatccctgttccccaaggggtagatcccaatgcttggcacttgttagcgctgtttgttggtactattgcggctattatcggcaaagccttacctataggggcagtatctattattgctattgcgcttgttgccgcaacaggcgtcactaacccagactcaactaaaggcgcgattaatgatgcattaagtggcttttccaacaatcttatctggttaatcggtatttctattatggtttcaatgagtcttaataaaaccggattaggtgctagaattggttactattttatttcgttatttggtaaaaaaaccattggtatcgcttattctctagctattgcagaaacgatcctcgcccctgttacgccaagtaatacagctcgaggtggcgggattattcacccaataatgcgatctattgccgatagctttaattcaaaacccgaagagggtactagtggtaagattggtcgttatttatcgctagtcaattataatatcaatcctatcacctcagcgatgtttattactgcaaccgcgcctaatcctcttattgtaagcttaattatcggtgaaacagggcctgaaaatgagttaacttggtcaatgtgggcaatagcggcttttgttcccgccattgtttcattatttttaatgccgattgtgatctactttttatataaaccagagataacccatacgccgaatgctccccactttgccaaagagcgtttagctcaattaggccctatttcattgccagaaaaaatcactttgggagtatttgcactgttattaattatgtgggcaggaatacccgcactattatttggtgatgcttttagtattaatgcgactactgcggcttttattggtttatcaatcttattatgtactggcgtattaaattgggatgatattttaaaaaacaaaggtgcatgggataccgtggtttggttttccgcattagtaatgatggcctcttttttaggaaaattaggtctaattaaatggctctcattaagtgtgggtgccggtattgatagtatggggataagctgggtaagtggtatgatattactcgtgctgatttatgtctattctcactatttctttgctagcaccacggctcatattaccgccatgtttgctgcattctatgccgcaggtttagctcttggcgcgccaccaatgttattaggacttattttagctttctcttcttcattaatgatgtctttaactcattacggtacaggtactgcaccgattattttcggctcaggctacgcgaccttaggtgagtggtggaaagcaggttttgttatgagcattgttaacctcattatctggataacccttggtagtttatggtggaaggtgctggggtattggtaa

SEQ ID NO: 305400 - DNA, 510 bp, Proteus mirabilis
atgtttgattatcaggtttccaaacaagcgcactttgataatgcatgccgtgctttcgcaaatacccataaaggggatttagtgcaaatagctgaaagcatcggcatgaacgcccaaatgttgcgtaacaagttaaaccctgaacaaccgcaccaattaacgtgcattgatttaatgaaactgactgatgcaactgaggacgcctctatccttgatggtgtcttagaacaaatgcaatgtcagccgtcagtgccagttaatgaagtgtgtgattctaatgtacctgcttatttactaacggcggtcggtgaagtggggaagttagcaacaaatacagtttcaggcggtaatttcaataatgcacgtgtcgctgactttaaacgttctgttaatacagcaattcgttgtttaacgttggcaggcataacactatcggccagattacatactaatccggcgtttgcctgtgcagtggatgcagtcgctaatcttagcccatcaatgatgtga

SEQ ID NO: 305401 - DNA, 1350 bp, Proteus mirabilis
atgctaataaaaaaactttttacacttttttccgtaggactcctaagcttgccagcttcagcggttacactgtctgatctctattttttagcgattaaacatgatcccacatttaatgcagctgtaaaagagcaagtagcaggtaaagagtatgaaaatatcgggttatcacaattgctacccaatatttctgtcaattacaaaaataatcctcgcaactggcaacgtaaggcttatccaataaatatatttcaggataaaataacaacagttgagtatcaaaactatcaaagctattctgtcaacgcgattattagtcaaccactatttgactacaccgcatttagtgaatacaaagcttctatcattaaaacattattagcagacagtcattatcaaaataaattttcagaattaattattcgacttattgataattatattcaagttgcttatacacaagataaattattgctaaatcaagcacagcaagaaatctatcaaaaacaactagcttcaagtcaacgcctatttgagttaggagaaggaaccaaaacagatattgctgaaatagagactcgtttatatttaacccagtcacaatataccgatcttcaattagaaattgaaaaggctaaaaacaaactcagtgctatgatcggttcacaattgcctactcatgagcacatcgcaaagctaactgatacaaagtttgttcttcaatcactggctcccgatgactattccacatgggaaaaaaatgccatacaaaataacttaaagatacaatctgctcgtcatgaaatggcgatagctaaacaagagattgagaaaaatagaggagaatttttcccaacagtacaattttatgcggcttactctagtagtaattctgatagtaataataccattaaccagaaataccaatctgctaacgtgggtttttatgtcagtatgcctttatttaatgggggtaaaacaacggcatcaatgcgtcagtcgacagcaaaatatcagatgagtgcatttgaaagggatgctattattcaaaatattattcaggaattaagatatcaatatcaaatttgctcaacgagtcatattaaattaatggcttttgagcaagccgttagttccgctaagttacaattaaatgcaacacgaaaaagctatgttggtggtcagcgaacgatggttgatgtgcttaatgcggaagagcttttatatagagcgcagcaagatttaatcaaagccaaatatgattatattcaagcttgggcattattacatcaatataccaatacactagacattgaaaaaataaaaattattgaaaactattttcagtag

SEQ ID NO: 305402 - DNA, 483 bp, Proteus mirabilis
atgagtgattttaaattttggggatgggataaaaaaccacgaacgatgctgaggtttgttaaacccggagatattttttgttttcaattaaataatgaaacatatgggtttggacgcatcatttcaaaaatcatgacaggccatgtagtagagattttcgatttcgtttcttctagtccatccataaccgaagacgacataaaaaaatctaacagaaaaatcacaccagttgtaatcgatacttacgggttatttgatagaaaaggatatcccaatagtgactggaggatcattggacatcagaataactatacgcctatgaatatggacgacatatacttttcttacggagttgaaaactcatgctataaagttgacatattcaacaatgattttcctataacagaaaaagaggcgactaaatatccccgcctaatccctcattctgattatcatattaaagaattattaggagctatctaa

SEQ ID NO: 305403 - DNA, 321 bp, Proteus mirabilis
atgccaggtcccataatgccagaggcaaatgtttcatcattaacctctgaaagtgcaaccgttttaccttgcagaggtgaaattaacccaacaggtaatttactattcgctatttgtggttttttgttggttgatgcagcttgtttattattttcttcttcgtcacggattgggtcatcagtaggatcatcaaaaccaataataagagttgcaataaaagtggctacactggcaatcaataaggtgattattgcatttactacttggttatctgtatcagatatccacattggtaaacttaataaccccggagtgacatag

SEQ ID NO: 305404 - DNA, 489 bp, Proteus mirabilis
gtgctttgtttaaccgcagggcaaaatgtaacttttcgtcaattaatcttcccaattattaaaaatccattaattatctcttgcgtaatagggattgttatcaatttatcaggaatagggcttccttttggtagcgatcaatttctaaaattgttagctgcgactagtttacctttagggcttatctgtattggtgcggcattacatttatcaacactaaaagcagaaagtaaaatgattagtattaacacagtgactcggttgcttattgtaccgataattgcatatagtgttgctaattttttaggtttgtctccattagttatgatgcttttagtcattttcttttctatccctacagccccaacttcttatattttaactcgacagctaggaggggattctgagctaatggcggggatcattacatcacaaaccatgcttgcagcagttaccttgccgatcgtattaagttttttaattccataa

SEQ ID NO: 305405 - DNA, 459 bp, Proteus mirabilis
atgccgcctgtttttcctgctcattggcacgtttcgcaacctgttctcattgcggacaccttttccagcctcgtttggaaagtttcattgccagacgggactcctgcaatcgtcaagggattgaaacctatagaagacattgctgatgaactgcgcggggccgactatctggtatggcgcaatgggaggggagcagtccggttgctcggtcgtgagaacaatctgatgttgctcgaatatgccggggagcgaatgctctctcacatcgttgccgagcacggcgactaccaggcgaccgaaattgcagcggaactaatggcgaagctgtatgccgcatctgaggacccctgccttctgcccttctcccgatccgggatcgctttgcagctttgtttcagcgggcgcgcgatgatcaaaacgcaggttgtcaaactgactacgtccacgcggcgattatag

SEQ ID NO: 305406 - DNA, 363 bp, Proteus mirabilis; identical to SEQ ID NO: 19892

SEQ ID NO: 305407 - DNA, 225 bp, Proteus mirabilis
atggataataattcgctaaaaaatgcgagtttatttgataatgatcccgttctttatgctgcatggctttactatcaggacggactcagtcaaagtgaagttgcaaatattatgagcgtttctcgagtgactgttgtgaagtatttacatctcgcgagagaaaaaggtttcgttaatataagcttggattcatcagtattttctacgattgattattcagaataa

SEQ ID NO: 305408 - DNA, 432 bp, Proteus mirabilis
  misc_feature (405)..(414): n is a, c, g, or t
atgttcaaaaaaagcttattagctatttctttacttactttatcaagtagtatcgctttcgctgcgacaccaaccgctaaattaaaagtaagtggggatatccaaccaccaacttgtaccatcaatggcgaaacaagtgaaactactgttgaatatacttttgctgtaactcctggccttttccctgcaaaaggtgatttaacattagagcctcaatcaaaaaatattgtcgtaacttgtgatgcaaaaacttatctagcttttactcctactgataatagagctgggacagaaaaaaaagaaggtgattcttattttggtttaggcagttataagatggcagtcgatggaaaagaggctgttgatactaagtctgacggttattgccatggcgagtattcattnnnnnnnnnnactacacagtttcaatga

SEQ ID NO: 305409 - DNA, 270 bp, Proteus mirabilis
atgaaaaatgccacagtaaaagaagatttgactagtgaagaaaagaaagtctatgtaatggattctagatatggcagatctacttctaagacactagtaaaaaatgattcattaggttgggctcgtagtaatgctaatgattatgctgacggtcaagtatttgcggcagattttgaagtcacaccaaccatcaatagcgcactaaaaaatagtgatggtgatgctaagttagatggtttagccacattaacattccaattcggaatttaa

SEQ ID NO: 305410 - DNA, 747 bp, Proteus mirabilis
atggatattcctcgtattttcactattagcgaaagtgagcatcgtattcataaccctttcacaccagagaaatatgccaccttaggtcgagtattacgaatgaaagaaaactggcaaattcttgatctcggaagtggctctggtgaaatgctatgtacttgggctcacgattacaatattacaggtattggcatcgatataagcccgctgtttactttacaagcaaaatctagagcagaagagttaggcgtcagccatcgagtacattttatccatcatgatgcctcagattatattagtgataaaaaatgtgatatagcagcatgcataggagcaacttggattgctggtggtgtaattgaaactatcgagctactagcaaaaagtattaaaacaggtgggcttattcttatcggagaaccatattggcggcaaattccaacaacacaagagatagcacaagcttgtggtgcttcatccatatcagattttttaactttatctgagcttgttatctctttcgacaatcaaggatacgatctagtcgaaatggtactggcagatcaagagggttgggatagatatgaagctgctaaatggatgactatgcgccgttggcttgacaaaaatagtgccgatgattttgctcaagaaattcgaacagaattgactatagcccctaaacgtcatgttagttttacacgagaatacttaggctggggggtatttgcattaattgctcgataa

SEQ ID NO: 305411 - DNA, 441 bp, Proteus mirabilis
atgtatgtgatgccagatgcctcacctatagcaagaagattagtcaaaacaacttaccaagcgatgtgggaaggtatcaaagaagttaaacctggtgcaacactcggtgatatcggtcatgcaatccaaagctttgcacaaagtcatgggtatagtgttgtaagagagtattgtggacacgggattggtcgagaaatgcacgaagcccctcaagtattacattatggtattcgaggacaaggtgttgtactaaaagaagggatgacctttaccattgaaccgatgattaaccaaggtggacacaaaataaaaaccaaaaaagatggttggactgtagtcacccgtgataaaaaattatcggcacaatcagaacatactattttagttactgctgatgggtatgaagtactcactttgcgtccagaagaaacactttcataa

SEQ ID NO: 305412 - DNA, 360 bp, Proteus mirabilis
atgactatgggttttgctatttttttactttctggctgtgctacgccagaaaaatggcaagtaaatatgaaaaatcccacacctttagatatcgctaaaaatctatgcatgcaagaagcaaaacaacgctaccccgagcattatttgagttcaacgccaaattatagctatccttcttcttcaacgataacaatagatggtaaagaagttactattcctaattcaaattatcattcctattctcgttatgatgccaatgaatcagagcgtaaacagtattttgatatttgtatgagaggagaggggtgggaaaataaaaataaagtgactggattactcgcctttttatttaatgactaa

SEQ ID NO: 305413 - DNA, 135 bp, Proteus mirabilis
atggagaagccttatctatcgtcttacgtatatctacgggttgaaaacttacattttgatgcatcgataaattcgatgaaaactcataaactagaatttcatcctcatgccctgattgatacttattaccaatag

SEQ ID NO: 305414 - DNA, 297 bp, Proteus mirabilis; identical to SEQ ID NO: 293814

SEQ ID NO: 305415 - DNA, 972 bp, Proteus mirabilis
atgcgaatcggacagtatcagttaaaaaattgcctcattgcagctccaatggctggcgttacagaccgaccttttcggtcactttgctatgacatgggtgcggggatgacagtttctgaaatgctttcttctaatcctcaggtttggaagacagacaagtctcggttacggatggtacatagcgatgaattggggatccgctccgtacaaattgcgggaagtgaccctgttgatatggctacagctgcgaaaataaacgtagaaggtggcgctcagattatcgacattaatatgggttgtccggcaaaaaaggtgaataaaaagttagcaggctcggcattgctgcgttatccggatttagtcgcagagatcctttctgcggtggtcaatgcggttgatgtacctgttacactcaagatccgtacaggatggtcacctgatgaacgaaactgtgtagagattgccaaattggctgaagattgtggtattgcggctctcaccattcatggacgtacgcgcgagtgtttgttcaaaggtgaagctgaatacgacagtattcggacagttaagcagagtgtctctattcccattattgcgaatggagacataactgacccgctaaaagccagagcagtgcttgactacactggagccgatgctttaatgatcggtcgcgctgctcagggaagaccctggatctttcgggaaatccagcactatctggacacaggtgaactgttgcctcctttgccgattgcaaaggtgcaacaaataatgcaaaagcatgtgcgtgaattgcacgacttttacggtcaaggcaaaggaactcgcattgcacgcaagcatgtctcttggtatctcaaggaacatgcccctgatgaccagtttcggcgctccttcaacgccatagaggatgccagcgaacagctggaggcgttggaagcatatttcgaaaattttttgcgtaaataa

SEQ ID NO: 305416 - DNA, 330 bp, Proteus mirabilis
ttggaaattttatttgaaaatagcagggtaaaaaaaatttgcgagcagcaaaaggaagcggaaagaaaactaggctccctttgcgctaaaaaattgagagcaagaataagtgatttagaatctgccagtagagttactgatttggttgcaggaaaccctcaccctctaaaaggggatcgtgacggtcagtttgctcttaatcttcaccgtggctatagactagtttttagcccatccaatgacccatgcccaacaaagccagatggtggcatagattggggtagagtaaccattatttgtattgagtttataggggattatcatgactaa

SEQ ID NO: 305417 - DNA, 1113 bp, Proteus mirabilis
atgactaatctgagtgctagtttcgcgccggactgggtctccccacctggcgaaaccatacttgatatttctgaagagcgcggatggtctcaatctgagcttgctaaacgcttaggatttagcgagaagcatttgagcctgctggcaaatggaaaggcatctcttactaaagaaacagctgagaaactggaaagagtactaggtggatctgtagatttctggttatcaagagaggctaattatcaagcccataaatccagaattgaagcggcaaataggaattctttatgggaaccatggttagaggaagtccctgttaaggacttaatgaactgcggtgccatagaaaagttaagaataattaaaaaacataaatcacaaatagttgagtcctgccttaagttctttggggttgcatcgccagatgagtggaggagtatatatggcggaatgcaagtttcatttcgaagaagcagagaagaacaatgtgatgtaggagcaatctcatcatggttaagaattggtgagatggagtctgaatcaatagaagctccaaagtttaataaaagtaagttcgaaaaagctttaaaagaaattcgtgcattaactacagaagatgctgaagttttcgaaccaagaatgagaaggttgctgcttgagtctggtgttattttagtgcttgttccagctatgcctagatcacatgtaagcggtgttgctagatggattaacccatctagaccactcattcagctttctctttacggtaagtctaatgataaattttggttcactttctttcatgaggcggctcacatcttgcttcactctgatacaaaagaagataaaaaatcaatttttctagacgatcctaacgctacaaggtctcaagataaatatgagatagaagctaatgagtgggcgggaaactttttaataccagaaaaatataacaattgtttacctgatcttaaaagtcgagaagcagttattcagttctctagggcaataggcattcaccctggaatagtcatcggaagattacagcatgacgggcacattcaaaacagttggatgaatgacctaaagcaaggattgcaatttagaaaataa

SEQ ID NO: 305418 - DNA, 192 bp, Proteus mirabilis
gtgttcgattacataaacaaaacctacggtttgaatatcaaaaaaggtgatcgtgttcgatatacgctccttagtggatcaataaaagagggagttgtagttggggttcacgcaggaagcctaaaaataaaaatggatagtgataagtatgcggatatttatcaccccacttggaatatcgaatatctctag

SEQ ID NO: 305419 - DNA, 234 bp, Proteus mirabilis
atgacagataaactttacacctacggaaatatgccacataagcagtttcctagtcatcgagaggaattacgcgacaagttcgcaatggctgttatgcaaggtgatttcgctgcacaggatgctgtggaaatggggtattacacaaatgatactcctgatgaatttctggtaaaaagagctgagttctactaccgcatggcagatgcaatgttaaaggctaggggggtgatatga

SEQ ID NO: 305420 - DNA, 144 bp, Proteus mirabilis
atgaacgaaaaatataacgtaggagttaagcctgataatacaaaagaagctaaaaagctcaatcgtgattatcaagttaaacgcctaattgctaaaggccacacaaagaagtttgcccgccaacaagttaaacgcattaaatag

SEQ ID NO: 305421 - DNA, 162 bp, Proteus mirabilis; identical to SEQ ID NO: 304001

SEQ ID NO: 305422 - DNA, 471 bp, Proteus mirabilis
atgaaaaaacatcatgtacaaattatttctgctactcatgaacatattgttcgtttattaccacatgtaagacaagctgatgttgatgagttctacgctatgtcaatgcaaacacctgaacaggtattacgacatggcttatctgtttctactaaagcctatgccggcattatttatgatgaggtcgtgactatttttggcgttgcttctggctcattactgactggcttaggtgttccttggttggtgggaactgatttattagagcaacatcagaaaacctttctacggcgctgtaaacccatcttaaaacagatgttagggcaatacccaacactgatgaattatgtcgatgaacgtaatcatattgctaaggcgtggctccattggttggggtttcagattgaagaagcaaagccagcaggtttacttcagttacctttccattgttttatattgagggctaaataa

SEQ ID NO: 305423 - DNA, 543 bp, Proteus mirabilis
atgactaacgctcaaattaaaagaacgtgggcggtatctaatatcaatggcagtgaagaagttatgcgttatgcaccagaagccgtatacagtattaatgaatcaggtgctggaaactggatcacgggtcaatgggaagaagagaaaaagcaattaatgtctaaatcatttggtggcgcttcttctgatactgatattgttattgtctctgatgcagtgacccccagagactacagttacggcataatgataaaacaaaccggtagtgatgatatccctatttatcgtccatacacgggaaataacggcttgcctattcgctttaaaccagaacagtcatcatcaccaatgtataaagaggtaatggaaaaacgccaacaaagcgttaaggaagctcaggataaaagggaacgagaagaagcattggataaatcacgctcagaatttgatgaacgtcgtcaaaatatccgtgagcaatataaagaagctcacaatgagcgagtaaataaattcaataattatttttcttgggataaaaactga

SEQ ID NO: 305424 - DNA, 3384 bp, Proteus mirabilis
atgcctatttacgaacaacaacctgatgatgttttatctgcggatattaatgctgttcagcaaacagaacctacttacggtgataatgtttcaccgtcttggtatgaccctattaatccgcttgatgatagacggcaaactaaagaattacgtgatgcggcgtttcgtatcgataactcagtgggtagcttgattgctactgcatcttttaatcaatttgaagatgtagaaggctataacccatttgaagatgaattaacgctttcaggttatgaagactatgccgatgcctttattcattcaaactctcctcaagaaacagctgcaataaaacaacgtattgatcgtgagcgtaacgataagcaaatgttagcagatgctggcggtgctggtgttgtgagtagtattgctatgggggttattgatccaattaatgttgctgcaatgatgataccagggggagccattgtaaaaggtggcagtgtggccacaaccgcaggtaagtttgcattggcaaatatcgctggtggtgtagcttctgaaatggcattgcatagtacccaagaaacacgaacattaactgaaagtgcaattaacattacacttgacgccatgatcggtggaaccctaggttcagccgcacagttagtaaaaaaccgtggtgaattggtaacaaaagtaagaaatgatttaattggagaacaacaatcagggcaacaaaatattccaaataatattcctgataattctagtgttggtgcaatggaagtacctaacaccacattagaacaagaaaccttaaaagggccatcatttattaatcgtacgatgaatgttagccctgttggccgtgttgctcaatccccctctaaaacagcgcgccaaattaaccaacaactcacagaaaataactttacctttgctaaaaatgaagaaggtattgcgacatttaccgctgttgaaacaaaagtgagaggttatgaaactctcgtttataaacaagtagaatcaacgaaagatcactttaaacagtatcgtcaatctggtggccgtgatatgagctattaccaatttagtgaggctgttggtgatgctatgcgcaatggtgatactcatgcaataccacaagtggcagaagcggcacgttctattagacctattgtcgaagcaaccaaagatagaatggttgaattagggatcttacgtgaaggtgtaaaggtgacaacggcacaaagttatttccctcgtatttataaattcgacaaaattttaaatgatcgtactgagtttaagaaaatcattgctgactggttagaagagattaatcaaacatcaataaataaagccaaaggtagccttgatcgtgctgaaatcggtattgataaagcacgtaacgcttcaccacaagccgaacgtttagggcttgaaattaaagaagctgagaattggtcaggtaaaaaatctttgttgatggatgatattaataaataccaaaaaatcattaatgaaaagaatgcggtagaagttgagttaaattcactttctaatcttgctaaattaaataaaacacaaacaagaagacaagcaacattacaaagaaaattacagcgtattaatgatgctgagaataaattgcctgcgttacaacgtagcgtagatattcttgataaccctcgcaagtttagaaatgaacatcgtcgtttaacacgaactgcgaattcattaactcgccatgacagaattagacaatccgcattaaatcgcatgacacctttagagcgtgaagagttagatgcggcagcagatgatatcgttaataaaattatcggtgcaccatctggcattgtacccagtgaactgatccctgatggattagttaaacgcgctggttttacaaaagatagaaccctaaacattcctgatgaacgcattaaagactatctcgaatcagatgttaactatgtgatggaaaactatattcgccaagtcgcgcctgaaattgaactcacggctaagtttggtcgtgttgatatggataatcaaatcaaagcgattacagaggaatacaaccagcttattgctgatgcaaccacacctaaagaacgtagtcgattagaaacacgaagagaagctgatttacgtgatattcgtgctatgcgtgaccgtttattaggaacctacggagcacctaaagatccatctagtttctttgttcgtgctggtcgtgtggctcgtcacgttaactttttacgtttattaggtggtatgacaatatcatcattacctgatatggctcgtccgattatgcaacacggtttacgtagtgcgttaaaaccattgggtaagatgctaactgatatcggtgctatgcgcattgctaaagctgatttacgcgaaatgggtattggtcttgaatatgtattatccagtcgctctaaggtgattgctgaccttaatgatccatatagcagacgtagctatttagaacgtggtttacaatggtcatcacagaaatttggcaaccttacgttgatgaaccaatacaccgatactatgaaaatgtggtctggtgttattactcaatctaaggtacttagagcggcaaatactttagatgctggtggttcgttaagtaaacgagaaataaagaaactggctcatattggtatcgatgaatcaatgctaaagcgtatagcagatcagtttaaacgacatggtgaagacttagacggtatgttaacagggcatagccatttgtgggatgatcgtgttgtgcgtgaaactttccaagcggcagtattaaaggatgtaagaactacggttatcactcctggtattggtgatacaccattaatgatgagcagtgaactaggtaagattgtgatgcagtttaaaaccttcttctttgctactcacaatagagcgttggtttcaggcatacaatcaggtgatgcatcattttactatggagcattgcttcaggtagcacttggatccctagtctatgtcctcaaggctaaaatggcaggacgagatattaataccgaaccggctaacttagtgaaagaagggttagactggtcaggaatgatgggctggttaggtgagcctaacaacgtattggaaaaccttagcggtggtacttatggtatgagtgccatgtttggtgggccaccagcctcacgctatcaaagccgtaatgggattggtgcattattagggcctacatttgaccttggcggtgatattaaaaacatcacatcaggtgtattaaacggtgaatttgatgatagagaagtgcgatctgtgcgcaaactattacctttccaaaacttgttttatttgtcaccattattgaatcaggttgaagaacagatgaagtaa

SEQ ID NO: 305425 - DNA, 1230 bp, Proteus mirabilis
atggcagtggcaagcgaaacagcaaaagaaccaacggtactttctcgtcgtaaattgttatgtattgccggaatggggtggactttcgatgcaatggatgtggggcttctcgcctttttattaacggcgttaaaagaagattggggattaacagcagcgcaattaggttggattggcagtattaattctatcggtatggcagtaggcgcttttgtctttggcattatggccgatagaaaaggtcgtaaaccggtatttatcttaacgttgctgctatttagccttggttgcggtttaaccgcattagcaagctccttaatggtggtattaattttacgcttttttattggtatgggcttaggcggagaattacccgttgcttctacattggtgagtgaaagtgttaaagctcatgagcgtggtcgtattgttgttttattagagagtttttgggcggtagggtggttaattgccgcgttaatagcctattttattattcctgattatggctggcgtatggctatgttattgagcgcactacccgcagtttatgcactctatttgcgttcaaagttaccagaacccagttccacacagtcattattacaaaatcgtttatctcttcgccaatcaatggcattgatttggtcacctcaatatcgccgttcaacactgatgttgtgggtattatggttttgtgtggtgttctcttattatggcatttttttatggctaccgagtgtcgcaatgttaaaaggctttagtttaattaaaagctttcaatatgtgttgatcatgacactcgctcagttaccgggctattttaccgcagcatggtttattgaacgttatggtcgtaagtttgtgttaatcacctatttagcaggcaccgcgattagcgcttactattttagcgtagccgattccacaaccacactattagtgttcggtatgttgttatcattttttaatttaggtgcgtggggggcattatatgcctataccccagaacaatatcctgatggtatacgagctacaggcgctggaacggcgacggcaataggccgtattggcggaatattagggccactgatggtaggctatttagtgcaatatcaatttgacataagcactatttttcttatttttagcctttccattgtgatagcgatactagcggttatgttattaggtaaagaaaccaaaaatagaccacttaattctatttaa

SEQ ID NO: 305426 - DNA, 183 bp, Proteus mirabilis
atgtctcattatgaggaagtgattaagcaggttgatgaggccattgccagtgctagcatacaaacgatgaacgaattgctggtggaattaggtaaagataacacaatagcttttgctcagcgttatgaacagcaagagcgtctacgtactgctatttttcatcatggtgaaaaacagcgctaa

SEQ ID NO: 305427 - DNA, 966 bp, Proteus mirabilis; identical to SEQ ID NO: 297666

SEQ ID NO: 305428 - DNA, 561 bp, Proteus mirabilis
atgactggattaattattaccatcgcgttattgggtcttattttttattattacaaccgtattatctctatgcgtgaagcggttatctcaagtgaaacagaaatatcggtacaactcgaccgtcgtggtaaagtgtttgatagcttattagctacagtaaaaaaatatcttagtcatgaagccgatgtttttactaaaatcaccgaattaagagctaaaacacaaagtagcaataaccaagaagcaaaagcggcagaagatgagctatcaaaaattgtttcaagtggtgcgattaatgtcgctgttgaaaactatcctgaactaaaatcagatactatcatggctaatttacaagaagagattgtctcaacagaaaataaactctcttttgctaaacgtggctataaccgtaccttagagcaatatcgtgcgtttatcgcctctatccctgcggtatttattgtgaagatttttccaagtctcgtgattaataaagaatactggcgtcttgatgaaacagcgattaaatcagaagaagcgcgccgtattaactttgattaa

SEQ ID NO: 305429 - DNA, 552 bp, Proteus mirabilis
atggctaaaaaacagtatggttttctgattaatagtaaagattgttatggctgtcgcacttgttcgatggcttgtaaatcagaaaatgttacccctcctggagtcttgtggcgtagagtacgcgaattcaatgaagatctgcccaatgcgcaagcttttatcactatgtcctgtaatcattgtgacgatccacaatgcttaaaagtatgccctgccgatacttatactaagcgagccgatgggattgtgatacaggatcatgacaaatgtattggttgccaaatgtgcattatggcatgcccttataatgcgccggtttacgatcctgtagaagggaagaccagtaaatgtaatatgtgtgccgatagaatagacgaaggcttaaaacctcgctgtgttgaatcttgtccaactggtgccattgagtttggcgaaattgaagatttgcgccaaaaacatatcacaaattgggcattattagaaaaacgttatggggttcctgatcataccatcagtcatcctaatattgtcattattggtatggaggattaa

SEQ ID NO: 305430 - DNA, 2337 bp, Proteus mirabilis
atgtataaaaataaacagtgggaattagatagaagaacgctattaaaaggaatgggagctattggtttggcagctctttcccctaatgcgtttagcctagctaatgaaaataaacccatatttaaccagaaaactcggataaaattatctgaatatcaaacttttcaatccacctgtgcaatggaatgtctccattgtaacctaaccgcttttactcatcagggaaaactaatcaaaattgaagctacagaaggctttaatgtcaaatgttgtttacgaggaattagccgaactaaatgggtatatcataaggatagactcactacacctttgctacgtgttggcgaaaaaggtaaggctgagtttaaacctattagctggaatgacgctttagatcttatcgaaaaaaatattcgagaaactatcgataaatatggcaacgaagggctttttatttctactcacgctggaaatatggattccatcaaaaacgatatgggtaaagcctttttcgactatttaggcggttctacaaaacaagccggctctttatgttgctctgcggttactgcagctatgatccctatggttggcctacgctatgcagatacgcgtgatacggtaaaagatagccgttatattctatgttggggcaataacccagcagtaactatgcacgcctactttaaaaattataatcaggctcgccgtaatggtgccagaatggtagtcattgatccgcgttttaatgaaaccgcagccaaagctgatgagtggatccccattattccgggtaccgataccgcccttgcattaggaatgatcaaattaatcattgaagaaaatcttacagataaaccttttttgcgtgcccataccggagcggtgtatttagtcgatgaacaacaaaaactactacgtgattcagctaatgataaagatagctatttagtctttgataccctaactcagcaaattgttcgccatgatacccccaatattgtaccggcgttaactcatgatgaactgccaaataaaataaattacaccaccgtttttgaacaaatctattggcaagctaaaccctggactatcgaaaaaaccagtaaagaaacagatattccacaagagactattattcgtttagctcgagactacgcgacaacaaagcctgcaatgattgtacaaaatatgtctggcgcacaacgcactgaatttggtgcctatgttgcagcaagccagttttatcttgctctattaaccggcaatattggtaagaaaggcgcgggtatttgtgatgccggtggtgtgcgtcagatggcaaaatttaatcctattattccccctgcaccaaatgttaaacccattaatcctattcctgttgcaaaagtgggtgaatggatagtcaacgaaagaccccacccgattaatttctggtggatcatgacgatgggggtgatgacacaattacccaataccaatatggtacgtaaggcgctaaaaaaagttccttttgttgttgtagccgataatttaatgtcatcaacagcgctttatgccgacttagtacttccagtgacaaccatttttgaagatacaagtttaatggccggtgtgcgtagccaatatgttcaattaatggaaaaagccgttgaaccaccaggagaagcaaagcctgattattggatttttgcccgtcttgctgaacgctttggtttcggtgacgtatttaatcaacctattgagcactatattgatacttgcctcgcgggatcggggattacgcgggaaatgctagaaaaagggcctgtacggccagtagaaggcgattggatcccatttaaagacggaatatttcgtacatcaacccaaaaagcacatttctttattgaagaatggcaagataaaaactactcccctatagtcacttattatccagtaaaggaatcgacaacaggctcccctgaattagcaaaaaaatatccgttaatggctgtgcaacgtaagctagcacgtagtgttcattcaagccatgggatgaatgaatggattttagaagtacagcgtaatcaacccaatattttaatacatcctaatgatgcgttatctcgtggaataaacaatggtgattgggtgtttgcttttaatgatagaggtgaacatagagcaatagccgttgtcaccacacacataaaacaaggtgttgtttctcttgataatggttggtgggaacaacaaggggggagtagtagccatgtaacaaatgaccatgttgaacctttaggtaatggtcattgttgtaacagtaccctagttaatgtgagacgggaggcataa

SEQ ID NO: 305431 - DNA, 258 bp, Proteus mirabilis
gtgactaattcagataaagagaatagttttctaattcaatcatgggtatctgataatcaaggtaataaaaataatgattttattgttacccctcctttatatattcttgacgctaataaagagaatgctttaagaattatgtatacaggtgaacctttacctgcagatcgcgaaagtttattttggatgaatgtcaaagctattccttctttagatgaaaagcttgccaatgaaaatacactacaaattgccatctag

SEQ ID NO: 305432 - DNA, 1005 bp, Proteus mirabilis
atgagtctagatattaaccagttagttttgcaccaacttattaagcgtgatgagcagacattagaagtggtactacgtgattcactcttagacattgagccggttgttcaagagatggtcgaagagttacatcgtgtttatagtgcaaaaagtaaagcctatggtttatttaatgaagagagcgaattagctcaagcattacgtttacaacgtcaaggtgaagaagaatttttaggtttttctcgtgcagcgacggttagacttaaagatgagttagcgaaatacccttttgctgaagggggaacggttcttttttgtcattatcgttatctcgcggtggaatatttattaatcgctgtattgaatagctgtaatagcatgtgggtcaatgacagtcttgatgtatcttcaacacgctatttagatattcctcatgcagatattatcgctcgtattgatttaactgaatgggaaacttcacccgattctttacgttatttaaccttcttaaaagggcgtgtaggacgcaaagtttcagatttctttatggactttttaggggcgcaagaaggtttaaatactaaagtacaaaataaaggcttattacaagcggttgatgacttttgcgaagcatcagacatgaataaacaagagcgccaaacttgtcgtgaacaagtctacagctattgtaatgagcaattgcaatcgggtgaagagattgcattaactgaactagcacaagagttaccgccattaggtgatcaaaactttgcacagtttacagaagaaaaagggtatgaattagcggaaacttttcccgcagatcgcagtacattacgccaattaatgaagtattcaggaagtggtggggggttaacagttaattttgatgcgaaactgttgggggaaagaattttttgggatcccgctaccgatacactgacgataaaaggaactccacctaatttacgcgaccagttacagcgtagagtctcagaaaaatag

SEQ ID NO: 305433 - DNA, 1101 bp, Proteus mirabilis
atgagtatagtttatgtgccatgcataaaaaacgggatgaatgatataaaggctttattaaatttaaaggaagagtcatcaggttatgtcatgcctctagtgttaacagcaggaacgccttatggagggaatggtgtagatttaaaaaaagactacttactagatgagtttatacataattgggataagccattcattgtagatgcctctagggctgattcagatagtgagtcactttataattcctaccacaacctgacatcacagcacgacaatttttcgggtaaaatcacttactattcaagtatatattcaataaataaaaaattaattccagctataagttggcagctaaatgatgatatgagaaatattgttcaactctctctgtatttagagcagcaatatgaaaaaatagcaataatcattgatcctaataatagtgagaatttaaatagattagatacgttgctttgtttgtttaaagataactcaagaattattgtattgcttaattataattctatatataacaaagaattacctcaagagcataaagttttaccagtgattagtaaattaacctcgcgtggagtggggagtatagtattactaagttcttcattccctccagtaaaacctgcaataaaagatacatggatacagtcagagaacactgatctactgtggcaactaacaatgatgaataagtcacccagagatagcgttatcttatatggtgattattcagccacatcacctaattcagcaacagaatatatacaagggatgcaaataattccaagtgtgacttattttagaggcggtatttggtatcaaataaaatcaggtgtagacaaagaattttcaaaatataaagacatagcaaacgaactaatcagattggatttctttcatggctcaacattttgttggggtgctgaaaatatttatgatattgcaaccaatagagacaggaaaggaggcaccccaggaacatggaatgggtataaaattaatgttcatgtagaggaaacgatcagaattttaaaagactattacagtactccacttgaaaattacgatgaagatagtgaatag

SEQ ID NO: 305434 - DNA, 207 bp, Proteus mirabilis
atgttccgtgttggcaggtcatggcgcgccagtaaagaaagcttgaaacgatttgaacaagctcaatttgataacaatcgcgattacccagctgtcttaacccataaaagacaaaaaaaggctgattataagaataaatatgagattaggatgcaaagtgatgtggcaaaagaattagataggctgttatttaaagatactaaataa

SEQ ID NO: 305435 - DNA, 531 bp, Proteus mirabilis
gtgccaatcataaaaaaacctatttcgggcgttgatctccgtgcaagtttttatttgacttcccaaagtttaggatatccttcaaataaacaggcaatattaatggctgatattgccacattaatagctaaatggaggaatggcttagaggtcgaaatttatacggaaaattatgaatttagatatggtaggattaagtcttcacgttttaacgcctctggtgaggaaagcgtatattatgcaacttactttcatactcgtgccaagccaaaggacaatgatccacttctaataattacttttgatcccgttgttggacaagacgattttatgttcattgagaccattattgatcatagaacctatttaggttcaccgggtgcaggtaaaactaaatctcatattgaaagacggtcatctgatttaaaacgccgtattgaaaatggaaaaaaaattagttccgaaccttcatcttcagttcaaaacgttaataaaaataacaatgattcgcctgaccaagaaaataagtaa

SEQ ID NO: 305436 - DNA, 453 bp, Proteus mirabilis
atgggcaatgaacaaaacaaaagcacaggtggaaaagctataggtatcgcagggggcggaggtgcaggtgcgataattatacagctgatagaggttattggtgtaaatccagaatataagaatatttacattgcgctagtaccagccatatctgtcatcttgagcgagtttttttcatttatagtggtattgatatcgttagatccaaataaactaagatttagaatatggttaaaaattaccaaatggcgcttatggtggggtatgcggaaaaagataagcccagaactaaaggaattagctgaaagtagatataacatatgtgtcggtattgaaatgggcatttacaaaatggaagattactggaatacagctccagctcccgttccagttcaagctaccaccacctcatcaatagcgactattaatgaaaatcataatagcgaaaaataa

SEQ ID NO: 305437 - DNA, 252 bp, Proteus mirabilis
atgcaagatagcatcattggaataataggaattgtgttaatggctccagccatactttattccataaggttaattctaagggttttgatttactttatcttcagtaaagagaaagtgacaataacctatcacgacagtgatggtaacacgcaagagaaagtagtgtacctaaaaagggatgatgagtttttttctattcttgacaaaatagccgaaaagaaagcccatggagaatccaatcatgggcaatga

SEQ ID NO: 305438 - DNA, 885 bp, Proteus mirabilis
atggatggaataaaaatggcatctggtgagcaaattataaacatagtctatgatggtgaagcattaaaagatcacaaaatggatatacttttctttgctgaaagtttacaaggattaggtaacgccatttatgaagcgaacactattttaaatggtaaaagcgaattttatgttgatgttgatgcagggctaatagctgggtcttttggttttaagttatcgataaaaagaggcgcagaaagtacaaaagatgttttaaaaatcattggattaaatacagctaatcttatagttggcgagaaaacggtaatcgatgtactgcaaaaactaaaaggcagaaaagtcgatatcatagaaaaaaatagcaccactggtgatgttaagttgcttgttgatggtgaagagattgagtgctcttcagacgtagaaaaaattgtaagctcacctagcatacgtaaagctatagattcattcatacataaacctttgttacatcccggagttaatagttttgaagttagcgaaggaaaaacaaaaaaaccaaaacctgacttaaaaataaccaaagatgaggctgggaactttaaatcaccaaaaactatttttgagacagaaagaagtgaagaagatattgaaactactcttacttttgtgtcagcaaacattcagaagaaatcaggctggaatgtaataattaatgatgagccataccaagttaaaatggatgatgatgagttcattttaaaattaactcagcctgatgctcctagtattttcggtgagttatttattgtgaagatgaagaaaatcacaacttcagactctgtaagtaagagatctagttacgtcgttcaaaaggtcggaaggcaattaggcaagaaataa

SEQ ID NO: 305439 - DNA, 1113 bp, Proteus mirabilis; identical to SEQ ID NO: 11536

SEQ ID NO: 305440 - DNA, 1686 bp, Proteus mirabilis
atgaaaaaaaaagttgttttattaacactattaagctgtttttctaccagtggattaagcgcaaatgaaacaggaaatttaggctcaatcagtgaatcaaggcgtgcattgcaagatagccaacgtgaaattaatcaattaatagaacaaaatcgctatcagcaactgcaagaaaaagcggtaaatatttcacctaccccaactttaattactgagtcagaacgctgtttgcctataaaaggcgtttatattcaaggtattactttacttactgagaaggatctcaattcattatctccattaccagatcaatgtattaagagtgctgatattaatcgcctcgtgaaagaactcactcagcattatcttcaacatggttatattaccgcacgtatccaattcttacgtcctaaccaacatggcgaattaggtctgtatgctattgaagggtttgttgaacgtattgaagggggtgatcgaggtgttaacaccacactactatttcctcgaatcaaagggcaaccattaaaactcgctacactcgatcaaggcttagatcaagctaaccgtttgcaatcaaataaagtcacagtggatattcttcccggtaccgaattgggaggatctgtcattaagttgtctaatcaacgaaaatcaccttggcatctcaatatcgctagtgacaattatggacagaaaaattcaggccgctggttaatacgaacgaatgctagtttagatagcccattaggtttatctgattttgtaagcttaaatgccaatataaccacagataacccgaatacccgttttaatcgtgcttatactttgctctattcaattccttatggtggctttacttttagctcttttggtagttattcggagtaccaatttcaccaaaaattacaaaaacgtactgtcagcttatatggcgataccactcaagtaggtattagaggcgattatgcttttagccgtagccaaaaacaaattgataccttaaatattcaagtcactcataaacgtatacgcaactactttagccaaattcgtttagatctcagtagccctaaattaaccacgattgaattagggattaatcatttgcagattattccaaatggcgtattgagcactaatttgagtgttgaaaaagcggtcggctggtttggcgcagaggaaacaccctatatcgctaacggtaatggtaacgactatcgctttacaaaagttaagctatttgccaattggtatcaacgcttttctctatggcattctacatttttattcaatagttcttttttaggccaatacagccacgacacactccccggcgttgaatggctaagtttaacagacaaaaacgccattcgtggttttgatcaaagcacactttctggtgataacggtggctatttacgcaataccctctcctatccctatcgacttaaccacttttctatcacacctcgtatagggatagatatcggtcaagtaaaacaacatggtaactacaaaggatggcaaggtggttacggcctaagctccggcttaaatattcaatatcaacaagcacaactcgaccttgaagttgcaaaaggcgagttactgtatcaccaaacaaattccaataaaaccaaagatcctactcaactactggttaaattttcatacttattttga

SEQ ID NO: 305441 - DNA, 4734 bp, Proteus mirabilis
atgaaatcaaaaaactttaaactttcaccctccgggcgacttgctgcgtctttagcaataatttttgtctctcttaatgcttatggcaatggcatcgtgcccgatgcaggccatcaagggccggatgtctctgctgttaatggtggtacgcaagtgattaatatagtcacgccaaataacgaagggatttctcataaccaataccaagacttcaatgttggcaagcctggggctgtatttaataacgcattagaagcgggacaatctcaacttgcgggtcatttaaacgctaacagcaatttaaatggtcaagctgcctctttaattttgaatgaagttgttagccgcaacccatcattcttattaggtcagcaagaggtctttggtatcgctgctgaatatgtgctttctaacccaaatggtatcacatgtgatggttgtggttttataaataccagccgctcttcattagttgttggtaatccgctctttgaaaatggtcagctaaaaggctatagcaccctcaacaacacaaatttactatcgcttggtaaaaatggcttaaatacaacagggttgttagacttaattgctcctcgtattgatagtagagggaaaatcactgctgctgaaatttcagcctttactggacaaaacaccttctcacaacattttgatattctctcttcacaaaaacccgtttcagcattagatagctatttctttggtagtatgcaatcgggtcgtatccgcattattaatacggctgaaggtagtggagttaaattagcaggtaaatttaccgcagataacgacctaagtgttaaagccgataatattcaaacagatagtcaagtccgttatgacagttacgataaagatggcagtgaaaattaccaaaactatcgtggcgggatcacggttaataatagtggctctagtcaaacactcactaaaaccgaattaaaaggtaaaaacatcacattagtagcgagtagccataatcaaatcaaagcctctgatttaatgggggatgatatcactttacaaggtgctgatttaactatcgatggtaaacagctacagcaaaaagagaccgatattgataatcgctggttctactcgtggaaatacgatgtgactaaagagaaagaacaaatacagcaaattggtagccaaattgatgctaaaaataatgcgacattaaccgcaactaaaggagatgttaccttagacgcggctaaaattaatgcggggaataaccttgcaattaatgccaataaagatatccatatcaatggattagttgagaaagaaagtcgtagtgaaaatggcaataaacgtaatcatacttctcgcttagaaagtggtagttggagtaacagccaccaaactgagacgttgaaagccagtgaattaacggcaggtaaagatcttggtttagatgctcaaggctcaataacggcgcaaggtgctaaactgcatgcgaatgaaaatgtgctggtcaatgccaaagataacattaatttaaacgtccaaaaaaccaataatgataaaacagtcaccgataatcatgttatgtggggaggtattggtggtggtcagaataaaaataataataatcaacaacaagttagtcatgcaacacaattaaccgctgatggtcaattgctccttgctgcagataacaatgtcaacattaccggtagccaagtaaaaggcaaccaaggtgcttttgttaaaaccacacaaggtgatgtcgtcattgataatgcgctgagtgaaaccatcagtaaaatcgatgaacgcacaggaaccgcgtttaatatcactaaaagttcacataaaaatgaaactaataaacaaacatctacaggtagtgaactcatttccgatgcacaattgaccgttgtcagtggcaatgatgttaatgtcattggtagtttgatcaaaagcgctgataaattaggtattcattctttaggtgatatcaacgttaaatcagcacaacaagtcactaagattgatgatgaaaaaacatcattagccattactgggcacgccaaagaagttgaagacaagcaatatagtgcgggctttcatatcactcataccaccaataaaaatactagcactgaaacagaacaagctaactcaaccattagtggcgccaatgttgatctgcaagcgaataaaaatgtgacttttgcgggatctgatctaaagactaccgcagggaatgcctctattacgggtgataatgttgcctttgttagtacggaaaataaaaaacaagcggacaacacagataccactatttcagggggttttagctacacaggaggtgtagataaagtcggttctaaagccgattttcaatatgacaaacaacatacacaaacagaggtaacaaaaaatagaggcagccaaacagaggttgcaggtgatttgactattaccgcgaacaaagatttgcttcacgaaggggcttctcaccatgttgaggggcgttatcaagagtctggtgaaaatattcagcatcttgccgtcaatgatagtgaaacatctaaaactgacagcttaaatgttggtatcgatgttggcgttaatcttgattatagcggtgtaacgaagccagttaagaaagcaatcgaagatggtgttaacacaaccaaaccgggtaacaataccgatttaactaaaaaagttacagcaagagatgcaattgctaatttagctaaccttagcaatttagagacccccaatgtcggtgttgaagttggtattaaaggtggtggtagtcagaaatcacaaaccgatagccaagccgtttcaacctctatcaatgcaggaaaaatcaacattgatagtaataataagttacatgatcaaggtactcactatcaatcaacccaagaaggtatttctctcacagcaaacacccacacaagtgaggtcgcgcaagataaacatcaaacgacattccatgaaacaaaaggcggtggacaagttggtgtcagtactaaaacgggcagtgatattaccgttgctattaaaggtgaaggccaaacaactgataacgccttaatggaaacaaaggctaaaggtagccaatttacctcaaatggcgatatttcgattaatgtaggtgaagatgcccattatgaaggtgctcaatttgatgcacaaaagggcaaaacagttatcaatgcggggggtgatctcactcttgcacaggcgactgatactcatagcgaaagtcaatctaatgttaatggtagtgcaaatctgaaagtgggcaccacgccagagagtaaagactatggtggaggtttcaatgcagggaccactcatcacagcaaagagcagactaccgcaaaagtgggtgctatcactgactctcaaggtattgaattaaacgctgggcataacctgactttacaaggtactcatttaagtagcgaacaagatattgcattaaatgcaactaataaagtcgacctacaatcagcgagctctgagcgtactgaaaaaggcaataatttatctggaggagtacaagcaggctttggtaaaaaaatgaccgatgatgcttcatctgtgaatggtttaggtagtgcccaatttgctattggtaaacaagatgagaaaagcgtatctcgagaaggaggaacgattaataactcaggaaacttaacgattaatggcaatagcgtccatcttcaaggagcacaagttaatagtaaagatactcagttaacatcacaatccggtgatatcgagatcacatctgcgcagtctactgattataaaaacaattggggaacagatattggctttaatggcaaaaaaaccagtaccaccccaaaagaagttacagaggagaaacctgctacctctattcataacatagggggtaaattactggttaacgtggaagatcaacaaaaaactagccaccaaaatgcaaccttagaaacaggtacattaacgattaatagtaataaagatctgacactatctggtgctaatgtgactgctgatagcgttacgggtaatgtcggtggttcactcaatattgctagccaaaaagagagtgatcgccatgtcactgttggcgtcaatgttggctataaccacaccaatgatcctaaatcaagccaagtgaataaaacggctaaagccggagggtcattattagagaaaactatcaaagatacgattgattcaggaattaaatcatcaaccgatgctatctctgataaatacaattccctctcttcaactattgcagataaaacaggtatcagtgatgaaactaaagccaaaattgatcaaggttttggtaaagttggtaatggtattaagaatatcgtaacaggtgctgagggtcatactgctaatgcagatatcaaagtcactcatgtagataatgatgctgtcactaaaaccacctccttaactagcaacaacaacctatcattaaatgtgaatggctcgacaaaactcaccggagcagaaattgcgagtaaacaaggccaagttgatttagggggaagtagcgttaaattagaaaatattgaaggacatcattatgaagccggcgctgatcttgatctgaaatcctctgtggtggatttagcaaaacaactggtaggtggagatatttcttttaaatcccccgttaaaacgaatgaaaccgtcaatacaaaagcatctatttctgaaaaatag

SEQ ID NO: 305442 - DNA, 2634 bp, Proteus mirabilis
ttgttaaagaaaacaatcaaatggacagggatgatactactgggtgtcggcgcagttagcacgaccttgtggctcaccattccacgttggttacctgttgtggctaaaagctatttacctgaaggtgtttcactctctttaacacaaccaaggttacaacaatggggtgtttttattgatgatatcgcattaaaaagtgatagctgtaccttggctaatgtgcagcaatttacgtttaactatcaaaaacagcaaattgatagcctatcatttaatagtcaacaacttgctattaacgaagggtgtttttcacaattatcttttgcagataaaaaagagaccgcaacagttcctctcgatattcatgcgttattagctactattcctcacttatcggttgatatcaatcatgtttctttaatggataatcagcgctataacggccattttcagcttaaaagtgatacaaatgggcgattaatcagctatcagggagataatacgcagatacaagcgctgatccgtgataatcaatggttagatattaaacaattaaagattaatttacctgacgataatcagatagagctggcggctgaaatagcgttaccccttaatgttgattcattaccagaaaatggttctatcagcacaacattgttaacatcccattatgcttacccattagtctttattgctcaatggcaagggaatagcggtaccatttctattgctgaacaaggtggagggcaagcgttagctgtgttgccttggaatgtaactgcagaaaatatcacgatagaaaaagggcgttgggaatggtttgggcttgatcaacccttacgtggtggtgtgaatatcaacattgcccagtggcagcaaggattaacggggttacgcttaactgcgcgcttaaatgttatgacgcaagggcatgcagggaaagggaatttagtgatgacgatacctgaaacggcgattaactggttagatgctgatatacctattcaattgacaggcattgtaaataaagatctcatgcaagccagtgcacaacttcccgttaaagtgactggtatgttgacagatcctactatcgaatttcagcccggttcactattacgctttaaagggcaactaacagaaacgctgacggtaaaagatgctcgtttaccactggctggctcaacattatcttccaaaggatttaatggtcacctaaatgcgattgtgttagctgaagatactatttggggagattatcgggtccattttgctggacgttcgaccgatttcttacctgatcagggcaattggcaatggcgttattggggagagggcaatttattgccattaaaagcgcgttgggatatcgctggaactggctcttgggtagataacatggtgagttttgagacattaaataccggatttgatgttttaacttatcagcataccagtatgttagcacccagattgacgctcttaacgccatttcgttggttaagagacgataaaaacccattatttgaaggaaaattgaagttaaccagtcaacgaatcgattttcctgcggggggattcttagatagagctgactttattgccagtgtaaaaggtcaatctccttttcgttttaatatgaaaggcgagctcaatgccaagccaaatattggaccgataacgattaatacacgttgggatggtgaaaggctaagagggcagatgcgttggcctgcacaaccaatcaatgcctttcaatctttattgccagaaaaattaggcatcacattagataatggcgaattttatacacaagctgacttttctattgcccctcaacaaggtttagttgctggtggacatttagtagttaagcaaggcagcatgtggctaaaagatggcgtattagaaggactcgattttattttaccttggcgtttaaacggtgatgaatggcaactaggtgtaaagcagccagtgcaattacggattaagcgcgtcaataatttatttgaaatgacagacattaccgccgatctgcaaggattttaccctattacagaagcaaaacctttagtcttatctaatgtcaaggttgctatgcttgatggcactatttctatggctaaattagcattaccacagcatgaagcggcgattatctcattagacaatctagagttaagtcggcttttcactttattgaaggtgacccaatttgccgcatcaggtaaagtcagtggcgaattgcctttctttatcaataataatcagtggatagtgaaagatgggtggctggctaattcatcgtacttaaccctcaggcttgataaagattttgttgactctattgatgatagcaatatgacagccggtgtcgctatggcatggttacgatatttagagattagtcgctcttggacgcgggttaatttaagcaacctaggtgaattagtgcttgaagcggaaatccaagggaaaaatccattagaagacaaacggcgacaagtaaatcttaattatcgccatcaagaaaatatttttcagttatggcgcagcttgcgatttggttcgcaattggaagagtggttagaaaagagcctatccgatttagggagtgagtcagaatga

SEQ ID NO: 305443 - DNA, 999 bp, Proteus mirabilis
atgaaaattgtttcctatagtactaaacattatgaccgcaaacacatggaatgggtcaatcagcataatggatatcattatgatatcgaatattttgactttaatttgactgaacaaacagcaaaaaatgccgtcggcgcagatgcagtctgtatctttgttaatgatgatgctaatcgtgcggtattacaagagcttgccagtctcaacatccatatccttgcactgcgttgtgcggggtttaataatgttgaccttaaggcagcagccgaattagggatcaccgtagtgcgtgtgccggcttattccccagaagcgattgctgagcatactgttgggatgatgctctcgttaaatcgtcgtattcacagagcctaccagcgtacccgtgatgcaaacttttccttagaaggcttaactggctttaatatgcataatcgcactgcagggattatcggtacggggaaaattggtctagcgactttacgcatactaaaaggctttggtatgaagctattggcctatgatccttatccaaaccaagctgtattagatttgggtgcggaatatgttgacttagcgactctttacgcaaattcacatgttatttcgttgcattgcccattaaccgcagaaaatcatcatttattaaatgaaagtgctttttcgcaaatgaaagatggcgtaatgatcatcaacactagccgtggggccttaattgattctgcagctgccattaatgccttaaaacaaggtaaaattggcgcattaggcatggatgtctacgaaaatgagcgcgatttattttttgaagataaatcaaatgatgttattcaagatgacgtgttccgtcgcctttcctcttgccataacgtattgtttaccgggcaccaagcattcttaactgaagaagcattaattagtattagtgaaacgacattgcacaatattaaagaggttgctgcaggtataacatcacctaacgaagtgaaagcctaa

SEQ ID NO: 305444 - DNA, 1515 bp, Proteus mirabilis
atgctggctattttatttgtacttattatgagcattatttactttagttatgatgcttcaacacgctcttatcataactttgtttcatcaaataacttaagtcagcaaatgttgctgatgggaaaagcgcgttatcaaatggcggtgatcagagcgaatattaatggattggatgggcagttaagagtgaatgaaaaaccttctgctaaataccttcatcaaactcaagaatatataaaaatcacccgtgaagagatccaccgttgggcggatgctgaaaagttaaccatggaagggcgtcaggttgctgatgatatgacgaaacgctttgatgagcttttagatatatttaccgatgccttagctaaattacgtaaaggacaattgactacgcactctgctagtcaaaaaatggatgaactcaacgagatcaccatgacatattatgcagtcgccaatggtattgagaataattatattgatattgcgaaaacctcacaacagcgcattatgctaatggcgttagtcacagcgattattgtcattatgctctttatcattatcttacgttggttctcccatagctttatcggcaatattaaagtgcttattaatatttttagtaaaatgagccaaggcgatttaagtatgcgagtagaaaatcacggtaacaatgaatttggtaagctatttaatgaaatgaataaaatgaaagtttcattaagtcaaatgattgcttcggtaaaaaatgcagtaaacaccattagcgtcagtgcaagtgaaatagcaacaggtaatactgacctctcctcacgtactgaagagcaggctagtgcgctacaacaaactgttgcaagcatggagcaaatcaaaacgacggttgaaaaaaatgccgataactcacgccaagctagccagttggcattaagagcgacaacgtcagcacaaaacggcgaaaaggtgatggataatgttatcgaaaccatgtcatcgatttctgaaagtgcaaaaaagatctcagatattaatgacatcattaacagtattgccaatcaaaccaatattctctcattgaatgcagcggttgaagcggctagagcgggtgaacaaggtcgcggatttaccgttgttgcagccgaagtgcgtaacttagctagtcgtagtgcagaggcagccaaagagatcaatgaacttattacccattcggtaaataaagtacaggttggatcacaacaagtgagcgaagcagggcgctccatgtcggaaattgtgaccaccattagtcaagttaatgattttatgcaacagattgccttagcctctaatgaacaaagtatggggattaatcaaattgctatggccgtaagtgagatggataccgtgactcaacaaaatgcggcacttgtggaagagtctgccactattactgccaatatggatgacgaagctcatcagcttgccaacttagtctctcaatttaaagtggatgagaaagaaaatactaggcatgcataa

SEQ ID NO: 305445 - DNA, 3057 bp, Proteus mirabilis
atgatcccacgtatatcgcaagcaccgcaagtcagtgaactcacaaccgaatttttaaatacactccgacaaaatggttttacaggtgatatatcgagcacttatgccgatagactcactatggcaacagataacagtatttatcagttgctaccacaggcggttatttttcctcgttccacagcggatgtgactattgtagcacgtttagtggatgaacctcgttttcattccctctctttgacaccaagaggtggcggaaccggcactaatggtcaagcgttaaccgaggggatcgtggtggatttatctcgttatatgaaacgtattattgagataaacccagaacagcgatgggtaaaggtagaagccggtgtgataaaagatgaacttaatctgtttttaaaaccctatggcttcttttttgcgccagaactgtctaccagtaatcgtgcgacattagggggaatgatcaataccgatgcctcagggcaaggctctatggtatatggcaaaacctccgatcatgtattaggcgtcagagccgttttactaggcggagaattgcttgaaacacgcgcgatggacagcgctttagctgaaactattgcgaaagaagattctgctgttggtcggatatatcaaacggtattatcccgttgcaaagcacaacgtcagcttattctcgaaaaattccctaaactgaatcgctttttaacgggctatgatttacgccatgtgtttagcgatgacatgaagcattttgatcttacgcgtattctaaccggctcagaagggactttggcctttattaccgaggcaacactcgatattacccccattccaaagcagcgcagtttagtgaatgtgaagtatgactcatttgattccgcattgcgtaacgcgccgtttttagtaaaagcaaaggcgctttctgttgaaactgttgactccaaagtattaaaccttgctcgagaagatattgtctggcattccgttaatgcattgattacggatgtgcccgataaagatatgcaagggctaaatattgttgagtttgccggtgatgataaaacactgattgcctcacaagtggaggatttatgtcagcgcttagataagctgatgaataatggcgaagggggcgttatcggttatcaggtttgtgataacctcgccgatattaaccgtatttatgccatgcgtaaaaaagcagtagggctattaggtaatgctaaagggcatgctaaacccattccttttgttgaagatacttgtgtgccaccagagcatttagcggattatattactgaatttagggcattacttgatagttatcagctcaattacggtatgtttggtcatgttgatgctggcgtattgcatgtgagacctgctttagatatgtgtgatccgcaacaagaacaactcatgaaaaccatttctgatgaaattgttgcattaacggcgaaatatggtggcttactatggggggagcatggaaaaggctttagagcgcaatatagtccagaattctttggcgaaaccctttatcacgaattacgtcaaataaaaacggtgttcgatcctcgaaatagacttaacccagggaaaatatgtcctcctctcgaggttgaggcgccaatgaaacaggtcgatgctattaaacgcggcacatttgatcgcaccattcctgtatcggttcgcgaagattttcgcggtgcgttagagtgtaatggtaatggattatgttttaactttgatgttaaaagtccaatgtgtccttctatgaaaataactgggcaacgtattcattcacctaaaggcagagcgacattagtcagagagtggttacgtctacttacagagcaaggtgtaagccctcagcagttagaaacaagtcttacaaataacaaacctagcttacggggattgattgaaaaaacacgcaatacatggaaagctaaacgtggagaatatgatttctctcatgaggtaaaaatagcaatgaatggttgtttagcctgtaaagcgtgctctacacaatgcccgattaaaattgacgtgccatcatttagagccaaatttactcagttatatcatcaacgctatctacgtccgctaaaagatcatattgtggcaaatgtcgaactcaccacaccgttaatggcaaaagtaccaagtctgtttaatttctttattaagcaaccattggtgcaatcgttgagtaaacgtactattggtatgatagatctgcctctattgtcatctccgacattaaagcagcagttagctggacatagcgcgttaacgatgaccttggaagagttagagcagttatcagaaaagcaacgaagccattatgttatcgtggtacaagatccatttaccagttattacgatgctaaagtagttgctgactttattaaattgattgaaaaaattggttttaaacctgtgctattgcctttttcacctaacggaaaagcacagcatattaagggatttttacagcaatttagtaaaactgcacaaaaaacagcaacgatgcttaatcgagttgcacagttgtccattccaatggtaggagtcgaccccgctttagtcctttgctaccgcgatgaatatcgggagatattaggggataaacgcggtaactttaaggttcaactggttcatgagtggctaaatcagttagtcagtgagccgattgagatctgcgaagatgctgaaaaatggtatctttttagtcattgtactgagtcaacggcattaccgcaaagtatgcaacagtggcaagcgatattccaacgttatggtcaaccacttgaagtggtaactacggggtgctgtggtatggcgggcacttatgggcatgaagtgaataactataaaaattcattgggaatttatcaactgtcatggggaaatgcattgaaaacactccctacagcacgttgcttgtgtaccggatattcttgtcgtagccaagtaaaacgtattgataatattgagttaaaacatccactacaggcgcttttggagattatgcaatga

SEQ ID NO: 305446 - DNA, 858 bp, Proteus mirabilis
atgtctgagattgtgtatttaaataaccaatttgtacctaaagaacaagctaatatctctgtttttgatcgaggtttcttatttgctgatgccgtttatgaagttaccgccgttattaacggacaattaattgattttgaagggcattttcaacgtttacagcgctcttgcaaagcattatcaatgcctttttctttaaccaaagagcaattaaaagagatccacgggcaattgatagataagaaccatctgcatgaaggacttatctatttacaagtcactcgtggcgccgattcatcacgtttttttgatttcccgtcttcatcagtcgctcctacattagtgctatttgttcaacactcaacggtggtaaatcatcctaatgcaagcaaaggaatttctgtcgtaagtgttgaggatattcgttggcaacgctgtgatattaaaacggtggcattacttgctgcatgtctagctaaacatcatgcgcatcagcaaggtgctgatgatgctatttttatcaaagagagttatatcaccgaagggagttcaagcaatttctttattgttaatcagcaagatgaaattatcactcgcccattaagccaagatattttaccggggatcacgcgacaagcgattattcagttagccaaagagcaaaaactcaccatcattgagcgtttatttacactcgaagaagcgaaacaagccaaagaggcttttattagttcagcgactaccttaatttggccggtgatctccattgataatgaaaaaataaatcaaggtaaggtaggggcgttatcacaacgcttaagagagatttatcttgagaaagccggtgtgaaaccatag

SEQ ID NO: 305447 - DNA, 561 bp, Proteus mirabilis
atgtcatcaccttcggcacccattgaaattatttctcaatctattgctagagaaagaaaaaaagcaggtctttcacttgcagaaatcgcaaggcgagcggggatcgcaaagtcaacgttatcccaattagaagcgggacaaggtaatccaagtatcgaaactttatgggctatttgcgtcgcactcaatattccgttttcacaactgatttcctcacctaaaccagaagttaaagtgatccgcaaaggtgatgggtttaaaattagtgcagaaaaggcctattaccatgcctttttattgtcatcttgccccaatggcgcgaagcgcgatatttatacggttattgctcaaccgggtaaagatagagtgtcagatcctcatagtaaaaatgtcacagaacatattcttataattagcggtcgtgccattgtcggtactttagataatcaacaagagttatctcccggtgactatatttgttaccctggtgacgttactcatgtgctacgtgcattagagccagatactaccgctgtcatgatcattgaacatcacaattag

SEQ ID NO: 305448 - DNA, 663 bp, Proteus mirabilis; identical to SEQ ID NO: 297388

SEQ ID NO: 305449 - DNA, 330 bp, Proteus mirabilis; identical to SEQ ID NO: 297389

SEQ ID NO: 305450 - DNA, 1404 bp, Proteus mirabilis
atgaagatccgctctttctttatttatactatctttctacaaacgatatctatcgtgatgctatggggcgtttggttagcttggatagaatttgattatcttgctgactttgaaactatctacaataagcaacaagaaattattgctgaaggatttgccaatacactcgaaacggtttcctctcaacccgagacagtaaaacagatagctcaccatttacaaaacatgtatatcgataccatgcttaatggtgaggatgatgatttacactatttaccttggtttattgtcttaaataaagataatgatctgatttataccaatagaccggaactttctctgcctaaacgggtactgtcgcttgcctctgaaaaaatctctgtggctggggagaaatggtatttatcttatagttggggaaaacaacataaaattaaagtttttattggtgaatccgtcgaagatagaggacatgtcattggtaaccctatttccggtacttttgtgcccttcctatttattttagcgacggtgatcttggctatcttaattactgcttattttagtttgcgccctttaagacaagccgcagagctgatttctaaccgaaaacctcgcaatttaacgccaattaatgtcggacaacaatttaaagagatccgccctatctttaaagagcttaaccaattaatggcaagaatagatgcggctaatattagagaaaaacaatttatggctgatgcggctcatgagctaagaaccccgattgccgcagtgattgcccaattgcatattctctctttagtcgatgaaaagcaggagcgagaagaaattattgaagatatgaaacaatctctggatagagccgccgcactttcccaccagcttattgatttagcaagattagagtgtgacgatttccctataaaaatagaatcctttgatgtttataatattattggtaatgctattgctcagcgcgtgccttatgccttaacaaaaaatattgagctatctttaaatgaaggtatgtcacttaaaatagaaacagataaacaagcactactgtctatttttaataacttattggataatgcaatcaaatattgccccaataatagtcaagtcgaagtgactattgaacataaagatacccatcatctcaatattattctgcgtgataatggaccaggaattgcacctgagtatattagctcactattttcccgtttttatcgtgttccgggatcacaagggacgggcagtggtttaggcttatctattgcacaaaatctcgctgaaaaaattcaagcaaccatttccattactgaagggctacacaataaaggtattggttttattattaccttaccgttaaaaattaaaccactagataatgagtaa

SEQ ID NO: 305451 - DNA, 666 bp, Proteus mirabilis
atgaatattttattagttgaagacgatctgcaattgggaaaggcgctctgtcgtggtctagaaattgccggttttcagccctgctgggtaagattgcttgcggatgcacgtgttcaattaaaccaaaaagcctttgatttaatgttgcttgatctaggtcttcctgatggtgatggtcaagatgaacttatcgcactaagaaaaagtggtgaaaaaatacccattattattttgacggctcgtactcaaatagataacttagtacaaacattagattcaggtgccgacgatttcttaccaaaaccttttgctatgcctgaattaatttctcgtgtaaaagccgtaagtcgccgtatggccggtttctcttcacagatttggtctattggtgatttacagcttaatccctcgaatcatcaagtcactttaaatggtgaactattgttattatcaggtaaagagtaccagctattatatgagctgatgcgcaatacagataatgtagtacgtaaatctgatttagaacaacgcttatttggcttagatgacaaaattgaaagtaactcacttgaagttcatatgcacaacttacgccgtaaaataggcaaagagcgtattattacggttcgcggtatcggttatctcttaaaaaaagaagtgaactaa

SEQ ID NO: 305452 - DNA, 621 bp, Proteus mirabilis
atgattatcggtcaacaaaaagggcgagacactaaagagaaagtaaaaagaaactttggtatgccatcaccagaaggttatcggaaagcattacgcctgatgaaaatggctgaacgcttccatttaccagtgattatttttattgactccgcgggtgcttatccgggggttggtgctgaagagcgggggcaatcagaagccatagcacgaaatattcttgaaatgtcccgattaaaaacaccgataatttgtacaataacaggggaaggtttttctggtggtgcattagcaataggtgtgggggatcgagtaaatatgttgcaatatagtacttatgctgccatatcgcccgaaggctgtgcctctattttatggaaaaatgctgataaagcacctattgccgcccaaaccatgggaatgacggcacctaaattacaggcattgggtattatagactcaattattcctgaaccattgggaggcgcacatcgccactaccagcaagcggctgaattcgtaaaaaaacagctcctcgcagatttaacagaattgaatagttattctaaagaagaactgcttgagaaacgttatcaaaaattaatgtcctatggttattgttaa

SEQ ID NO: 305453 - DNA, 345 bp, Proteus mirabilis
  misc_feature (332)..(341): n is a, c, g, or t
atgtctattattcatcttgaatttgaaaagcctattgttgaattagacgagaaaatagatgcattacttgcattcaaacagtctcaagatgaaacaacggcagttgatatagacgaagaaatcgccaaacttcgccaaaaaagcctttcattaacacgctctatattttctgatttaggggattgggagatagtacagttagcacgtcatcctatgcgcccttatacattagattatatcaaagctatttttactgatttccaagagttggccggcgatcgtgcttatgctgatgataaagcgattgttgcagggttagcgcgtttagatannnnnnnnnnatag

SEQ ID NO: 305454 - DNA, 2589 bp, Proteus mirabilis
atgctgaccgagctggcgatgcaaaccgacaaaggcatcgtgctggccagcgccttgatcgggcacctgcggcggcagtcggtcattctgcccgccctcaacgccgtcgagcgggcgagtgccgaggcgatcacccgtgctaaccggcgcatctacgacgccttggccgaaccactggcggacgcgcatcgccgccgcctcgacgatctgctcaagcgccgggacaacggcaagacgacctggttggcttggttgcgccagtctccggccaagccaaattcgcggcatatgctggaacacatcgaacgcctcaaggcatggcaggcactcgatctgcctaccggcatcgagcggctggttcaccagaaccgcctgctcaagattgcccgcgagggcggccagatgacacccgccgacctggccaaattcgagccgcaacggcgctacgccactctcgtggcgctggccaccgagggcatggccaccgtcaccgacgaaatcatcgacctgcacgaccgcatcctgggtaagctgtttaacgctgccaagaataagcatcagcagcagttccaggcgtcaggcaaggccatcaacgccaaggtacgtctgtacgggcgcatcggtcaggcgctgatcgacgccaagcaatcaggccgcgatgcgtttgccgccatcgaggccgtcatgtcctgggattcctttgccgagagcgtcaccgaggcgcagaagctcgcgcaacccgatgacttcgatttcctgcatcgcatcggcgagagctacgccaccctgcgccgctatgcaccggaattccttgccgtgctcaagctgcgggccgcgcccgccgccaaaaacgtgcttgatgccattgaggtgctgcgcggcatgaacaccgacaacgcccgcaagctgccagccgatgcaccgaccggcttcatcaagccgcgctggcagaaactggtgatgaccgacgccggcatcgaccggcgctactacgaactgtgcgcgctgtccgagttgaagaactccctgcgctcgggcgacatctgggtgcagggttcacgccagttcaaggacttcgaggactacctggtaccgcccgagaagttcaccagcctcaagcagtccagcgaattgccgctggccgtggccaccgactgcgaacaatatctgcatgagcggctgacgctgctggaagcacaacttgccaccgtcaaccgcatggcggcagccaacgacctgccggatgccatcatcaccgagtcgggcttgaagatcacgccgctggatgcggcggtgcccgacaccgcgcaggcgctgatagaccagacagccatggtcctgccgcacgtcaagatcaccgaactgctgctcgaagtcgatgagtggacgggcttcacccggcacttcacgcacttgaaatcgggcgatctggccaaggacaagaacctgttgttgaccacgatcctggccgacgcgatcaacctgggcctgaccaagatggccgagtcctgccccggcacgacctacgcgaagctcgcttggctgcaagcctggcatacccgcgacgaaacgtactcgacagcgttggctgaactggtcaacgctcagtttcggcatccctttgccgggcactggggcgatggcaccacatcatcatcggacggacagaatttccgaaccgctagcaaggcaaagagcacggggcacatcaacccaaaatatggcagcagcccaggacggactttctacacccacatctccgaccaatacgcgccattccacaccaaggtggtcaatgtcggcctgcgcgactcaacctacgtgctcgacggcctgctgtaccacgaatccgacctgcggatcgaggagcactacaccgacacggcgggcttcaccgatcacgtcttcgccctgatgcacctcttgggcttccgcttcgcgccgcgcatccgcgacctgggcgacaccaagctctacatcccgaagggcgatgccgcctatgacgcgctcaagccgatgatcggcggcacgctcaacatcaagcacgtccgcgcccattgggacgaaatcctgcggctggccacctcgatcaagcagggcacggtgacggcctcgctgatgctcaggaaactcggcagctacccgcgccagaacggcttggccgtcgcgctgcgcgagttgggccgcatcgagcgcacgctgttcatcctcgactggctgcaaagcgtcgagctacgccgccgcgtgcatgccgggctgaacaagggcgaggcgcgcaatgcgctggcccgtgccgtgttcttcaaccgccttggtgaaatccgtgaccgcagtttcgagcagcagcgctaccgggccagcggcctcaacctggtgacggcggccatcgtgctgtggaacacggtctacctggagcgtgcggcgcatgcgttgcgcggcaatggtcatgccgtcgatgactcgctattgcagtacctgtcgccactcggctgggagcacatcaacctgaccggtgattacctatggcgcagcagcgccaagatcggcgcggggaagttcaggccgctacggcctctgcaaccggcttag

SEQ ID NO: 305455 - DNA, 198 bp, Proteus mirabilis; identical to SEQ ID NO: 296348

SEQ ID NO: 305456 - DNA, 948 bp, Proteus mirabilis
atgaataacaaagaacgctttacaaccccttatttagaatttgatagaaagcagtgggctacgttaaggaattcggtccccttaacattaacagaaacagaaattgccgaccttaaaggcattaatgaagaaatctcaattgatgatgtcattgaaatttatcttccattatcaaggttgttaaatttctatatcagttcaaatttacgtcgtcaggctgtcttagaacagtttctaggcacaaataacgccaaaattccttatatcattggtatagcgggtagcgtagcggtgggtaaaagtacgactgcccgtttacttcaagctttgctaactcgttggcctgaacatcggaaagtggatttgattaccactgatggatttttattacctaatgcggaattaaaaaaacgcggaataatgaagaaaaaagggtttcctgaatcctatgatatgcatagtcttgtctcttttgtctctgatattaaatcgggcaaaaagcaagtgactgcacctgtctattctcatttagtgtatgacattattccagacaaaaaacaggtcattgagcaacccgatattttgatccttgaaggactcaatgtattacagagtaatcaagactaccctcatgatccacataatgtttttgtatcagattatgtcgacttttccatttatgttgatgcagatgaagcattattgaaacactggtatatcagccgatttttaaaattccgtgaaggggcatttaccgatcccgaatcctatttcaataattattccaagctgagtcgcgaagaatctattgagatcgcgtcttccatttggcaagaaattaatggcttaaacctaaagcaaaatattttaccaacccgtgaaagagccagcttgattatgactaaaggtgataaccattcggttaaaagcgttagattacgtaaataa

SEQ ID NO: 305457 - DNA, 195 bp, Proteus mirabilis
atggcttttaaatataaaataacaataatcatatttttgctatcttttattttttttgtagtgtatgagttttttattcccgttaaagttatgggagtacataaagatacgtatactacctctattctggttgaggattttccgataactgattatggaaaaatactatggtggaaaaaaataaggttatcttag

SEQ ID NO: 305458 - DNA, 228 bp, Proteus mirabilis
gtgtataagagacagattattggttacgctgatgcaatgaaaaaccaagataaattagttttattacccatacctgaaggaagccccgaagaaattgcgacactagcggtattaaaaacctcaacaaaccccacacaagcacaacaattggctgattatttttctcgtcccgaaggaataaaggcttttactgattatggttttctacctgttatttcaaaaccatag

SEQ ID NO: 305459 - DNA, 996 bp, Proteus mirabilis
atggcgtcactgaaagatgttgctcgacttgcatctgtttctttgatgacagtctcaagagcgattaataaccctgagttattaaaaccagatacgttgaaacaagtccaacgtgcaatcgaagaactgaattatgtgcccgatttttcagcgcgaaaaattcgaggtcaagggactaaggtctcatcgatcggtgtgcttggtattgataccgcaacgactcctttttccgtggaaatgattttatccatcgagcgtaccgctcgtcagtttggctggagttcatttgttgtaaacctcactgaacaagaggggtatgatcaagccatttggcaactgttagctcaacgtccagatggtatcatctataccacaatgggattgcgagaaatcacggtacatgaaaagctacgtgataaaaatgtggtacttgccaactgcctagctaaagatcaaacttttccaacctatattcctgatgattatcacggacaatattttgcgataaaacacgtgattgaaaaaggttatcggcatccgttatgtttttatctacccgaagataccgttgcaggccctattcgccgtaaagcggtcgaagatgcttggcaagatgccggcttacctttgtcatcattgcgtcaatacacaatgttatttggcgatgaacattaccgtgatgtgattggattgttacaacaacactgtcgtcagcaaaaagcagattttgatattttaatctgtggtaatgatcgtatcgcatttttggcttatcaagttttactgtcgatgggattacgtattcctgagcaagtggctgtattaggctatgacaatatgataggaacgggggagttattctatccgccactcaccacagtacagttgccacattatgacttaggtaaagaagcaacattacatattattcaagagcgtaatcataataaaacagtacaagtcccctgtcagttaattgaacgagagtctctgtaa

SEQ ID NO: 305460 - DNA, 1044 bp, Proteus mirabilis
gtggtggtggatttagatttatctaaactcaatgaaaacacctattatccgattattttgccattagtaacttctcgacgttatgcctttaaggtttttaggacattagggcaatatagagacaataaaccgagctatgcgactcacaataccaaaggttttgccatgattgtggaatggcaagtgagtggttctggatggggaacccagtctgaaaaccgcatcattgataattttgattggcgatggacaaatcaatcccctgtgatggggccagctcaattaacgaatggttctgtggaatatatctatttgcgaggaggtgctaaatatcagctcactaagcataaaagtgttaaccatcaaattatcacccgcacttataccaataacaaacaatcggtggcaccaaaaggatttgtggcgaatgaagtacctaagtccagcgaacagaaagccaatgcaacggcgaatgcggtaaaccaacttgaaactaaggtgactgaggtctcaggtaaagtgacctctaccgcccagcaagtcactcgccttgaaagccaagtgggtacaagttcagccaaaatcgaacaaacgtcgaaagtggtcaccgacataaatggcaaaatttccgcatcatggacaatgaaagttcagcaagatagcaaagggaataaagtcattacgggcattggcttagggtttaatgcacaaggaaatagccaatttctggtcaatgcccaaaactttgcagtgatatcgtcattaaatggcaaagtggtgacaccgtttatcgtgaagaatggacaggtggttgttaatgaagcttttattggtgatgcaactattaccagtgcaaaaatagctaatgtattgcaatcaaccaatttcagccatgcaaacaaggtgggctatcaacttaatatgcgcactggtgaagaaattaaatatgggaataacgctcaggggtactggattgaaacaaacatattaaaacgtttgtttgataaaaaaggcacaatgcgtatcagaatggggatatggtaa

SEQ ID NO: 305461 - DNA, 363 bp, Proteus mirabilis; identical to SEQ ID NO: 301378

SEQ ID NO: 305462 - DNA, 615 bp, Proteus mirabilis; identical to SEQ ID NO: 297564

SEQ ID NO: 305463 - DNA, 261 bp, Proteus mirabilis; identical to SEQ ID NO: 296448

SEQ ID NO: 305464 - DNA, 444 bp, Proteus mirabilis
atgcgttttttaaaattaccttttatttattggctgctactcaattgcatcccatttattggctttgaactacactcaggcaatataaaacccagtgtttttttctatttaggtgccctaacgatcatcacttcagggatttggctatttttctgcctttacttttttatcaaacataatacatcccctaaccctcaccagacaccgcgccagttagtcaccacaggtccatataaaataagtagaaatcctatgtatcttggctttctcgatattagtattgggctgttttttatttttggtaactggggatttttaggggctgcgcttgccttctactttattaccgatcgctatactattgtgcaagaagagaaaatattaagtgagcggtttccacaagcgtggcgacaatattgccgccacgttcgacgctggatataa

SEQ ID NO: 305465 - DNA, 1008 bp, Proteus mirabilis
atgaaaatattagtaacaggtgcagcaggatttattggctaccatttaagccagcgtttgatagaaatgggttatcatgttgtcgggatagataatctcaatgattattatgatgtgcgcttaaaagaagcacgattagctaaacttaatcagttggataacttccaatttgataaaattgatattacagattcagtgagtattgcgcaattatttgctgatcaccgttttgatcgagttattcacttggcggctcagcctggcgttcgttattcaattgaaaacccaatggcatatatcgatgctaatattgtaggccatattaatatattagaaggttgtcgccatcataacgttgggcatttgatttattcgtcatcaagctcggtatatggtttaaatcaaaagcaacctttctctacagaagatagtgttgatcatccggtatcactttatgctgcgacgaaaaaagccaacgaattaatgtctcatagctattctcatttatatcagctacccacaacaggactgcgattttttaccgtatatggtccttgggggcgtcctgatatggctctatttaaatttactaaagctatgttagcgggtgagcctatcgatgtttataatggcggaaatatgacccgtgatttcacttatgtcgatgatattgtcagttctgtggtacgtttaattaatattattcctgaacccaacccaaattggaccgtagagcagggggaaacttcatcaagttctgcaccttataaaatatataatgtgggtaatgggcaacctacaaagttaatggattttattacagcaatagaaaaatcactcaatattaaagctaaattgaacttaatgccgatgcaagatggtgatgtactttcaacctgtgctgattgtagcgatttagctcagacaacaggtttttcacccaacactgcagtagagtatggtgtgaagcagtttgtggattggtatgtagattattaccagcaataa

SEQ ID NO: 305466 - DNA, 906 bp, Proteus mirabilis
atgtcatcagtggtgcgtaaagtaagaaaagcggtgatccctgttgcagggctaggaacaagaatgttgcctgccaccaaagctatcccaaaagagatgctacctgttgttgataaacctttaattcaatatgttgttaatgaatgtatagcagctggcatcaatgaaattgtgctagttacacactcttcaaaaaattctattgaaaaccattttgataccagttttgaattagaagctattttagaaaaacgagttaagcgtcagttgttggaagaagtacaaggtatttgtccaagtcacgttactattatgcaaactcgccaaggaatagcaaaaggattaggccatgccattttatgtgcaaaacctttggtgggtgatgagcctttcgctgttatcttgccggatgttattttagaccgatatagtgctgatctgactaaggttaatttaaaagagatgctttctcattttgaacaatctggcgcaagtcaaattttagtagagcctgttcctgaagaggaagtatctaactacgggattgttgactgcatgggagaacatttacagcctggcgacagtaaacccattactcgtgtggtagaaaaaccgaagaaagaagaagcaccttcaaatttatctattgttggtcgttatgtgttgtctgaaaacatttggcctttattagccaaaacggcaccaggagcaggggatgaaattcaattaactgacgcgattgcaatgttaattgaaaaagagcctgtagaagcttatcacctacaagggaaaagccacgattgtggtaataaattaggttatatgaaagcttttgttgaatatggtttacagcacgaagagtttggcgaagagttcacgaaatggataaaatcactgcaagcttaa

SEQ ID NO: 305467 - DNA, 252 bp, Proteus mirabilis
atggttacattaagcaaaaaagatggcgctattatacctttcggtgcgatggttgttgatgaagagcgttccgtaagtggtattgttggcgataatgggaatgtttttatctctggtttagcacctgttggtaggctaaaagcaaaatggggaaaaatggctgatcaacaatgtatatttgattaccaaattaatgagaagtcatcaaaagaaaaaggtatctattttatttcttccacatgccaatattaa

SEQ ID NO: 305468 - DNA, 669 bp, Proteus mirabilis; identical to SEQ ID NO: 297912

SEQ ID NO: 305469 - DNA, 1053 bp, Proteus mirabilis; identical to SEQ ID NO: 296003

SEQ ID NO: 305470 - DNA, 471 bp, Proteus mirabilis
atgatagaaaataaccgacaccccttcgcttgcacaacacttgcgattactgacaagaaaaaacgtgtttatcatggtcggacaatggagttttcttctgatgagccaacgtctatcttagcttattatccacaaggtcatacttttcagcaaaatgcccctgatggaacccccggattaaagtacagcgttaaatatccttttatggctattaccgctcctattaacttatcgggtaccaaagatgtacttgaaggtgtaaatagtcagggactctcttttagcttaaatatgctacctaactctaagttagatgatctcgatccccaatattacgcaagctctgttcctattgctgctattggtgagtgggcattaggacaatatgcgacggttaaagagttaaaagagattatcccccaaacccatttttggtcacaaaagatttttattcgtaaaagtctgatataa

SEQ ID NO: 305471 - DNA, 564 bp, Proteus mirabilis
atgattaataaagtctattatttaaaatcagatttggaaaactatagttcttttattcaaaattatcctgatggagaagaaagtataatagggagagcgatggatcagcgatggtctaaatttactgatgactatactgcaatttcattagagttaaattccaatgattttggaagaaagaattataaatttgattttagtagttttttgtcgccatttatggtttttagtgaaaatgcattagtgtccttatctgatattttgagttcaagagggcaagtattacccgttaagactgagagcaaacggaagaaatttgttggctattatccaactaattcactttcaggatgttttgacagaaaaaattctgtttatcgggaataccccaatggattaatgattgaaaagccagttctcataaaaaataacatcactgatgagtatttatttactattgacgaatatattagtcgaatctttgttacggataaatttaaacaaagagtagaagatgcaggtttaacggctttcgatttttcagtggaaatagaattatcgtaa

SEQ ID NO: 305472 - DNA, 441 bp, Proteus mirabilis
ttggcaggggggataaacttatatgcttatgcgccgaatgcgttgacatgggtagatccgtgggggcattgtgcggtcaaactttctaaaaatatggtagctgatggtacgcctagacctgccaataccgcagctcatcatattgttggtgatacatctaaaggtgcccagccagccagagatattctgaaaaaacatggtattgatgttgatgatgctagaaatggtgttttcctgccaaatagaaataatgttgatgaagcattgtcaggaataaaacataatggcagacatccaaatgattatatagaagcagtgaatgaaaggattattagggctgataaagaaggaggtaaacaaggggtaatagatacattatctgaaattcgagaaatcctatcctctgctagtagaaatgctaaatggaaaactatattatga

SEQ ID NO: 305473 - DNA, 1356 bp, Proteus mirabilis
atgtatgctcaagatggaaaattacctgatataaaacaaagggctgaaggtctatttgcttatccgcaattaaccgtacattggtatggtgatgttaaaaaagaagataaaacaagagcttatgggcgtttatcaaaatcaggtacttattctactactatcaccaatccaactttatttgaaaattatttaactgagcaactgcaacttattgcagatgcttatcatgtctcttttgaagtgacggcctcaaaacaagagataccatatccttttgtcattgatggcactggcattggttttgatcggtcaatgagcgcctctttagcaaaatattttccgactaccgatctctctaaaattggtgatgatattaccgatggtttaattgatgactgcgagcttttacctctttcacattttgatgcactacggacggatttttctttggctcgtttaaagcattataccggaactttacctgaagatgtgcaaccttatattttattcaccaattataaccgctatgtggatgagttcgttcgttgggcctgtgcacaagttgctgataaaaatagtccatattgtgtactttcttgtgcaggttttcagcaaataaccgccgatacggttgatccggaaaaattaatttctgatctgacatggaaaaaatatcaaatgcccgcctatcatttaatcgcaaaagaagggccgggaataacattagtgaatattggtgttgggccgtcaaacgccaaaacaatttgtgatcatctggcggttttacgtcctcatgtttggttaatgattggtcattgtggaggcttaagagaaagccaattattaggtgattacgttttagctcatgcttatttacgagatgatcatattttagatgctgtattaccgccagatattcctattcctaatattgctgaagttcagcgtgcactttatgatgccactaaagccattagcggtaagcctggacatgaaatcaaacaacgattaagaacaggaacggttgtgacaacagatgatcgcaattgggaattacgtttttcagcaacatcaaggcgatttagtttaagtcgagccgttgccgtggatatggaaagtgccactattgccgctcaaggttatcgttttcgcgttccttatggcactttgttatgtgtatctgataaaccgttacatggtgaaataaaattaccaggacaagctaatcacttttatgaaggtgcggtatcagagcatttgcaaataggtattcatgcaattgagttattaaaagacgaagaagataaattacattctcgtaaattaagaacctttaatgagccgccatttagataa

SEQ ID NO: 305474 - DNA, 318 bp, Proteus mirabilis
atggcaactcccatagtggtgataacgcaagaagatttacgcacagttcgtagtgcttcaattgctgaaaccttaaccacattacccggttttcgtgctagtttttttggcggaggctcagtgcatccagttgtgagaggcatgtctggaaaccgcgtgaaagtattacatagtggtagtgatcttatggatgtttcgtcaataggtgcagatcacgcaattactagtgagccttttttgagtcagcgtattgaagtattaaaaggttctgcaacattactctatggtggcggtactataggggggcgattaatgtaa

SEQ ID NO: 305475 - DNA, 564 bp, Proteus mirabilis; identical to SEQ ID NO: 297818

SEQ ID NO: 305476 - DNA, 993 bp, Proteus mirabilis; identical to SEQ ID NO: 297993

SEQ ID NO: 305477 - DNA, 162 bp, Proteus mirabilis; identical to SEQ ID NO: 296642

SEQ ID NO: 305478 - DNA, 387 bp, Proteus mirabilis; identical to SEQ ID NO: 295557

SEQ ID NO: 305479 - DNA, 513 bp, Proteus mirabilis
atggattggcagatgagcggcaagcccttgctgctctacctagacaacgcggccgagttcaagagcgaggccctgcgccggggttgcgagcagcatggcatccggctggactatcgcccgctgggacagccgcactatggcggcatcgtggaacggatcatcggcacggcgatgcagatgattcacgacgaactgccgggaacgaccttctccaaccctgaccagcgcggcgactacgattccgaaaacaaggccgccctgacgctgcgcgagctagagcgctggctcacattggcggtcggcacctaccacggttcggtgcacaacggcctgctccaaccgccggccgcgcgctgggccgaggccgtggcgcgtgtcggcgtaccggccgtcgtcacacgcgctacttcgttcctggtcgattttctgccgatcctccggcgcacgctgacccgcaccggctttgtcatcgaccacatccactactacgccgatgggcactgttgcaaatag

SEQ ID NO: 305480 - DNA, 333 bp, Proteus mirabilis
atgaaaaagtttctcaccattcctttatttttacttttagcaggatgcaatacagcgacaggaaccaacacccaagttatgaacgattcgacaaaaacactgcttattgactctcagctttatgattgtgttggtgttgcgccaatgaaatgcatgaaagtaaaagaattacctgctggtgaatggtctctcttctatcaaaatatcgaaggatttgattaccaagcgggaacgcagtacaaagtaaaagtcaaagttacagatattcctaatcctcctgcggatgcaccaagcatcaaatatacactggttgagatcttagataaaaagtaa

SEQ ID NO: 305481 - DNA, 504 bp, Proteus mirabilis; identical to SEQ ID NO: 52325

SEQ ID NO: 305482 - DNA, 147 bp, Proteus mirabilis; identical to SEQ ID NO: 298659

SEQ ID NO: 305483 - DNA, 210 bp, Proteus mirabilis; identical to SEQ ID NO: 296203

SEQ ID NO: 305484 - DNA, 357 bp, Proteus mirabilis
gtgacagatagatcaataaaaattctaagcattattgaaattgagataggagcctcatcaaatgaaagacttcttttaagttcgttaaaaattcttgagcattttttatgcgatttgaaattaaggcggacattagttggaataagattatttctattagatgttggtggtctagttattctagaattaccatcatcaggtgttgaattatcatctataggtggttctataggtttactaattacgtcccccggatcgccaggttttatttttatgggatcaggagataaaggtacaggagtaggatttaaaggctctggattatcagttttacctctaaattttttttctatgtaa

SEQ ID NO: 305485 - DNA, 228 bp, Proteus mirabilis
atggcgacggacaccccacggattccagaacaaggcgtggccactctgcctgatgaggcttgggagcgtgcgcgccgtcgtgcggagatcatcagtccgttggcgcagtcggagacggtcgggcacgaagcggccgatatggcggctcaggcgctgggcttgtctcggcgccaggtatacgttctgatccggcgtgcccgaccgtctccgactgcgccaacggactga

SEQ ID NO: 305486 - DNA, 558 bp, Proteus mirabilis
gtgactaattcagataaagagaatagttttctaattcaatcatgggtatctgataatcaaggtaataaaaataatgattttattgttacccctcctttatatattcttgacgctaataaagagaatgctttaagaattatgtatacaggtgaacctttacctgcagatcgcgaaagtttattttggatgaatgtcaaagctattccttctttagatgaaaagcttgctaatgaaaatacactacaaattgccatccagagtcggataaagcttttctaccgtcctagtggattgtccgcttatactgaaaaatatgccaatgaagtgactttttcctataaaaatggggagttaattgcccataatccaacaccttatcatattactatggccaatttagccgcagccgacagtcaacttccttcaagtattatgattaacccattttcacaattaacattaggaaaagttaatcagaatgctaataccatttcattccaaaccattaatgattatggcgcacagactcctgttttaaaaaaagaaatcgttcattaa

SEQ ID NO: 305487 - DNA, 1020 bp, Proteus mirabilis
atgacaattagagttgctattaacggttttggtcgaatagggcgtaatgtgttaagagcgctttatgaatctggaaagcgggctgaaataagcgttgttgcaataaatgaattggctgatgcaacaggtattgctcatttgcttaaatatgactcaagccatggtcgctttgcttgggatattcgtgttaataatgacttattgcaagtaggtgatgatgcaatccgtcttttccatcatgccgatattgcagacttaccttggggtgagttaggtattgatgtggtacttgattgtagtggcgtttatggatctcgtgccgatggtgaggcgcatattgcacaaggggcaaagaaagtgctcttttctcatccgggaacgatagatcttgatgctacggtggtattcggtgttaatcaacatgaattgaaaaaacagcaccgcatcgtctctaatgcttcttgtaccacaaattgtattatcccgattattaaaatgatggatgatgcttttggtatagagtcaggtacagtgacgacaatccatgctgcgatgaatgatcaacctgttattgatgcatatcataaagatttacgtcgtacacgagccgcaggacaatcgattattccggttgataccaaattagctgccggtattacacggattttcccgaaatttaaagatcatttcgaggcaatttctgtacgagttcctacaattaatgtgacagcaattgatttaagtgtcacggtaaaaaatgctgtaaatgtgttagatgtcaataagttaattcaaaaatcagcaactggcgcatttcgtggtatagtggattacacagaattgccattagtctcaacagattttaaccacgaccctcatagtgccattgttgatggtacacaaacaagagtcagtgggcagcatctgattaaaacgttagtctggtgtgataatgaatggggctttgctaaccgaatgcttgatacgacgttagctatggctgcaactggttttaaataa

SEQ ID NO: 305488 - DNA, 1404 bp, Proteus mirabilis
atgtcttcgttgttaaatacttattaccgagcaaatgaatcttggcagatcgctataacccaaatattacccccttatatcgatccggttattatccgttggttggagacatcccctgatacccttgttcatttaacacagatatatggttcaccccttaatattgtctggcctcatactgtggagcagaacgtgaatgccatggtcgaagtcgccaaaacatttggtatacaaaccaatttgtattatggggttaaagtcaataaatcacagtcattattacaagccgctgttgctgcgggaactggggcggatgtatctagcctatatgaactcaacgatgctattcgtgcgggatgtaaaggtacagagttgtgtgctacaggccctgccaaaacaacggcatttttacaggcgttaatagtgcaaggggcacggattgttattgattcacttgaggagatggacgagcttattcaccttgctacaaggtggataagtccatcaggacgtataagtatactgttgcgttttcgtcctgagtctaatcatatcagtcgttttggtatgtcatccgctgagatcatgacagcgcttgagaaacttaattatagtgaccaagtaaaggttgatggattccatttccatcttagtggttactcttcggtatctaggatcaaggctttttttgataccttacccttgattagctacgcacgtgctttgggttactccccttatattatcgatattgggggagggttacctgttcagtatgtagacagtcattgttataagaaatggctctctacgcaaacacataaagactatcgtactcgacgaattcctgattctttctatccatatggtggagagataaatgcccaaggctggctcactgagtttctaaccggagtcgatcccacaggcaaaagagtttgtgatgcattaattgaggaaggattaacactttgccttgaacccggaaggagcttggttaatcaaagtgcgatcagtgtatttcgtgtctgtcgagttcgtccatatgatcatgtcggacatgttatttttgtcgaaggaactagttttagcgcatgtgaaacgtggtttaattctgaattcttaagtgatcctctccatatttatcaaaataaccatcagccactttcttctgctggaaatgcttggattgcaggccatagctgtttggacgacgatgttatcaccaatcgtttgatcgcttttgcacacctaccaaagccaggtgatttactgatatttgctaataccgcaggttaccaaatggatttactggaaaatcaatttcatcggcatccgttgcccacaagattaactgcggtcataaactcacatcaaaaacctatatttaccattgataattaa

SEQ ID NO: 305489 - DNA, 231 bp, Proteus mirabilis
atgcaaaataattatgtgttacgcagtgtgcgttatatgttagatcttagcgatggacatattgttgatataatgaaactggcagatttcaccgcgactaaagagcaagtcaatcagtggttaaaaaaagacgatgatcctgcctttgttgagtgtgatgatatgggcttatcttttatcgtcgtggtaaagatgaaaaatatcctactccagaagtcgaaaaacggataa

SEQ ID NO: 305490 - DNA, 450 bp, Proteus mirabilis
  misc_feature (401)..(410): n is a, c, g, or t
atgcagtttggttcgaagccactgtttgaaaacatttctgttaagtttggtggcggtaatcgctatggtttaatcggtgctaacggcagcggtaaatccacctttatgaaaattctcggtggtgatctcacgcctactagcggtaacgtattccttgatcctaatgagcgcttgggtaagctaaaacaagatcagtttgcttatgaagagtttaccgtgcttgatacggtaattatggggcacgctgagttatgggaaattaaacaagagcgtgaacgtatttatagcttaccggaaatgagtgaagaagatggtttacgtgttgccgatcttgaagtgaaattcggtgaaatggacggttacaccgttgaatcacgtgccggtgaattattattaaacgnnnnnnnnnnaacgttggtattccacttgagcaacataatggcccaatga

SEQ ID NO: 305491 - DNA, 405 bp, Proteus mirabilis; identical to SEQ ID NO: 303816

SEQ ID NO: 305492 - DNA, 537 bp, Proteus mirabilis; identical to SEQ ID NO: 300641

SEQ ID NO: 305493 - DNA, 1743 bp, Proteus mirabilis
ttgaaaaacaacgaattagaatggcaggcgttacgcccagattacgcctcctaccagactttctttcaaacagcatcgcaattgcctgcatcttcacttcgtgaggttcaacctcgcttgtatgaaagcttacagtggctaaataatgcagaagcaggccaatttatgctgttaaaagcagaagattctactgcttatttcgaaacactcgctgatacattacaacaagcagagataaaaacttatcctgttgtaggtgcctatcaagctgaatctaatcaaatttattggcaagaaaatgtagaaggctcattttcatcatcagaatctattgcttgttgccaatggatagagccagaacaactttttggttcattttattatcataaagataagctcctcgttaacccaggactgttgcataaagtcaatggtggtattttagtcttatccattaaaacgctcttagcacaacccttaatgtggttccgactgaaaaagatggttgaagagcaacgctttgaatggttagtgtggaatgaccatcaagcccttcctttgcctattgaagccatgccccttcacttgcgtgttattttagtgggcgatcgcctaagcttagaagagcttgagtttatggagcctaatattagcagtacggcactatatggcgaatatgagtacgatatgtatttagaagatgaaaccgctctgagccaatggtgtggttttgttaatggactttgccaaaaatatcgtctcccttcattatctgctgatgcttggcaagtattacttactcagggcgcaagagaacatgaagatcagcttatcttatctctcgatcttgaattcatattacgccaattgcgttatgccatgcgttttaatcatgacgcttatcttggtgctgaggcgcttaaaaaagcgcaagaaaatcgtttatggcgacatagctacttattagaacgaagccgtgatgaaatattacaaggccaagtcactattcacacggaaggtgaaatggtaggccaaataaacggtctttctgtcttagattatcccggttatcccgatctaattggcgagccaactcgtattacctgtgtggctcatattggtgatggcgaactggtcgatattgaacgaaaagcagaattaggtggcaatatccatgcaaaaggcatgatgattatgcaagcctacttaaattctgaattacgattagatcagccacaaccttttagtgcttccgtcgtttttgaacaatcttacggtgaagtagatggtgatagtgcctcactagcagaattatgtgcgctgatcagtacattgtcacaacacccaattgatcaacaaatcgccgtaaccggtgccgtagatcaatttggtcaggtacaacctattggtggtgttaatcaaaaaattgaaggcttttttgatatctgtcagcaaagaggattaacaggatcacaaggggttattataccgctggcaaatgtgcgacatctggttttaaacgagagcgtgatacaagccgtcaaagaaaataaattccatatttggccggttgtccatgttgcagaagcaattactttgctaacacatcagccttattacgaagaacaatgtgaaaatccacaatcaaatgaacacttgttagctgttattcatgatcgaataacacaagcgaataatcaggataggcctaagttaccttggttcctacgcttattcagataa

SEQ ID NO: 305494 - DNA, 2994 bp, Proteus mirabilis
gtgggctcggagatgtgtataagagacagatataaattagctctcaattttttagagattatggcttattttatgaaaaatatcgtaatacctacctcgttaagctgcttttttttacttttttcccattcaacatggtctgaaaccaatatttcacaaaccaaacaacgaattatcgaccaacgtaattattggttagatgagatcaaaaatggtgttatcacaactagccctcaaaaaggatcgagaaccgccgaattagatagaataatcagtaataattatcaagccattaccggcaaacgtagagaacttgccgaagcggataaatcacagtctcatacttatgtgttgaatacctatgctaatattttatttggtgataaggctaaatcgatcaactttagcgatattcaagcttatcaagatctcaataaattacatagcacaggcacctatgcttatgatacaaacaaaaaaagagtacgctcgatagattttatcttaaaagaactttttttacgtggccgaccttatcaagtacttgataaagaaggtcattatcttgataactacaccactataacaggctcatcttatcccagtggtcatacgtggaacggatacaaacaagctgcagtgttatccatcttattccctgaaaagggcagtgaaatgtttgccagagcaatagaatatggtgaaagtcgagttattgtcggggcacacttcgcaacagataccattgcatccagaataggcaattattacctgctgtcacaaatacttgcagatgatgacaccacccgcacttttgtagagcttgccaaagaagtccgccaaaatgttgctagccaatgcaaaaatcaacattgcttaacgacctcgacaacaatcactaacgatgaaacaggttattacgcaaccaaagatccagagcctgcaccacgcattacccctaatgaaataccaacatctgccaacgctttactgcgtttacgctttgcctatttaaccaaagagcaacgacaatctatcttagcgagtaccgcctacccgagtaattcattggctggctgggctgcaaacaaagatgatccaaacgccaattggggattaattaatctcccgaaagcctataatggccctacttatttctacaatcattttattgttaatcaaataactaatgaatttgactttgctgaatttggtcaacttgatgaatggaaaaatgatattagtgggcctggcaaattaatcaaacaaggtaatggcaccttgatcttatcaggcaataaccattttgctggcgttgaagttaatcagggtcatttactgctcactggtgaaaaccactatgcaaaaaattcttccattaatggtggtacattgcttcttgaaggaacactaaacactttactagatgtcaacaaaggagcattgctattaaatggtgggagcgttgattctcaagtcaatatcaataacaaagggatactttctggtaaaggaaaaattaataagctggccgtttattcaggaggcatcgtatcaccgggtcattcaataggtacaattaatatcgatgatactgttatttttaattctggtggcaactaccatgttgaaataaattcacaaggtgatagcgataaaataatcagtttgggtaccgcgacactgaatggtggaatggttaatgtatcgcttgaaaatagccaaaatctgctaacaaaagatgatgttcaaagtttatataacacaaaatataccattttaacggcagatcacggcgttaatggtcaatttactgatgtaaatccaaactatctttttttaggtaccacactgtcctacgataaaaattcagtaatactaaatgtcggaagaaataacaccgccttttcaagtgtggctaaaacaaaaaaccaactatcaatcgccaatgcgatagacgcattacccttgggacatcctatttatgaaagcattataagaatggatacagggaatgatgcccgctctgcctataatcaattaacaggtcaaattcatgcggatatcttatctaaccaactcaacaatagccggcaaataaaagaaacactcctctctcagattaaaaatgcagaaataattaatagagagaaagaaagtgcagataacaaaggtcatgtttgggctaaaattctctctaattgggaaaagacttccaatgatggcaatgcaaatagctatgatgcttccacctatggcgtactattaggtgcagatcagcgggttagtcacgataaaatgctgcttggtattgcaacaggggtcaccaaaacctcactatctggtgataacagtcacgcaaatagcgaaaattaccacttatcactctatggtggctatgattttgacacaatcgcgttacgtgctggtgcatctaatacctttcatcgtatccatacaacaaaatcggtcaactatggtgtacagtcagataaaaataaggcgaattacaatgggaacactagccaaatttttattgaagcagcttatcccatcaccctctcagatacacaattagagccttttgttaattttgaatatgccaaaacgaaaaatgctaccattaacgagcaaggtggacgagcagccttacaagcccattcgcaaactctagagtcaaccacctccactacagggctacgtttaaataaccaatggaaatttaacagtaaatcaacggtttctctctatggtgagctaggctggcgacaccaatataacgatgtagaacgagggatccatttacgtttcacacaaacccagcctacatttatagcaaatagtgttgatactgctcgagatgcactggtggtaaaagctggaacaactatccaaatcaatgagacatcaaaagtctcaattggatacagcggactagtggcaagaaatcagcacgataatggtattgatatgaaactctctatcgcgttctaa

SEQ ID NO: 305495 - DNA, 1380 bp, Proteus mirabilis
atgtcagataatgtcatctcctctatcggcaccaatcaaactggtgttaataaccgtgttcaattacgcaaaacattgacgctaatgcaagtcgtcatgatggggttggcatttttacaacctatgacgatttttgatactttcggtattgtatcaggcataaccaatggtcatgtggcaacatcatatgctattgcgttaaccgctattttatttaccgcagtgagctatgggaaattagtcaagcgtttcccttcagcaggctctgcttatacttatgcacaaaaatccatgagtccacatgttggttttatggttgggtggtcttcattattagactacttatttatgccaatgataaatatcttattggctaaaatttatttacaagccatattcccaggcgttgatccgtggatctttgttgttgcgttagtcgcgttaatgacattttttaatctacgcggaattaacgttgtggctaacttaaataccgttattgttgttattcaagtagctgtaatggtggtatttgttggtttattaattcatggcgtatataacggcgaaggtacaggggagttatggactttccgcccatttgcgtcagtagatgctgaattaatcccaatgataaccggcgcgacaattttgtgcttctcgttcttagggtttgatggcattagtaccttatctgaagaaacacccaatgccggtaatgtgataccaaaagcgattttcttaactgcgttaatcggtggtttaatttttatcgctgtttcttattttttacaattatatttcccagatatttcacgttttaaaaatccagaagagtcacaacctgagattatgctgtatgtagcaggagccttgttccagtctattatcttagtgttttcttgtgtgacggtattagcatcgggtatggcggctcacgcaggtgttgcgcgtctgctgtatgtgatgggacgtgatggtgtattccctgaaaaagcgtttggttatgttcatcccaaatggcgtacaccggcatttaacgtactattagttggctttttagcgctaggggcgatcttttttgatttagtcactgctacagcgttaattaactttggtgcgttagtggcatttacctttgtcaatttatctgttatttcgcagttctacattcgtgagcgtcgtaataaagggttaatggatcatattaactatcttatattaccgattattggtgccgcgacaatgggggtactgtgggtaaaccttgaaccaggctctatggaattaggactgatttggggggcaattggtatactttatatggtgtggatcactcgtcgattccgtcgacctatgcctcaaatgccagagaaataa

SEQ ID NO: 305496 - DNA, 1770 bp, Proteus mirabilis
atgaaacctgccatgtcacaaacatttattcccggcaaagatgccgcactggaagactctatcgctagctttcagcaaaaattaactcagttaggttttaacattgaagaagcttcatggttaaatcctgttcctaacgtttggtctgttcatattcgtgataaagattgtccgttatgttttactaacggcaaaggtgctactaaaaaagcagcattggcttcagcattaggcgaatattttgaacgtctctcaaccaattatttcttttctgatttctggctaggtgctgatattgcagaaggtgagtttgttcattacccaaatgaaaaatggtttccactgacagatgatgatgctgtacctgaaggcttattagatgcacgtttacgtcaattttacgatcctgaaggtgagctatgtggcagtgaactggttgatttacaatcaagtaattcagaacgtggtatttgtgccttaccgtttattcgccaatcagataaaacacctgtatatatacctgttaatatcattgcaaatctttatgcatctaatggtatgtcagcaggaaatacgaaaaatgaagctcgagtgcaagggctttctgaagtgtttgaacgctatgtcaaaaatagaattatcagcgaaagaattagcttgcctaaaatcccccatgaagttttagctcgttatcctgctgttattgaagctattacgacattagaaaaagaaggcttccctatttttagttttgatgcatctttagggggacaattccccgttatttgcgtcgtgctgtttaacccacaaaatgggacttgtttcgcttcttttggtgctcaccccgattttggtgtggcattagagcgtactgttactgagttattgcaaggccgtagccttaaagatctcgatgttttcaatccaccgagttttgatgatgaagaagtcggtgaccacactaatcttgaaacccactttatcgactctagtggtttaattagttgggatctgtttaaaaaagatgcagactatccatttgttgattgggatttcagtggttcaaccgaagaagaattccacacattaatgtcactgtgccagcaatgtgatgcagaagtgtatattatggattatgaccatttaggggtttatgcttgccgtattttagtccctggcttatccgatatttatcctgctgaagatctgcaactagccaataacattatgggtgtccattggcgtgataccattctttctttaccaacaagtcatggcacaaaagaagagtacctctcacttattggccaatttgatgaagatggcttagatgactttactcgtatcagagaaatgattggtattgcaccgggtaaagataatggttggagtcatttacgtgtaggtgaattaaaatcaatgttagcactcgctggtggcgatttagaacaagcattagtttgggttgagtggacacaagatttcaacgcatcattatttacaccagcgcgtcaaaattattatcgttgcctgcataatcttttactcctacgtgaagagcatgagcgtgagcctgcacaatatatggaggcattttctcgtatgtatggcgaggaaacactgcaagctgcattaaatgcaattgaaggtaaacaacctttttatggcttgcaacccatagatccatcattagcgaatttgcctgttcatcaatctttattagccgcgtatgaaaaattacaacaagcaaaacgtcaatcgaataaataa

SEQ ID NO: 305497 - DNA, 1038 bp, Proteus mirabilis
atgataagaaaaacattgctagccagcttattaaccgtaattagtggtaccgtttttgctttacctaatgtgacaatcctcgcaactgggggaaccatcgcagggggtggtgactctgcaacttcttcaagctacaccgcaggaaaattaggcattgatacattgattaatgccgtacctgaggcaaaaaaagtggctaacttaacaggcgagcaagtggttaatattggttcgcaagatatgaacgaccaagtgtggttaaaactggcgaataaaattaatacggattgtgataaaacagacggctttgtgataacccatggtacagatacgatggaagagaccgcctattttcttgacttaaccacagcatgtaaaaaaccggtggtgatggtaggggcaatgcgcccagcaacagcattaggtgctgatggtccattaaacctctataatgccgtggtggtggcgagtgataaagcatctgaaaatcgtggtgtattagttaccatgaataattcggtgatcagtggtaaagatgttgtcaaaatgaatacgacagaagtgcaagcattccagccgattaatgcgggtgcacaaggttatgttcatgatggtaaagtacactattacactgctgcaacaccacgcgctgagaaagttgcctttgatgtcagcaaattaaccgaattaccaaaagtaggtattgtttataactatgctaatgcatctgatttaccggcgaaggcgtttatagataaccactttaaaggtattgttagtgcaggtgtcggcaatggtaacttgtattctgacatcttaaatactttagctgatggtgtaaaaaaaggtgttgttgtggttcgttcaagtcgtgttccggttggatttaccacacaaaatggtgaagtagatgatgcaaaatatggctttattgcttcagaacgtttaaatccacagaaagcaagagtgttattacagttatctttgacagaaacacaagatcccgccacgatccaagaaaactttgaaaaatattga

SEQ ID NO: 305498 - DNA, 882 bp, Proteus mirabilis; identical to SEQ ID NO: 297936

SEQ ID NO: 305499 - DNA, 537 bp, Proteus mirabilis; identical to SEQ ID NO: 303829

SEQ ID NO: 305500 - DNA, 699 bp, Proteus mirabilis
atggtaaacaaaatacgcttttttcaatatatttcgttgtgtgttttaggagtattatttttatcatttcaggttcaagccggtgtcggtttaagccagactcgtattattattaatggggatactaatacagcctctattagcgctagaaataataatgcacaaccttatttagtctctaactttataaccgaaaaactggatacctcatcaccacctttgagtggtatgtttgttattactccaaacattttcaggttagctccggaaagtgaaaatacaataaaaattcaaataataccaacaaatcttcctaaagatagagaatcactttattacttccactcgcgaaatattccatcaacaaataaaaatgaagatgggataaaaatagcgatggaaaatattatcaaggtattttatcgccctattaatttagcgataaacccaaaagaagccggtgataaattagttgtaaaagcaacgcctaatgggatcagtattgagaaccctacgccttattatattaatctttttaagattaccgttaaaaatgaaacgataaaattaaataaaattaataatatgatagaaccattttcttctaaaaactatgtggtaagtaataaaacaggtgctgttaatattcatattatcaacgatttaggcggagaaagtgtctacaataaaaaactttaa

SEQ ID NO: 305501 - DNA, 465 bp, Proteus mirabilis; identical to SEQ ID NO: 305397

SEQ ID NO: 305502 - DNA, 807 bp, Proteus mirabilis
gtgaatgtgccctttagcgtatttgataatactttttattataattttaatgcgaatagtaacaataatagttcaagtacaggaagtgtaggtatatcggcatctcagttaaataatcgactaaattggagtgtgcaacaagcatttaccaatcaagatcaaggatcttctggaaatatcaatgcatcctacaaaggccaactaggtgatattacgggggggtacagttatagcaaagataatcataatctttactatggtgtgagcggtagcgtcgttgctcattctcagggagttgtttttggacagcaactgggagaaaccgcggcaatcgtagatattcctaatgcgggtgatattacgatattaaatcaagcgggagttaggactaataactcagggtatgcattagttccttatgtcacaccatatcgtaaaaatactgtcgagatcgatacattaagattgccagagaatgctgaaatggaacttaccagtcagacggttttaccgagtcgaggggctttagtaaaagcgaatttttcagccaatgtaggctatcgtgtattaatgacgataaatttggaaaacaaaaagccagtaccatttggcgctcaagctatttttaaagacaatagtcagttaaatagtattgtaggtaatgatggagaagtttatttatcagggctaaaacagaaaggaaactttactattaaatacaacaatgaaagctgtcaggtaaattatgatctatctgatattccagattatttagggctctataaaactactgtaacttgctattaa

SEQ ID NO: 305503 - DNA, 663 bp, Proteus mirabilis
atgcaattatcaacagatgatgagatgtatccagaaagtttaagaggctatgcgcctatcattagagggattgcaaaaagtaactcgcaaataactatcaaacaaaatggatatactatttatcaaactgaagtggcagctggcccttttgaaattaatgatttatatccatcaggtagtagtggggatttatacgttacgattaagggtgctaatggtagtgagcaacatcaaatcgtacctttcgcctctttacctgtattacagcgtgaaggtcatttcacttatagcgtaacgggcggtgaatatcgtgcttatgataataatgtagataaaacgaagtttggtcagtttacattagtttatggtttaccttatggcactactgcttatgggggaagtcagttgagtcaaaattatcaatcttactccctaggtgttgggaaaaatttaggctcatttggtgctgtttctgttgatgttacacaggctaagtcaacttttaatgatggaaggaagcaacaaggtcagtcttatcggtttagatataataagaatttgaacaatataggaaccaatattgctttagcaggttatcgctattcaacgagtggcttttatatttccagaaaattgaagtgtcacagtacttcctgcagatga

SEQ ID NO: 305504 - DNA, 1062 bp, Proteus mirabilis; identical to SEQ ID NO: 296634

SEQ ID NO: 305505 - DNA, 459 bp, Proteus mirabilis; identical to SEQ ID NO: 305405

SEQ ID NO: 305506 - DNA, 522 bp, Proteus mirabilis
gtgtataagagacagtggttatttttcttatcattatcacctaatgttgcatattctgccgatagcattattcaaataacaggttatatgagagataacacctgtgcagttgcaccagaatcacaataccaaactattgatttattaaataatgaagttaagcggttatataaagtgggagaaacaacaccctttattccttttcatataatactggagccttgtggagaatcagtgattgctgtgaaattctattttaatggtatttcagatagaaataatccttcattattagcgttagatccgatagcaacatctgcttctggtgttggaatacaaatattagatagtgaaaggtcacccattcctattaatccaagtagtgaccaacttaaatggatccccttagttgcaggaaaaagtaacaccgtttttttctatagtcgattaatggcatctgatatgcctgtcttagctggaaaaattaaagccagtgccacttttacactcgagtaccaatag

SEQ ID NO: 305507 - DNA, 513 bp, Proteus mirabilis
atgatgaaatataaatggcgaggagtaaaaaacgtaatatttgctattttatgctgcaatacttcattcgctatggctgcagatgcaacaattactgttaatggaagtgtaatagcaaggccttgtgaaacaatcacaaaaacagccaatgtggacatgggcgacctatatacattcgattttatgatcccaggctctacctctaaatggtatcccgttgatttggaattaagaaattgtcctattggtacaacttctattgaagcgacattcaccggtcttgatgatagtactggatactatagaaatcagggctcagctaaaaatcttcatttagaattacaagatactgcaggtaataaattaagaaacggttcgaaaaaagtggttgaagttggtgagtattcgtttgctgcaatttttcctttacgagtaagagccatctctgtgaatggtagacctacacagggatcagtacaggcaataattaatgttacctatgtatttatgtaa

SEQ ID NO: 305508 - DNA, 834 bp, Proteus mirabilis
ttgccacaacgctacgaacaaaagcgtggtagctattcagttaaagcctatccggcattagtggatgaaaagaatagtgttggtatcaagctatttgaaacagaaacagagcaacaagcggcaatgtggcaggggataagacggttattactacttaatattccttcccccattaaatacttgcatgaaaaattgcctaataaagcaaaattaggtctttattttaatccttatggcaaggtgctagatctgattgatgactgtatcgcttgtggggttgataaactcattgcttcttatgggggattaatatggcaagaagagcaatatcaaaaactccaagattatgtccgtgctgaattaaacgatgttgttgtcgaaattgctaaacaagttgaatctattttaactcaggtatttgcaataaataaacgcttaaaagggcgggtcgatattagtgttgcttttgcattgtctgatattaaagcacaacttaatcaattagtttttcccggatttgtcacatcccatggctggaaacgacttgcggatattcctcgctatctcagtgccattgaaaaacgtatggagaaattagcgattgatcctaaccgtgatagagcacaaatgagccgagttgaaaatgtcattttgcagtggcaacagtggttagctaagttaaccgagaagcaaaaacagcaagaagaggtacaaaatattcgttggatgatagaggaattaagagtgagtttatttgctcaacagataggaacgccttataccatctctgataaacgcatcttacaagctattgagtctatctcattaagttaa

SEQ ID NO: 305509 - DNA, 651 bp, Proteus mirabilis; identical to SEQ ID NO: 297555

SEQ ID NO: 305510 - DNA, 390 bp, Proteus mirabilis
atgtctaaatcggcaaaaggtacgacagaacggcatggacggaacgtaaaagctaaatctggtttaaaccgctcaatactggagcagggctggtatgaaatgcgccgtcagcttgagtataagcagctctggcgaggtggtcaggtactggcaataccccctgcctacaccagtcagaagtgcgcttgctgtggacatacagcaaaggaaaaccgccagtcacaaagtcaattcgagtgccttgaatgtggatatacagcgaatgctgatatcaacggggcacgtaacattttagcggcaggacatgccgtgcttgcctgtggagggagggtgcagtcagaccgcccgtcgaagcaggaacccgccgaggtgattcagacatcagtctga

SEQ ID NO: 305511 - DNA, 252 bp, Proteus mirabilis
atgttgccaaaagttgagctaaaatggtatcgcacgtctgttgaaggtaaacaagagcacttctttaccaccacactgactgacgcgacgatcgtgaacatcgattgccaaatgcctcattgtcaagatccggctaaagccgacttcacgcaacttatcgaagtctccctctcttaccgcaaaattgactgggagcacactgttgctggaacgtctggtgcggatgactggcgtgcgcctctcgaagcgtaa

SEQ ID NO: 305512 - DNA, 291 bp, Proteus mirabilis
atgcgccgtcagcttgagtacaagcagctctggcgaggtggtcaggtactagcaataccccttgcctacaccagtcagaagtgcgcttgctgtggtcatacagcaaaggaaaaccggcagtcacaaagtcaattcgagtgccttgaatgtggatatacagcgaatgctgatatcaacggggcacgtaacattttagcggcaggacatgccgtgcttgccagtggagggagggtgcagtcagaccgcccgtcgaagcaggaacccgccgaggtgattcagacatcagtctga

SEQ ID NO: 305513 - DNA, 240 bp, Proteus mirabilis
atggcaaaattagataaagaacaggttattgataacgcattgattttattaaatgaagtcggtatggaagggttaacaacacgtaagttggcgcaaaaattaggggtagagcaaccgacactttattggcatgtaaagaataaacgtgcgttattagatgctttagctgagactattttacaaaagcatcatcatcatgttttgccattagcgaatgaaagttggcaggattttttgtaa

SEQ ID NO: 305514 - DNA, 351 bp, Proteus mirabilis
atgaattattttaaaaatgaagtgggcagtgtttatgcttatgatgatgaacaagtatcagacggatgggttgagaaagaactgatccctatgtcagagaaagaaataaagattcatttagaaaaaatgacacaaaaaaatgaaccatcaattcaagcttcagtgcaaaaacaaaatttagtaaatgacgttaatgttgcaataggattattacaatcaaagttattgttaggccggataaatgagggagaaaaaaaattacttaatcagtggttagactatttagataaattagacgctattgatgttagtttagctcccgatatcgattggccaattaaaccagaataa

SEQ ID NO: 305515 - DNA, 561 bp, Proteus mirabilis; identical to SEQ ID NO: 298949

SEQ ID NO: 305516 - DNA, 270 bp, Proteus mirabilis
atggcgaacgctgctagattaagactgggcttctcacctttaactaaaaaaataagcttagcaaaaatgaaagtcgtcggcgatggtctcttggtcagagttggtaacgatgaaagagatgtgacaaatgaagccgcacaaatggtctggcaattagtaattgctgaaggcggggaaataaattggcatagagaagatggaaagatcatgaagctaaaggctgaactgattgatgacgacaactcgcagggatgcaatgaagaggaatga

SEQ ID NO: 305517 - DNA, 162 bp, Proteus mirabilis
atgaaatttaaagtcggcgataaggttaaagttaaggggtatgagaaaattggggttattgaattggttcgagaaggactttacgcgccctacttagtgcacgactggtgggataaccgaaattggtacaatgagaaaatgctggagttaattaatgaataa

SEQ ID NO: 305518 - DNA, 342 bp, Proteus mirabilis
atgaataaatacaccgaactatctgacttcgaagttaataaaaaggttgctgaaaagttaggactggcgtacgaagtcacaaggtacggcgtggttacaaggatgagcaataaagagcagtggcgtgaattcaatccatgcaataaccctactgacgcaatgccgattattattgagaataaaatttcattacgctccccaaccataactgatagatggaaagcggagtttgtagatgagtacggcaactatgttggatatattagagctctcaataaaaacccactgcgcgcatgcatggaagttttcttgatgatgaaggatgcggagaatgaaggctga

SEQ ID NO: 305519 - DNA, 561 bp, Proteus mirabilis
atgccaaaagccagatatatagatatagaggaaatgaaaaaactattcacatacaatccagatacaggagatttaatttggaattatcgagatgtttctgagttcaagaatgagcatgcagccaaatcatttaataataaaaaagccggaaaagttgttggtaatatcagggtaaataagaatgggaaaaaatataggtcaataaaaaccaacacccaaactcatctagcgcatagagtttgttgggctatctatcacaatgagcaacctgaaatgattgaccatattaatggagatggaaccgataatagaatatctaatttaagaagtgttagcgttactgaaaataatagaaatgccagaaggcataaaactaatacatctggatattctggtgtatcgaagtatagcgagtgtaaatggcaggctagtatatggataggaaataagcaggttaatttggggtgctatgatacaaaagcggaagcagtagccgctagaaagtctgctgaaaaagtttgcgggtatcatgaaaatcacggttcaaatagacccctttaa

SEQ ID NO: 305520 - DNA, 963 bp, Proteus mirabilis; identical to SEQ ID NO: 300369

SEQ ID NO: 305521 - DNA, 417 bp, Proteus mirabilis; identical to SEQ ID NO: 16834

SEQ ID NO: 305522 - DNA, 387 bp, Proteus mirabilis
atgaataaaccagcagatctgaaaccccgcaacttatcggctgctgtcagattgcgcctaaatgaaatcgagaactggctggacagagggctaacgcggcatgaaattgctgaaatcctcgacagcgaatacagcttttcggtaacagccaaagggcttgagatggcactgtatagaacgcggcaaaaccgaaaaaatgtattgcacaatacacatgataagagtagcgcgaagggtgcagcggaaagtgtattgcacaatacacaaccgtctgagcctgaagcgcaggaaagtgaaaaagcagagagtcccggcattattgataaagagttcttcaataaaatcggtgaggatttcaaccctaagaagttcaacaaaaaattctga

SEQ ID NO: 305523 - DNA, 717 bp, Proteus mirabilis; identical to SEQ ID NO: 16833

SEQ ID NO: 305524 - DNA, 369 bp, Proteus mirabilis; identical to SEQ ID NO: 16832

SEQ ID NO: 305525 - DNA, 345 bp, Proteus mirabilis; identical to SEQ ID NO: 16831

SEQ ID NO: 305526 - DNA, 180 bp, Proteus mirabilis; identical to SEQ ID NO: 16830

SEQ ID NO: 305527 - DNA, 510 bp, Proteus mirabilis; identical to SEQ ID NO: 16873

SEQ ID NO: 305528 - DNA, 360 bp, Proteus mirabilis; identical to SEQ ID NO: 16827

SEQ ID NO: 305529 - DNA, 297 bp, Proteus mirabilis; identical to SEQ ID NO: 16826

SEQ ID NO: 305530 - DNA, 549 bp, Proteus mirabilis; identical to SEQ ID NO: 16825

SEQ ID NO: 305531 - DNA, 240 bp, Proteus mirabilis
atgctgaacaaaaccgaaaacaacaccaacattagtagtatcaacccctgttctacagagagcctaatagccgtgacgggaaatgatggagagacgcatatcattcagcgtgagttaatatcccactctgttgaagggcatgaagccacaatcattcaccttgtaaccgggaagtcgataagggtttctttgtcatctgaaattctggcaaaaaaaataggcattaccgtgtctgaataa

SEQ ID NO: 305532 - DNA, 405 bp, Proteus mirabilis; identical to SEQ ID NO: 16822

SEQ ID NO: 305533 - DNA, 426 bp, Proteus mirabilis; identical to SEQ ID NO: 16821

SEQ ID NO: 305534 - DNA, 273 bp, Proteus mirabilis; identical to SEQ ID NO: 8075

SEQ ID NO: 305535 - DNA, 876 bp, Proteus mirabilis; identical to SEQ ID NO: 8076

SEQ ID NO: 305536 - DNA, 513 bp, Proteus mirabilis
atgacccaccgccatgtcgtatttggcttctttgatatagttttcagcattaccacgcttttcatagctgaaaaactgcgtaatgagaggcaatactgccgcgtcataagcgtctttatccgtaccagtccttattcagtgcgtgatacacagtatgccaatcaggcaaccgaaaaactgacggtggcaacccaggacagccgcacgataattcaggcagcacaagccgcgctggcgcggatctggcgggaagatattgcgtatgcaaaagcaggggtcatgctggcagattttagcgggaaggaggcccagcttgatttattcgactctgctacgccttcagctggcagcgaggctttaatggctgttcttgatggtataaaccggcgtggaaagagccagcttttttttgcaggccagggcatcgataactcctttgccatgcgtcgtcagatgttgtcacctgattacacgacagactggcgctcaataccaatagccaccatcaaataa

SEQ ID NO: 305537 - DNA, 792 bp, Proteus mirabilis
gtgaatttgcctacgcccgaaacctacgatgaacttcagagagcctacgattttttcaatgagaagctattcagcaacgagctgccgccatgcctgataacgttgcagcgtgagaagcgaacgtatggctattgttcctttaagcgtttcgtcggccgtgagagtgggtacacggtagacgagatcgctatgaatccggtgtatttctcgatcagaaccataaaggccacgctttcaacactggtgcatgagatggttcatcagtggcaattccattttggcgagcctggccgccgtggctatcacaacaaacagtgggcggcccggatggaacgggtaggactaatgccttctgataccggcgaaccgggaggcaggaaagtgggccagagcatgacccattatattattgccggtggccttttcgatatggcctgtgatgaactgctgacaggccatttccggctttcctggatggacaggtttccgccttaccagcttaagcctggcgctgtgctaagccctacaggaaaaggctatattgacgacgaggaagatgatagcgaacacgaacaggaggtggaggaagggcgcgacccggttgaactcgacgacgagatcatagaggccatgcgatttgtaaccccgccgcctgaagcgccggtgaacaaaacaaaccgggaaaagtacagctgcccggtgtgtcatatcaatctctggggtaaaccggggatagtggtttactgtggtggcgagcactgtaataaagccgcgttagtagtcttaaaataa

SEQ ID NO: 305538 - DNA, 342 bp, Proteus mirabilis; identical to SEQ ID NO: 16817

SEQ ID NO: 305539 - DNA, 720 bp, Proteus mirabilis; identical to SEQ ID NO: 16816

SEQ ID NO: 305540 - DNA, 270 bp, Proteus mirabilis; identical to SEQ ID NO: 300171

SEQ ID NO: 305541 - DNA, 570 bp, Proteus mirabilis; identical to SEQ ID NO: 16861

SEQ ID NO: 305542 - DNA, 276 bp, Proteus mirabilis
gtggcttctgtttctatcagctgtccctcctgttcagctactgaaggcgtggtgcgtaacggtaaaagtactgccggacatcagcgctatctctgctctcactgccgtaaaacatggcagctacagttcacttacaccgtctctcagcccggtacacaccagaaaattattgatatggccatgaatggcgtcggatgtcgcgccagtgcacgcattatgggcgttggcctcaacacgattttacgacacttaaaaaactcaggccgcagtcggtaa

SEQ ID NO: 305543 - DNA, 399 bp, Proteus mirabilis; identical to SEQ ID NO: 16863

SEQ ID NO: 305544 - DNA, 837 bp, Proteus mirabilis; identical to SEQ ID NO: 16864

SEQ ID NO: 305545 - DNA, 1077 bp, Proteus mirabilis; identical to SEQ ID NO: 97051

SEQ ID NO: 305546 - DNA, 594 bp, Proteus mirabilis; identical to SEQ ID NO: 139827

SEQ ID NO: 305547 - DNA, 2652 bp, Proteus mirabilis; identical to SEQ ID NO: 16870

SEQ ID NO: 305548 - DNA, 1008 bp, Proteus mirabilis
atgaatagcgtaacttcgcaattacaggaatttgattgcaatcaatttttccatactattaaatcaattagaaaaataacttctgaactatttgaacatgataatatcttaaatcataatcttattaccatatcaataaacaataataaaatttatgatgaaataattattttctctattctgctaaaaagccggctaaaccagaaattgttaacagggatatttaaaaatattaatgaaattaatcatgcaatggctgatagagagttgacacagcaattatcagaaaaactgcaccaagagaaaaagtttattgaacagttatttaaagatgaattaactgaatctatagaaattatagaaaagcacatccgttttattaatgataaaaaacagctcttaacaaccaccactattattagtgaaatagataaattaattagaaataaagaagaaatatctattgaaatcaatgagaaaattgccaagcaaaagttatcgattaatgaaattaaagaacaactcgatataattactaaaagtgaagatattatttataataaaaatatcctcgatttttttacttctcacctgccaagtaaacagacaatttctaaactgcagttggcttcttcagaaaaagatattctctctgtttttatcgatctgctaaagcaattttttacccatctggagaaagggttttcttaccaaaaactggtagagacacgtcatactcttattgataactatttgatacagataaaaaatctaaccaaactagaacagaaaaaacaagctctcttatttaccctaagtcgttattatgcagtcacagaaatcaatcaatatattgatatgttaaatcaacaattatcgctattagagcagtattggcatacattaatagagcaactgatacaattaaaacgcaatctttccgaggcaaaaaccgtgctctcacctcatcttgtattccttaatcacttttcacaccattatcaataa

SEQ ID NO: 305549 - DNA, 1068 bp, Proteus mirabilis
atgaaagttcattatgctgtaggtaaatatataattgctatatttattctattactgcttgttatcaccaccctattattttttacaagccatattcaagactttgactatgaaaacaaagatcaagaagaattaagttttttatctcaaggaaaccggctatcaggaactcttcttactcctcaacataagactccgtcagcggttatcgttgttattcatggtgatgggcctcaagatcgttattcaaatggtggctacaaccctctgttcaatacatttttggatgcaaatatcgcgatattctcgtgggataaagcaggcattggtgatagtcaaggaaactggctacatcaatcaatggaagctcgagctgaagaagcggtagcagcattaaaattaatgcaacttcgttatcccgaagttcaagtaggttttttagggttttctcaagcaggatgggttattcctatcgccgctagtcaatcacaaccagctttttctgtgattattggaggtgctgtcaattggcgagaacaaggacaatattatcaaaaattgcgttatgaacagcaaggaaaaacaccggatgaaattatacaattgctggtaaaagaacaaaaagaaaatgatgatatttttggactacatggtacaaaagatcgctctcgtcgcaatgatatgagtgaagatcgatttaattttgttgttaaaaattacttaagtgattcatcaagttatttaagaaaaatgaatggtcgtatattagcggtatggggaaataatgacttaaacgttaatgctcagcttaatgcttgtcgctatcgtgcaatattaaatactcatcatcaagctgatattgttgttttccctcatgctagtcatggattactccgtgtgcctgaatttaattaccaattagaaagtgattggccaatataccgtcaattacaatttctgtgggctggccgtaaagcttacactgaaggttcgttaccacttattatcgattggataaaaaataaaaatccggatttctctccctataatatggattgtaatttatga

SEQ ID NO: 305550 - DNA, 483 bp, Proteus mirabilis
atggctttaattgttatagacgcacaaaatgactatctttctgatggtcggtttcctttatggaatattgatactactttggagcatatagccaataaagtttcagagtatgaaagaaatggcgacactgtgattttcattcagcacttatcaccacaaggagccgctttttttgatgaaacaacagatggttgtgaacttatatctaaactcactagcttatctccaaaccattttgttgtgactaaaaagcacggtaattcttttgatgaaacaaatctcaatgacttgcttataacccatgatattagccatatcgaactatgcgggatgatgactcagaactgtgtcctatttactgctatttctgaacaagcaaataaatataaattaactgtgttaggtaactgctgtactagcgtctcacctgtaatccatgctgtagcactgaaaggcttatctagaataactaatgttatttaa

SEQ ID NO: 305551 - DNA, 189 bp, Proteus mirabilis; identical to SEQ ID NO: 301309

SEQ ID NO: 305552 - DNA, 507 bp, Proteus mirabilis
atgacgactatttttgatgttgtacaagctatgtcagggcagaaaaacgtcattgttattcctgttccctatttagatttttttaagggggatcagcaagctcacgccttgtctgcaattttaaatcaacttgtcttctggtctggtgtttcatcaagtgctgatgatggttggttctataaaagccatgaagaactagcagaagaaattcatggtctttctggtgaagagcaggctcgacggctcgttgataaattacgtaaaaaatattttcccggtgtgattgaaactaagacaaaaaaggtcaatggcacacccgttactcactacaagatagatggcaataagcttatctctatgattttcccgtctatttctgaaacgtcgaaagtgaggaatcctatctttatacagatcttaactcagataaaaacttacagatcagtaaagacctttcgtcgcagaattctaacgaatccagcgaccagccaaaaaatgattttttaa

SEQ ID NO: 305553 - DNA, 450 bp, Proteus mirabilis
ttgacggatgatatctgtctccataaatccaatctaaaaggcattttcaaaactctctcagaagtaacagaaactggtaagcgttaccgaatcaaaatcaccgaatggcgtgaactcagaacaataccaatgaacaaaacatggcgtatgtggatagaaaccacaggcgattggctgcgtgcgcgtggcgttgtcattgatattaaaaatggcgctggtgaggttgttctatcaaagccaatcactaacgaagaaacgcatgagtattttgttggtcactggctaggtcgtgatgaaaacggagagcgtgagaaaacccgcaagatggataaagcacggatgctctacatgatggagaaacacgaagcatggtgtattgaaaaaggcattccaatcatcatcccaaacgacagcgaatacatgaaactcaaggagcagcaagagagatga

SEQ ID NO: 305554 - DNA, 246 bp, Proteus mirabilis
atgcagggaactaattgggttaagacaaaggacaaattaccaaccgaaggcgaggcggtaattgttatctatggcgaacatatccagaacataacatacgagctaatttcatgtggtgttgactgcgaagaacttagatggataccacacaataacagcgactatgattcggatccattggaaacattcgactactggatgtacatcaaagacctgccgctcccaccaatgccagagggtgaatga

SEQ ID NO: 305555 - DNA, 294 bp, Proteus mirabilis
atgaacaagcaaaaggaaatcccatttggaactattgttgtaattcatcacgctgttgatgacgaaaacgaggtctatttaaagggttgccatggtgattttgacgcaactgacattcgagagtttcaagaagaaatatcaatggttttgaccggagaagattactttcagggtgagggggtctatacgctaaaaccaactaatgattattacgattaccatcgtgaaattacatttgagttggtttcatttgagccactgataggggaggaggcatctaatgcagggaactaa

SEQ ID NO: 305556 - DNA, 255 bp, Proteus mirabilis; identical to SEQ ID NO: 5118

SEQ ID NO: 305557 - DNA, 702 bp, Proteus mirabilis
  misc_feature (625)..(634): n is a, c, g, or t
atgagtgatcgctatgttattgaagctttattgcgtccagcggtcgaatttaataccgctatcgtgacagcgtgtgcaagttatctttgtattactgcaccttgggcaatggctttagcaccatctgttagttatgtcacggcatcagggtttgctattttatcaataaggcgagttattcaaggaagtcgcgttttacgttatcgtcgtaatattcgtcgtttaaaacgttatgtgatgtcgagtaacaatatccctgtaagccatcatcaactcttcttaggaaaagggttcttatgggaacaaaagcacacacaacgattattagatacgttacgacctgaggttgctaaatatattcgcccacctaagctgtatcgtgtggcacgtcaatttgaacaacgctatgaatatcatttcccttcactatgttcattattagcatccgattcgatatttaatcctgttcgcccattaccacccgttggcgggaaccctgcaatacatgggattgagttaaaagaggtaaatgtctctataaacttaagtgaacgagtggggcatatgttggtattaggaacaacgcgagtgggtaaaacacgttttgctgagttactgatcaccnnnnnnnnnncacccaagatattcagcgaggtaatgtcaccattgtttttgatcctaaaggtgatgctgatttattaa

SEQ ID NO: 305558 - DNA, 2064 bp, Proteus mirabilis
  misc_feature (2008)..(2017): n is a, c, g, or t
atgactgacagccaaaatttcgaatcccacacccccatgatgcagcagtatcttaagcttaaggcagagcacccagaaatcttactgttttatcgtatgggtgacttttatgaactgttttttgatgatgctaaaaaagcctcacgcttattagatatttcattaacaaaacgaggtcagtcggcaggtcaacctatccctatggctggcgttcctcatcatgcggttgaaaactatctggctaaattagtgcaattgggagaatccgttgccatctgtgaacaaattggtgatccggccaccagcaaaggccctgttgaacgtaaagtgatccgtattgtcacaccgggcaccgttacggacgaagcgctacttgaagagcgccaagacaatctattagccgctatctggcaagataaaaatggcgcttttggttatgccactttagatatcacctctggacgttttcgggtcactgaaatgccggatagcgaaagtatggcagctgaactgcaacgcactcacccagcagaactactctatccagaaacctttgagtcaatggcattaattgagcgtcagcaaggtttacgccgacgtccaatttgggagtttgagtgtgaaaccgccaaacagcaacttaatttacagtttggaacccgtgatttaactggatttggtgttgaaaatgcccgacttgcactttgtgctgcaggttgcttattacaatatgttaaagatacgcaacgcactgcgttgcctcatattcgtagcattaccatggagcgtccacaagataccattatcttagatgcagccactcgccgtaatttagaattaacccaaaatcttgctggcggttgtgataacaccttggcatctgtacttgatctgtgcgtgaccccaatgggaagccgcatgctcaaacgttggatacacacccctttacgccagcgtgaacaattaattaaacgccaagatgcgattagcgccttacaacccctctattttgagttacagccttttttacgtcaggtgggtgatttagagcgggtacttgctcgtttagcattgcgatccgctcgtcctcgtgacttatcacgtatgcgccatgcctttcaacaatatcaagatatccaccaagtgcttgatcaggcggatatgccctatattaaagaattacagcagcgtatcagccagtttgatgagttgcgtgaattactggaaaatgccattgttgaaacaccacccgtattagtacgcgatgggggtgtgatagcccctggttataatgcagaattagatgaatggcgagcactggctgacggtgcgagtgactatcttgaaaagcttgaagttcgtgaacgtgaaaaatggggtattgataccttaaaagttggctttaatggggttcatggttactacatacaagtcagtcgtggccaaagcaatttagttccaatgcactatgtgcgtcgtcaaacactgaaaaatgctgaacgctatattattcctgaactaaaagagtatgaagacaaggtattaacctctaaaggtaaagcattagcaattgaaaaaatgctctatgaagagcttttcgaaaaactattacctcatctaaccgccttacaaaccagtgccgaagcgttagctgaaaccgatgttctggctaatctcgctgagcgtgcagaatcactcaattatacacgccctgaattaacagaaaaaacaggtattcaaatcactggtggacgtcaccctgttgtagaacaagtactgagtgagccatttatctcaaaccctctacaactcgcgcctcaacgccgtctactcattattaccggccctaatatgggcggtaaaagtacctatatgcgtcaagcggcattaattacgctactggcttatattggtagttttgtgcccgcagaaaaagcagtaataggcccaattgatcgtatttttacccgcgtgggtgcctctgacgatctggcttccggtcgttcannnnnnnnnntcaacatttatggtggaaatgacagaaactgcaaatatccttcataa

SEQ ID NO: 305559 - DNA, 228 bp, Proteus mirabilis; identical to SEQ ID NO: 300275

SEQ ID NO: 305560 - DNA, 2433 bp, Proteus mirabilis
atgtcaaaaattaaaaataatgtttctatcactgaaatgagccggcgtggcttcattcagtctgcagctgttctttctggcgctgctgctgtagctggaacggtatcattacctttctctgctaatgctcaaacaccccagggtattcgtcctgatgagacgtctgaaaccatcaaatacagtgcatgcttagtgaactgtggtagtcgttgcccattaaaagttcatgttaaagatggcgtgatccgccgtatttccaatgaaaccatgtttgatgactcaacctttggtcttcatcagatccgtccttgcttacgtggacgttccgttcgttggaaaacttataatccagaccgtttaaaataccccatgaaacgtgtcggtaaacgtggtgaaggtaaattcgagcgtatctcttgggatgaagcgacttcgattatcgctgataagctaaaatatactatcgatacctatggtaatgaggctatttattaccaatatggtactggatctaccggagcgaatttacatggtagaacagcctgtaaacgtctattaagtacagtcggtggcttcttaagtgactacggtacttactcttattcacaattaaccggcatcgtcccttatgtgtatggtgatatgctggaatctctgttaacagaaatcgaaaactcagatttggttgtgatgtttggtcataatcttgctgaaactcgtatgtctggcggtggtcagttctatgaaacactgaatgcgttagataagagtaaaagtaaagtaattattatcgacccgcgtcgtactgatagtgtcacaacattaggtgcagagtggatccctatctatccgggtactgatgctgcattagtggctgcgttaggttatgtgatgatccaagagggtatcactgatgaggcatttttacgtgaatattgcatcggttgggataaacaaactctgccagcctcagcacctgaaaatggctcttacaaagactatattctcggtaatggtcctgatgggattgctaaaacccctgagtgggcaagtcaattaaccggaatttccgttgcgcgtattattcaattggcacgtgaaattggtaatgccagagccgcgtggatctcccaaggctggggtattcagcgtaccagtaatggtgaacaagctcgccgtgcaattatgatgttgccattaatgtctggtcatattggtcgtcctggtactaataccggatgttggggcggtagcattgaataccctgtcgcaagttttgccataccaaatccagtaaaaacccagatcccaacgtttatgtggtctgaagcggttgctcgtggtgaagagttaaccagtaaaaatgccggtgtcagaaataaagataagctggatacgggcattaaatttatgtggtgttactccagtaatgtgattggtaaccagcatgctgatctcaataaaacacatgaattactgcaagatgaatcaaaatgtgaatttattttagtgtgggataaccacatgacaccatcagcaaaatatgccgatattttactgcctgatgtcactactgtggaaactaacgatcttatcaataactcttatgctagtggtgcgtatcattatatggtgcgtttacaaaatgccattgagccgttatgggaaaatcgtcctaactatgatgtattggcagatatcgctgaaaaattaggtgttaaagagaaatttactgaaggtagaacctaccaagagtggattgagtattgctataaccaagtaaaagcaaataacccagcgcttccttcttttgctgaaactaacgatatggggattgtggatagaaaacttcctcctcgtagcgcttatgtggcattagaagcatttcgccaagatcctatcgccaacccactaaaaacagcatcaggtaaaattgaaatctattctgagaaattaatgcaagacactgaaggttggatcttaccagaaggtgatcgtattcctgcaattccagaatattgtaaaaatgaagaaggtgttgaaaacgttaccttaaaagagaagttcccactgcaaatgacgggcttccacgataaaggtcacgtccactctacctattttaacgtcgcaatgttacgtgaagctattccccatcaattttggttaaaccccgttgatgcggcacagcgtggattaaaatctggcgatattgctgagatttataacgaacgtggtcgcttgcatattcgtgtcaaagtgacagatcgtgtattacctggtgtgattgcagtaccacaaggtgcatggcgttcacttgatacaacaggtgtagataccggtggatgtattaatacattaacaagctggcacccatcgccgtttgctaaaggaaatccacaacatactaaccttgttgaagtgaaacgtgcataa

SEQ ID NO: 305561 - DNA, 651 bp, Proteus mirabilis
atgatgtatcacattatacctgtgacaaattatatgcaaaattgcacccttatctggtgtgatgataccaaagaagcggccattgttgatcccggtggtgatgtcgaaacattaattgcagaaattgaacaacgtcaattaaagttgactaaagtgctattaactcatggtcactttgatcacgtagcaggaacagctcaaattgttgagcattttcatgtgcctgtttatgggccacataaagatgataacttccttattgaagatttagaacaacagtgtcgtatgtttaactttcccagtggaaaatcttttacgcctgatcaatggttaaatgaaggggatactgtcactattggtaaaaccattactttgtcggttttacattgtccgggccatacacctggccatattatttttgttaatcaccaaaataaacttatctcgatgggagatgtattatttcgtgaaagtattggtcgtactgatttccctcgtggtaatcatgccgatctgattgcctctatcaaaaataaagtattaccactaggtgatgattatctatttatccccggccatggccctatgtctaatttaggtcatgagcgtcaatataatcctttcttacaagatgaaatgcccatttggtaa

SEQ ID NO: 305562 - DNA, 204 bp, Proteus mirabilis
atgacaactgaaccaataatcatagcgccagatggtttcactaatgaagatatcgttgcttggatgaaagataaattatcttctgttgatcatctgcttgagctttatgctaaacgtggggagctggtggctgacttatcaaaattggatgatgaaatagacgagtacagaatcaaaagtgctattcagacccaaagtaaatga

SEQ ID NO: 305563 - DNA, 255 bp, Proteus mirabilis
atgcaccttttctcattgcagattacttgtggtcgaatatcttcaattcttaatttaagacgggcttgtacttgtgacagtgaaggcattgaagtcacccctttttgttctataaatgcagacaagaaagcactagcaaataaaacactttctggcattgtgcctcctgcggctatttttgaggcaaatgcaccattaaaagcatctgttgctgccatcgtatcaacacgtagagaaggtagtggcggaatatga

SEQ ID NO: 305564 - DNA, 417 bp, Proteus mirabilis
atgaagtatgatctaaatgacctctattattttgttaaagtggtggagtttggcggtttttcacaagcggccgaaacgttaggtattcctaaatcaaaacttagtcgtcgtattgctgatttagaagagagactaaaggtctcgctgatctatcgttcaactcgtcaatttcatgtcactaagatagggcaaactttttaccaacagtgtaaaaatgtcgttgaacaagcggagattgctcaagaggttatttgttcagctcaagggcatcctcacggcacgatcaaactctcttgcccagttgcattactgcaaatttatattcaagatattttggtggattttatggcaaaatatcctgatatcaatatacaaattttagcgatcaatcgccctgtggatgtgatcttgacttag

SEQ ID NO: 305565 - DNA, 678 bp, Proteus mirabilis
atgagtactcctgcaaatttcaatggtcaacgtccagttattaatccagatgatgctgttatgttattgatcgatcaccaaagtggtttattccaaaccgttggtgatatgccaatgacggaattacgcgctcgtgctgcagtattagcaaaaatggcaacattagcgaagatgccagttattacaacggcttctgtccctcaaggtcctaatggcccattaattccagaaattcatcaaaatgcaccacatgctaaatatgttgcccgtaaaggtgaaattaacgcatgggataaccctgagtttgttgaagctgtgaaagcaacgggtaaaaagcaattaattattgctggtactattacgagtgtttgcatggcattcccagcaattagtgctgttgctgaaggttatcaagtttttgctgtgattgatgcatcaggaacgtatagcaaaatggcagaagaaattaccttagcacgtattgttcaagctggtgttgtgcctatggatacggcagcagtggcttctgaaatgcaaaaaacttggaaccgtgcagatgccgctgaatgggctcaagcttatacccaaatattccctgcttatcagttattaattgaaagttatagtaaagctcaagatgttataaagaataatgaaactttagattcacaacgttaa

SEQ ID NO: 305566 - DNA, 2211 bp, Proteus mirabilis
atggatggaacgaactttgaacagtggcaagaaataactaataaagactatgggaactatagtttaacggaaagaacgtatcaagttattgaaattattcatgcaatttatgatactcctcacttaatagataatttaagtgaactatctaaaaataggcttaatgctttttttgatgagggtaataaaggtattttatcacgagtattattgagcaaaatttcaagctttgaactctataaagagaccataaataatttaaaaaaactcgctgttatcagtcagtctgatgaagagattagcgctttatcgccgacagaagcattaaataaactcaatgaatttaaaggtgaagttaacttagccacaagtgaagatagctctaccatttcttctaaagtggaaattaataatcttgtcattgacaaaagattactctgttatttaggtgcaaagataaatggtgaaagtatcgatgcgatagatcttaatcagatagagaactgggataaaaaaattacttttgatcctcagcatcttaatgattattttttatctgtgacaggcaatgaaaaagataaagaagttattgcattattacgttatctattaaataacaaacaagataaaattaaatattttctttctcatatgtccagtagagctgattatgtcgcggctcatgaaagattaatgaaaataatagcattaggtagtaaacagtataatcagcaagattgggaaaatttaagaataccttcattaaaaattcccagacatatgagagttatcagtaaaattggttacgctaatattagcttcggtatatggcaatcaatcaattcaacctttatgcttgctgagcaacttaataatccgctattaacccctcaagagcatagagagaccatcaataatcttgccataacatggtcagaaatggcctataatggcttatctgaactcattgaaatcgctttagctaaaggattattaaagtaccgtaataatcctttggagtatattagtaaaaccagcactcgaataggtatcgggcttaatatcctgtctattggatttgatatctataatatctacgataactttagtcgtatctcagtagaaaaaaatgaaaaacgacggattgactatattgtgaatggctctttagctatagtttccggattggttactttgggggtttctatcgcaatgcttgctggctcgacggtcgcggggcctattggtattgtcgcgggcgctgttatcgccttagccatttcaatttataatgccgcaagactgatagaagaagcgaaagaaaaaataggatttacaccactagaagaacttaataatggtttttatgcatttttaatgggggatatcttaccaagcaaaaagaatgaaatcgtctatttagagacaatatcacagttagaaaccatgattgaccaaaatgcgcaagaacatcttaaagaaataaaaaaacaggagcctcacagttattatttttatacgaatgagaaacaactttatgaagaacatcattattataaagtgatccctcgtatattggggaaaacgttagataatatacttaatccgtttggagaaattgttgtacaacgagtggcgaaaaatttaagtaaagaagaagcagaaaagatagctgcgctttctcattatcttagtgtcgaaagaacggaatataaatactatgttcctaaagaagccatcgcaacagatgaaattctcatttttgatatggatttttatgttaatcaattaaatcgttatacgattaattttgcatttgaagatgataatcctgtttttgaggatgaggtgaatatctctttttttgataaaataagaacaacaaaagaaaaaacatggcaaaatttatcatcaggagaattaacagatgatttaattaaatcaacagctgaaaaacaatattttgagccaagttggcgtgagaatgagctattttattttaatacttataatggggatgatattattgctgcaccattaataacacaaaatatatttgatgttcataatgggactaaacgattaagtggaggagaaaaagatgacacctttaatgtgttcacttctgaatctcctcgttatgccagccgtttttatggtagagaaggtaatgatacattatgtattattcagacagaaaaaaatatatag

SEQ ID NO: 305567 - DNA, 669 bp, Proteus mirabilis; identical to SEQ ID NO: 297219

SEQ ID NO: 305568 - DNA, 1167 bp, Proteus mirabilis; identical to SEQ ID NO: 297218

SEQ ID NO: 305569 - DNA, 300 bp, Proteus mirabilis; identical to SEQ ID NO: 297217

SEQ ID NO: 305570 - DNA, 330 bp, Proteus mirabilis; identical to SEQ ID NO: 297216

SEQ ID NO: 305571 - DNA, 192 bp, Proteus mirabilis
atgatatgttttactttttcagtgaccatttcaccggaaatttctgacatttttactgagaaggtgccgccaaaaccacaacaagtttctgaattggcgaaaggtaacatttcgagtccttcaacatgttttaataaggttaaaggttcactaacaacccctaactttcgcgttaaactacaagagggatga

SEQ ID NO: 305572 - DNA, 1257 bp, Proteus mirabilis
atgactcaaccaattacagcaacagacttttcaattaatgatatgaaaacattaattgaaacaatgcaaatttataaaaaagataaccatgacaaagggataacacgtattgcctatagcgaagaagatgaagcagcccatctctatcttgctagtgtaatgaaagaggcaggccttgaagtctatcgtgacggtattggcacactctacgctcgcttaccggggcaagatagaacattacccgccgtaggaacaggctctcaccttgataccgttccccaagggggcgcttatgatggcgccttaggagttattgctggtttttatgctttgatgcaatacaaaccacaacaactgaaacgtgatctagagttaattgtattccgagcagaagaatcgagccgatttgggttttcatgtatcggaagtaaagtgctaacaggaaaaattgaccgtactcgatgggaacaaaatagagatgatgaaggtaataatttctttgatgttttaaaatcccttggttatcagcatgaaaacttagatcaatgtttacttaaatcagaccgttatagtgcatttgttgaattacatattgaacaaggtaaacgtctagaaaacgatcaaaaaacaattggaattgtcaatggtatcgctgcgccaacacgcttttcagtcaccgtaaatggccatgcagaccactctggtgcaacgccaatgtatcaacgtcaagatgcgttagtggcgagtgcgggtattattactgatatcaatcatgctgcctgtacggaagcggtatacggcaccgtaggtaccattggtaaacttaatgtcataccaaactcgatgaacgttattccagggcaagtaaaattctccgtggatattcgtggtattgatacggacagtattcaacgtgttgtacagcgtttaacaaacagtgttgagaaagcagaaaaagattttggtgtaaaaataatagtgcaacctatttcggctgaatcaccagtaaaactggatgactcaatttgccaatttattgaaaatatttgtcaaaaacacgatatcaattatatgactatgttaagtggtgccggtcatgactcaatgaatatggcatctttatacccgacagcgatgatttttaccccctctgttgcggggattagtcatcacccagatgaatttacggagtttagtgatattgcaatagctgcagatatcttagcggaaacattaggtgttctagctaatcaataa

SEQ ID NO: 305573 - DNA, 1734 bp, Proteus mirabilis
atgttgatggatagtgagtccttttattctagtccaaataactcacagataaatactaatgagagattagagaacaaaataaaaagcaatactattgaaaataaagctgtgaagggatcttatggtgatattttaaataatttaaaccagcagctaatgaataataaacctgagattgagccttatttctcacattacaactctcccgtcatgcgattggcgaaattaggctacctttctgcactggcctataatgctgataatgtttttaacaaacattcacccatacaaaaacagcaagagcaaaaaataactcatgatttgtgtaaactaatcggttttgaaccagataaagcatttggacatattaccaccagccatgtttttgcttgttatgaaattttgtgggctttgagaaatttaaaaacactgccgatggcgattgcacgtcatccaaaatcaagggatctggttgcagataaaaaagcatttgagttatttaatatgtctatcactgatattttatccatcagtgaacagctatatgaacgagatatttttgatgatgtcagccatttaacttgtcgtggcaccggcatgacaagaacgatgcatttaggtaaattactagtaccgatataccgcttcgaattttggaagaaggcgatggatatcttggggttaggttatgataatctcattgccttaccaatagatgaagagtttaaaacagatatagctaaaacgcgtcatattgtgcttcgtctaatcgagcagggagagccgatactcggtattattggcgtgttaggctcatcgacatacggtagcattgacaaacttaagcctcttttcgaattacgtgaagagtgtgaaaaacaacataacaactcattctatattcacattgatgcatcccaattaggctatatgaaaagcctgtttcttgacgaaaataatagcatcatcccttataacatattgtgcgataaacttaagcaagaagcacctttacttgagttaacctcagatatttatgatagttttactcagctatcaagagctgattctgtttcttttgagccatttcaagcgggattttctccttatcctacggggattgtttgtataaaagatgctcgattaagccgttttctcgctaacccgccaaaactgtgcccagaagaggggaatattcccgatgaaatcgatgggatccaatcagcacctgcagttgcatcaatgtgggggatccatcagctatatgcttttaatcattttgggtatgggcaatgcgctcaaaatcaatgggaagctagagtaaaactggaacaacaattaaaacaagagaacgaatttgaaaaatcgggtatctcttatgctattcatattttgccagtttcagattttaataaacttacttttgccattgctcttaaaggcaaccaatgtttaaaaatacaaaatcagctaaataatgctatttataaaaatttagaaataaagagccaatataagccagatctcaacctattagtgctgtgtgctcgtaatagcgatgatatacctactcagttttgtcaacaatgtcatttaggtaaagatgaatggaagcaagttaaccacttaagtcttttacaattaacgataaaaaacactgataaatggagtgaagagcatattaaagcagggtgcgactatattaaaaaagttgtcctatctgcattaaaatag

SEQ ID NO: 305574 - DNA, 483 bp, Proteus mirabilis
atgacagcagttggcactaattttgatattaatcaacaaattttttatataaaagaggggagtggaacattagaacatctgattattaatgaggcactgaaagatgaaagccaattagaacctctttttgtgacaataagacacagtgaaagttactggcttatattacatctgattagttatttggatgagaaaaaaagcaatattgcacaaataggtgaacgatatggtgtatcagggacacattttagacgactgtgtaaacgttatttaggtaattgtggtaaaagtcaattacgttcatggcgtgcggcgtcttctattttgacaacgctatcaacagatgaatcattgactcaaattgcagtcgataatggttttagttcagcatctcatttttctaatgaaattaagacattatttggtattacaccaactgaatttcggcgaattggccaatatctttatgaacataaaaaataa

SEQ ID NO: 305575 - DNA, 543 bp, Proteus mirabilis
atggttccttaccaacccgtattaaccttttggtttgaagaatgtaccccaaaacagtggtttcaaaaggatagcgcttttgataaagaaattaaggatagatttggtgagctatgtattagcgcaagtcgcgcagagcttgcctcttggcgcgagagcattgaagggcggttaggggaaattattattctagaccagttttcacgtaatatttggcgtgatacaccaaaggctttcgcccaagataatatggcgttaattcttgctcaagaagccattcgattacccgaatatctcaccctgacaccagtaaaacgcaaatttctgatcatgccatttatgcactcagaatcacaaaaaatccatcaagatgccattgcgttgttttctcaattaaatgatgacgacacgtatcaatatgaattacgccataaagagattatcgataaatatggtcgttatcctcatcgtaatgaaattttagggcgtacttccacagcagaagagttagcgtttttacaacaacccggctcctcattctaa

SEQ ID NO: 305576 - DNA, 165 bp, Proteus mirabilis
gtgttattcactctaatagaaggaggaggcgttgtttgtaacggagttgaacctctttcaataggtgttgccactcctgcattactgttagttgtaacaggtgatgtagaaacggtacgatttgacgaactatcattgacagaggttatcggtgcaggacgataa

SEQ ID NO: 305577 - DNA, 132 bp, Proteus mirabilis
gtgttattactggttgttgccgaagttgttggtgtcgaagtcgttgtctttggcggtgtcgttgttgttggtttcgtgatcaacggccccattgagctattattatttgacggcttagtttgtgccgtctga

SEQ ID NO: 305578 - DNA, 186 bp, Proteus mirabilis
atgatattattactgggccacaatccttcgattgcaattccaacacctgtaaccctagccaactttggcgctatagaaatagcttctaatgcactagttctcaacgctgtcaatgaattagaaaagatactcttaacattagcggaagcaaatggacttgatgtaaaactaagaacacctttataa

SEQ ID NO: 305579 - DNA, 768 bp, Proteus mirabilis
gtgaaagaacgtttagacgaaatcaaccgtatttctgaacaaactcagtttaacggcgtgaaagtactgagcggtgagaaatcagaaatggttatccaagttggtactaacgataatgaaactatcaaatttaacttagataaagttgataacgatacattaggtgttgctagcgataaactgttcactgaagctaccgtttctaaaggtgagaagaaagcaagtgctgatgatgctgttattgctgatttaggtgttgctggtggtactactctaaaagctggtttaacagttaaaaaatacgaagaagatggcaaagttgttgatggtaaattcgttgcaactgaaggtggtaaaagctacttagtttctgcttcagattttgaagctgatggtactactgctacacaaatcaacttaaaagcaggttcagctgttgctggtaacgaatttactgctgctgcaggtaaagacgttaaaactttaaacgttaaagatgacgctttagcaactttagacaaagctatcaacaccattgatgaaagccgttctaaattaggtgcgattcaaaaccgttttgaatctactatcaacaacctgaacaacactgttaacaacttatctgcttcacgtagccgtatcttagatgctgactatgcaacagaagtttctaacatgagccgtggtcaaatcttgcaacaagcgggtacttcagtacttgctcaagcaaaccaagtaccacaaactgttctgtctctgttacgttaa

SEQ ID NO: 305580 - DNA, 840 bp, Proteus mirabilis
ttgggtattggttgcagtgcaacggccggcgctatattggcactcctttttggtgtgatcagttttcaagatattccgactgtttggaacattgtgtggaatgccacagcgacatttgttgcagtaattattattagcctacttttagatgaaagtggcttttttgaatgggcggcattacatgttgccaagtgggggggtgggaaaggaagattactattcagttatatcgtgctacttggtgcaatggttgctgctttatttgctaatgatggtgcagcattgatactaacgcctattgtgattgcgatgttacttgcacttggtttcaacaaaggtacgacattagcctttgttatggctgccgggtttatcgcagacacagcgagcttgccgctgattgtttcgaacctcgtgaatatcgtttctgcggacttctttaatattggatttactgaatatgcatcaattatggtgccagtcgatattgcgggaattgttgcaacgcttgtgatgctacattggtttttccgtaaagatattcctaaccaatatgatgttaaaaagctgagtgagccagctttagctattaaggatatgactacgtttaaagcaggttggcttgtattgttgttattgctcattggtttttttattttagagccattaggcattcctgttagtgcaatagcggcaattggtgctttaattctttgggtaattgcagccaaaggccgtacgattaatactaaaaaagtgttgcgtggcgcaccgtggcaaatcgtcattttctctaggatcttgagtaaatctgcaactctatttttctctgtggtgtaa

SEQ ID NO: 305581 - DNA, 177 bp, Proteus mirabilis; identical to SEQ ID NO: 305153

SEQ ID NO: 305582 - DNA, 597 bp, Proteus mirabilis
atgtcattagaagaaaaaaatatcgataaaccaagaacaaagccagccgaagttcgtttagaagagttaatgaacgccgcagaaacactatttcttgaaaaaggatttgatgccacaaccgtcagcgatattgtaaaacaagcgggggtcgctaaaggaacgtattatcactattttacggcaaaaacagatattctcgacgcactgcgaactcgatatatggattggtatattgataaaattgagcaagcaatggcaagctgccaaattcaagattttcgcgctaaattaaaacagtggtgtgaaactagcgttattgcttatgttgaaaaacaagaattacacgatatgctttttcatcaagtctttcatcaaagcggtaatattcatgaaaatagggcgctacagcagttacaaaagatattaatgggggggacagagaataaaacgtggcaagtcctacagcctgaattaacctgcacgcttatttatcatggtatgcatgctgccgttgataatttagaacacagtacggaatacacatcacaaacattaggtgcgctattatatcgacaatttacacaattattaagttaa

SEQ ID NO: 305583 - DNA, 321 bp, Proteus mirabilis; identical to SEQ ID NO: 300106

SEQ ID NO: 305584 - DNA, 312 bp, Proteus mirabilis
atgggagaagggcagattattgcaagtcagcttgcatatgcctattcaattatcggtaaagataatgcccaacgaaataaatcaattctgtcggaaatacaaaaacagaactatgtgcaatacgatgataacacttactttaaaatcctaaaacaagggaaacctgtggattcaattgcaggtaaaacagttgttttcgctatgcatgaacaattaactgatggtacagtaacacttaattatgacaaagctaagccgttaattttaccataccgccaacttccactgcctcttaatacttttgttgcttaa

SEQ ID NO: 305585 - DNA, 471 bp, Proteus mirabilis
gtgactcttcaacaacaaaaagcacaagcagatgatcaattaacacagatcccagcgttgaagcttgagttacaaaataaggttaatgaattagctgagctgaaaaaaagtttatctacgggcgagaaagcttttgatgctttgatttcagaaaaaaatggtgtaatcgctaaattagagaaagctcaggcagatctcgccaataagtatcaagcattggatacccaatttaaagagaacaataccaccattgggcaacttaaagagagcaaaatagcgaacgataacgcttatgctcaattagagaaacaactagcagaaaaacaatcgcttactgataaattaacgacacaattaacacaagctaaagatcagttagcaaaacaaaattctgaaagtaaccaactaattgcttcattaaaacagcagcaagtagaatcgacggctcaatttaagcaacaaaagtattaa

SEQ ID NO: 305586 - DNA, 327 bp, Proteus mirabilis
atgcaaaatgtgttgttaacgttatggcctttatttgcgttaattgcgctaggcgctattttaagaagaaataaagcatttgaacctgcattttgggtaggggctgaaaaattaaattattttttactctttcctgcattacttctcaatagcttggctaatgctcctttatctgatcctcaattacctcaccttgctggggctattttctcagtagtcatcattaccactattttgtgtgttatttttaaaaaaataaccggctggtctgctggccgctttggtgcgatcgttcaaggcaatattcggtttagctattgtcgctga

SEQ ID NO: 305587 - DNA, 516 bp, Proteus mirabilis
ttgctcgaaggggataataaacaaacacacgcttctgaaattcctccccaagatgaatggcattcagtcagtgaatgggataacgatacccctctcaatgctgatgaagtcgagatccgttattttaaaagtattgaacttgccgctggtgatggctgctgtactaacgaagatcataatggttataaattgagattctccaaaagcacactacgccgctatggcgcttcaccacaaaatgtgatctgtttttccgtctatggtgatagtatgtctccggttattccaaatggttcaacagtgaccgttgatacaggtaatacgcggattgtggatggcggtatttatgctatcgaacaagattcattatttagaataaaattactctaccgtcagccaggcggaaaattaattattcgtagctacaataaagatgaatttcctgatgaatttgcagaaattgactccgttaaaattatgggacgcgttattcactggtctgtgatggcttggtga

SEQ ID NO: 305588 - DNA, 528 bp, Proteus mirabilis
atgaaattaaaaaaactgcatttagttttagggttaggcttatctatcattgcgggctctgcattagcggcagatcaagggcatggtactgttgaattctatggttcaattattgatgctccttgttctatcgatcctgattcaggtgctcaacgtattccattaggtcaagtgtcatctagcgcactgaaggacggtggccgtagtgcgtcaaaaatgtttaaaatcaaattattacagtgttctactgagacatataaaacagtcaaaacaacctttaccggtgctgaagctcctgatgttttagagggggctttaggtattgaagggatcgccaaaaatgcagctgttgttatcaccaatgcaggtggtgaacaaatcaaattaggtcaagcaagtgccgcccaaacattgaatgacggtaacaatgacttaaattttgccgcttatttacaaggttcttcctcaaaagctgctattcctggtgattttacagcaatagccacttttgctttatcttatcaataa

SEQ ID NO: 305589 - DNA, 375 bp, Proteus mirabilis
atgacagattatatcgaaaaagattttctttatgttgtttatcagaaagattctatagagggacaatttgcaacaagcttagaggaagcaattatactaactaatcacgaaaatgttcttcttcataacttaatatctaatcttaaaccaatagtttataaagaaataacgaatggtggtgtaaataaagagcaactaaaagggagctcttttagattacaacagagtcttggtaataatagtggtaagtccgaattcgcaagtaagttactttatgaactgattacgtctgatgatgctgaaaaacctaagctacctaaatatattaaagatggcttttcttggttggaaaataaactaaggaatgaggtataa

SEQ ID NO: 305590 - DNA, 462 bp, Proteus mirabilis
ttgatcaacaaaaaagaaagtgaatcaataaaaaaacaattagcagaaataagaggtctatttaaagaactgactatttcacaaagttccttggagcttgaaattgcatctaactctttatccggtatgtcattactgacatttctgttatctaagacacgtgagttgacgttaaaggtcatgttacatcgttcggaaagtgaacagaaactttttaatgaaatgcaagaggtgactgaaaaatcacttaaagataaagttgaagagcaaaaatcattaatcaaaaaacaagaagaaattcagttttgggctggtattggtttaaaaatattaggcggattattaacgcttgttgcaggtgtttcttcaagcgctttaataatgatatctttgatcattttccccaataccgcttcaagtccatcattgagcactttttttagtatttgtctaatttgctga

SEQ ID NO: 305591 - DNA, 447 bp, Proteus mirabilis
gtgaccctgtgcgacgaagtggattggagtgataaaacgctacctacggatttttcaaacgccaaagcacaacgtattcaatggtctaataatttctgtgcggtaaaaagtttcagtaaagacggttcgacaaccgaacaaattgatgtcaccaccatttgcagtgatggcaaggaatatgaatccggcgatacggaatacggctcaattaaattgacctttttcttacgttatagctccagtgaggtgcagcgactcttgcgtaaatatgaaaacagcaaagaaaaatttgcggtgaaaatggtattaacacgagatgaaggctccatgttttattacggctctgtcgaaacgggcatgaacattgatggcagtgtagggcaaatgatggattcggggatctcgattaaattgtctggccgtgattatttgaatgtgaagaaataa

SEQ ID NO: 305592 - DNA, 759 bp, Proteus mirabilis
gtgtataagagacagcaatatgaaagccgccagttaaatgcattctataaagatttaaatattgaacaagatgaaaaaaaagaaaatttagcgaaattaatggttgttaatgcatatcaatcgtacccacaaaataaaaaatttatccaagatgcagaaaaagaggcattgatgggagcggcagatattatcactaatactggcgaaaaaattagtaaacacttgggggaaaaatacaaaactattgctaatgagatcgctagtgatttacgtaactttcagggaaagaaattacgtagcttgtctgatgcattaaaaatgatggaaaaaatcaaccgtaatcctaatattaagataaaacaagcggatagagtggtactggctaatgcagtgcgccatgtggatacaaaaatcctgtctgaaaattttcagcgtttaggtaagtcattcggggtattgggtaaagtcttgagtgttgaaaagcttcgcgaaaaagcagctattggttttgagactggtaactggaaaccattgatgctggaagtggaagctatgataatcagtggatatgctacggggatagcgataagtatagcaataagttttatctcatcaattgcatcatttttagctataggagcattacctacaaccttagcaattatagcaactataatgttaattagttatttagcatccttaattgatgataaagttgttgataaaattaacaacttacttattccagaagctcattaa

SEQ ID NO: 305593 - DNA, 171 bp, Proteus mirabilis
atgaaatttaaagtcggtgataaggttagagatgtagactttggctatgtaggggaaataaagaatattgatactagcaaaaaaaatccttatcaagttgaaataatagaatcggattggatatttacattttggtttgcagaaaataatttggagttgatcgatgaataa

SEQ ID NO: 305594 - DNA, 306 bp, Proteus mirabilis; identical to SEQ ID NO: 296601

SEQ ID NO: 305595 - DNA, 639 bp, Proteus mirabilis; identical to SEQ ID NO: 300208

SEQ ID NO: 305596 - DNA, 603 bp, Proteus mirabilis
gtgtacccctacagcgagaaatcggctataatccacttacccctacagaataagagattatcaaccatgccgaattggattgaggcagtgattgcctatttgaaaaaccaaatttcactgaggtttactatggtgtggttgctatatctggtcagtctgtggttatttttacctgaatcattctttgattttcttaacgcaaagccaatttttggctcggtaaataatatcaatgctgttctttttattattcctgttagcttctttctttcagatataacaaaaagaatatatttattaacttttggtataattaattccgtaaagttaaaatcaataaagcgtaataatcagcacaaaatatcatttgttatttcaagcctttctgaggatgaaaaggattacctagccatgttcattgacactggaaaggaatttctaggcgggaaaagaaatgaccctgttattaactcactgttggataaagacattctccatgattcgtcaaagcatttgagtatgagacataccaatgagtttataattaatcccaattattactcagaatgcgttaggcaattcactggatattttaataaatga

SEQ ID NO: 305597 - DNA, 162 bp, Proteus mirabilis
atgaacacacctgagaaattgcaggattttatttattatttaactaaagacgccgcccgaaattcatttgaagaatggagggaagatattggaattagttatgaacaatacgccgaaataaaagaatggttcaagcaatttgatattaagccatacgtttaa

SEQ ID NO: 305598 - DNA, 501 bp, Proteus mirabilis
atggcaattaacacaataacggcaagtggaaacttaggtaaagattgcgaacagcgatggacgccaaatggtaaagcggttgcatcttttagtttacctgtgaaacaaggttacggagaacacgaaaaagtatcttgggttatctgcaagatgtttggccctaaagctgaaaagctacctccgcatctaaccaagggaataaaggttactgttactggtgagttcgtcatggaagaatggacaagccagaacggtgagaaaaaatcagcgccggtaattatcgttgatcaattagattttggtggtaacggtggtaatcaggcaggaagccagaaaccacagcagaatcaaggatggggacaacctcagcaaccgcaagcgccaaaacaagcatcgagtaatcaaacaccacaaagtgagccacctcaagattgggatgatcctatacctttcgcccctatcggactcccctacccacgacacgctatttatgtgatttaa

SEQ ID NO: 305599 - DNA, 432 bp, Proteus mirabilis
atgtgcttgtggggcgggtttgacgctgtaaatatccccaagcactgtattgcccttgccaaacgatttcaccctcactgttggtcaacgcttccggtaagccacttaaactgctgtgcgtataataaatcgcccgttgcggatttagcgggttatccgtgcattcaatgcgggctagaggggtataactttggtcattgtaagcatgataaaccgtggtatggggcgctgcgctgctgtgctcagacaccagtcgcatccctacccagccaaagctgtacacttcatccggctcatgttgatgataggtcaccgtattggcaatcgcactggctttccatagccgtttttcaatccggcgccctaagatatcgtagcggtattccgctcgctgataccctaagggaccttggtcgatatccaccgcgataa

SEQ ID NO: 305600 - DNA, 552 bp, Proteus mirabilis
atgataatgtcgatattattacaaagtgggtttaatcgtacggtttttgattctggcttaatgtttgttcctgcaagtatcggttttatactttcctctttattcacaccgaagtggatcaaaaatattggcgaacatgttatctattggggcgcagtctgttatgccttcagctatattttgcttattttaggcgtctattatttgattacccctaagaacactacattaattattcctttcttattgttagttggctttacacaaggcatgattatgactcctatgctgaatttagtgttagaaaaagtgaagcctgaacttgtagggattgcttccggattaacggcaacattacaacaaattggggctgctataggggtaacatctgtttccatcattttgcaatttagcctcacacaggttatatcaaggaatataattgaacattataagatagcgtttagttttagtatgttgtttaattttataatggctatatgtgcggcttttttcttgaaaaaaataacaaaccataagaatacgttataa

SEQ ID NO: 305601 - DNA, 177 bp, Proteus mirabilis; identical to SEQ ID NO: 305140

SEQ ID NO: 305602 - DNA, 210 bp, Proteus mirabilis
atgagtagattagcgcatttaatacctaaaaagcaattccgttgtttacctgtttcaggtagtcagtcgtttcgctatgtagaaatcatagcctctgacgaacaaccaaacaactacaagaaatctgcatgtttggtagatagacaggctcttaaaaaggcgtggactgatttttattttttaagtggaggacgaggcaatgagcaatga

SEQ ID NO: 305603 - DNA, 159 bp, Proteus mirabilis
atgcaagggcatttagcgttactgatgaaaaatagtttggctgatggtgttattgataacgaagaagagcagaaaataaaaatgatgttagatggtttaatttcgcagatccacacatttatgaatgcatttgttttgttacatcaaaagagaaattaa

SEQ ID NO: 305604 - DNA, 528 bp, Proteus mirabilis
atggccgttattcttacttatgtcaatatttcccctattgtagtgatgcaacaaatgaattattcaacaggagagtattcaatattaatgacatcattagcaatgataagtatgaccatttcttttttaatgccaaaaatattaatgaaataccgctataagcatattttatcagtagggtttatatgttttggaataggtattattttcctttttatagggaaaaagagtgacatgcgttggttttttattacctttgcattatgcggctcaggatttgcgttattatttgggattattatgagccaagcactttctccctttagccaacgagccggcgttgcgagctctgtgctgggtatttcacaattaagtttttcttcactttatatttgggtaatggggtggattgaagtatcctcaataaatatgttggtggttattttatttatcagttgtattgtaggtactctttttctatgctttcctcggttcacagaacaaaaaaaggttaaatataatgtctaa

SEQ ID NO: 305605 - DNA, 426 bp, Proteus mirabilis
atgcaagacattgcccgtaaaaccagaaatcaaagcgcgcgtaaggcgatgaatgcaggtgcttcggcgttaaaagaagaaatcaaacatcgagtgcctatccttaaggaaacggtgcctcatcgacgcaaaggcactatcaagcgcaatattcgttctaaaacgaaagtacaacgcaatgggcaagtcaaaacgcgcatttgggtgaaatcattatcgggtaaaaaggtgtctgcctttaaacaagcaacggggaaaagtgcagcattgaacccaaatgatccgttttattggtggtttgttgagtttggtactgccaagatgcccgcacaaccgtttatgcgccccagctttgaggcgaaaaaggaagcgacggctaaagtgattgttcaaacacttaaagaggatattgaaaaagcaaggtag

SEQ ID NO: 305606 - DNA, 426 bp, Proteus mirabilis
atgcaagacattgcccgtaaaaccagaaatcaaagtgcgcgtaaggcgatgaatgcaggcgcttcggcgttaaagcaggaaatcaaacatcgagtgccgatccttaaggaaacggtgcctcatcgacgcaaaggcaccatcaagcgcaatattcgttctaaaacgaaagtgcagcgtaatggacaagtcaaaacgcgcatttgggtgaaatcattatcgggtaaaaaggtgtctgtctttaaacaggtaacgggaaaaagtgcggcattgaatccaaatgatccgttttattggtggtttgtcgagtttggtaccgccaagatgcccgcacaaccgtttatgcgccccagctttgaagcgaaaaaggaagcgacggctaaagtgattgttcaaacactcaaagaggatattgaaaaaacaaggtag

SEQ ID NO: 305607 - DNA, 246 bp, Proteus mirabilis; identical to SEQ ID NO: 305161

SEQ ID NO: 305608 - DNA, 270 bp, Proteus mirabilis; identical to SEQ ID NO: 300219

SEQ ID NO: 305609 - DNA, 198 bp, Proteus mirabilis
atgagaaggaaaaagtatcaatgccatgactgcggagatgaaacaaaaataatccaatcttatgatcaaacgtcaaatacatatggtttcataattcaatgccttaattgtgggtatgaggcaggcctattcgacacaattgaagatgctgaaatggtggttaagtgtaactcgcagggatgcaatgaagaggaatga

SEQ ID NO: 305610 - DNA, 174 bp, Proteus mirabilis
atgagtaagcagatggttttagttgcaagaacaaataaggttggctctgactctgaatgttggctgggaattactgaggacgaatgggataaattaaccgaagaagaacaatcaggatatatcaatactgcaattgataatcttgttggttggtatgtgaagacagagggataa

SEQ ID NO: 305611 - DNA, 372 bp, Proteus mirabilis
atgttaagctgggagctacgatcatggcatgatgcatccaatatagatgataacagcaaaccttatttttatgaccgaggcataccggatatagcaggttatttacacttttgtgagcgtcctattccccaacatcttgaaaacgcaataaggctatatagatattctacaaccgtgtttattgctccaccatggaaagaaatttacttacaagataaagagcgccaacagacatttgatgaagccgtagcaacttatcaagcgatgctggcgatatatagacagtataattataccttaattgaattacccaaagccgatgttaaccaaagagtaaaatttattataaacaacataacatcgctatcttag

SEQ ID NO: 305612 - DNA, 165 bp, Proteus mirabilis
atgactgaattagaacttggtggtaaaaaattagagaacactatggttccaccttttgaagataagtctatctctattccaacatcagcttatgggaaactctcgtttcaaactattaatgattatggtgccatcacaccaaaaacaatcgtcgacgttagataa

SEQ ID NO: 305613 - DNA, 945 bp, Proteus mirabilis
atgtttacaattcactccatcggggactcggcattcttggagcaaatcctgattgcggtgtccatgatcactggtaccggggacttcgagaaaatggtcagcattggcttgctgctcggtgttctcatcatctgtatccagtcagtttttcagggtgcaaaacaaatcaacttccagcaggtcttgctgagctgggtcatctatgcctgctcctttggaccgaccacgacggtagccattgaagacgcctatacaggcgaggtgcgtgttgttgccaacgtccctatattggttgggtttgcgggcgggatgatctccaacgtgggatacaccattaccaacctcttcgagaccggatacggggtcatcgtaccgaacgttacggaaagccacttctcggagactctgaagctgctgaatgacgttcgtagaagagcttatgataccggtgtcttcaccgccctcaatgcggccaatggcggtggatacgtcgatgtgcgcctgtcctggaacaactacatccgtgaatgcacactgaccaaggttgaccttaaactgatgtctctggatgaactcatgaatcgtcctaccgatacagcacttcggtttaactcccagctctatgggactcgcctttacctttctgcgggtaatcctgatggggctgattacacctgcactgacgggtgggtcgccatcagtaacgccactgcaaacttgaatagccctgtggtggttgacgccttgaacaacttgctgggaatcgataccagtgccggcgatgacgccatcaccaaaatcggcgattcgctgcaagctatgggagcttcgacaacatcatccatcgattatttggaggcagccgtgctggaaccccttttactacgaggcagccgctggtcgctatcaggacttacaggactacggctccgcgctgatgattaa

SEQ ID NO: 305614 - DNA, 903 bp, Proteus mirabilis
atggatagattgctcagcatggcggtgttcgtctccgcagtcgaagaaggcagcttggtaagcgccgctcgacggtttggcctgtcaccgtcgatggcgggcaagcacgtttccgcgatcgaggaacagctgaaagttcggttgcttcaacgcagcacacgcaagttgacgctaacggatgtaggaaggtcctactacacgcgatgcaagcgcttgctggaagaatacgaggacgcgaaccgcgaagcccaggacgcgcaacagagtgtgcatggaattttgcgcgtggctgcgccgacaacctttggggcactgcatcttggtcgtgttgtatcgaattatctggctgaataccccgatgtctcgatcgagaccacgctgagcgatcgctatgtcgatctactggcagatggcatcgacgttgctatccgcatcggccgtctgcaggactccgacctcgttgctcggcggctcgcctcgtgtcgcatgatgttctgtgcagccccatcctttttggcacgacatggcgagccgaaaaccatcgaacagctccgccaggcacctcggcttgctttctcccaggcggtttcagccggagactggagcgttacggatgctaacggccagacatatcacattgatggtgagatccggctcgctgcaaacaacatgcagatgctgctcgcggcagcgctgacaggggcgggggtggtctacggccctagctttgtgttcgagcagtccatcgccagcggtgcgcttcgtgtcctgctgcctgaccacaaaacaaaggatttggcgattcatgccatctatccgagcaagcgccatgtgtcgttgaaagttcgccgtttcatcgagcatctgagcatgagcttcgacgacatcccatacgacgcctga

SEQ ID NO: 305615 - DNA, 768 bp, Proteus mirabilis
atgaccaaacggccagaagaaatcgcgctgatggcggagtcaggccagcttttggcacaggtgttcagccatcttgatcggctgaatctgattggcatgtccacgatgcaggtcaatgatctggtcgatgacctcatcgtccatgaattcaacgcacgcccggccagcaaagggcaatacggttacgcgtacgcgctaaacgcctcccgcaaccatgtggtctgccacggcgttccttccgccgaggacatcctgcaggacggggacatcgtcaatttcgacatcacgctggagaagaatggctacatcgccgattccagcaagacctatctggtgggccaggtgtcgcagccggcacggcggctcgtgcaagtggcttatgaagcgatgtggaaaggcatccaggctgtccacccaggtgccacgctcggtgacgtgggccacgccatcgagcggcatgcccgcaggaatggttattcgatcgtccgggaatactgtgggcacggtatcggtcgtgaaatgcacgaggacccccaggttttgcactggggcaagccgcgaacggggctagtactgcgcgaaggcatggttttcaccatagagccgatggtgaaccaaggacgacgtgccattcgaactgaggacgacggctggacggtggttacgcgcgatgggcaattgtcggctcagttcgagcataccgttgctgtcaccgggaacggtgtgcgtgtcttgacgctgcgcccgggcgaaaaggcgttgcactga

SEQ ID NO: 305616 - DNA, 1083 bp, Proteus mirabilis
gtgggtcatcccggtggccaggctcaagcagcgcaagctgctgaccaagaagaagcgcaagcgcctgatcgacatcccgccctacatcgtgccgctgtcggtgcaggcgcaggcgcaggcgcaggcgcaggcgcaggagatcgttcgccacctgctcgacaactgcaagccggcccaagtttatctcatccccggcgactggtgcctgaagaacccgatcagcgagaacacgctcaacgccgcgctcaagcgcatgggctacgaggaccaactcacggggcatggcatccgggcaacgatctcgacggcgctgaacgaactcgggtacccgaagaaatgggtggacgcccagctctcgcatgccgacccggacaggatcagcgcgacctacaaccatgccgaatacgtcgagcagcgtcgcgtcatgatgcaggactgggccgatcgcctggacctgttcgagcagaatcaggtcgaggttgccagccggcatctgaccatcacgcttcagggcctgccgaccatcgccggccaggcggccgtgcagccgccggtggtcgacctcaccgcgccgcaactgatcgtgaccgcgccggcgcccggccaacccgaagcgccggcatcggtgcagcggttgtcggccgtgcgcatgcccgagtacgcacggccgcgcctgtcggaggtgcagcgcgaacgccagcaagtgctggagaccttcgaggcgccgcacaacctctcggtggcggactacgcgaggctcgcgggcaagtcgcgccgctggatcacctacgagatccaggccggcaacctgctgtcgatccacatggggcatcgcgggcagcgcgtgccggactggcagctcgatccgctcaagcgcaggctggtccagtccgtcctgaagcaactgccacgaagcatcgacacctgggacatctaccacgcactcctgcgctcgtacgaggctctcgggacacggccggccatcgaagccgtcaatccaacgaacctgcaccttgccgcgcggctggtggccgcacagtgcatgcaggcgagcgagccagtcgtgacgaccgagttccctga

SEQ ID NO: 305617 - DNA, 1023 bp, Proteus mirabilis
atggcaaaaccggattgggggatgctacaacaacagttcctcgccgaacatgctataacaggaatatcccctaaagagtggtgcgaactaaaggaactaaactacgcaacagcccgacgatatatcaaaatatccagtgcgcagaatgcgcaaaaaactgcgcacaagaaattgcgcactgcgcagaaaaaagaatgcgcaaaagagccaatgcgcaatagtgatatacccactgcgcagagtaataaatccagtaatgcgcatgatgatgaaaacacctttagtctgcgcaattacgggctaactgaacaacagattaaatttgttagtgaataccttatcgacttaaatcgaacaggagcatataagcgagccggttataaaggcgaaggaaatacagcttatgtaaatgctactcgcatgctaagaaatgctaaggtttcacgagcaatcactgacgcattagccgaacgggaacgcagaacagagataacccaagatgctgtattaaaaatatggtgggatatcgcaacggcagacgttaacgaactgactgaataccgtcgattatgttgccgtcattgctggggctttggtttcaattaccagtggcgtgattcaatagagtttgaagatgcgattaaaaaagcagttgtagcaaagaaacccccaccacaagatgtgggtggctacggttacgatgaaacattagatccaaatcctgattgccctcgttgtaacggtgccggtattggtcgtgcgtattttcatgatacgcgtgatttaacagggccagcgcgtcgagtatttgctggcgtgaaagaagggaagtttggtgttgaggttattactcgtaatcaagatgaagcgcttaagatggttgcacagcatttaggcatgctgaagaacaagacggaattaacgggtgccgatggtgggcctattcaatcaactgggattgaccttagtcatttgagttttgaacagcttattaaattgagaaagatccataaaactaaataa

SEQ ID NO: 305618 - DNA, 327 bp, Proteus mirabilis
atgaggaacacaaaacgtcgcccagtaacggtcggtcagatgctggtgaccgagttcctggagcctatgaacattgagatcaacgaactggctgaagccatgggtgtgcacagaaacaccctgagtcggatcgttcacgacaagggggctttgaccgcacccatggcaatcaagctggctgaggccttgggtaatacgccggagttctggctcaatattcagcactcagtagagttgtgggatgttcggcatagagcctttgagcgtgaagtggggaacgtaaaaagagtcacacctcacctggataatagaaaagtggcccattga

SEQ ID NO: 305619 - DNA, 1212 bp, Proteus mirabilis; identical to SEQ ID NO: 300085

SEQ ID NO: 305620 - DNA, 891 bp, Proteus mirabilis
atggagccaatcacccgcttaatcgatcgcatgttatcttttgcattacttgatcctcgaattgaggctgtggtattaacaggctcagtgggtcgtaataagaagatagacagctattctgatattgatatagagcttattggtcacggtgcgactgagctagcaaaaaaccaacattggctatcacaatttggtaaacacctcgtctctttagcaacagaatgtgaagatccgaacggcattcgctggccaatctatttgcacgtattagctcaaggccgaaaaatggatattttgatggcagagcctgaaagaattatcaatatgaaacaaaatggtctaagtccagtttatcaacgaggctatcgtgttttacttgataaaacaggtttatgtgaccaacttccagaaattagcactgtgactcccccagccctttccatagagcaagctgatgccttggctcaagagttttggtttgaagccacacaaatcgctatagctatcttacgtaatgaattttggttcgctgaatatcgtatgagtgatataagggaatggttgatccgtttactagagcaagttgctctgcaaacatcaacacaagatgtctggtatcaaggcaaaaacttacgggagtggttacctaagttttactcattacgttcattagaaagcacactggctatgagtaccccttatgaagcagcggctacattaagtattatcatggctttttttattgatgcatcaaagcgttttggtttgtcgatagaaaaggcaacacaagctcaaacacttattagcgattggtttattgataatgaactattaactgaaaatgaatattaccaaataaccacttccattatttgtcattatccaacttaa

SEQ ID NO: 305621 - DNA, 654 bp, Proteus mirabilis
atgaagaaattattgaatattagtggggtgattgctttgctggttagctgtttgttttttagcacaacagcattggcggtagagaaaaaaatatcagctccatttggattaaaatggggaatgacatacgacgatgtgctcaataaaactggaaatataaagttaattggtaatgaaaaaaatagagtgaaagagtatctcatcaaaaatgaatcctcattaattgatggcatggatatgtatagtataagtattgatgataagtatggattaattaatgtagatgcgttgatctacgtggatgaagatgatgatagcaaagttgttgagaaatataacatattaaagcaagcattatcttcaaagtacggtgagcaatattctgaagaatatttatggaagaatggaacaaggggaatgcttactttaccagagtgcttaaataatgaggtttgtggtaaatacttatccctgtttcatggcgatgactcaagtagtgttatggttatgctgagtggcactgccgataataggtcagttactatatctttattttacaaatctgaatttattgaaaaaataaaacaagaagaaaaaaagcagaatgaaataatgattaaggaaaaatcagacgctttggcaagttctctataa

SEQ ID NO: 305622 - DNA, 321 bp, Proteus mirabilis
atgaaaattaaaatactagttacatcattattgctgttattcttaccattattttcttttgcaggctcaaaaggctatgggtgtgataagaggatatataatcttgagaatcaattaaagtatgcccaaaaatatgggaatgtatatagagagcaagccctaaaaagggctatatccaacataaaatctaattgttacgaccattattcgggggcaactggaccaacgaagctgcatgatcatagttcacgggaaagactttttgggttgaaactgaatgagtggaaaaaaattatagatgaattaaaagatcttgattaa

SEQ ID NO: 305623 - DNA, 198 bp, Proteus mirabilis
atggactactatttaacaaacgctataaatggtatagggttcacattacataaagatgtttgtaaaaaagttcttttaaccgagagacgattttatcttggatactattttggagaatataatgctatccaagaagcaaaaagagttacctctggtatggtggttctttgctctgaatgcatgaacagcccacaataa

SEQ ID NO: 305624 - DNA, 2445 bp, Proteus mirabilis
atgaaaaacatcaaagagatgacgttactttccacccccctatctcgccgacgctttgtcaaagtgggagccgctggtggattagttgcaacggcaggtggattatctctcccctttagccaagccatggcttcggagcaaacagcgccgacatctaccaataaagaaaaagtcgtctggagtgcatgtactgtcaattgcggtagtcgttgtccattgcgtatgcatgtcgttgatggcgaaattaagtacgttgaaacagacaataccggcaatgacgtttacgacgagttccatcaagtacgagcttgcttacgtggtcgctctatgcgtcggcgtgtttataatccagatcgcttacgttatcccatgaaacgcgtaggtaaacgtggtgaaggtaaatttgaacgtatctcttgggatgaagcctttgatactatttccgacaccatgaaacgcctgataaaagattatggcaatgaatctatttatctaaattacggtacaggcaccctcggtggcaccatgacaaaatcttggccaccaggagcaacccttattgcccgtttaatgaattgctgtggtggttatctcaaccattatggcgattatagtactgcgcagatcgcggcaggcttaaattacacctacgggggatgggctgacggcaatagtccttcagacatcgaaaatactaaattggttgttatgtttggtaataatcccggcgaaacacgtatgagtggcggtggtgtaacttattatgttgagcaagctcgtgaaaaatcagatgctcgcatgataattattgatcctcgctatactgatacgggtgcaggtcgtgaggatgagtggatccccattcgtccaggtactgatgcagccttagttaatgcgttagcttatgtcatgatcaaagaagatttagtcgataaacccttcttagataaatactgcgtaggttacgacgaaactacgatgccagaaggggcacctaaaaacgcccactataaagcctatattttaggtgatggcgcagatggtcaacccaaaaccccagaatgggcagcacaaattaccggtattcccgcggcacgtattgttaaattagcccgtgaaatcgccggtgctaagccggcttatattactcaaggttggggcccacaacgccgttcaaatggcgaattagcctctcgcgctattgcaatgctcgctatcttaacaggtaatgtgggaataaatgggggcaataccggtgcccgtgaaggctcttacagcattccttttgtccgtatgccaaccttaactaaccctgtcacgaccagtatttctatgtttatgtggacagatgccattttacgtggccctgaaatgaccgctacacgtgatggcgtgcgaggtaaagataaactggatgtacctattaaaatggtctggaactatgcggggaactgcttagttaaccaacattcagaaataaaccgtactcatgaaatcctacaagatgataaaaaatgcgaaatgattgtggttatcgataatcatatgaccgcatcggcaaaatatgcagatatcttactgccagattgcacggcatcagagcaaatggatttctgtatggatgcttctgcggggaatatggcttacgtgattttcgctgaccaagcgattaagccacgttttgaaagtcgcaatatctatgagatgaccagcgaaattgctaaacgtatgggggtgggtgagaaatttaccgaaaatcgtacccaagaagagtggctacgccatctttatgagcaatctcgtcaaaatttaccagaactgcctacctttgaagaatttcgggcacaaggtatctttaaaaaacgtgatccacaaggccatcatgtggcttaccgtgaattccgcgctgatccactcaacaatccactgacaacgccgtcaggaaaaattgaaatttattcttcgcaattagctgaaattaaagcgacatgggaattagcggcagacgatgtgattgatccactgccaatctactccgcaggttttgaaagctatggcgaccctgctatggataaatacccattacaaatgacgggttttcactataaagctcgtacccactcaacttatggcaacgtagatgtattaaaagcggcttgtccacaagaaatttggataaaccctgttgatgctacaaaacgtggtatcaaacacggcgatttagtccgtatttataacgatcgcggtgaagtacgtatcaacgctaaagtgacaccacgtattttgccgggcgttgtgggattaagtgaaggggcttggtataacccagacagtaaccgcattgatcatgcaggttgcattaacgtgttaacgacccaacgcccttcaccacttgctaagggtaatccttctcacagtaatcttgttgaagtcgtcaaggcgtaa

SEQ ID NO: 305625 - DNA, 438 bp, Proteus mirabilis; identical to SEQ ID NO: 295368

SEQ ID NO: 305626 - DNA, 144 bp, Proteus mirabilis
atggggagtggagtgatatcttgcatctctaataaattcctttctatggtgttacatattgcatttaatggtaagtcattggcagaaacaccgaatggatcttctaactcttcagctaatgagtcccaagataaaaaagtataa

SEQ ID NO: 305627 - DNA, 507 bp, Proteus mirabilis
gtgtctatatcaaagaaaaataccttaagagcaagtgtctattttaataatgattattatattataacaacactttcaaaaatcggtatttatttgattgattttaaaaaaggttataaggttttatccaaagatccatttgatgcagatttgggtttctttacaagaaatgcattaatccaaagcgaaatattagatgctaattcatctgaatatcatgaaatgcgtaataacgaaggattatattctgaatgggtaaaaaaaataattaaagaatgtaattataaaaataaaacgacactattcaaaaacatgaacttatgtaatgtgaatgtgactgatggtattatatctattattccttatgatcacttacgattggatcattggattggtaaaagtatgcctaacaatgcaattattacattaaaaaccaattgtagtgacgaggttttaggtgcttcaataaaaaaagcttttacacgttgtattaactgtaaagtttaa

SEQ ID NO: 305628 - DNA, 177 bp, Proteus mirabilis; identical to SEQ ID NO: 300067

SEQ ID NO: 305629 - DNA, 240 bp, Proteus mirabilis
atgcatgaacttcctcttgtcttttttactgttttaggctctagcgcagcaggcctgtttctgatcgcttatatcagtaaaaagttaggtcaaattgatgaacaacaactgcgtaatgccaatattcttgctctgatattaatgcttgtgggcttaggtattggtggattacacgtaggtcagccactacgctttttcaatatgttattaggcgtaggccgttctccaatgagtaactaa

SEQ ID NO: 305630 - DNA, 252 bp, Proteus mirabilis
atgcatattcgaatttaccaaaagaacaacgtgacgcatggcgtttatgggttgggctataagatgcaggtgaaacaaattacagagcatagttttatgtatcgaggtttcactattattaaactgccaagaaaagcagtaacaccgataactcgttatcacgtttggttagatgatcagtcattcggtaagtttgatgcaatggcagaagcaactcactatatcgacttattaaaaggtgacattcaatga

SEQ ID NO: 305631 - DNA, 855 bp, Proteus mirabilis; identical to SEQ ID NO: 296336

SEQ ID NO: 305632 - DNA, 1251 bp, Proteus mirabilis; identical to SEQ ID NO: 300077

SEQ ID NO: 305633 - DNA, 993 bp, Proteus mirabilis
gtggattttcaccacgacgatcaagaaataacaccagaaacatcacttgtattggcggaaaaacaaccattattagatctcaatgcaactttcacctctccgacacaaactaaccctgcactggcttatttacgcagtttaggctctaaacgtagtcgccaaacgatgggatcgtttttaacaatcgtggcaaaaatgattggcttctcttcaataaagcattgccaatggggagcacttcgccgccaccatattcaagcaattatcgacatgttatctgatgcggataaagcacccgccacgattaacacttatttagctgcactaaaaggtgtcgctttagaagcatgggcgatgaaattgatggatacagaaagctatcaacatattcgccaagttaaatcggtaagaggcagtcgattacctaaaggtcgagcgcttactggacatgaaattcgcgcactttttcgctgttgtgaaaaagaccactcctcaaaaggtttaagagatgcggccatattaagtgtactacttggctgtggattacgccgttcagaaattgttgcgcttaattacgagcatattcaatttcgtgatcaaacctttattgttagaggaaaaggtaataaagaaagaatatcctatatgccagaagatacttgggagcgtgttcaattatggatcaatgaaataaggggatcacaagatggcgcccttttcacacgtattcgccgctttgatgatgtaacggatgaacgaataacagaccaagccatttattatattttagagacacgccaacaagaaagtggcattgataaatttgctcctcacgatctgcgacgcacttttgcctctgcaatgttagataatggcgaagatattgtaaccgtaaaagatgccatgggtcatgccagtattatgactacacagcgctatgatagacgtggtgatgatcgtcttagaaaagcggctcgacatttacgtttttag

SEQ ID NO: 305634 - DNA, 720 bp, Proteus mirabilis
atggttattaaggctcaaagccccgcaggttttgcggaagagtacattgttgaaagtatttggaacaaccgttttccaccaggttctattctgcccgcagaacgtgagctttccgaattaattggtgtgacaagaacgacattgagagaggttttacaacgtttagctcgtgatggttggttaactatccagcatggaaaaccaaccaaagtgaataacttttgggaaacgtcaggtcttaatattcttgaaactgtcgcgcgtcttgatcatgatcgcgtgccacaattaatcgataatttattagccgtaagaacgaatatctcagcaatttttattcgcacggcatttaaaaataatccagaaaaatccctagaagtactgactcatcaactaacgactgaaaatagtgctgatgagtttagtgagttggactataacattttccgtggtttggcatttgccagcggtaatcctatttatggattgatcttaaacggacttaagggattatatacccgtgtagggcgttattatttctctaatattcaggcgaaagagttggcgctatcattttataaaaaattggcgttgctatgtgaacaaaaagatactgagcacgttatggattgcgttcgccaatacggaaaagagagtggcattatttggcatgagcttcaatcgccactacctagtgacttagaagaagtaaaacgttaa

SEQ ID NO: 305635 - DNA, 1281 bp, Proteus mirabilis
atgtttcataacgcagcgcatcctttacgaatacaaggaaatattttagaagtgatgttacgtgatgtttttattggggaggtctgccaactaaaagagaatattttcagtgaaaatattctcggtgaagctattgttattgggtttcataataacatagcaatattaagtatgatgggaagcgctcaaggttactctttacaaattatagttgagccaacaggaaaaacattttcagttgccctaggcccacatatattaggcagcatgattgatagtaaaggaaattgcttattacgatttaatacagaaatagcagagaagacctttaataccttatgtcctatcgaaggtcggccacctttgtttagtgataggctgcctattacaacactatttaagtcaggtatacgtgctattgatggattattaagttgtggattggggcaacgaatggggatttttgctagtgcaggaacgggtaaaacgatgttaatgaatatgattatccgttttgcacaggccgatgtttttgttattggcttgattggtgaacgaggaagagaagttacagagtttattgaagaattaaagcaacataagcgatgtgaaaatacggttttaatttgctcaacttcagaacaatcagcggtagaaaggtgtaatgcggctttagtggcaacaacggttgccgaatattttcgtcaacaaggaaaaaatgccgttttatttattgattctatgactcgttattgtcgagcgttaagggatatcgcattaacagcgggtgagttgcccgtacgtaaaggatatccagcatctgtatttgataaacttcccgctattttagagcgtccaggggtaacaaaaacaggctccattacggcattttatactgttttattagagagtgatgatgagccagatgcgatcggtgaagaaattcgttctattttagatggacatatttatttatctcgaaaaatagcagcatcagggcactatcctgctattgatgtattaggtagtgtgagtcgggtttttcaacaattcactgatagtaaacaacaaaaatctgctttaaaaataagacaaatattgatgcgattacaagatgttaagttattgcaagagttaggagaatatcatgaaggagataacgaattaaatgatatcgcggtaagaaaacaagccaagatagaaagctttcttactcaatcctttaaagaaaaagccgattttcaacaaacattagaacaaatgtatgagattaccgcttaa

SEQ ID NO: 305636 - DNA, 1566 bp, Proteus mirabilis
atgcgcttagaagttacctgtaaagatcgcatcgggttaacccgcgaattactcgatctacttgtattaaaaaatatcgatttgcgtggaattgaaatctttcctattggtcttatttatctaaatttttcgcaaatcgattttaatatatttcaacctttaatggctgaaatcagaagaattgagggggttatcgatgttcgtactgtggcttttatgccatcagagcaagagcatcgagctatgtggacactattagaatcagtacctgtccctgtcttttctattaataccaaaggtcaaattaagttattaaacccagctacacggcatctgtttgaattagatgaaaatgataaaaatgaaaaatcttttaaccaactgatacctaactttaatatccatcgctggttagaacaaaaagatcctcatgctgaaattatctccatcaaattaaaaaaacaacattttgatatggagattgtgccaataaaactgactgatgataatcagtttaatcattgtgttggtgcacttattttattgaaatatcgcggaataattcatgagcatccgaaattaattgttaatgataattcggggtttgaacaagttattgctgttagcacccccatgaaacaattagttgaacgcgctaagaaaatggcaaaaatggatgatcctttattattagtgggggatacggggacgggcaaagatctatttgctaaagcttgccacttattaagtcctcgagccagagagccatttttaggtcttaactgtgcctctatgcctgatgatgtggttgaaagtgagttatttggttatgcggcaggtgcatatcctaatgctatcgaaggtaaaaaaggcttttttgaacaagccaatcgaggcactgttttgctggatgaaattggcgaaatgtcgccacaaatgcaaattaaactcctgcgttttttaaatgatggtactttccgtcgtgttggggaagagcacgaagttaaagttgatgttcgaataatttgtgcaacacaaaaaaacttatgggaattagtacaaaaagggctatttagggaagatctctactatcgacttaatgtattgacattaactctaccaccgctacgggaaagaaaagcggatatcatgccgttagcactgcattttattaatcaatattgtttagagcagaaagcatcaaaacctgttatttcccctgatttatctgcttatttagtacaatatggctggcctggtaatgttcgccaattaagaaacacaatttatcaagccatggctcagttagtaggcaatacattgcgacctcaagatatcgccttgcctgagcatactgcggatactttatttgatgaagatttgcttgaaggctcgttagatgaaatgactaagcgatttgaagcttctattttaaggcgtctatatcgtgattatccaagtacacgtaaactggctaaacgtttaggtatttctcataccgcgatcgcaaataaattacgtgaatatgatttaacaagtaaaaaagcggataaaacagagaaataa

SEQ ID NO: 305637 - DNA, 960 bp, Proteus mirabilis
atgaaacccgttgtaatactttatcaaccgcttccagaaaaactgcaacaaaaattatctgccgttgctgaggtaaaacagtttaacgcgctctctctcgattgtgccgattttaaagccaccctcgctcatgctgaaggattgttaggcgccggcggtaatatcgataaacactttattgaaagagcaccaaaattaaaagccgtatcaacgatttctgtcggttatgataatgtggatgttgccgcgctcactgaacgtcatatcaaattgatgcatacacctacggtattaactgatactgtcgctgatacaatgatggcgcttgttcttgccgtctctcgtcgtattcctgaactagccgataatataaaacaaggtttatgggtaaaaagtattacgccggattggtatggtactgatgttcaccataaaaccatgggaattattggtatggggcgtatcggtaaagcattagcacaacgcgcccacttcggttttgatatggatattatttaccattctcgtactgaatataacgatgttaaccagcattttaatgctaaattttgttccctagagatgcttttacaacaagccgattttgtctgcattactttaccgctaacgccagaaactcatcatctgttaagcgcaaaacagtttgcattaatgaaagctgacgcctatttaattaatgccggacgcggtgccgtggttgatgaaaaagcattaattaacgcattagagcagcgacaaatagctggagccggattagatgtgtttgagcaagagccactgccaacctcttcaccacttttaaccatgaaaaatgttgtcgccttaccccatattggctctgcgactaaagagactcgctatgcaatggctgaatgtgccgttgacaatctgattgctgcattaaccgataatgtaaaagaaaactgtgttaatttttaa

SEQ ID NO: 305638 - DNA, 2007 bp, Proteus mirabilis
atggtagtgttaaagaaaaataaaattgcgcttggcgttgttgctgctcttgcatcaagttttgtgatgacagcttccgcagaagatcctgaaaggttactggtgacaaccgcttcgggatttaaacagactgttgaagatgctccagcttctgtttcagttgtaactcgtgaacaattagaaacaaaatcatatcgtgatgtgactgatgcgctaaaagatgttccgggggtgctagtgacagggggcggtagtagctctgatattagtattcgtggtatggatcctaagtataccatgatcttagtcgatggtaagcgtgttgcatctcgtgaaacgcgtcctaatagtgataactcaggtattgaacaaggttggttaccgcctttacccgcgattgagcgtattgaggtagtaagaggcccaatgtcttctttatatggctctgatgccatgggaggcgttatcaatattattacgcgtaaagcgcaaaaagaatggaactttagtttacgtggtgacacaacgttgactgagcgtaaaaatgaaggaaatacaggacaaggtagtttctatgctgcaggtccattgattgataatgtgttaggtctaaagctgcaagggcaatattctcaccgtggtgaagatagacgtgttgatggctataaccgtcagatcacagcaagtggtggcggtacattaagctggacaccagatgagaaaaataccgttgaatttgaatttaaaaaagataatcaacatcgtgattcacgtgttggctattcaaaatcagctgaacttgttaaaggaaaggcaccacaaagtagctttactgattatgagttaacgcattatgccttaacccatgatggtatttatgattttggtactatgaatacctatgttcagcgcgatgaaagccgcaatccatcacgtaaaatggattatgatgatacaactgttcgtaaccaaaccgtctttatgtttggtgatcatatgttaagtgtcggcggtcaatatcgctatgaagagctgaaagatgaaggcaataagcttaaaggtaataataagctagatcgctatagttgggcgctgtttgctgaagatgagtggacattgacaaacgacttcgctttaaccgccggtttacggatggataaagatgaaaactttggtactcactggacaccgcgagtttatggtgtttggcatttagctgatgaatggacattaaaaggtggggtatctactggatatcgttcaccggatttacgtcaagcgacagctacttggggacaagggactggcggtggtcgttatgatgcagttatttacggtaatcctgacttaaaaccagaaaaatcggtgacagaggaaattggtattatttgggataatcgtgataacttaacggcaagtttgacgatttataatactgattttaaagataaaataacagaagttcgtcgttgcgatagtcgttcagacaaagcaccgggtatgcgcgattgtacattagctgatggtgttggtaatagtggcgacccttatgattttgtaagtgatagaactaatgttgataaagccaatatgcgcggtgttgaagttactgctaactggattatttcccctgaatggaatttagcagcaaactacacgttcacagatacggaacaaaagagtggtgatttcaaaggtaagcctctgaataagcaaccgcgccatatggcaaacgcgaccttaaattgggaaaccacccctgaaatggaaacttgggcacgcattaatttccgtggtaagacatcagaatatttatcacgtacttcaatgtctaagagcacaccttcatacgcctttgttgatgtaggtactagctatagtctaacgaagcaactaaatctgatcggtggcgtctataatgtttttgatcgtcgcatcgaaagagataattacggttcaaccttagaaggccgtcgttataacatcggattaaactacaacttctag

SEQ ID NO: 305639 - DNA, 813 bp, Proteus mirabilis
atgaaaaaaataaacatttttacgggtactctatttgttttatctagcataagtatggcacaagcagaaatccattctaatcaaagtggccctttaaccaccatgagtgtgggggcgagtgatcccgtgactcgaggccctcatcaatcagcaggtggggagccgggtgtcggtatttctaatctatatggagggaaaaaaattggttttgcgtcattaacaccaaataatatgagtggtggggcggatagccatggtgtttatacaatacaacccaatgaaaatacaccagctagccatagtaatatgggggtatttcatttttcacaggtgactgatgccaatgtctattttggtacttgggcaaaaacaacctctgttacagatatcactcatcagtcttattatgtaggtaaagaggttactagtacgctaccgacagacagtgcaacttataccgtaacaggtatcagtcaatatagtggtgataatttactgtctggtacttttgatgttgatttttcacaaaagacaattggtggttcactggctaataacctacgtactgtcgagttagaacgtggcaatatttataccgcaaataaccaagtaaccttctctgcagatgcaaaagaagataccacatccggtattgttgaaggggctttctttggtgaaaatgctgaaacattggctggtattgtcgtcttccacaccgatcatactaaagatattggttttgggggaagcaaaaatagtgctgaagtagatactgcaacagatagcgtaacagatagtgcagaagcctcttaa

SEQ ID NO: 305640 - DNA, 1011 bp, Proteus mirabilis
atgaaaaataaatcattttatttcacgctattattattttttattgctattgatacttctgctgctcgatgtcggaatgtgtcaatcaaatataattttccagcccaaatagatattacaaataaaaaagtgggagataagctttattcttttggtgcgccagacgcccctataaacgttgctggtcaatgtctacgtgctaatagtggggcgggaaatacaaatggaaattatatttatattgttgatcaatatggatcatcaccaacattatgcccgactactggtacagttgataaaaattcaccagatggatacttgcgttttcgttcaacgggaagttgtgctaattcttcttggctgctagttcttgattataaaatatctggggttggctggaccaatttaacaggtcccggtggtggtactgattcaggcgttgtttatttacaaaaaaagccacctgtaggaaaaacggttattaatcctgtctatatgttgaaacgtaattattattctcgaattggtcaaatgggcaatacgttacaaaaggaaagcgttgctcttagtgcaccaacatcgatgacgttgataaataatgcttcttgtgcagtgtctgttaatgacgtcgcatttggtgaacaaaccgctagtgacgtaaaaatgaatactattgcaggaaaaaatataaatatttcttttacgtgtaatgctgtattacctgcatacacactcagtttttttggtaaagatggtgtgaataatgccacaacagggatcattaaggttaaagataatagttcagtggggtatcaactttcttgggcagatagcacggttaaacccattaatagtgctgtagttattaataatgtggcaatagctccgaatacaaagccaaaaaccaataattttactattccgataagggtaaaacctgttgcgttatccactcagccaatccctgggccggctaatactgcattaacgattaatataaagttaaattaa

SEQ ID NO: 305641 - DNA, 474 bp, Proteus mirabilis
gtgttctttattcctgcacctaatttattcaaaataactggaggagaaaaacaattaatccgcttgctatatgtaaatgatattttacctaaagatagggaatcattgttttggctcaatattcaggaaatcccgccaatttcttctgccgatgacagtaatgtgcttgctgttgcattaaacacacaagttaaactgatttatcgccctaagattttagctgaaaaacgcgaggatgcagaaaaaagtctgacatatagtggttcagttttaaagaatcctacaccttactattttgcattaactcaagtgtcagtcaataataatcctttggtcttgtcaaaagacattgagcaatctattagtttatttccacctttcagtgaggtaaatgtgcagcgcccattgttaggtaaagtaaccgttgaagctattgatgattatggtgctagacgtgttattgagcttaattaa

SEQ ID NO: 305642 - DNA, 1149 bp, Proteus mirabilis
atgtcagaagaacttggaagattaacatactttgatgttgagaagatggggatatatggctgtaatggaggggatattgatcctcgatacacaccgaactactttctttctgagcttatttcatgggttaacgctaatcgatttgaaaacaccctaccaacaaaagatgatactcgattgaggaaaaaaatttattgtaggaatgcctataaatgccccactacaggtgattatttctttgtcttatggaagtccgaggaagatggcaatggcaacatactgggagttgacgttaatagcccagttgatagtgattctgataccgtagccttactaacttctgacggcaaagaaggcaaaaagtatatctggggtaagccttgttattattggtacattacgagtttaaataaatttgttgccatcaaatttcctcattcaagtacagacacatacctgtttgcatcgtatattaaagattttgttaattatagaatgagcttctctggtaagaaaatatcaaaaaacaaaagagagagcgttggtgggaaagactttatctttgatcgggttaccttttcttctgatgacggcaagtttcgaacacagtttttatttgattataagatgttcatgaaaaaagcaaatagggaaacattgcagcggattaggggcaatattactcatattgtgtatcgcaatacgataagtacatctgagcgtgatgaaagatcgttttttactaagttatttgatggtttttcaatgacaaaggaagacaagccagccacaacaaaagaaaaaagaattgaacttttaattgaagaaaccccaactcaagctgagctgaatagtattttagagttttatgatgatggattcccaataaagtcatcatgggataatattggatttagggagggaggtaagcaaagtgaaacaaagtggtttaatgaatatgtgctaagagattcatttactatatcctattcagctgctagtaaaaaacatatatctgctatctcgctagctaatgaaataagtaagcatagggatagatttatcgctggattaattgaagaccaagattcatcagatgctgctaacgatgatagtgggcgtgcaagaacaagcgcgggagtgggttaa

SEQ ID NO: 305643 - DNA, 1167 bp, Proteus mirabilis
atgaaaatcaccatctccggtaccggctatgtcggtctatctaacgggatactcctttcccagcacaacaaagttgttgcattagatatcaataaagaaaaagtcgaactattaaaccaaaaaatctctcctatctctgataaagaaattgaagagtttttagccactaaagagctcgactttacagcaactttagataaagaattcgcttataaagatgctgaatttgttatcattgccactcctaccgattatgatcctaaaactaactactttaacacctcttctgtagagtcggttattcgtgatgttttagaatataatccaaacaccactatgattataaaatcaaccattccagttggttttactaaacagatgagagaaaaatatcataccgataatattatcttctctcctgagttcttacgtgaaggtcgcgccctttacgataatctctatccatctcggattgtaattggtgaacaatctgcaagagcagagaaatttgctgagcttttacaacaaggtgcgttcaaaaaagatattgatgttctttttactgattctacagaagcagaagcaattaagttatttgctaatacttatctcgcactgcgtgttgcttattttaatgaactcgatagctacgcccaagcttacaatttaaatgcaagacaaattattgaaggtgtctgtttagatccacgtattggtaatcactataacaatccatcatttggttatggtggctactgcttaccaaaagatactaaacaactgttagccaactacgaatcagtgcctaataatatcattggcgccattgtggaagctaaccgcacccgtaaagactttattgctgattctattatcgctaaatcaccgaagattgttggtgtttatcgtttaattatgaaatcaggctctgataatttccgctcatcttcaatccaaggcattatgaagcgtattaaagcaaaaggcattgaagtagtgatttatgagccagaaatgaaagaagagactttttttaactcaaaactcattcgtgatttagatgcgtttaaagccatgtctgatgtcattattaccaatagaatggcttcagcgctaaacgatgtggaagaaaaagtttatactcgtgatctctttggtaacgattaa

SEQ ID NO: 305644 - DNA, 495 bp, Proteus mirabilis
atgttttggatagcatgtgtattaaatacgaatgctgatgttcttattaatatatcagcaacaatgctagcaccagcatgtagtattacgagtactgacggttatgatccaattgaagtaaattttgatattgtcaatgttgaaaaattaaatatttcacctccaaggaaaagtttttcaatatttatcagtgaatgtgatttaacaaaatctttggcgattgttatttcacctaaagctaatggttctatgatggctaaaggtagaaatatattagcaacctcagtagagggacttggtatatcctttagcgatataacgatggataaagatacatcaatcgatgttggtaaaaaacaacaaatttatccagagatattaaataataaaggtaaaatagatatacaatctgaattaattaatacaaaaccaataaatgaattacctaaaggatttttcaatgcatcgatgtcagtgctcattacttataattag

SEQ ID NO: 305645 - DNA, 804 bp, Proteus mirabilis
atgatactttggctgatctcttttggcttaatttcaggtattactacatggttatttggttttggcggtggttttgttactgtgcccctactctatactttgattcttacactttgggctggtgatagtttagcgggtgaacatgctatgcaaattgctgtggctacctctgcgctcattatgttgttttccgctattattacgaccctaaaacaccataaggcgaaaaaaatagattggaaattaattatgatcttattttgggggattgcattcggtgggatcttcggtgccttacttgcctcatccgtccaaggtgaatggatccgatggatttttattggctatctattccttactatcttagattgctattttcgccccggatttatggcgccacgcaaagaaatacaaaaagtaaccaacaaaaaagaagcgttaactggcactattattggcattattgcagcttttttaggtgtaggtggcagtgttatgaccgtacctttattacgccgtagaggtatgtcaatgactcaatcggctgccatggcaaacacattgacattccctttagcattaacggcaacactcacttatatcttattgtctttcactaccccgttaggggatagcgctggatttgttggctatatttggataaaagcagccgttattctaatctgtagtacatggataggattaaaaatagctgaacgttttttatcacgtataccggataaatggcatgctagagtttatccgctgttattgatattggtgttagtcgttatgctgaactaa

SEQ ID NO: 305646 - DNA, 405 bp, Proteus mirabilis
gtgaacgggttgtcggcgatcctgctgggcttcggcgtggccaactttgcgggcacatcgctggccggcgcactgctgcagcggaacctgcggctgaccctgctgctgatgccattggcaatggggctgatggggctggccttcgtcgccctaggccaggcgccgctgacggacgggctgctggtggcgctgtggggcatggccttcggcacagtgccggtgacctggtccacctggatcacagtcaccgtgccggacgaagccgagagcggcggcggcctgctggtagcgacaattcaactgtcgatcgcggtgggtgcggcggcgggtggcgcagtgttcgacgcgagcggggcgcgtggcgtgtgtctcgccgcgacgatgtactgctggtggccgcgctga

SEQ ID NO: 305647 - DNA, 777 bp, Proteus mirabilis
atggataaaattacgattaaaacccctgaggaaattgaattaatgcgtgaatcaggtcgtttattagcccaagtttttacaatgcttgatgattttattgtgccaggtgtttccacattagaaattaacgataaagtagatgattttattactcatgatctgcaatcgagacctgcaagcaaagggcaatatggctatgaatatgtacttaatacttcaattaatgaggtagtatgccatggtgttcctaaagccgatgagctattaaaaagtaaagatattattaatgtcgatattacactagaaaaaaatggttttattgctgattctagcaagatgtatgtgatgccagatgcctcacctatagcaagaagattagtcaaaacaacttaccaagcgatgtgggaaggtatcaaagaagttaaacctggtgcaacactcggtgatatcggtcatgcaatccaaagctttgcacaaagtcatgggtatagtgttgtaagagagtattgtggacacgggattggtcgagaaatgcacgaagcccctcaagtattacattatggtattcgaggacaaggtgttgtactaaaagaagggatgacctttactattgaaccgatgattaaccaaggtggacacaaaataaaaaccaaaaaagatggttggactgtagtcacccgtgataaaaaattatcggcacaatcagaacatactattttagttactgctgatgggtatgaagtactcactttgcgtccagaagaaacacttccataa

SEQ ID NO: 305648 - DNA, 159 bp, Proteus mirabilis
atgattatcgcttattcaacagctcctaatgaaactgtcgcccatgaaatagctcaccatcttatacaggcgaagcttgcagcttgtattaacgtccttcccaatatcaaatctatctatcattggaataatgaaattgttgaagataatcagcaatga

SEQ ID NO: 305649 - DNA, 648 bp, Proteus mirabilis
atgaaattgttgaagataatcagcaatgatgatattttaggtgtagcttggggaagaacaatccataaactagggcactatctccccactaaaacactagaaaatgtcaccgtgttacaaatgattggggctgtagccccacaacctgattttactactgcggaatctgccgctttgatcgccaataagttttcaggttgcagtattaatttgcatgtaccggctgtagtgtcaaatgcacgtttggcaatggagctacaagcagaaccaataatacggcgtaatttctctgctttaaatcaatgtaataaagctttgtttgtagtgggtaatactcaagatgacaatcctttgattacaacaggcgtactcaccacaaatgagatggcacaatatcgcgatttaggtgctgttggtgtcatttgtggtcgattctatgatgcacaaggtaatcctctgctttctgatatcgaccttagaattatgggaattagtcttgcacagttaagacagatcccacagcgtatttttattgctggaggcgttgaaaatgttgctgcaaccataggcgcaataaaagggggatatgctacagatattgtcatcgatgaagtgacggcattagcattattggaattgagtatttaa

SEQ ID NO: 305650 - DNA, 861 bp, Proteus mirabilis
gtgtataagagacagacattagaccaatggatcaccttacaagctgttgttgattacggtggctttgctcaagccgctgatgtgttacataggactcaatcatcaattagctatactatcaataagttagaacaaaccttaggtatagaaatactttctttagaaaaaagacgcgcagtattaactactgagggagaactattgctaacactttctcgagaagtgacagaaaaagcattatctctagaaaaaaaggcaaaaaatatcaaatttaacaataagttaaaaattaacgtactaattgacccaatgtatgtcgctgatccttttttgaacaaaatatcacaatttattaagcagaataaacagtatgatattaatatttataggaattctctcagcaaatcagaaattttagcgcaaaaagaatatgatttaattgtgtcaccttattatattaaatcactgcaacctattgttttagaaagcattacaactaccttagtatcacatccagatagcccattacagaaactacaagatgaggaattattgcaggaattacaaaaacatagctgtatttctctttctcctgattcacccgatactgataatcaggcccaagtcattcaagttggctcggtagagacagcaattagcttaattcagcatggtttaggttatgcacgtctcccccttatttttattcaagatgaattgaataaaaaaacaataaaacaattaataacgcataaaaaagagaaggaatataaattctatttatatttgaataaaaattcatttattaatgaaaacttgcaaagtttattatcaacaattagctattcaacaaatatctaa

SEQ ID NO: 305651 - DNA, 459 bp, Proteus mirabilis
atgcgtgacggtacaagtttttctcatggcttaatcgactttatcgtattgagtggcaatagcagtaaactgtatctattcccaattattggcatactttatgcgataacttattactctattttccgttttttaatcgtgaaactcaacctgaaaaccccagggcgagaagtagaagataaaaacgcgaaacaagcggataaaagtgcgatgggacaatctttagtcgctgctttcggtggtaaagataatatcagtagcttagatgcttgtattacacgcttgcgtattggtgtaaaagagattgataaggtcgatcgtgatgagctgaaaagactgggagcggctggtgttgtggtggttggatccggtattcaagcaatttttggccctaagtctgataatttaaaaactgaaatggatgaatatattcggtctataggtacaactgaaaaataa

SEQ ID NO: 305652 - DNA, 285 bp, Proteus mirabilis
atgggggaaatatcctgggaagaaatggcctatgccgataatggctctcctgatattttttggaattctttagagtttaaagaattactcaaggatggatataaaccctcagatatagattggaatcgatatgaattaaatacctataacaataaccgtttgtttcgctatgaaataggatttagcagattatcgccaataaaacttgttaatcctgaagagagaacatttcattataatccttacctttctattattgatgggaaagtgactattgtccgataa

SEQ ID NO: 305653 - DNA, 2487 bp, Proteus mirabilis
atgttaattccttattcaccccacacaatatggaagaccatttgtgcgactttgctattaagcttggcgtttttctcacaagcagagcaggacgattctgtggaatttaacattcatatgctagacgcggaagatcgcgataatgtcgacctttcacgtttttctacctcaaattatatcattccgggtatgtactatttagatattcgtctaaatggtcgcgactttcctcgccaaaatattaattatattgaagtagcagataatcattccgtggcttgtatcgaccctactcttttaaaaaagttaacaatcaaccaagaaaaccaaaaatatatcaaacaaatatcaccagattgttttgatattagccaattacccggtatctcgattaaaaatgatggtggtgtacttgatatcacgttaccgcgctcattaatgaaatatgaagaatctgattggacacctccggagctttgggatagcggggtctctgggtttatttttgattatacattaacaggaacgtcaactcgacctaataaaggcaataataacaataccttaactggttatggtcaagcgggattaaacttgggtgaatggcgtttaagagctgaatatcaaggcaattattcttctgaatattcatctaacaatcgttttgattggaaccaaatttatgcctataagccattaccagatctcgcagccaaactaacggttggggaaacttatttaaactctcaaatttttgatagtttccgttttacaggagccaatttacaaagcgatgagagaatgttacccccttctctccaaggctatgcacctgaaattcatggcatcgccaataccaatgcaaaagtgacggtaacccaaaatggacgtttaatttatgagacaaccgtacctgctggccctttcgtgattaaccatctacaaaataccgtacagggtcaactcgatgttagagttgaagagcaaaatggtaagattaacgaatttcaagtgcaaaccgctaatttgccttatatgactcgcccaggatctgtgcgttttaatacctcactgggacagtcatccgtgaacaaccataaaatgcaaggccctattttctatcaaggggatttttcatgggggatgaataatacatggtctctctatggtggtgctttacttaccgctaaagattataacgcatggtctttaggtatcggccatgatatgggacgttttggtaccctttctggtgatattacacagtcttatagcaaaacctatgataatgaaaaaatcaatgggatgtcttttaaactaaactatgcaaaaacttttgatgagtaccacagtaccattacttttgcaggttatcgtttctcagaaaaaacatttcgctctttttctcagtatattgatgagcgttataacggcatcaataataatggctatgaaaaagaaatgtacaccattaccggtaataaaactttttgggcagatgatgcagagaaatcgaccaccctctatctctcttatcgccaccaaaattattgggataaaaatactcaagagcagtatggtgtcacagtaagtcgcaatttttccattatggggattgagcaaatcaataccaacttgtcagcatttcgtacccaatataaagggaatactgacgatacgctctcttttaatatttcactaccattaggaagtggtcgcaatattggttataacttgcaagataataatggcaaagtgacacaaatggcctcttatgctgataatcgtgattataataatttatggcgcataagagcaggcttaagttcggataagaaagccaataccgatggttattatcaacatcgttctcagtatgcagaaatcaatgccaatgcaagctatcaacaagataattacttagcagtgggcgcaacgataaaaggcggttttactgctactcgttatggcgctgcattacacagtagcagtatgacctctagcaccgcaagaataatggtggatactgatggtgttgcaggggtgccctttaatggtcaaagcacgactacgaaccgcttcggcattggcgtactaaccgacttaacaagttataacaatgttgatgcacgtattgacgtcgataagatggatcaagatattgaaacacgtaaagccattgcttcaacaaccttaacagaaggtgccattggttattaccaatttccggttcgtcaaggtgaacgcttaatggctgtcttacagacaactgataataaataccctccttttggtgcagaagtcaccaatcaaaaaggggaaagtattggtatggtgatggaagaaggccttgtttatattgcgggtgttaaccttaatgaatcattaaatgtaatttggaacggtaaaacacaatgttcaattaccattcccgcggaaataacagatcccttaaaacatcaatcgctcgtttgtcaggatcgttaa

SEQ ID NO: 305654 - DNA, 750 bp, Proteus mirabilis
atgagtaatagcaacttgtttatagataatgaggtgcatatctggattggtaatctacaaacgataccatgtttaagtaaagctaaatccagaatgcacatcttaaataacgatgaaatttcatcgttattcgactacccttttataaaacaacgaaatatttttttgctatcaagagtcatgttacgcgatattttatcattttatttaaaaatttcaccagaagatgtaagattttcaaaaaatgagtacgggaaaccatttattttaaacgaatcaaaggaaagcatttacttcaatttatcacattcaaataattgtgttgctctcgctatttcaaatacatcatccgttggtattgatattgaatatttcaaccgtgatatagaaataaatagcattatagattattatttctcaaaaaaagaaaaaaaatacctatcttattttgacgagactcaaaaaaaacataatttctataagatgtggacattaaaagaagcctatattaaatcaagaggcattggattatcagaagaaatcattaagaatttagatttttatataaagagagatcaatttgataaattatattttatagaacagcattactctgctcatctttcatatattaccaaatcaatattagatagctataaaatatccataatcacatatcaccatccatttaactataaattcttaacatggggtgatataaaaagcaacctgccacatcatttattatag

SEQ ID NO: 305655 - DNA, 327 bp, Proteus mirabilis
atgatgcaagtattacaatatgtcggacaacatgatagtgagttaaattttatcagtatgcttcctcttgctggtcatgatggtacattgcaatatcgtggtggttttactgaagcgggcgtcaacggtaaagtttccgctaaaacaggctcactcaagggagtgtataatctagctggctttatgaccacagccaatggacagaaagtagcatttgtacaatttatttctgcctactctccgcctacacaaaatcgcaatgctggacgcgcctatttggttcgttttgaaacgaatttatataaagatatctataacaatagatag

SEQ ID NO: 305656 - DNA, 324 bp, Proteus mirabilis
  misc_feature (305)..(314): n is a, c, g, or t
atgaatttagaatctattataaaactcacatccgctgatatggctgcggtaaatgacgcaattctttaccagcttaattcagatgtttctttgataaaccagcttggttactacatcattagcggtggtggtaaaaggatccgcccaatgatcgctgttctgaccggccgagctttggattatcaaggggacaaacatatctctgtcgccgctttaattgaatttattcataccgcaacattattgcacgacgatgttgttgatgaatccgatatgcgtagaggcaaacaaacagctaatgctgnnnnnnnnnntgtttggtaa

SEQ ID NO: 305657 - DNA, 2847 bp, Proteus mirabilis
  misc_feature (2795)..(2804): n is a, c, g, or t
atgagaaaatacttatcgcaactttggattatgttgctattgatgctagtcagtatcaacagcttcgcaacagatccactttggcaagtattgccggatagcattgaaaaaagtgaaagtgatccacgtgattatcaggctattaaattagctaatgatatgaccgtattactggtttctgataaaaaagcggtcaaatcattaaccgccgttgctctgcctgtcggtgcattagaagatccagatagccaacaaggtcttgcccactatttagaacatatggtgttaatgggctcgaccaaatacccaaaatcaggggatctgacagagtttttaaataaaaatggtggctctcataacgccagcacaaccacttaccgcaccgcattttatttagaagttgaaaatagtgccattaatgaagcagttgatcgcttggcagatgcattagcggagccattacttgatcctaaatatgctgatcgtgaacgtaatgcggttaatgcggaattaaccatggctcgctcccgcgatggaatgcgtttttggcaagtgagagccgaaactttgaatccggctcatccaagctctcgttttatgggaggaaacttagaaacattaagtgataagccagagagtaaattacaagatgaattagtgaaattctatcaaacatactattctggtaacttaatgaatggggtgatttatagtaataaatcactggacgaactcgctaaattagcggctgatactttttcccgtattcctaataaaaacacccaagcaccagtaacgacggtgcctgcgatgacagaaaaagaaaaagggataatgatccacttagtcccagctcagccacaaaaaaccttacaaatcgaatttggtattgataataatcttgccgattttcgcagtaaatcagatgaatatattggctaccttattagcaatcgtagcacgggaacactagcaacttggttacaagagcaaggattagcagagaatattagtgcttcatctgaatcctatatcgatcgcaaccaaggttcatttaccatttatgtttctttaacagacaaaggccttgctgagaaagataaagttatttcagcgattttttcttatattcaactgatccaaaataaaggggtcagtgagcgctattttaaagaaatagccaatgtgcttgacctctcatttcgctatggctctattgtcagagatatgaactatattgaagatatctccgatatgatgctgcgttatccgattaaaaatattcttaatgcagattttattgccgatgactatcaaccttctgcgatcctttctcgcctaggatcgcttacaccagaaaatgcgcgtatttgggtgattagccctaatgagccttcaaataagcaagcttattttgttcatgcaccttatcaagtggataaaattactgcgaagcaattagcttcatggcaggaattagccagcgacatctcattgtcattgccgacactaaacccttatattcctgataatctgtcacttattgatgctgatagtaacatcactaagcctcaattattatggcaagacagtcatgctcggttattctatatgccatcgcactatttttctgatgagccgaaagccagtgtgacgttaagtttagtgaataaaaatgcagatcgcacagttaaacagcaagttatacaaacattgaccaattaccttgctgatctaacctctagtgaactggcttatcaagcttctgttgccggcatgaatatctcctcttcttctgggcgtggagtcgatttctcagtcaatggttatactcaacatttaccagagctagtgaatgccacactaaaaagctatataacgtttgaagctactcagcaagagcttgatcaagctaaatcttggtatcgtgaacaactggaagtgacgcataaccttaaagcgtatgatgctgcaatgttacctgcccgtcgcttaaatacgatcccttattatgaagaagccgataaacttaaggcattagagtcgataacgttacaagatattaaagataatcgtcgtgatgtcattgaaaatgcagcgcttcaagcattaattatcggtaatttaacgccagagcagagccgtgagatagttaaatcggcacaggcattattaggcaataaaggaacagaatattggattggcgacacattagtttttgataaattaaatcaagttacattccaaaataaatctaaaagcaccgataatgcgctaggtgaattgtttatccctattggttatgagcgtctacaaggaaaagcgattacatcagtattatcctctatcgtgcatccttggttctttgaacaactcagaacagaagagcaattaggttatgcggtctttgctttccaagcttcaatgggcgagcagtccggtttaggctttttactgcaaagtaatgcaaaaccacctgtttatctcaatgagcgctatcatgcattttatcaacaagcttatgatcgcttgaaaaagctaagtgaagctgaatttaatcaatataaaaaagccattattgatgaagtaaaacaaccaccgcaaacattttatgaagaggtttctctttatcgtaatgatttctatcgtaataacttaaaatatgatggtcgtgagaagtttttagcccaactgaataaggtaacgctaaaacaagcaatcgaattttatgaaaaagcgataattaaaccgacaggactcgtgtttgtttcacaaataatcgggaaagagggtannnnnnnnnngattatgcgcaaaataaacagtggaaaatctattcaaccgtga

SEQ ID NO: 305658 - DNA, 1956 bp, Proteus mirabilis
atgttccatatttaccattcaaatcaattatcactacttaaatcactgatggtacattttatgcaaaatcggccactatcatcgccttttgagcaagaagtgattttagtgcaaagtcccggaatgtcgcagtggttacaaatccaattagcagaaagtttgggtattgctgctaatattcgttatccattacccgctacttttatttgggaaatgtttactcgggtattatcaggtatacctaaagaaagtgcgttttctaaagatgccatgacatggaaactaatggcattattgcctaattaccttgatgatccggcatttaaacccttgctacattatcttaaagatgatgaagacaaacgtaaattacatcaactagcggggcgtgtggcggatctctttgaccaatatctggtttatcgtcccgattggttgtcggcatgggaaaatgatcaactaattgatggcttgagtgacaatcaatattggcaaaaaacactgtggttggcactgcaacgctatacagaagatcttgcgcaacctaaatggcatcgtgctaatctttatcaacaatttatttctactttgaatgatgcgccagtaggggcgcttgcgcactgttttccatcgcgtatttttatttgtggtatttcagcattgccacaagtctatttgcaagcactgcaagcaatcggcagacataccgaaatctatttattgtttactaatccttgccgctattactggggagatattcaagatccaaaattcctcgctcgtctaaatagtagaaagcctcgacattatcagcaacttcatgaactaccttggtttaaagatgaacaaaatgcatcgacactatttaatgaagaaggggagcaaaatgtcggcaatccactattagcgtcttggggaaagttaggtaaagataatctctattttctttctgagcttgaatatagcgatgtgttagatgcttttgttgatataccaagagataatttattacatcaacttcaggccgatatactcgatttagaggatttttcacaaataggtcagacgcttgaggattaccaaagtagtgaaaaaaaacggatcatcgccaatgatgatcgctctttgacctttcatgctagccatagcccacaacgggaagtcgaggtattacaagaccaattactgcatctcctcgagcaagatgctgatttattaccgcgagatattattgttatggtggcggatattgatagctatacgccctatattcaagccgtatttggtaatgcgcccgcagagcgttatattccttttgccatttcagaccgaaaagctcgccaagtacatcctgtcttacaagcttttatcactttattagaattacctcaaagccgttttaccgcagagcaagtgcttgcattacttgaagtacccgccttagctgcacattttgccatttttgaaaatgagttgaagctactacggcgctgggttgaagagtcaggtatacgttggggattagatgatgaaaatgtggcctcctttttattacctgtgacaggaaaaaatacgtgggagtttgggttattaaggatgcttcttggttatgcgatggacagtgaggcagggccgtggcaaggggtactgccttacgatgaatcaagtggcctagtcgctgagttagcagggcatctagcagattttttatataccttaagtgaatggcgaacacgattaagcgaaactcgaaacttagaagagtggcttgatatcggtcaacagcttgttgatgccttttttgacactgatgaagagacagagctggtattggcgcttatcacacaacagtggcaaaaggtgataaaaaatggtctagaggcgcactatcaacatgaaattccattagtgctgatccgcgatgaacttacaacgctttttagccggaagccttaa

SEQ ID NO: 305659 - DNA, 522 bp, Proteus mirabilis
gtgatcacatcctgctcaacttacccgttttattatcataacttacaaaagcaaggggtttctttagccattagcccagtgagattgggacaaaatagtttattagccggtatcaagcatcttaatcgcttagagcaagtgctgattaaacaccatttagaaacaaccccatttgatgacatgttagtgtgtgacaatgaaggatatttagttgaagcgaatgccgcaaaccttttctggcgtaaaggaaatcaattatttaccccggatattagcctttcgggtgtgaatgggatcatgcgccagcaggtattagattttgcgcaacaattggactgggatattcacattgtgcgagaaaaaccgcaaacgctctatcaagcagatgaaatttggttaaccaatgcactgatgcccattattcccgtaaaacagatctatttttcagatgataagcactatcaatatcgcgatagagacgcttaccatgttgttttacaacactgtttgtcactgacttaa

SEQ ID NO: 305660 - DNA, 321 bp, Proteus mirabilis
  misc_feature (218)..(227): n is a, c, g, or t
atgtttttagttgattcacactgccatcttgacagcttagattatgaaaaactgcacaaaaatattgatgatgttgtagaaaaagcacaacagcgtgatgtcaaatatatgttagctgtcgcaacaacattacctggctttaaaaatatgcgcgaactgatcggcaagcgtgataatgtggctttttcttgtgggattcacccattaaaccttgatgnnnnnnnnnngtacataagcgggttggttctctttaccacgatgagggacacgatgtcgctgagcttgcgcgccttgcagctgaggccgatgttgttgcattag

SEQ ID NO: 305661 - DNA, 234 bp, Proteus mirabilis
atgatggtgatgggagttatcggttattttcttcaacaacgtaactttccaatctcaccgattatattagggatgattttaggaccgatgctagagaagaatttactttcttcgttgatgaaatcggacggagagctaattaattttgttaatagacctatttcaattgtattagccagtgttttcctattaattgtcgctatgcaaattaggagcgcatttaaaaccaaataa

SEQ ID NO: 305662 - DNA, 282 bp, Proteus mirabilis
atgagttttttcatttctgatgctgttgcttctgctggacaagcagcacctgaagcaagctttatgtctattttaccgatgttagtgatctttattttaattttctattttatgatcctacgtcctcagcaaaaacgtactaaagaacaccgtaaactgatggaatctatcggtaaaggtgatgaagtgttaactactggtggtttaatcggccgcgttgtaactatcaaacgtgactttgttgccgctgtattaccaaaaggcacaatgaaagctatttaa

SEQ ID NO: 305663 - DNA, 930 bp, Proteus mirabilis
atgtcagaaaatacagaacgcaataaaacaacagaaaatcaccctattaatgataataaaagaacagataatttgaatcgcttctctgttgcacctatgctcgattggactgatcgccattgccgttatttctttcgccagcttaccaaaaatactttgctgtatactgaaatggtcacaacaggtgccattattcatggcaaaggtgattatttaaaatatagcaacgaagagcacccgatctcattacagcttggcggcagtgatccacaagcgttagcgcaatgtgcaaaattggcacaagagcgtggatatgatgaaattaatttaaatgtaggttgcccttctgatcgggtacaaaatggacgctttggtgcttgtttaatgggtgaagcacaactcgttgcagattgcgtgaaagctatgcgtgatgtggtcgatattcctgtgacggtaaaaacacgtattggcatcgacaaccaagatagttatcaatttctatgtgattttattgataccgtcagccgtgataataactgcgatacctttattattcatgctcgcaaagcttggttatcgggattaagccccaaagaaaaccgcgaagtgcctcctttagattatcctcgtgtttatcaattaaaacgtgatttctcgcatctcactatggcaattaatgggggaattaagtcactagaagaggtgcaggagcacttaaaatatatggatggtgttatggtaggtcgcgaagcttatcaaaatccatcaatattggctcatgtggatcacgtgctttttgataatcagttacctgttactaatgccgtcgctgccgtaaaagccatgtatccttatattgaaaaagagctctcacaaggcacttatttaggcgtgctagagaatgcgctcaagtttgtgaccgaaaaatag

SEQ ID NO: 305664 - DNA, 210 bp, Proteus mirabilis
gtggaagtagaagaagatctggcattggtcgctatcattggtaattcactatcgcaagtcaatggcttaggaagccaaatttttggcactttagaggattataatattagaatgataagtcatggtgcgagtacccataacttatgcttattagtggatggcaaagatgcagataatattgtcagaaaactgcacgacaccttattttaa

SEQ ID NO: 305665 - DNA, 408 bp, Proteus mirabilis
atgatgttatccatcaccaagcgctctaagatttgttggcgcaaaacttgctcatcaggcatttcttgcccggcatttttggcattcatttgcaccgtttgtaacattctattgacgtcgctttccagaacgacaccgttattgacgatagccgatacgcggttgagttcttgtgctgcaaaagtggttgtgctggtggctgcaccaaccgtgatcattaagccgataaccagcgttttccaatttttcataagtttcccattatgtgttttccgcattttgcgcgatgacatattcattcagccaattttgtcgtttgggttaatcaaaacgctctttgataaggtaagataccgcgctcaagcattttttgactacctaaactatgattgttacttaggcctctga

SEQ ID NO: 305666 - DNA, 546 bp, Proteus mirabilis
atggtatgggcaggcgatgcatattggcgtattactgatactttaggtatgcgtggtggtttacaatatgaccgtcgtttaggcagtgtctctatgggtgatgcgattatggagtatcgccgtgatagcgaccatctcttacaattgagctatcgttatgtagaccgtgattatattcaagcaacacgggttcgcccttatgatggcgggatcaatcaactaccagaataccaaaaaggcatttctcaaattggtgttgtcggcagttggcctttagcagaacggtggggactggtcggcgcttattactttgataccaaagattcagagccagtaagccaaatggttggcttacaatataacacctgttgctgggcggtaaacgttggttatgaacgtaaaattgttggctggaaagaagaccacagcgatattgacaacaaatggtcaatcaatttggaactcagaggcctaagtaacaatcatagtttaggtagtcaaaaaatgcttgagcgcggtatcttaccttatcaaagagcgttttga

SEQ ID NO: 305667 - DNA, 477 bp, Proteus mirabilis
gtgtttgacattggttttagtcagctgctattggtcatggtgataggtcttgtttttctggggccagaacgattgcccgtagcagtaaaaacaattgctggctgggtaagggcattacgctctttggcggcgaatgtgcaaaatgagctaactcaagaactaaaacttcaagagcttcaagagagcctgaagaaagtggaagagaaagcgaatttgcaaacattatcccctgagctaaaagcgtcgatggatgagttaaaagaggctgcacagtctttaaaagaaacttatcaagcacctacaacgccaggatctacagagacagagcagtctgtaaaaaccgactctacggaacctacgccttctgatttagcggcactggctgaagcgaatgaagcgaatgacgatgttcaacacagttccaaaacggtaactgaaaatacagaaccaactgatcaggcaaatggtgagcactaa

SEQ ID NO: 305668 - DNA, 726 bp, Proteus mirabilis
atggaagtttttttattgagtaatgggaagattgccggggacccacaatggttaagttacgccaaagataatatcgacagcatgattaaaaagcgtggtattcgttctgccgtgcttattgcatatgcggttattcgttctgatcacgaccaacgtgctcgtgaattatcagaagtattaggtattgaagtgacttgtattgaacattttgattcagaagtggaagccattaacaatgctgagtgtattttagttagtggggggaatacgtggttattaaaccaaatgctgcatgagaaaggattagtggttcctatccagcgtgcagttcgtgaacgtaatatcccttatatcggttggagtgcgggttgtaatgttgccactccgactatccgtactacaaatgatatgcctgtgcgctgttctgttgttatgccttcactgggattattccctgtacaaattaacccgcactatattgatgccaccattagtggacatatgggcgaaactcgagatgagcgtattgcggagttttgtgcgatgaacccagacgagatagtggttgccattcgtgaaggtagttacttatatattcagggtgaagagttacgttattacagcgctaaaaatgaaggctttaaaattttccaacatggaaaaacttttccagaacagtttgatacaaaaatgttggcaaaatgggttccatttcgctgtttataa

SEQ ID NO: 305669 - DNA, 417 bp, Proteus mirabilis
atggtgctgatttcttcagctttatgttttgcacttgattcatccgcttcggcttttttcacttggcgtactaaagattcttcggcttcagcttgcgcattaatcaccgtcacttggcgcatacgctcagcttctgagacttcacgtacttctttaattcgctcttcttcttgtgcgaccgttttttcaacagcaacacgctcgcggatcacatttgaaatatttttgcgctcttcttctaacgctttttctttttcaatacgttgtagttcaacttctcgctcacgagcgacaatttctaattcacgggcacgattaacacgctcttgctcgatagctaccgctctggtgcggttttgttgcgcgacttcgacttcacgcatacggttttcttctcgtatttcaatttcttgctga

SEQ ID NO: 305670 - DNA, 2073 bp, Proteus mirabilis
atgactttttctatgatagcagtatctacaaaacgattacccatcaacatggcagataatctttatcgtcgtggagtgttagctattgctatcacgactgttttattcccttatactgttcttgctgaagatatttttaatcctgaagcacttaatttaggtatcgaaaatcacgttgcagatattaacagtctgaattacctgtcctatgcaggaggacaacttccaggtgtctattctgtcgatatttatcttaacgataaacttatcgataatcgtcaaattcgttttatttttgatgacgataaaaaagtgctggcgcctgaaatcagtaaacaggatttactcaattggggagtcaaagggtccgttacagacgcgtttagccaacaacctgatagtagtaaaataacggatattgctcgtgttattcctaatgctacatataaatatgatttttcacgtgcgcgattatcattttcgatcccacaaattgcattatataactatgggcaaggttatatatcccccacagaatggaatgatgggattaatgcagcctttattaattacacctatcgtcagaataaatattggtatcgagaccaaaaagacagtgacaatatctttttaggattgcgcagtggtattaatctaggcgcttggcgtgtacgtaatcacagcacttacaacaaaaatagtgataacgccgcagaatggaacagtctacaaacttacgttgaacgcgatatccgccgtttaaaaagtcgattaacactaggtgaaaccgcatcaagtaatgatgtgttagaaagtgttccttatcgtggtattaaattagcctcagatgaaagcatgttgccacaaagtcagcgtggctttgctcctgttgtaagaggaattgcacaaagcaacgcaatggtgactattcgccaaaataatagtgttatttatcaaacctctgttcctcccggtgaatttgaaatatcagatctctatcccacctcttatagtggtgatttacaagtgactgttgaagaagctgatgggagcaaacgtacattttcccaacccttctctgcagtccccatgatgcaacgagctgggaacttaaaatatagtctcgacttggggaaatataatgctgatagcgcagagcgaaaaccgacctttttacaagcttctgccatttacggcttaccttataatttttccctttatggaggtacgctactttcagcagattatcaagcttatgcgataggtgccggcgtaaatatgggttatttaggggcgatttcagccgatataactcatgcaaataccacgcttatcgataaccataaagcacaagggcaatcttatcgtgtccagtattcaaaatatttaccggataccaaaacaggattttcattagcgtcttatcgctactcaactaaagattattatgatttttcaaccacgaatgaacgtttttcacagctttatcgtaagaaaaaacagtttcagatctcagtatcgcaagcattaggagagcttggttacctctctttaaatggttatcagcaatactattggtatcaagatagagtcgatcgcaatatcaacctaagctttaactctaattatcgctcactcagttatagtatttcttatgcctataataaacggcaagaaagtgaattaaccgatcaaattttatcgattaactttaacctaccgttcaatatgaccaacaataacaattggttaagttatcgttataacaccagtaaacaaggtgattcgataagttctgtgagtttaagtggtactcgtctcgaagataacaatcttcagtatgatatttcgcaaaactataaccatactcgccaagaatatagcggtgctatcaatggtagttatagtgcttcaggtggcgaaatcagtgctggttataactatgataaacgtttccagtcagtgaattggggagcaactggcgcgttattaatccatcaagatggaataaccccatctcgcactatctatgactccgctattttaatcaaagcggaagatattgataattag

SEQ ID NO: 305671 - DNA, 864 bp, Proteus mirabilis
gtgcaaaatgctggcttattgattgactgtaaactcgtggcacaaggtaaaaaaagtgatattttatcagactcagtaattgcgcaattatctcacagtgaaacacttgaaaatctgatcttacccgcctcagactccgttgatgcagttcctaccttaccaccaacgctttcccctattatacttaaggatggcgtggtcagttataatgataaacctgtgctccatcacttaacctgggaagttaaaccacaacaacattggcaaatattaggtcctaatggcgcaggaaaatcgaccttattaagcttaatcacaggagatcatcctcaaggctatagcaatgatttaacactatttggtcgtaaaagaggcagtggtgaaaccatttgggagatcaaacgccatattggttatgttagtaatgccttacatcaaagctatcgcgtctcttcaagtgtgaaaaatgtgattatttctggttttcatgactctattggtatttatcaagccgttaccgataaacagcaaaaattagcggatgaatggctaacactaattggtttaactgcactcgctaaccatccttttcactcactttcatggggacaacagcgtctagtattaattgtaagagcattggttaaacacccgacattattgatcctcgatgaaccactacaaggattagatacaaccaatagactattagtacagcgctttattgatatcatgataagccatagcaatactcaactactgtttgtcagtcatcatcaagaagatgcacctcactgtattacccatcgactgatttttattaaagaaggagatatctatcgttaccaacaacaaccctgttaa

SEQ ID NO: 305672 - DNA, 633 bp, Proteus mirabilis
  misc_feature (595)..(604): n is a, c, g, or t
atgaagtacttgcaactcacaaaaacacagtttcgcttaagtgatacactctgcttgcatatcgatgatttaactatcaatgaaggagaaagttgggcattcgttggtagcaatggtagtggtaaaacggcgctcgctaatacattatgccaagaggggattttattatcgggtgagcttattaataggtttactcgtccgattaatctctcttttgaaaaattacaaaaaatgatagaggaagagtggctgcgtaacaatacagacttattaagtgaagatgaggatgatacgggattaaccgtggctcaggtgatccaaatgcaggtaaaagataatgatcgctgcctgttattagcaaaacaatttggtattgatgcacttttatcaaggcgttttaaatatctttcaacgggagagtctcgtaaggtactgcttattcagttattgatgaataaacctgatctattaattttagatgagccttttgatggtttagatattgactctcgtcgtacattaagtgagttactttcatcactacatcaacaaaagctaacgattgttcttattttaaatcgctttaatgatattnnnnnnnnnntgattttgtgcaaaatgctggcttattga

SEQ ID NO: 305673 - DNA, 939 bp, Proteus mirabilis
atgggcttagcaaatggtgaacaaattacctttctttccgatagtcgctatcgtgaaaaattaagtgaatgtcaggccgctgcggtggtattaacagaggctgatcttcctttttgtcctgttgctgcactggtggtgaaaaatccttatctggcttatgcacaaatggctcagattatggatactacgcccgcgccagcacaagatatacatccttctgctgttattgccgctgatgctaaattagggaataacgtctcaattggtgccaatgcggtcattgagtcaggtgttgagttaggtaataacgtagttattggtgcaggatgttttattggtaaaaaagcacatatcggcgataatagccgtttgtgggcaaatgtctctgtttatcatgaagttatcattggtaaagattgtttagtacaatctggtactgtcattggttctgatggttttggttatgccaatgagcgtggcaattggattaaaattcctcagttaggctcagtgatcattggtgaccgtgtcgaaattggtgcatgtactaccatcgatagaggcgcattagataacacagttatcggtaatggtgttatcattgataaccagtgccaaatcgcacataacgtcattattggtgacaatactgctgtggcaggtggtgtcatcatggcggggagcctgaaaattgggcgttactgtatgattggtggagcaagtgttatcaatggtcacatggaaatttgtgataaagttacggtaacaggaatggggatggttatgcgtcctatcactgaacctggggtttattcttctggcattccgttacaaccgaataaagcatggcgtaaaaccgcagccctggtgctgcgaattgatgaaatgcaaaaaaggctaaagtcgctagaacgtcaagtagaaaatagcgataagtaa

SEQ ID NO: 305674 - DNA, 453 bp, Proteus mirabilis; identical to SEQ ID NO: 294529

SEQ ID NO: 305675 - DNA, 804 bp, Proteus mirabilis
atgattgataaatccgcagtaattcacccttcttcaattattgaagagggtgcggtaattggtgctaatgttcgcattggccctttttgcgttattggtagccatgttgagattggtgaaggtacagatatcaaatctcatgtggttattaatggccatacacgcattggccgtgataatcagatttaccaatttgcctctatcggtgaagtaaaccaagatctgaaatatcgtggtgagccgacccaagtcattattggtgatcgcaatcttatccgcgaaagtgtcactattcatcgtggtacgacacaaggcggtaatattactaaaattggcaatgataacttattgatgatcaacacccatgttgctcatgattgtatcattggcgatcgctgtattattgcaaataacggtactttaggtggacatgtcactttaggtgattatgtgataatcggtggtatgagtgcggttcaccaattttgtcagattggttcacatgtcatggtgggcggctgttccggtgtagcacaagatgttcctccttttgtgattgcacaaggaaaccatgccaccccttatggtttgaatattgaaggattaaaacgtcgcggttttgcaaaagaagatctgcatgccattcgtaacgcttacaagatactttatcgtaatggtaaaacgcttgaagaagcgcgagaagagattgctcaattagccgcagacaataataatcagtatgtaaaaatattcagtgattttctggaaaattcagcaaaatcaaaccgcggtattattcgctaa

SEQ ID NO: 305676 - DNA, 1167 bp, Proteus mirabilis
ttgtcaggccaatcatctataaaacagcgtccgttagttatcggccttgtggctggtgaaacgtccggtgatatcttgggcgcgggattaatccgcgctcttaaacaaatgcatcccaatattcgttttgttggtgtcgcaggtcctttgatgcaagcagaaggttgtgaagcttggtatgaaatggaagagcttgcggtgatggggatcgtggaagtacttgaacgtttgccacgattattgaagatcagaaaagatctcactcaacgctttacacaacttaagccagatgtttttgttggtattgatgctcctgattttaatatcacccttgaaggtcgcttaaaacaaaaagggttgaaaactatccattatgtcagtccatcagtatgggcttggcgtcaaaaacgggtttttaaaattggtaaagcaacggatttggttttagctttccttccttttgaaaaagcgttttacgataaatatcaggttccttgtcgctttatcggtcatacaatggctgatgcaattgcgttacaccctgataaaaaagcggctcgtgaacacctaggtattgatcaagaggcaatctgtttagctctgctaccaggaagtcggcattctgaagtggaaatgctcagtgcggactttataaaaacagcgcagcgattaaagcaacagatccccgcattacatattgttgtccctttggtaaatgcgaagcgacgggcacaatttgaacaaatacatcaaagtgttgccccaaaacttgaaatccaactcttagatggacaagcaagagaggcgatgaccgccagtgatgcgactttattagcatctggtacagccgccttagaatgcatgttaacgaaatgcccgatggtagtgggttatcgtatgaaaccatttaccttttggttagcaaaaaaattagttaaaacgccctatgtctctttacccaatttattagcgggacgggaaataattaaagagttgctgcaagaagagtgcacaccagaagcactggcagaacaattactccccctattaacggatgcggaaaaagcacaacacttaaaagagatatttttacaattacactcagctatccgttgtcgtgctgatgagcaagcagcgaatgcagttttagaattagcaggtcaataa

SEQ ID NO: 305677 - DNA, 591 bp, Proteus mirabilis
atggaatttgtctatcctaaagcaaacctaattgctggcgtcgatgaagtcggtcgcggaccattggtgggtgcggtagttactgctgcggtgatcctcgatccagctaatcctattcagggattaatggactcgaaaaaattgaccgagaaaaaacgcaatgcgctttacgatgaaataaaagaaaaagcattatgttgggctattggacgtgctgagcctgaagagatagataaactgaatattctttgggcaacgatgaaagccatggagcgtgctgtcgcgggattatccataacgcctgatatggtcttagtcgacggaaaccgttgtcctaacttgccaatggcatctcaagcggtgattaaaggtgatagtttagttcaagaaattagcgcagcgtcaatactggctaaagttacccgtgatagggaaatggaacagctagataaactttatcctgattacggctttgccaaacataaaggctatccaacagccttccatatggaaaaactggcttcattaggggcaacgccttatcatcgtaaaagttttgcgcctgtaaaacgtgctttaaatttagtctaa

SEQ ID NO: 305678 - DNA, 279 bp, Proteus mirabilis
  misc_feature (254)..(263): n is a, c, g, or t
atgtaccaagatcttattcgtggcgaattaactgaagcggcagatacactctctcgttttttacaagatgatgcgaatattgaagccattcaaaaagcagctgtattattagcagactcatttaaagcaggcggcaaagttttatcctgtggtaatggggggtcacactgtgatgccatgcattttgcagaagaattaacggggcgctatcgtgaaaatagacccggttatcctgctatcgcaatttctgatgnnnnnnnnnncatatttcttgtgtga

SEQ ID NO: 305679 - DNA, 267 bp, Proteus mirabilis
  misc_feature (237)..(246): n is a, c, g, or t
atgaacccgaaaaatcatgaccagtttcagaacaacttcgccgcattaaacgaaaccgtacaacaagtgactgaacgtattgttgctcgctcacaaataactcgtcgcgcttatctgaaaaaaattgaagctgctaaaagccaaaccgtacaccgtgcccagttagcttgcggtaatttggctcatggttttgccgcctgtcaaagtgaagataaaaatttacttaagaatatggtnnnnnnnnnnttatcgcagatccctaaataa

SEQ ID NO: 305680 - DNA, 3429 bp, Proteus mirabilis
atggccaaatattctttgacgccacgcgtaaaaatgctggcagaacgtttagtttcacgtaacagttctattagcacagagcgtgcgacgatttttgattcattagataacaatattgccggtgtgccccaagcgattaaacctgcacaacgcttttatcagtttattcgtcattttccaagctatatcgctcaagatgagcttattatcggtagccaatcctcaacaccacgtggtgcgattttccacagcgaagaagaagtgcgtagtgactctatttatcgctttttaagtatcaataatagcgttgcatcacctgattatatgctggtggtgaatcaaggtttcttagccatcaaagcacaacttgaagatagaatgagaagcattggtagtgcggtaaatcgtagcagtatggatgaagccaatttctgcaaatcggcgatttatgcatgtgatgcggcactttattttgcacaactactgtcagctaaagcagaaaatttagccgcaatggaaggtaatccataccgtaaagctgaattattagaaagtgcggctattttacgtaaagtacccgccaaaccagcagaaacctttaaagaagcggtacaagttttctatttattacagcttattcttcatctggagaatggtagctacgctatcaacccaatgggctttgataaagcactatacccattctatcaacgtgatattgaccaaggccgtttaacgccagcacaagcttatgagattgttgaaagtctttggctaaaactggctgagctatccgaagtgcgcgcaacgaaagaagtcgatggctatccaatgtttgatgccatgacccaaggtatcgatattaacgatcctcgcgtcagtattaacgaactttcagaaatgttgttatcagcgcgcgctaatctatcagcattacacagttcactacaagtccgtttatataacggtcgtatgaatacaccaccgcaatatgcttcaccttcagccaatgttgttacaccggcgacagcaaatggtgagttgactgtaatggaaggcttaactccccgtctacagcgcctgcgtaatcgttatttagaggctcgtcctagtgtttcaatttatagagcattagcctttactgaaattgctcgcaataatcctggtttaccccctattttattgcgtgctaaagctttccgccgtgcttgtgaaaccgcacctatcttaattcaagatgaagagcttattgtgggacatccttgtgggaaaccgcgtgctggcgctttctctcctgatatcgcatggcgttgggtacgtgatgaactcgacaccatgagcacgcgcccacaagatccattccaaatttcagaagaagacaaaaaagtcattcgtgaagagatagtgccattttgggaaggtcgctctttagatgaaatttgtgaagcgcaataccgtgaagcgggtgtatgggagttcagtggtgaaacctttgtcagcgatctctcttatcatcaaattaatggtggtggtgatacttgccccggttatgacgtattgttattcaccaaagggatgaacggtattaaagccgatgcacaagcgaaattggctgaattaagcatggaaaatcctgctgatattgaccgtatctatttctataaagcgtcgattgaaagttgtgaaggtgttatcgcttatgctcatcgtattgccgagcatgcccgtgaattagcctctaaagagagtgatccacaacgtcgtgaagagttattgaccattgctcaagtcaatgaaaatgttcctgctaatccaccaaaaacattgcaagaagcactgcaaagtatctggactgtagaatcattgtttgaagttgaagagaaccaaacgggactttctttaggtcgcttagatcaatactgtttcccaatgtatgaaaacgacattaaaacaggtcgtttaacgcgtgaacaagcactggaaatgatgcaggcctttatcatcaaatgtgccgaattaatgtggatgtctagtgaacttggcgcaaaatattttgccggctatcaaccctttatcaacttaacggtggggggacaaaaacgctcaggtggcgatgcttgtaacgatttaacttacttgattatggacgcagtacgttttgtgaaagtgtatcaaccttcactggcttgtcgtatccataaccaatcgccacagcaatatatggaaaaaatcgttgatgtggtcaaagcgggaatgggcttccctgcctgtcacttcgatgattctcatatcaagatgatgttgcgcaaaggcttcgactttgaagatgcacgcgattactgcttaatgggctgtgttgaaccacaaaaatcaggtcgtatctatcaatggacatcaacgggttatacccagtggccaattgccattgaatttgtattaaatcgtggtcgtatggtgctgtttgatagctaccaaggcttagacaccggcgatttacgtgatttacgtacttatgaggatttcgatcgcgcggttaaagagcaagtcgcacatattattcgtttatcagcaattggtacggttatcagccagcgcgttcaccgtgacattgccccaaaaccactcatgtcgctattggttgaaggttgtatggagcaaggtaaagacgtgacagcgggtggtgcgatggttaaccacggaccgggtctgatcttctctggtttagccacttatgtcgattctatggcggcaattcgcaaactggtttatgaagacaaaaaatataccttagagcaaatacgtgacggcttattagctaattttgaagggcacgaagagttactgcgtgactgtttaaatgcaccgaaatttggtaacgacgatgatgttgttgaccaatatgcgttagacattaccgaatggactgaacgtgaatgccgtaaatataaaatgctctactccacatttagtcacggtacgttatctatctctaataacacgccaattggtgaattaaccgcagcaacaccaaacggtcgtttagcatggaaaccattatcagatgggatcagccctacacagggtgccgataaacatggcccaactgccatcattaaatccatcagcaagatgaatgttgaaaccatgaatatcggtatggttcataactttaaattcctcaaaggcttgctagataccaatgaaggacgccaaggattaattaccttattaagaactgcctctattttgggtaatggtcagatgcaatttagctatgtcgataatgaagtactgaaaaaagcccaattagagcctgaaaagtaccgcgatttaattgtccgggttgctggctacagtgcgtacttcgttgaattatgtaaagaagttcaggatgaaattattagtcgtacagtgattgagaaattctga

SEQ ID NO: 305681 - DNA, 1128 bp, Proteus mirabilis
atgatattacgatttatattttctattgtattgttgtattcatcaatggcttactcacagcaagttgtaacacctgttactgacctacttggcagaaccgtgaatgtcaaattaccggtacagcgcgtcattttgggggaaggacgacagctttatttagtggctatgtttgataaagaaaatccagcacaaaggatagtcgcttggcgaaaagatttaatacagtccgatccggccacatggcaacagtaccgacaacaatttccacagttggcaaaaatccctacctttggtggcagcgaacaaggaacgtttgatatagagcaggcgattaatctgcaacctgatgtcatcatcatgaatatggacgcacgcaatactattgttgatgctggacacgaagctgcactagcccgagcgggtattcccattgtttatgtcgactttcgctatgatcctattgcacacattcctccaacagtgacgttatttggtaaattatttggccaaccagatcgcgcagaagcttatttaacattccgtgataaagagttacaacgagtgacatctcgagttgaacaattacagggggcattgccaaaagtatttttagagcgtcttgggggttattcagaagagtgctgtatgacctttggtaaagggagttttggccgttttgttaaaatagcggggggggataatattgccgacaatcttgctccgggaaccttttttacgctaaatccagaaaaagtggttgttgcaaatcccgatattgtgattattaccagcggcaattttcaggcatttgtgccgggtggaaagtggatcccacttgggccggggattaatattcaacaatcaaaacaccgactcgcatggtttacgactcgccctgcttatgttgatagtaacgctcgccgtcgtggcgcattttttgctatttggcatcagttttataatagtccctatgatgttattgctatccagcagctagctaagtggatacatccccaattatttgctgatcttgatcctgatgacacattccgtcgtttacatcaagaatttctacccatctcatatcagccgggatatatgattgatttggaaaaagaggggaggtaa

SEQ ID NO: 305682 - DNA, 1212 bp, Proteus mirabilis
atgcgtgttaccggcagtgtcatttttattgtccagtttttatttatcgtacagctactctcaatgggagccatggaaatgagtggccctttttggccgcttcatctcgaaagtatggcgtcgacagagctactgagtatcgtgggaaccggcgtgtatatcgcacctatgttgggcgttatgctaaccagtaccttttggggacgaataggcgataaaactggcaataaagtgatgatgatccgtgcactgatggggctggcattaacgcaattggggctcgcttttgccaatgatgtctgggtaatactgctactacgttttttacagggaacttgtgcggggtatattgcacctgctcaagcttatggtattgccatgatccccgtagcacaacgtactcggcttttggcatggttacaagtatctaccaatgcaggatcgttagctggagccattgctggtggggccatcctcgatttactgagtttcttttggataaatttcggggcatttatcatttgtacgttatgtgcactactggtttttttcatattaccgaatgatttaccgcgccacgcttcatccaattgcgtcacttcctcaacaaataaagcaaaagcgatatcatcaattaaccacagcgtcattgttggcttacttaccgtactgggtttgttattaatgagccgcatgatcacacaaacccctttttctctttatgtcagtagcgtatttaatgcccctaactggttaacaggggtcgcttacggattgcaggctacaggtgtgattgtctcagcctccctctgggcaagatggtttgaagcacacaacatatctcatgcactctatcgaatggtggggatcattgcgggatgttttattgtgaccttactgctagcagcagtaagagaaataagctggtttatcggactttattttttgtggggcattcttcttggggcaacaacgccagtattaaccgcattaatatctcgctcaaccgctgaaagtaaacagggttatattttggggctggtgcaaagtattagccagtttgcctctatggttggcattgcactggggggcggaatacttgtttggcctgggttgaccacgttgtttttgtgtgtggcggtgatgtattgcattactttaattattacgctgaaaatgagttactcttcaaaaaacactaaccaaaaatag

SEQ ID NO: 305683 - DNA, 1020 bp, Proteus mirabilis
atgaatatggaaaaattaattatatatagtgtaaagcataatgcttccgatctgcacctttgttgtggcgatgtgccacgattacggatcaatggcgtactttatcaacaaaatcaatgtaaacctattacttctgatacgctattcaaatggataacaccttatctgaccacagcgcaattgcaattttttggtaaggaggggcaagttgatacggcgataactcttgctgaggggcagcgcttacgagtgaatttatttcgccaacaattagggatatccgcagtactaagagtgataaattcacagctcccgacattaacatcactacgcgtaccaaaatcaatcactgcattattagataatgtttctaatggacttattttagtgacgggagcaacagggagtggtaaatcatccacattagcagcgatgattgattatctcaatcagcataagcgtcagcatattcttactttggaagcgccaatagagtttatttacaccaataagcaaagcattatccaacaacgtgaaatagggcgcgatgtacaaaatatagcgagtgcaataaaagccgcattacgtcaagatcccgatgtaattatgctaggggaattaagagatctagaaagtattaaaatggcattaattgcggctgaaacggggcatttagtactagcaacattacatacgcaaggcgttgttcaaacgttagagcgtgtcactaatgtattttcatccaatgaacgaaaatggatctcggcacaattagctggaagcttaaaagcaattatttctcagcaattggttccagcaacacaaggcgggcgtgttgccctgtttgaagtgatgtatatgacgcaggggattgcacatctgatcagagaagggaaatatcatcaagtgacgacattaatgcaaactgggtttgaatatggcatgcaaaccttcactttaagtcgccaacaacgtcaatatgaaggtttgctcaatgagcacatcaatgaagaaaattaa

SEQ ID NO: 305684 - DNA, 249 bp, Proteus mirabilis
  misc_feature (23)..(32): n is a, c, g, or t
atgctctcgctggcgtttatagnnnnnnnnnntagtgatgcggtcagccctgtagggccaaaaattcaagttaatggttcgattgagttacttaaaaaccctattattcaagccaaagttcgtggattacttctgacaggtcttcgtagtgccgtactttggcgtcaagtaggtggtcgccgttttgattttttactccatcaaaaaaccatcttacgacaaactgatgattttctcgctcaatgttaa

SEQ ID NO: 305685 - DNA, 261 bp, Proteus mirabilis
  misc_feature (193)..(202): n is a, c, g, or t
atgactttaaagaattccacacaatcaaaaacaccttctctctttatggtgtatctcgcctgccttagtatgctgggctatttagctatcgatatgtatctgcctgcatttggtatgatgcaacgcgaattatcaatcagtgaaggcgccgtcagtaacagcttaagtatctttctatttggctttgctgtcnnnnnnnnnnactttgggggccactctcagacaaattggggcgtaagcctattttacttattgggctaa

SEQ ID NO: 305686 - DNA, 816 bp, Proteus mirabilis
atggaaatgattttactgtttctgattgtgggatgtataactggattttttgccggattgttaggaattggtggtggagccattattgttcctattgtgatgtatgttgttagccaacaagctatccctgcagatatggtaatgaaaatcgccctctcaacctctttttctgtcattatattttctactgcctcttctgcttattcgcataataaacataaagcgattttatggtcacaatttccgctcctcgctgtaggcactcttcttggtatgctagttggaacattcctagtacaaaaactctcaaataccctattgcaaattatcttttgtatttttatggcctataccatatatggattactgaccaagaaaaaagaagctgaacgtgttgagaatgcccaagatccggttgtttcaaaaccagcactgacaaccggtggtagcttagtgggttttatttcgagttttattggtatagcgggtggcaccataacaataccgctattaagccactgggggtttaatacccgtaaatgtattgcaacatcatcaatgctgggtgtgattatcgccactattgggactgttatggggatcgtttatggttggcaacaaactgaattagcagactattatttaggttttgtctatctacctgcttttattggtattagtattaccagtatacttacagcccctatcggcgtaaaagttgcctataaactacctattgccagagtacgccaaatatttgccctattcttattaatcgtcatggctaaaatgttatataccctgatattgggatag

SEQ ID NO: 305687 - DNA, 537 bp, Proteus mirabilis
  misc_feature (501)..(510): n is a, c, g, or t
atgaaatcatttgatgttgttattgctggtggtggaatggtcgggcttgcattagcctgcggattacatggctgtggattacgtatagcgataatagaaaatcacccagtcaccacgcatttccatccgcaagatgattttgcattacgggtatctgcgattaatactgccagtgagttattactcaagaaattgggggtatgggaaaacttaacggcattacgtacagctccttatcaaggtatggaagtatgggatcaagatagttttggacgtattgcgttttcagcgcaacaagaagggttatctcatcttggcactattattgaaaatcatcttattcgtgaagtgctgtggcaaaaggtcaccagtcatagtgatattacctgttattcccctgctcaaattgaacgcattgtgtggggagaaaatgaagcctttatcagcttaaatgacggtgaaatgttaaccgctaggctggttgttggcgccgatggtgcnnnnnnnnnncgatggtgcgaattcttggttgcgtaa

SEQ ID NO: 305688 - DNA, 381 bp, Proteus mirabilis
atgttctctgcacatatgaaagaaatagaagctgcattaggacaattagttcgtgagtatccttgggcttatgccgttgtcttattacttgtttctaagtttgttaattcacaagccgccgcattagccgcaatagttcccttggctttaggtattggtattgatcctgcctatattgttgcttcagcaccggcgtgttatggctattatattcttcctacttaccccagtgatttagccgctatccaatttgaccgttcaggaacaacacgtataggtcgttttgttattaatcatagctttattttaccgggattaattggtgttactgtttcttgtatttttggctgggtatttgctgctatgtatggttttttataa

SEQ ID NO: 305689 - DNA, 642 bp, Proteus mirabilis
  misc_feature (7)..(16): n is a, c, g, or t
gtgattnnnnnnnnnnaactaaacaaagttgattacaacatcggtcgtgtcattgctcgtccatttattggcgacaaaccaggtaatttctcacgtacaggtaatcgtcatgatttagctgttgagccaccagcaccaactatgttgaaaaaactggttgatgaaaaacaaggccacgttgtctctatcggtaaaattgctgatatctatgcaaatgtaggtattactaagaaagtgaaagcaacaggtattgatgctctgttcgatgcaacgattgaagagatgaaattagcaggtgataacactatcgttttcactaactttgttgatttcgattcatcttatggtcaccgtcgtgatgttgtcggttatggtgaagcactcgaattattcgaccgtcgcttacctgagctgatggaattagtgaaagaagatgatattttgatcttaaccgcagaccatggttgtgacccaacttggcaaggttcagatcacacccgtgaacacattccggttctggtttatgggccaaaagttaaaccaggttcattaggtcaccgtgaaacttttgctgatatcggacaaactgttgtgaaatacttcggtttatcaccagtagaatacggtaaagcaatgttttaa

SEQ ID NO: 305690 - DNA, 465 bp, Proteus mirabilis
ttgatagataaagctaaaagttggttagccggtgatccattatcaccaagtagtgatgcggcaaattatcttgctctgttaaatgattggcggggaatgatgagttttatctctccttgggctaaagatcgtgtggtcgttttagtgactgcaaaaggtaatgactcaattaaaaacatcattggtgatttgaaccatgcaaatgtcaatgccgctattaaaggggatctgactttaattagtggtcaagatacggtgatgagcttccatttaggagaacatttttcacagggagacctgcctctattacagcaatttctttggtattgcaccagacatgtctatttgcttggcatgttggcagtcggtttttgtgcgctaacagggagcgtggtttattgctggttacaacgccgctcaacgcgtcgcctgagtgaaatatcaaagcgtcatgttgataaatag

SEQ ID NO: 305691 - DNA, 168 bp, Proteus mirabilis
atgaataaaaatgtgtcattaaaatttgcggtacataatctcatgaataaaaattattcaaatgcacttgatagaagtaattcagcgccaattatggatgaacagggacaaaataaacaaacggctagaggcagaagtttcctgtttggtggagaaattcgtttttaa

SEQ ID NO: 305692 - DNA, 1344 bp, Proteus mirabilis
atgaaatcagaaagtttagtgattaaaattgggggatctccacttgatacccctgaatttattgccctgaaaaccgaatttaataaattgagccaccctgctcgaccagaaataagttggacacttattgagtcactttgcttatccctatttaaaaatcatggtatcgacctacaaagcggtgcttactataccattgcaagattacaacagcatggtttaagcggttttactgaaggatgtgagttattagcaaatgttattgtgacttattgggatagcctgtggccggaaaagccaaaccaacgtacagaggtattaaactggtttaatactaaagccagcgctttattaagacaacaatcctatcaagcaaaagatctacgattaatctatcgttcagagcgcgcgttacagttaataatcgataaactggctaaaacaacttgggaaaaactgcctaaaattgaaaacttactgtggtttttccaaaacttagccaaacaaattgaaaagcaagaaaaacagacgcaacaagatagtgccgaacccgttagcgtaccgccattagtctgtattcaacaaccgtcgaaaacaacggacaaagcagcccccacttttgtgattgaaacacctcaacccgcctcttctttcactgtagtagcaaaaaaaatgagtgcgacccgaggttttatatggggctgtgtgctcagttgcatactgtttttagctgtcggatttggtgtacatctctatttaaaacaagagatgaatgcgattacttcaatacctgaaggtgcggctgccaaatggttgtttaaaccacagttaaatagctacgagtatcatttagcattattagaaaaacgttctcctctttctaatttacggctaattgatacgatgcaagaaaaagccaaaaacgcttggcctacagatgcagagcaaatttattttacacgtaattggcaaaatctttatcaaacgcgcttagagaatatgccaattaatgatagctggtctgaaaccgcgacattattacaacaactttctaataaaatagttcagcaagaacgaaatagaggcagttttacactctcttatctaaaaacggcaatttatgatattcaaaaacagcacaataaagttgagccaatcgaagaaaaactgcgacaactcgctgtacaaattgaaacagggcaacctatttctcctgcaactcttaataatattgataataaaattaatgggttattagctcgttattatgatttacaaaaacaagctgaacaacaaggtttaaaacccggctcatattcatcttttggattagatcatgagtga

SEQ ID NO: 305693 - DNA, 477 bp, Proteus mirabilis
gtgattgatccagttgctgctgcattaatttgtgagccactcgaaacaaaatgggcgccaaaaacagcttatggggcaaaatttagcttaccttggttatttgctattggttttttggataatgcgttaactttatcatcgctttcagcggaaaacttacagcgtaacgatatccaactattggcgaaaaaagtgagctatcgttatccatcagaaaatgaaattccctttccgagctattttcctggattaatctttgttagattgaaaaatgggcaacaattaactgaaaggatcgatattcagtatggtaaccctgaaaatccgatggttgatacggatgtaatagcgaagttttatgataatgccaagtgtgtaatgaaaaagacacaagctgatcaactgattgaaaatataatgaattttgaaaatatacctatttcattacttacacaattattacaggtagaggcataa

SEQ ID NO: 305694 - DNA, 342 bp, Proteus mirabilis
gtgattttaacagacggcgagttaagcgacagtcagttatctttacctattgcggaaatgttaagagaagcagggccttgggggcaagcctttcctgagccacttttcgatggcaaattcaccttactacagcaacgtattgtgggaagcaaacatttaaaaatgatgcttcaaccgataaatagccatgtaatgattgatgctattgcatttaatgttgatgttaatatatggccggataacagtattaaaacggttgagcttgcttaccgattagacgtcaatgaatttagaggacagcgcaatgcacaactgctggtggagcatatttggccttgttaa

SEQ ID NO: 305695 - DNA, 882 bp, Proteus mirabilis
atgacgggagccaaagctgttgagtggaagctaaaacacaatattgccacactacgtcgtgcaaacgatctaccaggtattaatggcgtacgtaatattctggcggtgagttcaggtaaaggcggggtgggtaaatccagtaccgcggtaaaccttgctttagcgctagcacaagaaggggctaaagttggtattctggatgcggatatttatggcccatccattcctaatatgttaggtacaaccatggaacgcccaacttcaccagatgggcaacatatggcacctattatggcgtatggtctagcatctaactctatcggttatttagtcacagacgataatgccatggtatggcgtggtccaatggcaagcaaagcgttgatgcaaatgctgcaagatacgttatggcctgatttagactaccttgtgatcgatatgccaccaggaacgggtgatattcaattgaccttatcacaaaatattccggtgactggcgccgttgttgttacaacaccacaagatattgcgctggtggatgcgatgaaaggcattgtcatgttcaaaaaagtcaatgtacccgtattaggtattattgagaatatgagtgcgcatatttgtagcaattgtggtcatcttgagcctatttttggtactggtggtgctgagaaattagccgaaaaatatcattgccaattattgggtcaaattccactgcatatctctttacgtgaagatttagatcgcggacaaccgacggtgatgcgtgatcctgaaggtgaattcgctgatatctatcgtgaaattgcttcaacagtttctgcgcaaatgtattgggatggggatgctattccaacggaaatttctttccgcgcggtataa

SEQ ID NO: 305696 - DNA, 276 bp, Proteus mirabilis
  misc_feature (248)..(257): n is a, c, g, or t
atgagtgataaatcccccgagcagaccacccctgagattctgaaagaaaaagtttcaggtgtcttgtctacttttgaacacccgacattgaaacgtaatctgctttccctaaaagcattacatcagtgtgcgatgattgatgatgtccttcatatcgaattagtgatgccgtttgtgtggaaaaaacctttccaacaactgattgaagaaaaaacgcggtatgaccatcgatttaggttatgcctatnnnnnnnnnngcagagctgcgtaatatga

SEQ ID NO: 305697 - DNA, 210 bp, Proteus mirabilis
ttgtttgggaataacgctgttttccctgatttaatttctgtggaagaatcagaactcacacaagaattcaaagttgaaaaattagtgattaaaaataaaaagaacatcctagcagaactgtctcggcttaatattactgatgctaccgtttatcaaggtatggaaagaacaatgaaactaattgctaataaattttcagtgcaagaatag

SEQ ID NO: 305698 - DNA, 219 bp, Proteus mirabilis
gtgagtggaaaaaaatggactaaagatagtaaaaagatgaaacgaaagttgcttgcccacattattcaagggctagaaagcctcgcagtctatgattatgtaagctcgcacaatggtgtctgtgcactagaacacgatgggtttgtgagtttatatgagttgtctgatgacgattggctgcatgagtatttggagatagtgttgaaacatggttgttag

SEQ ID NO: 305699 - DNA, 459 bp, Proteus mirabilis
atgagttgtcaatcaataaaacaggtagtgaaagcgatgtgtgaggcgacagctggtggacgtgaagcaatggctggtgcgctcggtctgtctttaacatcattcaataacaagctttatgagaaaaacggttgtcgttcatttgatttaaatgagttgttagcgatgcaagatatttctaaaaccgttttgtttgctgagtttgttgctcgtgaatccaatcgcttgttagtggatagagtcaatccagctgaactagacacaaccgagttattcacattacgcagcaatgttgatgaaatgcaagggcatttagcgttactgatgaaaaatagtttggctgatggtgttattgataacgaagaagagcagaaaataaaaatgatgctggatggattaatttcgcagatccgcacatttatgaatgcgtttgtttcgttgcatcaaaagagaaattaa

SEQ ID NO: 305700 - DNA, 345 bp, Proteus mirabilis
atgacagatagagaaaaaaatgaacgacttaatactaaagatataaaccgttctatatctaaatttgtaaccaaggcgaggtctgagttatttagaacacaaaaagatactaaaagattacttaccattgaagcattcgaagaggcagtaaaaacacgaaaagaggtaatgaacttttggatatcaaagctacatgacctaaatgatgaatgcctaaaagatattgttgctagattagatgaaaaatgcatttctgaagtttctagaaaatttgcatttgagatggtaaaagaaaatagaaaaaggctgttgaagcagtttttcttaggagatgaacatgagtaa

SEQ ID NO: 305701 - DNA, 363 bp, Proteus mirabilis
atgcgtaatagtacagaagagatcatggttgagaattatgtgaaagcagcggcaacccgtggcttatcgcgctttactattattcgccgtcatattctacataatgcattaccccctattattcccaaattaggcttacagttttctaccatgttaacactgacgatggtgaccgaaattgtttttaactggccaggattaggccgttggctagtaacggccattcgccaacaagactattcggctatttcagccggtgttatggttgttggttcaatggttatcatcgtcaatgtgttatcagatattgtcggtgcgatgagtaatccaatgaaacacaaggtgggatatgcctttagatag

SEQ ID NO: 305702 - DNA, 4224 bp, Proteus mirabilis
ttgactgtcaaatgtgaaaacaataccgaagatggtttaggaatttatcgtgaagcggtcttagataaaaaccagtcccttgatgatgcacaaattgaatatgcacaaactggcagtttaattttattaaaagtgcttccttaccgcgaagagaattggcgttatttagtctataacacactaacacaaagtgttcagcgtattgatgccattgggcaagcttgtgtgcaacttccggaagatcacggtatcatttttcccggcggctactatctacaaaatggcgattacaaaacctttgatcaaccaatggaaggtatgtattttcgtcgtttgcgtcgttcacctaacggtgaagatgtgctgtatgtcttctattcaccgacacaaggtcgtctcgcgctatttaattacaatatgattgagcgtaaattggcgacaccattggtcggtcatggctatgccatgctagaagatggcaaaatggtgctatttgaaggggaaggcgaagaagctacccgtgttcacccgatgcaagtttggcaaacgcccttctattctgaagaatttgccgataaacaaccgccacgaaacggcttttatgggcgtattggtaatgccgatttagttcgcgggatctcagaaattttacatgtcgccaaagaaattgaaggtagccaagtttccatcgctcgttatgagcaacttagccaacaaccaaaaagcttattagatctctattactggtttaatgatgaacactgtctaggtattggccccttactaaaagagatcgctcaaacaagtgaattagtgcttgatgaatatgaaaaagtcgaaagtattcgtcaacaatcagcgaaatcaatgcaagaagcgatcaaccgtcagaaatctctgttatcactgacactgcctgatagttggaccgatattcaacaatttgttgatagtttaaattcgctcaatacacaccatggacaccttatttctttgcgtgaattccgttatatggatttaacgcaattaaataaaatggaaacggaaataaccgaggcacagcaacgtgtttcgcaagccacagcccaatttcttgccagcgacaaagcgctacagccttttaaaacacagcttactacttttgaacaacagatagaaaaagcacaaaacagtgctcagcttgatgtaccaatgaatgagatggcgcagatgtcagaagatttagacatgctgtcaaatctgatggcatcacttacctttgaggatgtgacgcaacaaacacagattattgatgccatctcccaaatttatgcacaactcaatcaatcacgagctcgcttacagcaaaaaagaaaatcacaaagtagcgtagaaaccgtcgctcaatttggtgcgcaattccgcctatttagtcaggggatcaccaatgctttatcactggcaacagatccggaacgttgtgaagagcagctttcacgattgctagtacagctagaagaattagaaagccaatttagtcagcatgatgaatttcttgatgatatcttgtcaaaacgtgaagagttattagagacttttgaggcgcataaacaatcgttacttgatgatcgacaacgtcgttcacaaagcttattaactgctgctaatcgtctcttagaaaatctgcaacgtagaacaactcggttgcaatcacaagatgaattaaatgctttttttgcctctgatcctttagcattaaaaacacgtgaaatcattgaaaaactaagagaaatcaatgacaatgttaaagcagatgatattgatgcccgtcttaaatcgtctcgtgatcaagccatccgtatcttacgtgataaaacggatatctttgaagagggtggcaatgttattaaattgggccctcatcaccgttttagtgttaatacacaagagctagatcttactattttaccgaaagaagataagctttggttatatctaaccggtaccgatttccaagagccaatcgaccatccagagcttgaaacactgcgcccttactggaatgcgacattaagttcagaatctgaaacggtgtatcgtgcggaatatctcgcctattcaattatctatgctgcatcaaaacgtcaagatggattaaccctagaaatcttaaaagaagcactgagtgtacctgaaaaattagaaaagttagtacgtgatttcgcaacacctcgctataaagaaggctatgaaaaagggatccacgatcatgatgctatcgccattctaaagaaacttctacctgtaggtgaaagtgctgatctgcttcgttataacccaacagcacgggcaattgctgctattttctgggaaaaagtacaaactaatgaatacccagcattatggccagagcgcgcacgaacggcagtgaatattcaacaactgtttcataatgatgatgcattaattgatttacaggcagaaatagaagcagatatccgcctattccttactgataatccgattaaatgtggatcttatgttccgatccaagccgctgaatatttaagttttgcactagcaagaacaccaatagaattggtttacagtaaatatgccaaagagctcgttgttgccttacaaaaccgattagaagccgctcatatgtggattgattttaatcgttcacaacaaaatttagcctcacgttatgcacaacgttgggcattgattcaaaattggctacaaggattgtgctctcaagccgattatgctcatctaaccccttatattccgggggcaattgccattattatgttagataaaatcgcctctgcacgttatagcgaggttgatttatactttaaggtaaacggattattaggtgagcatcctactattgaaaatcaaacactttcattgagtttagatgattatttcagtcgtatgcgcggacagcgtaaaacctttattcccgcctttaatcattatctgactttacgacaaaaaattgttcttgaagagcgccagcgtttaaaactggatgagtttaaagcaaaacctctcagttcatttgtgcgtaataaactgattaacgatgtctatttaccaattattggtgacaatatggcaaaacagatcggtgcattaggtgaagggaaacgcactgacttgatgggattattattaatgatctccccaccaggttacggtaaaacgaccttaatggaatatgtagccgatcgtttgggactgatctttatgaaaataaatggtcctgctttaggtcataatgttttgtcattagatcccgaacaagcgccaaacgcaacagcaaaacaagagctagaaaaactcaatcttgcccttgagatgggcaataatgtgatgttgtatgtcgatgatattcagcatacacaccctgaattcctacaaaaatttatctcgctatgtgatggcacacgccgtattgaaggggtttggaaagggaaaacccgaacctatgatatgcgcggtaaaaaattctgtgtggtgatggcgggtaacccttataccgagtctggtgaactatttaagatccccgatatgttagctaaccgtgctgatatctataatcttggtgaggtattagggggaatggatgacgcctttgcactcagttatattgaaaatagcttaacctctaactccgttcttgctccccttgctttacgtgatctaaacgatctctatcttttggttgataaagccatgggtaaatcagtttcaaccaattccctcagttatccttattcggatgcggaaattaatgaaattgtgatggtattaaaacatctaattactttgcgtgatgtaattttaaaagtaaatcaacaatatatagcaagtgcggcacaatccgataaatatcgtactgagcctgcattccgcttacaaggcagttatcgcaatatgaacaaattaagcgaaaaagtctctgcggttatgaatgagaaagaaattgaacgcttactcgacgatcactatcttggcgaagcccaattactcacaacgggtgctgaagagaacttattaaaactggcggaaatacgtggcacattaaccgaacaagatgctattcgttggcagcaaatcaaaaaagattttatgcgcaacaaagcattaggtggcgataatgctgatattggcgatcgcgtagtgtcacagttggcgaatttagtagaaagtgtgcagagtttacgctaa

SEQ ID NO: 305703 - DNA, 327 bp, Proteus mirabilis
atgtcattaaaaacaagctctcttccttttaaaacgctaattgatcgtcaagttcacgatcaaattatgcaaaaagccgttgctaatgcgcaagaaactattggccgtaatcgtcaaaaaatggttgatgaattaggacactgggaggattggcgggatagagcggcacaaattcgtgatcatgtacttgctaatttagatgcctatttatatcaattatctgaaaaaatagaacaacatggtgggcatgttttctttgctcaaacgaaagaagaagcctctcaatatattctcaatattgcaaaagagaaaaaagccaaaaaatag

SEQ ID NO: 305704 - DNA, 1245 bp, Proteus mirabilis
  misc_feature (1138)..(1147): n is a, c, g, or t
ttgttaattccattatatgaacaaaaagagaagctgatctttgctcaaactaactatcatcgcaaagatcttcgtagccaatttaattatggtattggttatcgctattttactgaaaaatttatggtcggcattaatggcttttatgatcatgatttaacgcatcatcataatcgtttgggaattggcgccgaaatttggcgagactatttcaaattaagttctaaccattatcaccgtctatcaagttggcgagcctctaataatatcttagattatagtgaacgccctgcgaatggttgggacattcgaacagaaggctattttccagcttatccacaattaggcactaaattaatctttgaacaatactacggtaaagaagttggtctatttggcaaagataaacgggacaaaaatccacatatctacacattagggattaattatactccgataccattagtcacattaaatgccgagcgtcgtattggcttacatgatcgtgctgataataacttgaatatcagcttgtcctaccgcataggagaatcactcgcttcacaacttaatcctgataatgtcaaagcaatacgtacattagcaggaagtcgttatgactttgttaatcgtaataacgatatgattttagaatataaaaaggaaactttagttttcctttctatggttgattcaataaatggttatgctaaagaggagcgcgatttacaagttcaagtaaaaacaaaatatccgttagccaatattgaatggtccgcaagtaagttaaatgcccaaggcgggcaaataaaacatcatggtggaactcactacaccgtgattttgcctcaatatcaaattggtgcaattgagaaaaatagctatatcattagtgctgttgccattgatacccatggcaatcgttcagcgcctgttcaaacaacagttattgtagataaatcgttaatcaatacgcgtaatagcctattttcacctaaacagagccaactattcgctaacggtgaagctacccaaaggttaatattatccatcgttgataatgataatttacccgttgatattgatagtaaagaaattactttacagcaacagtctgatacagaaaaaggcaatagcnnnnnnnnnnatttctactttctctcgtttagctgctgggaaatatcaattaacggttacagcaggaagcataccggaaaaattaaccctaacccccgtattccgtga

SEQ ID NO: 305705 - DNA, 1224 bp, Proteus mirabilis
atgtctttaggtattcgatatcttgcgttattaccacttttcgttattactgcttgccaacagcctgtaaattataatccaccagcaactcaagtggctcaagttcagcctgctattgtcaataattcatggattgaaatttcacgaagcgcactcgactttaatgtaaaaaaagtccaatcattattaggtaagcaatcctctctttgtgcagtgttaaaaggagatgcttatgggcatgatttatcgttagttgccccaattatgatagaaaataatgtgcaatgtattggtgtaacaaataaccaagaattaaaagaagtacgtgatttaggatttaaaggccgtttaatgcgagtacgtaatgcgacagaacaagaaatggcacaggcaaccaactataacgtagaagagttaattggtgatcttgatatggcaaaaagattagatgctattgccaagcaacaaaataaagtcattcctattcatttagcattaaattcaggtggcatgtctcgtaatggtttagaggtcgataataaatctgggcttgaaaaagcaaaacaaatttctcaattagctaacctaaaagtggttggtattatgtctcattatcccgaagaagatgctaataaagtaagggaagatctggctcgttttaagcaacaatctcagcaagtgttagaggtgatgggattagagcgtaacaatgtcacattacatatggcaaatacctttgcgacaattaccgtgcctgagtcatggctggatatggtacgtgtgggaggtattttttatggtgataccattgcgagtacagactataaacgagtgatgacctttaaatccaacattgcttcaatcaattattatcctaaaggtaatacggttggttatgatcgtacttacacattaaaacgtgactcagtactagccaatattcctgtaggttatgcagatggttaccgtcgcgtttttagtaatgcggggcatgcattaattgctgggcaacgcgtacctgttttaggaaaaacatcaatgaataccgttatggttgatattaccagtcttaacaatatcaaaccaggtgatgaagttgtattttttggcaaacaaggtaatagcgaaattaccgcagaagaaattgaagatatcagtggtgcattgtttaccgaaatgtcaattttatggggagcaaccaatcaacgggtattagttgattaa

SEQ ID NO: 305706 - DNA, 291 bp, Proteus mirabilis
gtggaattaccaccattaaaaattggtgttcctgggctaggaggcgctatctcaaccgcaggtaatgtgatgtttgttgctgcttctcaggataattatattcgagcatttaatgtgacgaatggcaaaatgttatgggaagcacgattacccgcaggtggacaagcaacgccaatgacctactctattggaggcaagcaatatgtggtcattatggccggcggacatggttcatttggtactaaaatgggcgatagcttagtggcctatgggttacctgataatttatag

SEQ ID NO: 305707 - DNA, 174 bp, Proteus mirabilis
gtgggaataacaatcggcgctgcagcctcaagagttcgttgtgctgttccgcttatccttgaagattctgaaaatggccttagcgttagaatgcgtaggacgattgcagaactttatgatttctttaacgatctaggtcgtcgtataagcttttttgatatggccacaggttga

SEQ ID NO: 305708 - DNA, 123 bp, Proteus mirabilis
atgaaagttaatgatattaaacgattaaaagaacttgaagatgaaaatgctaaactgaaaaagctatttgcagaagtcagccttgaaaatcatgccatgaaggatcgcaaaaaagattggtga

SEQ ID NO: 305709 - DNA, 324 bp, Proteus mirabilis
atggctgagaaaaagtcctgtgctcaggctttaaacgaggcagggttatcagtcattaaggcttgtaaattgacgttattaccgcgagcaacgttttatcgccagccgttagattggcgtgaaaaagaccgtgttgttattgaggcaagacaagctatttttgccaaatcccctcaagctggtttctggaaatgttattatcggctgagatttcaaggctatccctttaatcataaacgagtttatcttgtttattgtcgcttaggactaaatttaaaacgtcgtattaaaaaaggcttcctgaacgtgaaaaaagaccgttaa

SEQ ID NO: 305710 - DNA, 189 bp, Proteus mirabilis; identical to SEQ ID NO: 300082

SEQ ID NO: 305711 - DNA, 228 bp, Proteus mirabilis
ttgctgatccagactgtaaaaaatgaagctaaattacagcaatttaatgcgataacgttaacgactttccgcgatgtcccttggaatgccccctattatcagcgtttaggtttccatatcttacttgagcatcaaataccctattctttacaacaaattttagataatgaagtagagcatgggggatttgcgagagaaatgcgttgtgcgatgaagtgtgaaatttaa

SEQ ID NO: 305712 - DNA, 414 bp, Proteus mirabilis
  misc_feature (389)..(398): n is a, c, g, or t
gtggctgaagatagcgatctcgaaaagacagaagaacccactccccataaacgggaaaaagcgaaaaaggatgggcaaattgttcgttccaaagagctttcgtccgtattaatgattttagggggcgtcagtttactgtggatgagtgggcgttttatcactcgtgagctttatgccatgttaacggaaggttttacttttaatcaccacataatcggcaacgagaatttattgatcccccgttttgccagtttaatgaaacaggctgtatttgcgttatcgccagtgtttctaggcttggtcttagtggcaattggtggttcagccgtattgggggggattaattttagtagcaaatctatcaagtttgatccgaaaaaatggaaccnnnnnnnnnncgtattttttcaatga

SEQ ID NO: 305713 - DNA, 591 bp, Proteus mirabilis
  misc_feature (267)..(276): n is a, c, g, or t
atgatgcaagaagtagctatagaacaaagtgaaaaaaaagtacctccgattgagagcgcattggcttcgtggctacaacgttgtaaagatgctcgtgatggtcattataagagagcagaaaagctcttcgatttatcgcaacttcttggctacatgctgagctattcaactgtatttattacagctttttcatttttcactcacaaccctgaccaagttttattttggtgtattactaaacaacacattgtcattttcattgggtgnnnnnnnnnnattgggtgtatcgcagcagtaatctcaggaatagttagccaagctagatttggagaaagggctgaaatgcatcgcttatcaggagctcgatatgcaaacttagctcgggatattgaagagctacaactcaaacaaatagtgggtacagtgcaaaatagtgaactgtctacacacattaactcagttatcaaagaatggaataacctgtcagaaaactccttactaacaccacataacccaactcgaacaaacaaatgtggtcacgttttgttaacgctattcttcatcataatatttttctctgtcgcagcctaa

SEQ ID NO: 305714 - DNA, 516 bp, Proteus mirabilis
  misc_feature (501)..(510): n is a, c, g, or t
atgagcaaatatgatgcaatacagcgatttaatctctgttttcaacaacttgaaacagaaatcaatgctcttaccgattttcttcgtcagttaaagcaacttccttctgcggtttttgaattacctgaggtaagtaaagaagatgaacatgatgagataacaaatgttacagtgtcacctagttatgatctcgatgctttagaactctctttaaaattaatgaccaatctctttatctatgataatgccccacatgtcagtagcaagcgtgcgatacgtttaccgggggtactctgttttagtgtcagcaatcctgtatttaagaatgtaaaaacacaagtagagagcattaattcattaaaaaaacaactttcagatattgtgacgaaagagtctggtatttcgaaagaagaacgttttgattttgtccataatcagctaaaaggcttaattacacttaatgcttatcgcaccctcaccctactttctgatcctgatacnnnnnnnnnntcctga

SEQ ID NO: 305715 - DNA, 987 bp, Proteus mirabilis
atggaggaaaaagtccctcatccagtgacgggtgagttagtttatcgctttgaaaaagatgttattaatcctcaggcattttctctatcagaagatattcaagatccctacgcactggagcctagctatcagcatggcgcattttcccctttaatctctgccaccctttatgccaacgatatggtgcgtttttatggccgttatactgagcaattgcgtttgcctaacttatttgaagataccagtggtttttcaggctctaaagctcgctattatggttttaagttaaagccagagcgtgccaaaagcagtgagtttggtgtggttgttgattttacgcattggttgaatatagagcgccacgctgatattaaaattaattactttaaaacgaacattgaaaatgtatttgatagagatgctaattggcaaattagacagttagaaaaacaaatattagaaggtgtagagttacaagcccggtttgataatggatttattttctttgataccgcattagtgtatagccataaaaataaagtctgtgatgaaaatgctttttatgagcttgatgcatcaggattatcgggtattaaaaactgtatgacagggggataccctggcggatttttgcgcacctcaatgcagcctaaatactcagttaacctacatttaggcacgcgctggctaaatgataaattagaattaggtagtcgctggctctattcatcagaagttgaaaataaagatgagaaatggcttaaagaaaatttacctaatagctattttggcataaataataatccgatgcgttgggcaaaagtatttactattgatgcttatgcaacttatcaatatagccccaatttatcttttgaaataacaggaagtaatttattaaatgaatattacattgatccgctgacccgttctggtatgccggcaccaggaagaagtttgcgattaggtgtaacagcccaattttaa

SEQ ID NO: 305716 - DNA, 693 bp, Proteus mirabilis
atgtctattgcaaaacgcaccaaagacaaacgtattgcgttaggtttaacacaatctgagcttgctaccttggctggtacaacgcaacaatcaattgaacagcttgagagtggcaaaaccaaacgccctcgttttttacctgaattagcaaaagcgttaaattgtgaattatcgtggttgctcgaaggggataataaacaaacacccgcttctgaaatacctccccaagatgaatggcattcagtcagtgaatgggataacgatacccctctcaatgctgatgaagtcgagatccgttattttaaaagtattgaacttgccgctggtgatggctgctgtactaacgaagatcataatggttataaattgagattctccaaaagcacactacgccgctatggcgcttcaccacaaaatgtgatctgtttttccgtctatggtgatagtatgtctccggttattccaaatggttcaacagtgaccgttgatacaggtaatacgcggattgtggatggcggtatttatgctatcgaacaagattcattatttagaataaaattactctaccgtcagccaggcggaaaattaattattcgtagctacaataaagatgaatttcctgatgaatttgcagaaattgactccgttaaaattatgggacgcgttattcactggtctgtgatggcttggtga

SEQ ID NO: 305717 - DNA, 324 bp, Proteus mirabilis
atgaaaggtgaaccacatccttttgccgcgactgcaacagataaatttaaccctctccaacaacttgcttacttaggtgttatgtttgggttagttccactacttcttatcacaggcgtactatgcttataccctgaagtcctaggttatggctattggatgttaaaagtacactttatattaggcatcgttgcactcatgtttatttgtgcgcacttctacttatgtactttaggcgatacttttacacaaacattccacagcatgattgatgggcatcatcgacatcaaaaacatggtgaaagcacaacaacaaaaaattga

SEQ ID NO: 305718 - DNA, 474 bp, Proteus mirabilis
ttgggtaaccagtttcgtgttttccaaggacatactgcggcttacattgacctcagtggccccaaaaatgaagttaatgaggcccttgagcgggtgatgagtgatgaaattgtattaccagaaggcgaagcgttttatcttcatcccggagagcttgccttggcggttacattagagtctgtcacattaccggataatgtagtagggtggttagatggacgctcatctttagctcgattgggattaatggtacacgtcacggctcaccgaattgatccgggctggcatggacacatcgtattagaattttttaattcaggtaaactgccattagcattaagaccgggtatggtgattggcgcattaagttttgaacctatgtcaggctctgcggataggccttacaatcgtcgccaagatgcgaaatataaaaatcaacaaggtgcggtaggaagtcggattagcgaagattaa

SEQ ID NO: 305719 - DNA, 1458 bp, Proteus mirabilis
  misc_feature (55)..(64): n is a, c, g, or t
atggccactcttgatattagtatcgtcaatgttgctctacctactattcagaatnnnnnnnnnnatattaatgccaatatggctacattacagtggattgtggatgcttatgcactatgtctatcagcttgtattttgtcttccgggccattaagtgatcgtttcggacgaaaaaaagtgtggctctggggggtgattattttcactctaggctcccttatctgtgctattgcacaacaacatgaaatattaatccttgggcgtattatccaaggtattgcagctgcagcccttattcctggcgcattatcacttattacacatgcctttcctgttgatattgaacgtatccgtattattggtatttggtcttcggttagtgcattatcgctgattattggccctatccttggtggtgcattagttcatgccagtggttgggcaagtatatttcttattaatattcctattggtgctattacagtattactaggctggtatggattaagtgaaagtgccgatcctgaggatgttgcgttagatcccctaggacaattaaccagtatcttgggattaggtttactaacctatggttttattgaagcaggctctgtaggttggtctgattatcgtactgtattcgcattaattgtcggtctgatttttattaccctgtttgttatagtcgaaaaacgtattgaacgcccattattaccgctatcgttatttaaagatcgctcgtttttccaatataacctttcctcttttactttgggatttgccacttatagtaatgtcttttttattgcttttttcctacaaaaagcacaaggctggagtgcattagaaacaggtttaagaatggctcctgagtttatcgccatggcccttttttctatgttatttggacggttctctcgttatatatctgtcagaaaattaatgatctttggctttttgttgattgcaatatcttcttgtttattggcaacattagcaacaaatagctcttacacaataacaggaagctatttatttatcttaggtgcaggaatgggattagcgacacccgcaataggggttttagtgatgaaaagtgtagcaccgtctcgctcgggcatggcgtctgcgaccatgaatgcattaagacaaaccggtatgacaatgggaattgcgttattaggtacattaatgatacagcaagcaattaattatatgatgatacaaagtcaagcattaggaatagtggcagaaccgattaatattattacgttagtaacagaaaataaaactgcttccctagataatcagttggttgccctattacctgaagcatttaattcaggatttgcctatgccatgctaaccgcaggactttcctgttttattactctgtttattatgctttttccttgcaaagagaaacaaggtgcactttctcagcagatagcggattaa

SEQ ID NO: 305720 - DNA, 444 bp, Proteus mirabilis
atgaaccgtaaaaacctgtttactcgcacagctctcgctgccattgtaggaacactttcctcttatgcaagcgctgccggttttcagttaaatgaatattcaacttcagcactaggtcgtgctttttcaggagaaggcgttattgcagatgatgcgagtgtaggtagtcgaaaccctgccgcattgaccatgtttgatcgtcctgagttttccgttggtgctatccatattaatcccagtgttgatattaaaggtaaatccccactctctgacgccagcactaatgccggcgatatcgccccaagtgctttagtccccaatattcactttgttgcgcctatcaacgataaatgggcaattggtgcatcaggtaccactaactttggtttagctaccgactttaaaaaccatgaacttaaatttaagtgcaggttatcgagttaa

SEQ ID NO: 305721 - DNA, 780 bp, Proteus mirabilis
gtgaaagcggcagttgagaggcgtatggaaatcctcgatatggttaaccaacagggcaaaaccagagtcgaagatctcgctgaattatttaaagtctcaagtgtcactatccgcagcgatctaagttttcttgagaaaaatggctatatcgttcgctctcatggcgcagcaattcctaatacaggctttattgctgaactaagtatccatgaaaaacgtggacaaaatgcgggcattaaaacattaatcgggaaagctgccgcaacgctgataaaggatggagacaccgtcattcttgactcggggacaactacacgcgaaatcgcgacacatttaaagtcgcgcgaaaatgtagtcgtcatgactaacggtctggatgtcgcaatggagttagcaaataccacaggtgttgaagttttaatgacaggtggtgtattgcgaaaaagtgcattgtctttttctggctcacaagctgaaaatagtctaagaaattaccgtttcgataaggtttttcttggtgttgacggatttgatttacgtgttggtatcactactcacaatgaacaggaagccagtcttaaccgtttaatgtgtgatatctcagaaacgattattgcggttgcagattctacgaaattcggtaaacgcagctgtcatatgatcagagagtttggtgatattgatgtgttagtgacggattcaggtattcctgatgagtatgttcaggaactgaaagatcataaaatcgacgttatcatcgtggacgataagacagcgtaa

SEQ ID NO: 305722 - DNA, 378 bp, Proteus mirabilis
atgtcatttactaaatcaatgcttgcactcgctgttatggcggtttcttttactagtcacgcagccaaacaggctgatttaatgattgtcgatggcacagtgttaacaatggacgcacaaaatcaggttatcgaacaaggaacggttgttgtaaaagaaaataaaattatcgccgttggggggcctgagttaacacaagaataccaagccaacaaagtgttagatgtggatggtgatatcgtgatgccaggattaattaatacccatacacatgcatcaatgacggtttttcgctctttagccgatgacgtgccagaccgattacatcgctatattttccctttagaaaataaaatctcgccaatgttgaaatggtaa

SEQ ID NO: 305723 - DNA, 996 bp, Proteus mirabilis
atggtaaaagggggagtaactacctatgttgatatgtattattttgaagatgaagttgctaaaacggttgataagatgggaaatagagccatcttaggtgaatcagtgattaattttccggtggctgatgcacaaacccctgaagaaggcattcaatatgctgtcaattttattaatgaatataaagatcacccgcgcattattcctgcctttgcacctcatgcaccttataccaataccacagagaacctgcaaaaaattgctaaactctcggtagagcttgatgcccctgtgatgatccatttagcagaaaccgatagagagaaagaagaaattgcaaaacgaaccgatggtaaaagcccagttcaatatatggcagatattggcgctttaaataataaagtcattgccgctcatgcgattatggttgatgagcaagatattgatttattaaaaaaatatgatgtaggtgtggctcataatattagtgctaataccaaatcagccaaaggtgtttcgcccgttgttgccatgctagaaaaaggtgttcgtgttggtttagggactgacggtccaatgtcgagcaatacactcacaacgatgaatgagttaaatttagtaggcaaaattcataaattagagaataaagatcgcgccgcaatgccaccattaaccgtcgttgaaatggcaacaataggctcagccaaggcattacatatggaagataaattaggctctttagaatcgggaaaacttgctgatattattgttgttgatactaaagctcctaatatggtgcctatgtatagcccatatgcagcattagtttatggtgcgaatggaagtaatgttcgtcataccattgtagatggtaaaattttgatggaagatcgccaactgttaaccgtagatgaacaagcgattatcagtgaagctcaaaatttcgcgaataaagtacgccaaaccgttgttgatagtggtgaagtcgttaaatag

SEQ ID NO: 305724 - DNA, 1581 bp, Proteus mirabilis
ttgatcccggacgtatctaaagcgctttcttggttggaagcccatcctaaagttttatgtggtatccaccgtggtatagagcgagaaaccttaagagttactcctgatggtcatttagcggctacaggacaccctgtcgagctaggtaagtcactcactcacaagtggatcacgacagattttgctgagtctctgttagagtttattactcctgttgacgataatattgatcacaccttacattttttaagtgatttgcatcgctatacggcacgtcatttaaccaatgagcgtatgtggccgatgagtatgccttgctttattgaagccgaagataaaataacattagcgcaatttggtacctctaatgttgggcgttttaagacgttatatcgtgaagggctgaaaaatcgttatggtgcgttaatgcaaactatttctggtgtgcattacaatttttcgttacctatcgaattttggcaagcgtgggcaaatatcaccgatgaagaaacaggtaaagaggcgatttcagacggttatttacgtttgatccgtaattactaccgttttggttggataattccttttttctttggtgcttcgccagctatttgtggttcattcttaaaaggtcgaaaaaccaatttaccctttgaaaatacccctaaaggcgcaaaatacttaccttatgcaacttcgttgcgcttaagtgatttaggctataccaataagtcacagagtgatttagatattacttttaatcatctagagacttatgtgaaaggtttgaaaaaggccattcataaaccgtcagaagaatttgctaaattaggtgtaaagaaagacggtaagtatattcaattaaatactaacgtattacaaattgaaaatgaattatatgcgcctattcgtcctaaacgcgtagtcaaaggggatgaatcaccttctgatgcattattacgtggtggtatcgaatatatcgaggttcgctcattagatatcaatccatttacgcctatcggcgttgatgaaacacaaatccgtttcttagatttattcttgatttggtgtgtattagcggatgcaccagaaatgaatgcagaagaattggcctgctgtcgtgcaaattggaataacgttattctagaagggcgtaagccaggtcaagttattggcatgggttgtggtgaaagaaaagagccattagcacaagtggggaaagcgctttttgctgacttacagcgcgtagctaaggtattagatagctgttctggaactaaatatctagaagtttgccttaagttagaggaaatgtttgataatccgcaattaactttctctggcagattattagaaaaaattaaagcacagggtattggcggttatggtctatctttagctgaagaatatcatcaacaattagtcaataccgcttatgaagtgttaacagatgatgcttttgaacatgagagaatttcatctattaaacgtcaggcagacttagaaaagagtgataccatttctttcgatgaatatttgaagctccatgctgggccaaataatgatggtgtggcttcttaa

SEQ ID NO: 305725 - DNA, 1839 bp, Proteus mirabilis
atggataaatacggtaataccattgatggtaagaatgttgagattaaaactatcagtggtaagcctaattttagtgacaatccattaaagtcagtgggcaatggtgaatatcaaacaaatgttacagcaaatacgatgtccgatattatcttaaccgctcaagctgaaacaataactatcgcagagccattgacgattaaagtggcaatccctaaatctgaaattacctttgagaaacctatccaacaggaaatctacaaatcaactgtgattgatgcgttaagttataaaggtgtaccacaaaatatgcaggtaatatggtcaagctctgatcctactgttgcttccattgatacaacaagtgggcaaatctccatgaaaaaggctggtactacaattattaccttacaaaccttaggtaatgagcaatatccatcagctaaaaatagctatcctttagtgatagaaaaagcgccaccaaaactgaaagtaacctctcctcacaccatacaatcgatctggaatgatggcattacccatcaaataacagcggaatttgataatccagaggttaaaaatacccccattcatttctctagtagcgataccttggtagccaccattgatagtaaaggtaacttaaccgccattaaaccaggaaaaacaaaaatagtaatacaaagtgatgctacagataaattcctagcggatagccaaactgtagactatcagcaaggaaaagccgcactaagttattattttaaaaagaattatattgtattaacacctgattctgctgcagataaattattgatggctcaaagccctacgccagatgtacccgttgaagcgaatgcaacttggtatagtagtcaacctaacatagttgaaatcaccccagatgggattatcaaaaaccttaatattgggcaaacaacattaacacttgaggtgaaaagtaataattattttcaagatcatgagcaaagctataacgtcattatacaagcatcgcctcgcatcaaaattaactcatttgagtttctatctgcgggagagagcaaatcaaatacacatttggatgatttaacttggcaacctttatacacttcagacgatcagtttattgttaaatggtcttcatcagacacacctaaagcgattaacttcgagttatttgatgaaaacggcacttctatcgccttagaagaaagacaaaactatgcacctaaatataatatacatgacccagtaaaaattcaggtaccgaaacaatatctaaccagtccaaaacaattaacactagaagtcacaacctttgatagtaataatcagccttatgtcgatcctaaaaagtataaaattaatattgactattttcctgccaataacgcatataaaataatctctcttgattataattctaaatttatctatacagatacaggtacccttgcttcatcttgtcaaaatggttggtcaaccactacaacacatcttattttaacgccaagattagtatttaaaggtgagccgaaaaagttactttatcccatttatattactacggaattatatgatgtaacattaaatccatcggataaactcatcggacatattaatgagaaattaacttatccagataagattatatttagcgagcattctaaaaaaatagctgaaatatcgccgacatcagcacactacgcattagacgaagaatgtagaattaatgattctggtcatggtacgttaaaagcaaatataaccataggtaacagatccagttatcttaaaaaagaatttcattgggatggccaaatagggggatatttttaa

SEQ ID NO: 305726 - DNA, 1344 bp, Proteus mirabilis
  misc_feature (1322)..(1331): n is a, c, g, or t
atgaccatgaatgaggcagatgcccgcccaacgaactttattcgtcaaattattgacgaagatctggctaccgggaaacataatagtgtccatacccgtttccctcctgaacctaatggctatcttcatattggccatgcaaaatcaatttgcttaaattttggtattgcacaagattatcaaggtaaatgtaatttacgttttgatgatacgaatccagtaaaagaagatgttgaatatatcaactcgattcaaaaagacgttcagtggttaggtttccaatgggatggtaacgttcattactcctctgactattttgatcaactgtatcaatatgcgattgagctgattaacaaaggcttggcttatgttgatgagttgagtgctgaagaaattcgtgaatatcgtggcacactcaaagagccaggaaaaaatagcccttatcgctctcgtagtgtagaagaaaacttagcgctatttgaaaaaatgcgtgcgggtggctttgaagaggggaaagcgtgcctacgtgcgaaaattgacatggcatcaccatttattgtcatgcgtgatcctgttctttaccggatcaaattcgctgaacaccatcaaaccggtaacaaatggtgcatttatccaatgtatgattttacccattgtatttctgatgcattggaaaatatcacacattctttatgtactttggaattccaagataaccgtcgtttatatgattgggtgttggataatatcactattccttgccaccctcgtcaatatgagttctcacgtcttaatcttgaatataccgtcatgtctaagcgcaagctaaatcagcttgtgacagaaaatattgttgatggttgggatgatccgcgtatgccgacaatttctggcttacgtcgtcgtggttatacggctgagtcaatccgcgaattctgtcaacgtattggtgtgaccaaacaagataacaacgtggaaatggcatcattagaagcttgtattcgtgatgatttaaacgaaaacgcacctcgtgcaatggctgttatcgatccggtacgtttagtgattgaaaatatgccagaaggtgaagagattttaactgcgccaaatcacccaaataaaccagaaatgggaactcgtgaagtaccatttagccgtgaaatttatattgatcgtgcagactttaaagaagaagccaatcgtcaatataaacgtctggtattaggtaaagaagtccgtctgcgtaatgcttatgtcattaaagcagaacgagttgaaaaagatgaacaaggtgaaataaccaccatttattgtacttacgnnnnnnnnnnggtcgtaaagtaa

SEQ ID NO: 305727 - DNA, 1029 bp, Proteus mirabilis
  misc_feature (1016)..(1025): n is a, c, g, or t
atggataaacccgctaaagtcggtttattacaacagcctaaaccattctttatgattttctttgtggaattatgggaacgttttggttactacggcgtacaaggtattcttgccgtttattttgttagtaaactcggattctctcaagaacaagcttttattacttttggtgcattctccgcattagtttatgggcttatttctattggtggttatgttggtgaccatctattaggtactaaacgaaccattgttttaggggctatcgtattggctatcggttattttatgaccggcatgtcaattatgtatcctaatttaatcttttatgctttagccactatcgcagtaggtaacggtttatttaaagcaaacccagcaagcctattagctaaatgctataaacctaaagatccccgtcttgatggtgcatttacactattttatatgtcgattaatgttggttcattaatctccttatctattgcccccgttcttgccgatcgctacggctatgcactgacttataatatttgtggtatcggcttaataatggccatattggtctattttttctgccgtaaaatggtcgtgaatattggttctgaaccagatcacctgccaatgaatttcaacaaactgctattagttattgcaggctctgtcgctatggtctttatttgtgcatggttgttgcacaatgtgatgattgctaacatcgttttaatcagcttatctattgttgtggttatcatttattttcgtgaagcctttaaacaaaaagacagagtggcacgtaataaaatgtatgttgcatttgttctgatgttagaagctgttattttctatattctctacgctcagatgccaacctcacttaacttctttgctatccataatgttcaccataccctgttaggctttgatattaacccggtgagtttccaagcattaaatccattttggatcattattgccagccctatcttagcaatggcttatagccattttggcgnnnnnnnnnnatag

SEQ ID NO: 305728 - DNA, 666 bp, Proteus mirabilis
  misc_feature (626)..(635): n is a, c, g, or t
ttgttaggcgccggcggtaatatcgataaacactttattgaaagagcaccaaaattaaaagccgtatcaacgatttctgtcggttatgataatgtggatgttgccgcgctcactgaacgtcatatcaaattgatgcatacacctacggtattaactgatactgtcgctgatacaatgatggcgcttgttcttgccgtctctcgtcgtattcctgaactagccgataatataaaacaaggtttatgggtaaaaagtattacgccggattggtatggtactgatgttcaccataaaaccatggggattattggtatggggcgtatcggtaaagcattagcacaacgcgcccacttcggttttgatatggatattatttaccattctcgtactgaatataacgatgttaaccagcattttaatgctaaattttgttccctagagatgcttttacaacaagccgattttgtctgcattactttaccgctaacgccagaaactcatcatctgttaagcgcaaaacagtttgcattaatgaaagctgacgcctatttaattaatgccggacgcggtgccgtggttgatgaaaaagcattaattaacgcattagagcagcgacaaatagctgnnnnnnnnnnaaatagctggagccggattagatgtgtttga

SEQ ID NO: 305729 - DNA, 1221 bp, Proteus mirabilis
gtgaataatggaaaacatcagtcttatgttattcctttcgcaacaacctatcctattaatattgtttatcacggtaaaagcgaatttaaatatgggcagtatggcattcatcttggccagcaagatacactcacctttttaggtgataaaaaacaaaagatactggctaaatttattgattgtcgtaaaaactcaccgacatttaaatcagaattaagtttggaaataaccccatcatccgcaagaacacttattattccccctggagttgctcatactttttcccatctagaaaatgtttttaccttaaatagctactctctttttttacctactatcgagcaattagcaaatgaaacattaaattggtcacctaataatgatgtgataaatctgccggaagatatcgatattaatgagattgaaggctatgagccgatgacagaagaagcttctgcgctggtctactatcgagttgctgagatacaacagcagtggttaagccaacatcgatttttacactctgaaactcgtaaaattcgcttagataatggcgatgaaattaatgtaaggttgcgagagaaaattgccgatgttcaaaaacaatcattacctacatccactattttaggtgttgaatttcgtgaaatggcgaccctgcatacgggcaaagagagtggcattgtcccattaacgcgacaatcccctatgtatctagttgagcatggtcaggaggcttatgatttcgactcttatggattacatttagggcaagaagatcatttaacttttttaggaaatacctcgggtaaaatcactattaagctggtggatatgcgtgaagattcgcctacgctattttatgaagatgaaatggtttttgatccggcacccaatattgagttagtgatcccctgtggtgttgcccatgccttatttaatatggcgaatatcattactgtgaatcgacctgttatctatttggacgaagaaaaagaatatattccgggtcatgacgtgattgattggaaaatcgctaataaaaattatcaagcttatcgtgttaataaaatagcagcagatttaacctattatcaatttcttgtttctaaacaacaagcgttaatgaaacataagcccacccatcataccccaaaatcgattattgtttatgatgaaaataatcagcctattaaagtattaattaaagaaaaggtgtaa

SEQ ID NO: 305730 - DNA, 642 bp, Proteus mirabilis
atgaccattgaaactataatttctgttttaaaagagtacctagcaaaactaaatgatgaacaaaaaattgaagctctcaataaaataaaaatatcgcttcatcaaataagcccatttaaaaatgaacctactgactgtgttctttggataaagcaacaacaagttatcgctaatgactataatcccaatgtcatgtctccgacagaaaagagattactagaaacgtctctggtaaaagacggttatactcaacctgttgttgtattacctattcaacagtccaaaaataaaccatcacaatggcaagtcgttgatggttaccatcgttatttattgagtaaaaaaaatagcttaaacaagcgaattaacggctatttacctattactatacttgatgttgaaagtcatactatggctgaccaaatggctgctactattcgccataatcgggctagagggcaacatcaagtggcggcaatgtcagatatagtcagagatttatcaaggctaggctggaatgatcaaaagattggtgatgaattaggtatgtcacaagatgaggtattacgtttaaaacagattagtggcttagctgaattattttcagaacacgatttttcagaagcttggactattaaataa

SEQ ID NO: 305731 - DNA, 615 bp, Proteus mirabilis
atggcctaccctatttatgattggcatgttaaagatatttggacttatatagcgcgtttcaatttaccctataaccctatttatgatctgatgcaccaagcgggcgttagtttaagtcaaatgcgtatttgtgaaccttttgggccagagcaacgcaagggactatggttatatcatgtgctagagcctgaaacatggagtcttgcttgtgaacgagtgagtggagctgatgccggaatgttatatacgaatcctcgtaataaatcaggtttctatgggcgacatcaaattagcaaaccatcccatcatacgtggaaatcttatgctcactttttattagccagtttaccagagaaaacagcagaacattatcgtaataaaatagcggtctatcttcgctggtatgccgaacgagattacccaaatggcatacctgatgcacaagaaggtgatactagcactaaacagataccttcttggcgacgaatttgtaagaccatcttgcgtaacgatttttggtgtagaacattagcatttagtcctactaaatcacactgttatgatcgatattttaaacggatacaaggaaaacgaaaagactggcaacttatttag

SEQ ID NO: 305732 - DNA, 243 bp, Proteus mirabilis
atggtggttaatactttaaacgccttaaatatcgagtatgcaccttctcacgccaactttatttttcataaagtcaaaggtgatgtaaaaacttatcaagagagaatgaaagcggcaaatattatggtaggacgtgagtttcctcccgcattaggttggagccgtttaaccttaggaacccctgaggagatgagttattttgtcgcgacgttaaaagagtttagaactaaaggatggatataa

SEQ ID NO: 305733 - DNA, 162 bp, Proteus mirabilis
atggcgcaatttggtggtgatccaaaagctattcctaaatgggaaagtggtgattttgatagtatctatatattaaaaataatcaaagaagcagataagaaaaaagtgctctttgagcaacagcatcaacagctaaatgatgtgcctaaacagtgtccttag

SEQ ID NO: 305734 - DNA, 207 bp, Proteus mirabilis
  misc_feature (195)..(204): n is a, c, g, or t
atgcgctatatcattatctttttgagcctcattttatatggatttaatcttatggcttattcagaacaaacgctggtatttatccgtcatggtgaaaagcctaataatgatagcgggcaattaagttgtcagggattaaatcgtgcgttagcgttacctaatcgattgataacacaatttggtcagcctgatgcnnnnnnnnnntga

SEQ ID NO: 305735 - DNA, 369 bp, Proteus mirabilis
atgatgatgccatggaaagtgaaaaagtatatggatgaagtctatacttatggtcacggcaaactatatgaaaacgatggacgtactcgtcatgatccaagcaaacaatatggtagcgggggattgttgcaaggtaagcaatatatgatctccgcgacttggaatgcccctattgaagctttcaatgaatttggtaatttctttgatgggcgaggggttgatggtgtctattttgcttttcataaatcacaacaatttcttggtttatctcagctgcctacttttatgaccaacaacgtcattaaagagcctaatattgagaaagatattgtagaatataaagcacatctaaccaaagtctttggctaa

SEQ ID NO: 305736 - DNA, 1338 bp, Proteus mirabilis
atggcacatcgattaacttccagagacattctggcattaggttttatgacttttgctctatttgttggagcagggaatattatttttcccccaatggtggggttgcaatcaggggaatttgtttggactgcggccattggttttttgctaaccggagttggcttacctgtgctaacagtggtggcattagcgaaagtgggagggggaattgaagcattaagcacccccattggtaaatctatgggacttttattagcaatagtcgcttatcttgctgtcggccctttatttgccaccccgcgaaccgcaacggtctcttttaaagttggcattgcccctttagtgggtgatagtgatattgccttacttatttatagtgtcatttactttttaattgttatcggtatttcactgtatccgggaaaattacttgatagtgttggtcacattctggcaccgattaaaattttagccttagctgtattaggtttagctgcgctattttggccagcaggaacgccgatccccgctacacaagcgtatcaagatatggcatttacccaaggttttattaatggctatcttaccatggatacgttaggcgcgatggtctttggtattgttattgtcaatgcggctcgctcaagagggattgataattcgtctttattaacacgttatactatgtgggcgggaattatcgcgggtgtgttattaacggcgatttatcttagtttatttaagcttggttctgctagtggcagcattattccagaagcaaaagatggcgcagatattttacatgcttatgtgcaacatactttcggtaattttggtagtttctttttagcactgcttattttcttagcttgtatggtgaccgcggtaggtttaacttgtgcttgtgcggaattttttagccgctatttgcctatttcttatcgtacattagtattgattttggctgtattttccgcggtagtctctaatcttggtttaagtaaactgattgcgttctccattcctgttctggtgatgatttatcctccttgtattgtgattattctgatgagtttcactttacgtttttggcataatccaagccgcattattgcccctgcaatggcaataagcttattttttggcatttttgatgccattaaagcatctgatcatttaaaacatttattaccggattgggcggctaaattaccattaagtgagcaaggattagcgtggttaattcctgtattagtgactattgttgtatgcgctatttacgataaagtagctggctcacaacataaaaaagtgatccactctgggataaacaaataa

SEQ ID NO: 305737 - DNA, 279 bp, Proteus mirabilis
atggctattgcacctattattcccgttaatttaaccaaagaactacaagatacaagtgatgatagtttatcgactatcatggtaaatggcattattagtagtatgcaatatgaaaaaaagatacaagaaaagttaacaacattaagccaattaggtgatgcccaaagttatacgaatttacaaatagaacttagcgattattcaattacgatgagcttagcgagtacgttagcaagaaaatctctcaatattgtggaaacactacttaaggctcaatag

SEQ ID NO: 305738 - DNA, 408 bp, Proteus mirabilis
ttgttgtttcaagcaaccgcaaacacacaaacaccattcattaatcgagtaattgagaagcgcaaaaatcagctaaagaacaatgataatgttaaagatttcgtcataggtacattctatttatgtcttgttaatccagctcaaaataaagagtctttgattcacctaaaagttatcgccaaacatcttcagaatgatgctcttataaataaactgaaaaatttcatttggtttgataagcatcaagataaagccaagttcgcagatcctaaagcttctgctgacaagtggcacttttttgacacacaagccgattttgactcgaacctaagacctattttaaacgaaatagatgtagataagcttgatgcttttgatgagctaattgtacggataaatataatttga

SEQ ID NO: 305739 - DNA, 492 bp, Proteus mirabilis
atgttctatcaagagcaccgagaaaaagttgaggaaaaagtaagtaacactcttcacttcataattgatgaagctcataatattctttcccaacaatcgagccgagaacatgaggtttggaaagattatagacttgaaatgtttgaggaaattattaaagaaggccgtaaatttggcatgtttttaactcttgctagccaaagaccagcagatatctcaccaacgataatgtctcaacttcataatttcttcattcataggctagtgaatgacaaagatttgttccttattgataacaccattagcacattagatcgtatgtcaaaaagcttgatacctaacctttcaaaaggggcgtgtattatcacaggtacagcttttgacttgccaatagtaatgcaaattgactacataaaagagaaaaaaaatcgacctgcaagcgatgacgttgatttagctaaactatgggggctgggaaacgaagatgagtaa

SEQ ID NO: 305740 - DNA, 336 bp, Proteus mirabilis; identical to SEQ ID NO: 304707

SEQ ID NO: 305741 - DNA, 432 bp, Proteus mirabilis
atgaagatccgctctttctttatttatactatctttctacaaacgatatctatcgtgatgctatggggcgtttggttagcttggatagaatttgattatcttgctgactttgaaactatctacaataagcaacaagaaattattgctgaaggatttgccaatacactcgaaacggtttcctctcaacccgagacagtaaaacagatagctcaccatttacaaaacatgtatatcgataccatgcttaatggtgaagatgatgatttacactatttaccttggtttattgtcttaaataaagataatgatctgatttataccaatagaccggaactttctctgcctaaacgggtactgtcgcttgcctctgaaaaaatctctgtggctgggaagaaatggtatttatcttatagttggggaaaacaatcttaa

SEQ ID NO: 305742 - DNA, 354 bp, Proteus mirabilis
atgcctgaattaatttctcgtgtaaaagccgtaagtcgccgtatggccggtttctcttcacagatttggtctattggtgatttacagcttaatccctcgaatcatcaagtcactttaaatggtgaactattgttattatcaggtaaagagtaccagctattatatgagctgatgcgcaatacagataatgtagtacgtaaatctgatttagaacaacgcttatttggcttagatgacaaaattgaaagtaactcacttgaagttcatatgcacaacttacgtcgtaaaataggcaaagagcgtattattacggttcgcggtatcggttatctcttaaaaaaagaagtgaactaa

SEQ ID NO: 305743 - DNA, 420 bp, Proteus mirabilis
atgtatacaggtgaacctttacctgcagatcgcgaaagtttattttggatgaatgtcaaagctattccttctttagatgaaaagcttgccaatgaaaatacactacaaattgccatccagagtcggataaagcttttctaccgtcctagtggattgtccgcttatactgaaaaatatgccaatgaagtgactttttcctataaaaatggggagttaattgcccataatccaacaccttatcatattactatggtcaatttagccgcagccgacagtcaacttccttcaagtattatgattaacccattttcacaattaacattaggaaaagttaatcagaatgctaataccatttcattccaaaccattaatgattatggcgcacagactcctgttttaaaaaaagaaatcgttcattaa

SEQ ID NO: 305744 - DNA, 819 bp, Proteus mirabilis
atgcttactattacggcactactagaaaataagacaagcgatcccgcccttagccattatccaggcctttcactgctattagaagacactgaaagcgaaagtaaaattttatttgatactggtaaagatctcacttttatcaataatgctaaaaaaatggcgattgatttgacatcattaacgacaattgttatttcccatgggcactatgatcattttggtggattaactcatttaaatgaggatttctttattactaagccacatattattgcccatcctgatttattttcagtacgttattcagcactttttatggggcgccagtctattaaatttaagcgccttactccattttttaaccgacagcagctagaacagcagttttcatttcagttaacagcgacacctaaagctatcgataaaagatttatctattctggtcaagtgacagagcgtcaaatacataaacgttatggcgttattgtcagtgaaggtagcgaaacggatgattatgtacttgatgatagttttctaatttggcaaggtcagcaaggactggtgattattacgggatgtagccattctggtattgatgcaattattcgccatgcgaaaaaaataacgggaaatgacaagatccaagctattgtcggagggctacatcttcgctgtgcctcactggcggcgttaaaaagagcgaaaaaagcaataggtcaccatgttgaggtttatggttgccattgtaccggtgcgcttggccgtagctatcttaatgccaaagattttaatacagggcaaagattattttttaaatga

SEQ ID NO: 305745 - DNA, 765 bp, Proteus mirabilis
  misc_feature (731)..(740): n is a, c, g, or t
atgctaattggtatgcgttttctacatggatttgctgctgccgctgcaagtgttgtcattaatgctttaatgcgggatatgttttcaagagatgagttctcaagaagcatgtcatttgttgcattagtcatgacgattgctccattattagcgccattacttggtgcttgggtgatgaactggttctcatggcatgctattttttggagtattgctattgcggcgatcattgctgctgcattaattgcgctctatataccggaaactttgcccaaacagcaccgccaacgctttagcctacgagtgacatttagtcaatttattagcttatttagagcacgtcgagtactttgctatattctggcatcgggattttcttttgcagggatgttttcatttttaagtgcagggccttttgtttatatcgaactacatggtattccattcgaccaatttggcttgtactttggttttaatattattttcttgattgtcatgaccagtatcaatgggcgctatgtgcgccgatttggtgcactgaatatgttacgttttgggttaactgtgcagtttttaatgggcatattcttaatattggtggtcgcccttaatttacatttttacttccttgttgtgggagtggctatgtatgttggtgggatagccatgataacctcaaatgcgatggccgttattcttgaagactatccacatatggcgggtacggtatnnnnnnnnnnatccgttttggtgtgggggctttag

SEQ ID NO: 305746 - DNA, 315 bp, Proteus mirabilis
  misc_feature (301)..(310): n is a, c, g, or t
atgcaaaccccgcacattctgattgttgaagatgaagtagttactcgtaataccctgaaaagcatattcgaagctgaagggtatatcgtacacgaagccactgatggcaacgagatgcataatattctgtccgaccatgatatcaatctggttattatggatattaatcttcctggtaaaaacggtcttctattagcccgtgaattacgtgaacaggtaagtgttgcattaatgttcctaacaggtcgtgataatgaagttgataaaatcttaggccttgaaattggtgccgatgattacnnnnnnnnnncttag

SEQ ID NO: 305747 - DNA, 183 bp, Proteus mirabilis
atgcttgaaggtattccagctagctattttatcgggggcgccctaggctctttattatcgggttacgcttatcaccaatatggctggattggtgtttccagcgccggtgcaatcattggcttattaggtttactggtttggttatttggttataaaaatgatccagtgatccaatctgaataa

SEQ ID NO: 305748 - DNA, 660 bp, Proteus mirabilis
  misc_feature (646)..(655): n is a, c, g, or t
atgttaattggtactgccctatcaggtatgttctcggtcgtcgcccaaattctggttccttttgccgctacacttgctgcacctcatcaacgaggaaaagcggtaggtactattatgagtgggcttttacttggtattttactggcaagaacagcgtcagggctgatggcttcctttactaattggcagggcattttctggctagcaagtgtttttctagctattttagctattacactatggcgctgtttacctacctataaaagccaaacaaatttaaattattttcaactgctcggttctatttttaaattgtttgccacgaccccagtattacgtacccgctcactgattggtgcacttatctttgcccactttggtttactgtggacatcaatggcttttttactcgcttctgatccctttaattattccgatgcagttattggcttgtttggacttgtcggtgctgcgggagcactaatggcaggtaaagcgggtgtatgggttgataaaggcaaaggtaaaaaaacgactacttcaggtttaattcttctcttcatttgttggggacttattgttatcgccccttattatcaatggattggactgattagttttattattggtgtggttttattagatnnnnnnnnnnagtaa

SEQ ID NO: 305749 - DNA, 306 bp, Proteus mirabilis
gtgacaacattatctaaaccttcagcaccgcaaaaacgtgcttgtgcaaaaggtaaatctgctgaaatacacagtacaacggtattatttaattcgttggctactttattaaattggcgaacactcgctgcacaaacaccagtatctacacttgggaaaatatttaatactttacgtttgccggcaaattgcgctaaagaaacatcatttagatctttacctactaaagaaaaatcggctgctttttggcctacagtggggaagtttccagctaaagtcaccgcattaccttgtaaagtcacttga

SEQ ID NO: 305750 - DNA, 732 bp, Proteus mirabilis; identical to SEQ ID NO: 299193

SEQ ID NO: 305751 - DNA, 300 bp, Proteus mirabilis
ttggatgagaaaaaaagcaatattgcacaaataggtgaacgatatggtgtatctgggacacattttagacggctgtgtaaacgttatttaggtaattgtggtaaaagtcaattacgttcatggcgtgcggcatcttctattttgacaacgctatcaacagatgaatcattgactcagattgcagtcgataatggttttagttcagcatctcatttttctaatgaaattaagacattatttggtattacaccaactgaatttcggcgaattggccaatatctttatgaacataaaaaataa

SEQ ID NO: 305752 - DNA, 291 bp, Proteus mirabilis
gtggggtcttttagtgcggcttattataagaatacagagttagaagatttaattacttatgaaggtactgatttaaatagtgtattaaatctagtctcaaaaacttattcggtcgctattgcgcctagatggttagttgaaagctattcagaacaattgaacattaaggcgatatcattaccttgggagaaggtagaacgtccatgctatttaatttggcatgagtcaacggcacgagataaaggccatttatggatgaaaaatttacttagtgaggtttgtcaaaactaa

SEQ ID NO: 305753 - DNA, 543 bp, Proteus mirabilis
atgactaataatattaagggtattttgacaacactatggttatttttcttatcattatcacctaatgttgcatattctgccgatagcattattcaaataacaggttatatgagagataacacctgtgcagttgcaccagaatcacaataccaaactattgatttattaaataatgaagttaagcggttatataaagtgggagaaacaacaccctttattccttttcatataatactggagccttgtggagaatcagtgattgctgtgaaattctattttaatggtatttcagatagaaataatccttcattattagcgttagatccgatagcaacatctgcttctggtgttggaatacaaatattagatagtgaaaggtcacccattcctattaatccaagtagtgaccaacttaaatggatccccttagttgcaggaaaaagtaacaccgtttttttctatagtcgattaatggcatctgatatgcctgtcttagctggaaaaattaaagccagtgccacttttacactcgagtaccaatag

SEQ ID NO: 305754 - DNA, 399 bp, Proteus mirabilis
atgagttcacatcttgtgatgcaaaatattgaagctctttcatcgccaggggggcactactctcatgttgttacagccaataatatgtcctttatttcaggcctattacctttagataaaaacggcgtgccattaacggataaacctattgaatttcaaattaatcaagtgcttgaaaatttaaacgcttgccttataggaataaaagcacaaaaaaccgatattgcccaagttaagatgtatattacagacattaacgaatggcctgttgtcaatgagttatatgcaaaatggattggtgagcataaaccggccagattagtcgcgggtgtaaaagagcttcattttggcagtaaaattgaaattgaagccatggtgatcaaggagcaaactttatga

SEQ ID NO: 305755 - DNA, 384 bp, Proteus mirabilis
atgcatgtagtgctttttcacaaacgtacgttagtctccatgatagtttcactctccttattttctctcaatagttattccaagactaaggataatacaaccgatcttggacaaattcaggttgcagataatttagaaaaagatcaacaaggttatgctcaagtctatgaaaaggatgtggctaatatttatttaggtaaagcccttattgaacgttatcaaggggtatcacctgcagatttatttaaaagcgcgataggtgtttatagtggtgaagcccgtaatggaggagcattggatccgaatattcgtggtattcaaggccaaggacgtatccccgttactgtggatggtacaatcgtaactatattgattcaaatttga

SEQ ID NO: 305756 - DNA, 294 bp, Proteus mirabilis; identical to SEQ ID NO: 295186

SEQ ID NO: 305757 - DNA, 333 bp, Proteus mirabilis; identical to SEQ ID NO: 297028

SEQ ID NO: 305758 - DNA, 258 bp, Proteus mirabilis
atgcatgatattgccttagcgggtattttcgtccaaattggtttactgccaaacacacaatggttagacggaactgttgagcgtaataaaattggtgagatcgtggttgattcacgtggtgaaaccaatattaaaggggtatttgctgcgggtgactgtacaactgttccttataaacaaattattatcgcagcaggtgaaggtgcaaaagcctcattaagcgcctttgattacttgattcgcacaactgcaaaataa

SEQ ID NO: 305759 - DNA, 459 bp, Proteus mirabilis
atgatttttattcctacattatttaaaacggaaccagtaaaaaaagccaataaatatcaatgggttttactggctatggcgatccccgcactgttattattcgcaatggcattgggtggactcactattgaattacatttgccacaatggctacccgcctttatgttagcaaatattttctttgtctctcttgctgaagaagcactatttagaggagccatacagcaaagtctatctcgctatttatctccctatcttgcgctatttattaccgctattttatttgggttagtccattttgccggaggaatattactcattatcttcgcctcattggcaggtattatttatggcttagcgtggatgtggagcggtaggctttgggttgctacactctttcattttgcactgaatctcactcacctgctctttttcacttacccttttaaaatcgcgtaa

SEQ ID NO: 305760 - DNA, 408 bp, Proteus mirabilis
  misc_feature (194)..(203): n is a, c, g, or t
atgatagagaaagaaattcctaagaccttgaatgtcaaaattcctgccggtgttgttgatggacaacgtattcgtttaaaaggccaaggtactgctggggagaatggcggagaaaatggtgatttatggctaactatccgtattgcacctcatccattatttgatgtaaaagggcatgatcttgaaattgtggnnnnnnnnnntactattcctcccgctagtcaggcaggtcaacgcctgagaattaaaggaaaaggcttagtaagcaagcaaaaaagtggtgatctctatgccattttgaaagtcgtcatgccacctaaagtggatgaaaaaacacattcattatggcaacaactcgccgaagcccaagccgattataatccacgtaaaaactgggagaataaataa

SEQ ID NO: 305761 - DNA, 357 bp, Proteus mirabilis; identical to SEQ ID NO: 302516

SEQ ID NO: 305762 - DNA, 258 bp, Proteus mirabilis; identical to SEQ ID NO: 305758

SEQ ID NO: 305763 - DNA, 480 bp, Proteus mirabilis
atggaagttgctcaagccgctcttaatgatgcaccaacctactatattcaaggcttattggctgataacctgacaccaattacgttttcttctatcattattatcatttttagcttaatcagtactgcctcttattggtttgcccctgccttaattttagtaaatgactataaagctatccctgccgttaaagccagttttatggcggttaaaaacaacttatttggtggctttctattctttgtgctgttaagcatcattattggcttgagtattatcccatttggattaggcttatttatcactattccactctcttttactgcaatgtatggatcatatcgccatattttctatcagaaaaatatgggtaatatgactaataaccatactgatgacaatgacaataatggtgatggtgggaataaagtttctttaaataaaaccgcagaatcgaatatcggtaaattagtcagttaa

SEQ ID NO: 305764 - DNA, 195 bp, Proteus mirabilis
gtgatcagtaaaaaacctgatttgattttatttagtggtaaaccaaaccaagttgccgcaatacaacaattttggcaacctcaactagatattcctattatcgctattgatgaagatagttttagccgaccagcaccacgtattatttatgcggctcaacagatttgtgaggctattaaagataataataagtaa

SEQ ID NO: 305765 - DNA, 225 bp, Proteus mirabilis
gtgaattattggcaacaatttgatcgtgataagacgcctgcgtggatcagtattgatggtaaagagcgcgccgattataacttaacgccaggtatgatggcggtaagagatctgacaatgaaaacagcaattgaaaatgtcgatttaactaaggatacggattattactcttcagccttacatttattagccgcctttgcgcagaataatcacaatgactattag

SEQ ID NO: 305766 - DNA, 408 bp, Proteus mirabilis
gtgactttatggaaatcacatttaacagtttcttggtttacacagttattttcaactagtgtttacgttatttttgaaatagcattgctgttatatccttggccacctggctttatttatatctgggttcctttgttacttttacttatattaggttggtattttagccaaaaaaatatcaataaaaggaaaggggatttagtgctgcttaatggcaatcgtattcaatggaaatatcatgaatggcagattgcaaaacaaccgtggatcagccgatttggtgcaaaaataacgttagattctatcttaaataataagcaaatcacgctatgggttgcttttgatagtatgccggaaaatgagtggcgaaatttttcacaactgctgatgcaatacccagatatttaa

SEQ ID NO: 305767 - DNA, 270 bp, Proteus mirabilis
atgggagtaagtattagtgctaataaacataaaaatgtttattgcggggtttgtgagagtgttaccactgcgcgtttttgtaaagtgattaataattgcaatatgctagccatggggggtttactgattactccctttaaagccaatatgatggtagatgcttatttatctgcaacctttacacaagggttttctgaagcgaccccagatgatttacaatgtggcttacagaccatgaaagaggttgaaaagcgcatttatactgactaa

SEQ ID NO: 305768 - DNA, 249 bp, Proteus mirabilis
atggatttttctatctttgtcgatacgccattagatatctgtctaatgcgtagaattaaacgtgatgtgaatgaacgtgggcgtagtctagattctgttattgaacaatataataaaactgttcgtccgatgttcttccagtttattgagccttctaaacaatatgccgatattattgtgcctagagggggaaaaaaccgtgttgcgatcgatattttgaaagcaaaaatcggacagttttgtgaataa

SEQ ID NO: 305769 - DNA, 249 bp, Proteus mirabilis
atggcaggagaaggatttttggcaataagtccgggcagccaagcttctggtattgcggtgggattagagtctgaaaatggtaatgctctacctataaataaagaaacagacaagatgtcattaactgcgggtgacactattttgaatttttatgcctttattcaaggtgagccggatgcgattgcgaataagtcgattaaacgtggtccttttagtgcaatagccaccttctatttgaattatgactga

SEQ ID NO: 305770 - DNA, 174 bp, Proteus mirabilis
atgcgccgtaaaacttattccatatatgaaagtagcggtgatgatgaacgtaaagtttcattaggtaaagagggtaaagcattctctgatatatatggggcacaatatgagccttcgatggcattaaccgcagactattttgcagatcctcaactctacgatgtgatcaaataa

SEQ ID NO: 305771 - DNA, 267 bp, Proteus mirabilis
atgttgattaacgacgcacaaaggccaattaatgccaccacgcaggagagtagcgaacagtattcgcgagagcaatcacgtggtgccgaaatcaacacggcggtcagtgggcgaacgaaagcggaattgtcgataacaatcgaaacagtgatagaaagagccaacatgcaactggcttatcaacgtgtggtggaaaacaaaggcgcagcaggggtagataatctgagtgtgtacgagttgaaatcgtggttgaaaaggcattggtga

SEQ ID NO: 305772 - DNA, 2040 bp, Proteus mirabilis
atgcctaagaaaacattatcgatcaatttcccaattgagagagtagtcctttcagacctgcttccatatgaggttccaataacattttcgaataggcatttttataacttcatagtagataatcaagtaaagtattcgaatgattatttttactggaagaaaaaagataccgcttttgatagccttgttatggtgttgcttggtttgcctaaaagtaagcaggttcagaactttgagaaagaaggtatcaagtacagtaaagttagtacaaggaatataaacccttttactatacctttcacatttaatatatcacacaaagtggatcagtatagacatttgtctttaatccacccaagatcacaagtccgtgctgtagaattttacaagaacaataaagacttgatcacttattattgcgataaaagccagtttagtctcaggtcggcgaagcgagttgctggttgtacatatgtagataagaagtcacttattgagcagtttgatactgatggtgaagtaatagaggttgaaggtgagaattacgagaatttgaaatcgttttttgtatacgataaatatagtagtatctttaatttttatgaatccgatgaatatcatgattgcgagggaaggtatagttttttatcaaaacttgatatttcgaattgttttgattcaatttatacccactcgatagcttgggctgtatacagtaaagaatatgccaaaaataatcttagtcaaactaaatcgacttttccaaatgtttttgatagtttgatgcagcagcttaactataatgagacaaatggaattgtaattggtcccgagttgtctagaatatttgctgaaattatacttcaagctattgataatgatattgtctcagacttggaggtaaaaaatgttttctttggggttgactatcatgtatttaggtatgttgatgacttctttgttttttataatgaccaagaggttttctctaaaataaagtcttcaattagtctttgtttggcaaaatacaagcttaacctaaataaaagtaaagaatgcttttttgataggcctgtgataacgcctatcacaatagcaaaaaagaaaattgctgatcttttgtctgataagctgaaatataatatagaatatatagagggaactaaggaaatagagaaagctagtttgtatttcaggaaatcaagtttaattacagactttaaatctatcctccatacgtcagacgtttcatatggggatatactcaactacactctttctatattagagaaaaaaataagaaagatattgcttgtttatactaaggttcctgaaggtgaaaatgttgataaacaacttgtaagtgcgttagttagtttaattgagttttcattctttatatattcaatgtctccaaaagttaatggaaccattaagctctgcagaattatgcaacagattgttctgtttgttaatgatcgcactctagggattgaataccgtgatgtaatattccgttctatatttaatggctcttgttctgtattggaagatataaaggtagggaatgaaactccagttgagacattgtatttgcttgttttaatgcgtcagctaggtaagttctattggcttgatgaattttccttgtgcaaatattttgggattgtaaaaagctccgaaggcattaatgttgaaaaagatttaaactacttttctattgttgttttgctgttttatatagagaacaagaagcggtatgattttttaaaagagccaattgaagaatacattttgcaaaaatatgcacaaaaaaattcgataataaacattgatagtgaaatcacacatatgacacttgatttgattgtgtgtccatatgtgagtgaaaaactcaaagatgaaattttagaaaaaagtgatgtccctaaggagtgtcgaaaaaaagttatcagctattgctcgacttggttcactaagtggttagggtacaatttcgctaaagagctagacgctaaagtgagccaagatgtatactga

SEQ ID NO: 305773 - DNA, 1347 bp, Proteus mirabilis
atggaacagtctttttcagttaaaaacttccggagtatttatgatcttgatctgaaaaatcgaggtgatttggagcgtgaatacttcgaaaaagcatatgcagaaagactgaaaattagagttttaaaaaagtttaagtatcggattttatccagatttaaaaaaggcgtgataaaaaaagaattctatgagaaaagagtggagttaattcgtaaattattggaggttagaaagggtaggtacaatagttttgtaaatgatgaaattgaaagcatttgtaataaggtaaataggaaggggtataatctcccattatcaaagcttaccaatcagatttctggtaaagatgtatttacaattggaaaaagcgtggagagtgtgtttgttacaagacatttacacaacataataagaagtacttataatataaagcaatcgcatcgtgacttaatcgttagcagagttaaaagtatctgtttggataaaagccctaaatatattgttaaagctgatgtaaaagatttttacgaaagcattgaacatgaactaattataaaaaaactgcacgcatctacaaagttgtctgtattgcctaagagaatacttacccagcttcttagatcatatgctaaattggtggggtgtgataaagggcttccaaggggggttggtttgagcgcctatttatcagaagtatatatgaaagacttggatgatgagatggtgaataatccggatttaactttttattctcgctacgttgatgatttaatattgatatacttccctgatgttataaaagataagtcttattatcttcaagttgtagataaagctgttgataggaagaaattaaaattaaataataaaacaaaagaaattgatctgacactggataaagctcaagagtttgaatatctgggatataggtttttatttaaaggtaaagatatagcaatcaggattagcagtaaaagagttgataaatacaaagatcgtatcaatcaggctttcgataactattttaaaaaatgcaaatataatcctgataaaaaagctgaccttctaatagataaaattcggtttttgactggaaatactcggcttttgcatgccaaaagaaaagcgttcactggcgtctattttaataacatgtatataaatgacattagtgatctggaagagattgataagtacctgaaaaataaattgctagcaataacagatcagagattacataggtgtctaaataagttttcttttgttgagggatttgaaaataaagtcttcagaagttttactactactgacttgaaaaatataactagaggatggaaggatgcctaa

SEQ ID NO: 305774 - DNA, 303 bp, Proteus mirabilis; identical to SEQ ID NO: 24284

SEQ ID NO: 305775 - DNA, 1494 bp, Proteus mirabilis; identical to SEQ ID NO: 13713

SEQ ID NO: 305776 - DNA, 225 bp, Proteus mirabilis; identical to SEQ ID NO: 13704

SEQ ID NO: 305777 - DNA, 738 bp, Proteus mirabilis; identical to SEQ ID NO: 13703

SEQ ID NO: 305778 - DNA, 768 bp, Proteus mirabilis; identical to SEQ ID NO: 13701

SEQ ID NO: 305779 - DNA, 507 bp, Proteus mirabilis; identical to SEQ ID NO: 13700

SEQ ID NO: 305780 - DNA, 1068 bp, Proteus mirabilis; identical to SEQ ID NO: 13699

SEQ ID NO: 305781 - DNA, 204 bp, Proteus mirabilis; identical to SEQ ID NO: 13698

SEQ ID NO: 305782 - DNA, 225 bp, Proteus mirabilis; identical to SEQ ID NO: 19405

SEQ ID NO: 305783 - DNA, 249 bp, Proteus mirabilis; identical to SEQ ID NO: 13648

SEQ ID NO: 305784 - DNA, 1428 bp, Proteus mirabilis; identical to SEQ ID NO: 13647

SEQ ID NO: 305785 - DNA, 237 bp, Proteus mirabilis; identical to SEQ ID NO: 13646

SEQ ID NO: 305786 - DNA, 780 bp, Proteus mirabilis; identical to SEQ ID NO: 52392

SEQ ID NO: 305787 - DNA, 189 bp, Proteus mirabilis; identical to SEQ ID NO: 13644

SEQ ID NO: 305788 - DNA, 738 bp, Proteus mirabilis; identical to SEQ ID NO: 52390

SEQ ID NO: 305789 - DNA, 828 bp, Proteus mirabilis; identical to SEQ ID NO: 13642

SEQ ID NO: 305790 - DNA, 222 bp, Proteus mirabilis; identical to SEQ ID NO: 13641

SEQ ID NO: 305791 - DNA, 1548 bp, Proteus mirabilis
atgaaaaaactctttactaacaaaatattgcaatgccttattttgcttatatttgttttattactacatatctcattaggatatacattacgccccttctatgttctgacttttaccgcttttcttctatgcttatctggatattttaaaagaacctatttcatctttataatattattgatgatagttggtgctatttatttaccaataggtttaaagtatggctcaccaaatatcaactctatcatctctatcttctataccaatacacatgagagcttagagtttatcttatctgtttctcctataagcttagcatttagttgtttacttatattatttggcttacttagtcttaaagtgaacctcttaattggaaagaaactatcactatttactgtctctatttttatcttaaccagtgttacatggccggtaaaagcccttattactcatgatgattactcttttgaagccaaattacctataattcgcttttttagtgatataaaaaaacattatgatacagtgataatagaaaataattggataaatacagaacttaacaaaaaagatagttggttacctattaataatagtaaatataaaaattatattttaattatcggcgaaagtgccagaaaagactttatgcaaagctatggtttcccaattcaaaatacaccatttttagagaaatctcctgtaatacagtttgacgactatatttcatcagcaccatctactttcttttctcttcctccttcattaaccttaaaaaaccataaaactggtgatatggagttacaaaacaacatcattaccttagctaaaaaagcgggtatctatacttattggttttctaatcaaggttctatgattggctctgattctattatttctactataggtaaacgtgctgatgtatatcacttcttaagcaaaggtgattatcataataacggaagaagcactgatgatgatttattgcctgatatcaaagcagctctttcaacaaatagccataaaaccaacctcattgttgtacatttaattggctcccattcacaagcctgtgctagaacccaaggacaatacgatgagttttttcaatcaaccgaagtctcttgttatgtgcaaagtataaaaaacacagataagttattagaaaaaatcgtctcgatgtcaaatgcaacgggcaattcatggtctttgctctatttttctgatcacggattatcttatgaacataagggagaaagctatactaaacttatccataatgatcaatttaaacaaaattttgaggtaccactctttatactttcgagtgatagtcacgagaaatatcacataacagcaagaagaaatggtagatattttatgacgttattttctgagtggataggcattcaagatcccaaaatttctaatcattgccatatgatgtcaaatgatatttgcactgatcaagatacggttatcaactttcaaaaagaagaaatcgattataattcactaccagaagacaaaataatatatcaataa

SEQ ID NO: 305792 - DNA, 639 bp, Proteus mirabilis; identical to SEQ ID NO: 14558

SEQ ID NO: 305793 - DNA, 936 bp, Proteus mirabilis
atgggtcaaaatatgaaatatcattccttattaaaaaatttattttatgcaacactttccatcatggcgttaaattttagtggcgtcactatggcaaaaaataccatgaatgagatttatgttattaatttatcctcaaatgaggcaggttgtggtataaaaattaatgaaatgttggtaatgaataataaaaaataccctaaaggtcattattccgtcggtcaaaatatatctagcatattaactaatggggaaaataccttaggtgtaattatgtttaatggctctattttaacaggtgaagaaaaacttacccctgatatgtggtgtgaagtcgaacttaaaaaattatctgcaaacggcgataacaccttaatatcgggacttagattaaacggaaataatgacgggaaaatggtggtctctgataaatatcaaaataacagtgagcaaatctattttggtggccccagtagagatagtgagtataatgttttagaagcaaaaaaccaatttaatatacaaggcctcccccaatggcaatgggaaaaagcgactcccgttactgaggacgatcttcctaaaattcgtgctttttatgccgaactacgacaagcatttatcgataaaaatctagataaattaaaaactatggggaaaatatcatgggaagaaatggcctatgccgataatggctctcctgatatcttttggaaatcgcttaattttcaagaacgattaaaacaaggatataaacccaatactattaattgggatgaatatacttttgttacttataacgacaatcgagtctttcgctatgaggttggttttagccgattatcccccattgaattaatcaactctgaaggggataattatttttataatccttacctttctattattgatgggaaagtgactattgtccgataa

SEQ ID NO: 305794 - DNA, 336 bp, Proteus mirabilis
atgaaattattatttaaaagtattattgttactgttagtattttatcttccagttttattatggcagataacgaagatgagataattaaagtattttataattgtgaaaataataaagtaatggaagttatttatgtgaatacggcaaaagatagttatgcaatgattaatcaaatggatgagctgatcccaatgaaaattatgaaaatggcttctggcgcaaactataaggtaatgtataaagtttataaatataagctttatactaaaggtgataaagctgatttaattcgggataatggcatacttgtattaagtaattacaaagttggttaa

SEQ ID NO: 305795 - DNA, 837 bp, Proteus mirabilis
atgagtgcgtcagtaattagttttatcaatatgaaaggaggggtagggaaaaccaccctatgcattagtattggtgaatatctagcaaattataaagataaaaaagtattaattatagatattgatcctcagtttaatgccacgcaatcaattttaagtaagtataaaagaatcgatgagtatctggatgatcacctagcaaataccaaaacaattcgtagaatatttgaaacaaaatcatcattaacggatacagttcaaccagttactccggatgaaataatcgtagaaatatctgaccatctagatatgatattcggtgatataaatacaatatttgatattgagcaaccggcagctagattaaataaactaaaacgatttatagctgaacataacttacgcgatacatatgattttatattgattgatagcccaccgactatatctttatttactgacgcagctttagttgcatcagactattatctagttccggttaagattgatcattactcaattttaggtgcaactagcttgttaagtgtgattaataacataaaagatacatatgttcatccaaacataaaaaatcttggttttatttatacgaacacacaagagtccttaacattaaaaacaagaagaatgaagaatcgctttgaaagaactgaaccgtttaatgatctttatttttttgataacaggttcaattttgttcaggatttaatggttggcggaaaaggcaatatagcatctagttataaattatcgagaaaatacattatagatatatgtaatgaatttatatccagaatagacgagcttgaggaataa

SEQ ID NO: 305796 - DNA, 432 bp, Proteus mirabilis
atgaataaaaatattatgaataaaaatatccttagggcattgacttaccaaaaaattaactcaaagcaagagttgattggagcaattacattagttttatattcaaaagatatttttcctagaaatatagatgcttacaatttcatcaataatgtttttaatgttaattacttagactatgttattcgctcaagaacgcttctttgtgctagattaactagaaatctagtggaaatgaatgaaaaacaggtagataaaacaattaaagagctatctttattttttttagagtatatggctgagctgaaggaagaacatgatgtttatgaaaaaaatgaacgtaaaggaattaaatataaaataaataatgaaaaagatctagataagtggattagaggtattttaggtaagaataaaaatgttaataaatag

SEQ ID NO: 305797 - DNA, 669 bp, Proteus mirabilis
atgttaataaatagagacccgtatcactttaaggaggaagtaagctcctttcagcaagaactatgtaatttggatttaagtgtaggagctaaggataacttcacatcttcctttaagcatgtgctattcatggagtttttatattgctcacatccagacttaagtcacaaaaaatttgtaaaaagcattatttatgatgttttaagttcaattcttgcaataatacaaaaaagagagcgttatctttatttaaatgttaggtcaatgattgagcacatcgctaggatagcattacaaaaaatagacaatggcggtgactttgatataacggttagaagtaaagattttgaacttttaaaaaccaataaacctagtgaaaattggatttatcttcatcaacagtacaaacaatcatgtggatggattcattcgtcatctaatgtgggtttgaatatattatctacttttaatgaattgttaactggagatataaaaaatagttcacttaagcaatcaatatatttaaataaattaacatctgaaatagtacgagtattttacagttattatgaaaatgagattaaaaacattttcatgaggaagatggatgcaatgaaatatctagttggaaaaagtaatttcacatatttttctataaatttcccataa

SEQ ID NO: 305798 - DNA, 276 bp, Proteus mirabilis
atgaataagaatatattagaaatagcaaaacatttaaaaaataaaataaactcaggcaaaggtattgatgaacacaattggcaagaaataattgacgtttgtaatgaaatagaacgaattaatgatttagagccagtagcatttgccagacacacaggaatgcaaaggcatctggatttaaccgtatctcagacagtattaaatgaatgggtagaatttaataataaaaacctagaaataaaagacgatatttaccctctatttattttagattaa

SEQ ID NO: 305799 - DNA, 870 bp, Proteus mirabilis
atgataagagataaaattaataatgatattttattcatttttgctatcactattcattttaaaagtgaggagtttaataaagatatacccttatttgaaaaatttaatttctttaaaagactggtttttttaggagagggaaaaaacatatcttttaagttgaatgagctcttaggtataaaaaccaaatattatattgatgaaaaaatatataatattattgccatggacatgaataaattgctacctagcaatttacaccttgaaataaaaagagaatattatctttttatgcctagctctttttatattaacctcttggttgaaattaaatcagcttatttaagctatgtaataaatagaatagaaggtgtaataaatacgaattattttgatgatattgtgaatagatttaatcatgttgaagataaggagtattatatatatacagtatcttcttttaaaaaagatagcgtttttagtggtaatgctttgcgaggaatttgtatttctaaagactactctaataaattgtatgatctagccaaaataataatagatgaaaatcttgatatccatggatttaataaactaataggatgggaagagggacataaaattgtatcatcctctcatgttaatgcaaatgaaacggtcataggattgagctctaatgaattatataataaatgtttggaagttattcatagtaatactttctctgagataaataaagaaaattataaatatcaagtaaaaaataaaattgttgaaattgttaataattcaaaattgagtcaaagtgccagtctaatcttttttctcgatgaagatgacgataaaataaagctttcttatattcctatataa

SEQ ID NO: 305800 - DNA, 204 bp, Proteus mirabilis
atgaacaaagttattatttccaccctaataattacacttctcagcttgttttcaataaatactgtatcagctcaaaactacccttgttctggtaaaaaaggcggtgtatctcactgtgagaatggtaaatttatttgtaatgatggaagcataagtaaatcaaaacgagtttgtactgatgaaagtgatacaaagaaaaaatag

SEQ ID NO: 305801 - DNA, 1131 bp, Proteus mirabilis
atgatgataagaacatttcaccctattgggcaaggtgcattttatacagaggaatttgataattttacctttgtttatgattgtggcacagatacagatggtaaaaagagaataggaaaatatgtaagtaatcattttgatataaatgaggaaataaattttttatttatatcccattttcatagagatcatattaatggactggaatatttactttcaaaatatactgtcaaacgtatttttattcctcagtatgatatttatgagcgagtaattgagctttttaatacaagtaatgaaggcgattatgaaaaaatagacattaacttattcgataataaattaattttagatcctattgaaacaataaaatctatatcaatagatacagaagtaactttagttagacatgactatggtgatagtatcattgaagatgatatcaatgattatgaagtatctccagataactatctgaatagtggtgaaatgttgtcttctccaattcctaattggatatttattcctattaattataaggataaatttcgatcacatgtatttagtgaagagcttaagaagttaaatattgaatttagaaatactgatgattttgttaaggcctggagtagaaaagataaaagaaagaatgttattaacactttcaaagatttatcatatagtccaaatgaaaactcaatggtggtttactctggtccaaaaaatgaaggaaaaaactattttttaaaaaatattttttctcaatctattccagatgatgatttttcatttcctctcctactaaatataaataatcacgctggttgtatatactttggtgattatgaggctaaaaataaaggtgcattggaattaattaagaatagattgaaagagtattataactctgcttgtactattcaaatacctcatcatggttcatttgaaaattatagtgaaaatataaacgaaagacataacatatattctgttatctcgtatggagaaagaaataggcataagcatcctagtccatgcacaagaaagcttattgaaaaaaatgctggtattttgttcgaagttacagaagaaccattaacaatattacgtttttttatagatgaaagataa

SEQ ID NO: 305802 - DNA, 279 bp, Proteus mirabilis
gtgaaagtagaatataagtgctatattgatgaatatgataatgggaaacatgctagatttcgagataagaaaactaataagcaagtttcttttataaatattcctatggatagaagaatagatttattacgatttataaataagatgaaaacattaaagttagacgttttttctcgagatggaaataattatatattaattgaaggtgagttagatttagaaaccaatgatgaaatatgcctcatgtatgataaagttttaatatatacctacaaataa

SEQ ID NO: 305803 - DNA, 420 bp, Proteus mirabilis
atgaaattgctactatttgtatattgtgccttttttttactatctggctgtcagagtaatcctagtcgttcaaaccaaggggtgcctcaaccacctgaatttgttgtggttgaagtttctttttgggaatcattatttccaactgatggcgtcaatagttattgcaaacaagagatcataaattttgatcctaattatccattttatgaagctgctgttttcgatgcagttagaaatgcaagcacaatcaaaattgtctctggaacttatgaaactaatcgtgaagatgatgcagaacattggttaaagaaacatggggctaagggtaatattgagcgttggtctgaagctaaatgcagtggtaaatgtactccaactcattgttgcccgataacgatatgctttgagtataataaatag

SEQ ID NO: 305804 - DNA, 273 bp, Proteus mirabilis
atgaatccatttgaacggttggtaaaaagaatggataacgtgaccactgagcggatggggatccccatccgtattaatggtgttatttatcaagcactcgaatctcactttatccctgaattgggaccgatgagtggtgacggggtgagttatgttattttttcgtcaacctatcaacctgaccgtaaggatactgttgaaattgatggcaaaacttaccaaatcacgcgatatcaaaagtttaatgggaaaccacatatttggatcaaatag

SEQ ID NO: 305805 - DNA, 2103 bp, Proteus mirabilis
atgacagcaacagtgtcagcaaccacattaagaaaaaatgtagctcaactcattaaagcaccgaggcgaatgccagttgcggatgctgtggcaaaatatatgcgcgtacctgtgggagcgggtaactcggttccttgggatccggcagtatccccttacattgttgaacctatgaattgtttatcgtcacggctctatgatgccgtgatatttgtgggtcctgcaagaacaggaaagacggtcgggttaattgatggctgggtgatttacaatattgtgtgcgatccttctgatatgttgctggtgcaaatgacacaagataaagcacaagagcacagtaaaaaacggctttctcgcacctttcgttgcagtcctgaagtcagcaaacaactcagccctcgtcgtaacgataacaacgtgtttgataaatactttttatcgggcagttttttaaaaatggggtggccatcgattaatgtgatgtcctcatctgactttaagtgtgtggcgctcactgattatgaccgttttcccgaagatatcgatggtgagggggatggcttttctttagcctcaaaacggacaaccacttttatgtctgcgggtatgacgctggtagaaagctctccggggcgtgatattaccgatactaaatggcgtcgtttatcccctcacgaagccccgcccacaacgggtattttatcgctttataatcggggggatcgccgtcgctggtactggcaatgtcctcactgccacgaatattttcagcctatttatgatgcggtaaaggggtatcgtgataatccagatcccgtagaagcgagtgaatctgcgtatgtggagtgtcagcactgtttaggtcgtatcgaacctcatcaaaaacgggaactcaataataaaggggtgtggttgattgaagggcagtccattgataagcaagggaagatctcaggcacagggcgtcgttcgcgtattgcctctttttggatggaaggcccagcagctgcttatcaaacgttgtctcagttagtttataaattactgactgcagaacaagaatatgaattaaccggcagtgaagaaaccttaaaagcggtcaccaatacagactggggtttaccttatttaccccgtacagcacaagaacagcgccggagtgatgaactgattaatcgtacggaaagttgggatgagtcagtggtaccagaaggcgtgcggttcttggttgccacggttgacgtgcaaggtggtaaaaaacgtcgctttgtggtgcaagtggtcggttacggtgaaaaaggtgaacgttgggtgattgaccgctttgaaatcacacaatctctacgctatgacaataacggtgagtgccgtcgaattgatccgggctcttaccctgaggattggcaggtattaattaccgatgtattagagaaaacctatccattgcaacattatcctcaccatgaaatggagatcatgatgttgggggtagactctggcggtgaagagggtgttactgataatgcctataaattttggcgtcgctgtcgaaaagagggactgcatcgtaaagtctatctctttaagggtgacgggcataaacgcagtaagttaatcaccaagtcattccccgataacaccagtcgttctgaacggcgcgcccaagccaaaggggatgtgcctctttatttactgcaaactgaccaacttaaggaccggatcagttctgcgttatcgcgcgataccgtagggcctaactatatccatttccctgattggttggatgaatcgttctatgacgagttgacgtatgaagagcgtgatgaaaaagggcattgggaaaaaccgggtcgaggcgctaatgaggcatttgacctaatggtttacgcccatgccttggtgatattaaaggggtacgaagggatcaattgggaaaaaccacctaaatgggcaaggttacctgatgtgacactttcctcctcctcgccaattaccgatatcgccacagagcctgaaataaaaccctcacccgaaaccccaaaacaggaaacgcctgcggtatcagcatgggcaccggtatcaaacagcggaggctggatatga

SEQ ID NO: 305806 - DNA, 567 bp, Proteus mirabilis; identical to SEQ ID NO: 298053

SEQ ID NO: 305807 - DNA, 207 bp, Proteus mirabilis
atggattactatataaatacattaattgatgacaagggctattacgttattcatcaatatggttgtgagcatatgcctataacattaaacagaatgtttttaggaaatttttatgattgtttttctgcaatgcgtgttgcaatagaatatagctatccaaaagcgaatggttgctattggtgttgcagggagtgccatatgccttaa

SEQ ID NO: 305808 - DNA, 474 bp, Proteus mirabilis
atgagtaaaaaactgttaattgcctgtgctgtgatgatgacactgttatttatcactgttcgatggcaggcaggaaaaattaatgagttgaatgagagtgttactaagttagaaaaagataaaacatcacttaccggacaactctcccaacaaatcgaaatcaataaagactaccaatctcgcatcactcgattaaatcaactcgatattaaatacacacaggagttagccaatgcaaagaatgaaattgataggttgcgtgttagtgctgagcgtaatactgacagggtgtacatcaaagccgagtgtccaaaagtcacaaccactccctccatcagcatggatgatgcaaccaccgcccgacctactgacaccgctatccgaaattattggctactcagagagcgaattgtacagtcggagcaaatgattaaagggttgcaggatcacattagaacggagtgcttgcagtga

SEQ ID NO: 305809 - DNA, 216 bp, Proteus mirabilis
gtgaaatggctaatgttttttataccgcattgcatcaccgaagatgtcgtatttaatgaaaatgaagacgaagacgaaatttatccagtgtgttgcctggatgacgtaagagaaggtgaacaattctcatgggtaggaacagtgcgttcgcttagttttatgaactttggttatttcccaaaacttatgggtgagctacgaccgttcagaaaatag

SEQ ID NO: 305810 - DNA, 1686 bp, Proteus mirabilis
atgttaaaatgtaagaaattattactttctactagtattggtatttctcttttatcatcaagtactattgctgcatataaaggaaatttaaatacagatgctaatgctaaaggattttcctctatagcgattggttctaagaatacagaatcagcaggcattggaagtatcgcgattggtgatggattaggtgataatacaaaatcagatcaaaacttttcagtagtaataggtgcaaaagctaaatctcttagtgtacctgaaaaaaaaggtgcgggagcatctgtagtaataggattcgattctgaaacaaaagccgagactttttcaacattagttggggctagatcgaaaatagatcaaggcggaaactattctactctaataggtactacagcttcagtaactaaattacctggaaatagttcatcattagatgttagtggtaaaaaaataactgtattttctgatggtcatatttctgtttcttcaccagttgatcctcatgcaaaggagaaatatggtaatcaatatgcttcatctgtaatggggtataaatccagttctcataatattcaaggaacagctttaggatccttttcaacggtgacaggtgagtttggcacagcattgggtagtcaatcaacttcaattggagatggcagttctgctatggggttagaatcttattctattggtaaaaatagtattgcattaggttcatattccaactcacaagaagataattcagtttctgttgggtatttatctgaggctaattcaaaaggtagtgttgctttgggggcaaaatcaaaaacgcatcagaaatatgaaaatacagtatctaaatatacggaagtaaataattcagatagtgaaaatggtgttatttctataggaagagaaaaaacatctaccgagccaatgataaatagaagaatcacaaatcttgcaggaggagtaaaatctacggatgctgtgaatatggctcaattagatattgttactaaagctataggcatgagtgaagatgaaattaaaaatatagaaaaataccctaattcgtcgttagttgcaaaaataaaagcagaacagagtgctcggattgatacattaaatatagaaaaaggtgctcgaaaacaaggtgacataaacacattaaaaatggcgaatcactatactgataataaagttataagtagtaatatacgtactgataatttaattagcgaggagcagaaatctcgtcagcatagtgatgccgtattatcccagcgtttaaatgaggaaatggaatatcgcagaaaaagcgatgaagaaacattagagagtgcgaatagctacactaattatcgcattaatacattagattcaactatcgataaaacgttaaataattttcaacagaatactgaacaacgattttcacaaatgaataataaaattaatcgagttgaaaaacgtgctaattcaggtattgctggagttactgcaatttcatctattccttatgttaataaggagcatttttcatttggcatgggagtaggacattatcgtgatgctcaagcaattgctgctggagtgcaatataaggtggaacagaatactaatgttcgtgttaatgcatcatggaacaatggtggtgatacaaacttaggtgctggttttgccgttggctggtaa

SEQ ID NO: 305811 - DNA, 207 bp, Proteus mirabilis
atgattgatttattttgcaaagaaaactcggttaaaaattttagctttcaacttcacaaattacctaatattcaaggccactccaaacatataaagactgatggtaatcctagatatgtcgcagaagtcagttttcaatttaatggtcaaaatattgtgatcttagaagttgatacatccgataataaaaagcctctttcaacttga

SEQ ID NO: 305812 - DNA, 300 bp, Proteus mirabilis
atgtcaagatcgcaaggtgagaaattacgattaatgcgtaactccgaacagatgacaaaaagggaactcgctgatttggttgggctaaattatacaacctaccacggttatgaaagtgacaaatcgaaaatgacatttgaatcaggtgtgaaaatcttttccgccaaagtattcaggaaatatcgagactggtttatgttcgatgaagttaatcccgatgctgggcaaatcgcaccggcactcgcacacagtgggcaagacaacacgcaatcatcccactcagacaagaaaactggataa

SEQ ID NO: 305813 - DNA, 909 bp, Proteus mirabilis
atgatgaatattaaagctaaacgagatattgcacataaaacaaaaatcttaaatcatgcccgcgagagcaaaaatattgctaaaacttgtcgtcattttgggattagtagagaaactttttatacttggaaaagagcttatgaacgagatggcgagaaaggattaatcaacaataaaccctgtcctgaaaatccaaccagaagagttgcaaaacatatcgaagagctggttatttatctacgtacgacttaccatcttggcccccagcgcatcgcttggtatcttctgcggtttcataacatcaaaatatcacgctctggctgttactatgtattactaagaaacaaattaaaccaacttccccaaaatcagcgaagtcgctctaaaccactatttaaacgttatcagaaacaagtgcccgggcaccatgttcaagttgatgtgaagttcctattttttaatacgccagatggtcaacaaattaaacgttttcaatatacggagattgatgatgcgacacggatcagagcacttaaaatttatgaaaagcacaatcaggctaatgccattgattttattaattatgttgtaaataaatttccctttagaatcaaaacgattagaacggataatggtcacgaattccaatcaaagtttaattggcatattcatgatctcgggatggagcatgtttatatcaagcctgcaacccccagattgaatggaaaagtagagcgttctcatttaacagataaacaagagttttatcaattaatcgattataaggatgatgtcgatttacatgaaaaattagctgaatgggaggctttttataattgtcatcgccctcactcagcgcatgctggtaaaacaccgtatgaagtgttaaaaaataagcttggtctttaa

SEQ ID NO: 305814 - DNA, 981 bp, Proteus mirabilis
atggaagataaagattacactgaaattagagagttttggaaaaatgaaatcatagcatttcttgcgttgacctgcttaaaaggtgttggttattggactctccgtaaaatatacgaatccaaactagggtttaaaaatcttttaaaagctagttcagctgatgctttggcagggtatctaagggttgcgttacccaaagatatcgcgtgggaggaatttcaacaagagttgtgggcgaaaggattagaacgagctagagaactaaataaaaaaggaattattctaaccttttttgatcaacctactttcccaactaatttaaagaatataagtgatcctcctttttggctttttgttcatgggaatcaagatattcttaataagaaatcaattgcaatcgttggtacgcgaaagccaacagatgatggcatttttctggttaaactaattgtatctgggttgtataaaaaagatatagttactgtaagtggtttagctactgggattgaccaatcatgccattatgaatctattcgttatgggatacctacaattgcagtgttaggtaacgggatttttgtagaatatcccaagggctctaaaaatctctacaatcaaatagttttaagcggaggcgcaattgtcactgaatatttgcctgaccaaatttatagcgccgaaaattttgtaagacgcaatagaattcaagctgcgctgtgcacatctcttattcctgtggagtggaagataaaaagcggtactgctcacacagttgaatatgcttataaatattcgaagaaaatagctaatccgtacttacctaatacatataatttaagaccggaattgagcttttcagaggaaaatcgaaaatctttatcttttctaatgccaactgaattgaaagaaatgatggattatatttttagtgaagatttaaatctgagagcagaaccaacacagcagagcttagatctctaa

SEQ ID NO: 305815 - DNA, 1230 bp, Proteus mirabilis
atgagcaagatcaaaggtgtgattctcagtgttgaagacactattttaccaaaaggtaaaattgatggtgatattttctttgaagttgataaattaattaaatattttaaaaataaaaatattgagtttgtcgtatttacaaatcgcgcttgggttgttggtgatgaccatattcccttagaagatatcttacggaagcattggggagagtttacgtatttatgtcgagctaaggataggagtattcctggaaaacctacagctgatgcaactaggtatgtacttaatttgatgggatggcaaagtacagaaactttatatatcggcgcatcactaaacgacatgcaaactgcggtaaatggggaattgctttttttaagagcaacctggtgggccgataaaacagattacgggtttgaattttcatcgcctaaagatattgctagatttatagatacattttgtttgagagatcatctctggtgccatgaaattcatgatggtgattttaatttttatgcacttgcccctttcagtacaatgaaagaagaatataccttatattcggaggatgctcgtgcagcggcaaagcatggtttggggcatcctgaattctggacaggtgctttggtgtctagcttatattttagtggcattcataaacatataaactatgttagtgtttatcctgggcataaagaagggtatggtaataacataatggatgaagctatttcactatttggtaaatgcttcagaaaaacatacatacctgatcttattttaagacatacaacatcaacaaaatcacaaaaggcaagaaatgaaggtattgcaattgatcattgcaaccaattaaatacaatttgtcttaatcctaaaccgcatagaaacccaacgactatttataaaaaaccacctttgggatctggaaaaacagttctccttatagacgatattacgactcgaggttacagttttgaatcagcccgagcctacattgagaaaactggagcgaaggttatacttgtatcttggcttaaaacaattaatactgatatttctactcttggtgagttgcctagctttgatccttacaaaccgaaccattttgaaaatgtacctttaggaaaatttcatagatacagggacaatatcgttgatatattagcaccgactgagttaactcgattgtttacagcttacaagcagtgggattggcctgtataa

SEQ ID NO: 305816 - DNA, 276 bp, Proteus mirabilis
gtgctttggataaaatggaagcaattcggcggcccatgtactatcaataatgggttggcattgtgtgcattacaccactctgcctttgatatgggcgcaatcagtattgatgataatatgaaattattagtttctagcggtgtgaatggtaatcaaatggtagagcaattattttggcaattttcaaataaggtaattggcctacctaaaaacacaaaagagcatccgaaggatacatttatccattggcatcgtgagcaagtgtttaagctataa

SEQ ID NO: 305817 - DNA, 1020 bp, Proteus mirabilis
atgaataaagccttagtcggtaaaaaaattctcattattgatgatgaggttgtatttcgcaccatgctcactgagtatttttcacacgaaaaggcttgcgtttatgcgactgacaatggtagccaagcattgttgttacttgaagagggactaagacctgatcttattttatgtgatatcagaatgcctgttatgaatgggccgacttttttatgtcatctagagcagcgtcattggtctttccctgttattgctatttcatgtactgacaacatggctgaaattgatgatatgttgcgctttggcgctcaggacgtttttcttaagcccgtaactaatttagctaagttaaaacagaaggtcattgaagtattatgtccaggtttttttgagtctgaattaattgcaaggggacaacttggacctctttggaataacttacgagaacagcctcattatattcaatcctttgttaaacagatgcaaccgcaagttaaacaaattgtcgcaggatataatgttaattatcgtcaattaaatgatgcatcccaaatggggttgttatttgatatagcgactttatcaaaagatcaaatcattttttactgtgttgacgtctctaatgatgaagaaaatgggttactcgttgcgctgcttttaagggtggtttttaatcgtttcctaaaagctactgagaaaagacgcttcttacctagtatgtataacatattgaataaaatcaataaaatgcttgatgatatgggggtgagaggatcattcccgctgattttaggttattaccacaccaaggaaaaaaatatattattagcgtcagcaggactacgagctgaaataaaaacagagaataaaaaatatgttttaaatagtggtatacctttaggaacactacactctttatatattaaccaaataaagtgtgtgggaatagattggcaatgtaaaatttggaatcagcaccataaaattaatttaatgttctcacctatacataaacgttaa

SEQ ID NO: 305818 - DNA, 1167 bp, Proteus mirabilis
gtgggtatctatacttctggtttatctttctatcaaacttgggttaaacgtagttttgaaattgaatttacaaccccctttgctcgttggaatagcttagagctttatggaaatgactatagccatgatccaaaaatcagttattacaagacttacgttgagatgggaaaagatatattacatagaacatccatgctacaaagtattgaatcctactctcatattgatgcagtgatccgtttaaaacagaactacttaacacctgaaaaagaggtagatagttttcaatatgaaggctgtaatggcgtggcaggagatagccatgatgttataaaaaacgacacattttttaccccagacagtcagaaagcctatctgtcaccaacgcaaattttaccctccgttcgctatatttctgacacaccttggggagggttaaaatatatggtacttgatgatgttaacaataatagttttactatcggtcaaggtaatcgagataataaatcgtatcttaatattcctggctactgctttaatggcgtaaatctttatttaagtcgtcacaatggaaaaagctgtcaagctaactcaggagcttggttaaccgaatctgcacctatatttcgtttttatgatggttatgcatccttaccccttgacactaaaaatcatttacccacagcaaaaaagagctatgaactcgatttaaatcatggatttatgactcaactaagcaaagctcaatatggctatagtgatatgttagtggggaaaaattgtattttgttaaatcacgatgcttatttttgtttaccatcagaagagccgattggcaaagtaggtttatcacaaaaaatcaccttgttattacagtgtgcaattacgcaggaacaatcgttagccatagtggcaagaacgggcgatgcgacccaaggcactattattggttctgctgaatttaagctcaccacagatcaagataatattatttataaaataaccccattacttaatcatcctatttccgataataaaagttatttttatacttatcagattgatttatcttgtatttttagtcaagaagatcaaaaaaatctctattttcatctctatttctttgagcctaataccttgttggctgatatgactgttttattctaa

SEQ ID NO: 305819 - DNA, 849 bp, Proteus mirabilis
gtgtacacttttggctgggtagggatgcgactggtgtctgagcacagcagcgcagcgccccataccacggtttatcatgcttacaatgaccaaagttatacgcctcttgcccgcattgaatgcacggataacccgcttaatccgcaacgggcgatttattatacgcacagcagtttaagtggtttaccggaagcgttgaccaacagtgagggtgaaatcgtttggcaagggcaatacagtgcttgggggcatttacagcgtcaaacccgccccacaagcacgtttaatcgtgaacagaacctgcgttttcaagggcagtatttcgacaaagagacggggttacattataatacgttcaggtactatgccccggatttaggccgttttacccaacaagacccaatagggttggcaggggggataaatttatatgcttatgcgccgaatgcgttgacatgggtggatccgtgggggcattgtgcggtcaaactttctaaaaatatggtagctgatggtacgcctagacctgccaatactgcagctcatcatattgttggtgatacatctaaaggtgcccagccagccagagatattctgaaaaaacatggtattgatgttgatgatgctagaaatggtgttttcctgccaaatagaaataatgttgatgaagcattgtcaggaataaaacataatggcagacatccaagtgattatattgacgcagtaaatacaagaattattgatgctgataaattaaatggaaaacaaggtgttctggatgagttatcaaaaattcgtgacatcctgtcttctgcaaatcgagatgcaagctggtatacaatattatga

SEQ ID NO: 305820 - DNA, 396 bp, Proteus mirabilis
atgaagcgtattattacgtttggtacatttgatgtgtttcatgtaggtcatgtaaatattttagaaagagcagctgcattaggtaactatttaattgttggaatatcatcagacaaattaaatttttctaaaaaacaaagatatccaatttattcacaacaagatagaacaagaattattaagtctttaaagtttgtggatgaagtatttttagaagagtcattagaattaaaacttgaatatataaagaagtataaggctgatattctggtaatgggtgatgattggacgggtcgatttgattgggtaaaatctcactgtgatgttatttatctaccacgaactccctctatctcaaccacagaaataatagaagttgttaaaaaccataaataa

SEQ ID NO: 305821 - DNA, 1077 bp, Proteus mirabilis
gtgagtgacttaaaaatattattggttgaagataatcaaagtgatattcaaacttttagatcttcactcgaattattcgatgatgataatgacattactacagatctacaaactgctgataattatgaatcagcattaaccctaatcaaggaaaatgactttgatggaatagttattgatttatcacttcataataataaatttggtggaaaagaacttataagtacaatcacaaatgaatacaaattaaccatccctattattgtttatactggtacccccgatgatattgctgaatacgaatatattcaaacatatcagaaaggtgaaagtgaaggtttaattagtgaaattttaaatgattttagaaaaacaaaagattttggatttaatgacttatttaatgcaaaaggtgaaattcaatcttttttaaaagaagtattttataaaaatatatattatcaaaaaaaacaatggatagaatatgatgataaagaactagtaaaaaaagcaattctaagacatacgctaaatcatcttacacagcatattgatgtaactaatgagaaatactttctagaagaaatgtacatttatccacctattaataaaacacccaaaactggtagtatcattaaagatacaagcaataactatcatattatactaactccagcatgtgatttcgcccaatcaaaagctagatgtatattattggcaaaaattattgctccactaaactacattcgtgataattttcctggaaatgaaataagtaatggaagaaagagcaaactcgaaacaatcttacataacaaaaaacaagaatatcattatttacctaaattaagtccttttgaaggtggatttatagatttcacatctgttcaaagctactctaaagacgaccttacagaaaaatttagtgaagttaaaatccaaatatccccatattttattagtgatattttaggtcgcttctctagttattatgcacggcaaggacaacctgatttgtatcataaggacaattatatagagcagttattgacaacagatacacgttcatcaacttaa

SEQ ID NO: 305822 - DNA, 288 bp, Proteus mirabilis
atggtcagtaccaaatctcctgataaaaatattgaaattactgttactgaaaactcaggtgtctttgattctattatttataaagattcaggacccgggattaaaaaagaagatatagaaagcttaattatatttactccaggtttttcagggaagcctaatggtgggactggtctcggactttcaattgcaggtgaagctgctattaggaataatcttaagctgcaagctgaagaagctactgatggggctttatttaaaatcataaataatggagaaaaaaagtga

SEQ ID NO: 305823 - DNA, 639 bp, Proteus mirabilis; identical to SEQ ID NO: 14558

SEQ ID NO: 305824 - DNA, 735 bp, Proteus mirabilis
atgaaaaacataagatgcgtggttttactgggtgggtgtctgatgtccgcaccgctgacagctgcacagtctgtttccggggcaacccgaccggttcagattgaggcggggaaatcggctgagagtcagacacagtcattgcagtatgaggcgcaggaatggggactgagtgcggaggagtatgcccgttttgaggcgctgatgaaagggcggcgcggtattcagtctcccggactggatcccctgacgacattgggtattgaggcccggtcagacgaagagcgccgccggctggctgaaaagtgggtacagcaggaatttgctagggcagaaaaagagctggcgtttcagcgggaagtagatgctgcctggaagcggctctatggtcaggtattaccggtcagtctgggaacattcggcaggatggaacagggaacagcgcagcgccggcaggcactgtttgtgcaggcggaaaattgtagcgcgtgtgatgcccgtctggctactctgctggccggcaaacagccgtttgatatttatgtgctggggacaaagggggatgataaccgcctgagggcttgggccagacaaaaaaatatcccggcagagcgcgtcagaaagcgggaaattacgttaaatcatgatggcggtctctcgcttcagtacggactgaccaccacaccggtggtgatgcaacagttaccggatgggcggtggcgtccgctcacaccttaa

SEQ ID NO: 305825 - DNA, 741 bp, Proteus mirabilis; identical to SEQ ID NO: 190889

SEQ ID NO: 305826 - DNA, 663 bp, Proteus mirabilis; identical to SEQ ID NO: 190890

SEQ ID NO: 305827 - DNA, 1257 bp, Proteus mirabilis
atgtctagccctttaaaatttcttgatttatttgctggtgctggaggcttatctgaaggatttatccgcgctggcttcaaaccagtcgcccatgtcgaagcggatgcttcagcttgttttactcttaaaacacgacaagcatttcattggcttaaaaataataatgcaatatatatctattcaaaatatttaaaaaatgaagtaacacgtcaagaactctatgatgctgttccttccaatgaaatagattcagtcataaatgaattcattggctcagatactcttaaaacaatttttaagaaagttgatagccaattaaataattcaaaactagatctgattattggtggtccaccttgccaagcttactcactcattggtcgagctcgagggaatataaatgatgatcctcgtaatcatctatacaaatactatgcagaatttctaaaaaaatataaacctaaatattttgtttttgaaaatgtacttggactattaacggctaaagatccaaatggtgacttatacttcgacaaaatgaaaagtctatttatcgaaataggttattcaattgaatataaagtcttatctgcaaatgaatacggtgttcttcaaaaccgaaaacgaataattctagtaggtaaacggggacatcgcagtaaaaaatctttttaccctgagattgaaaaatggactcctgaagcaacagtttgggatctactcaaagatcttcctaaagtaaatgctggtggaggtaaatcctctccattagaaccgatctctgaaccgtctcaatggctgaaagatgctcagatatcaactgagcttcctttaacttggcatgaggcacgcccacactcagagcaagatttagaaatttataagcacgctgttaatttatggaataatgaaaaaagacgtcttcattatgacgatttacctgaacatctaaaaagtcataaaggacgtaattcttttgttgatcgttttaaggtggttgctggggatttggccgcctgccatactatagttgcacatatatctaaagatggacatcattatatccatcctgatataaatcagaatcgttcattgactcctagagaagcggcaagaattcaaagtttccctgatgattattattttgaaaatgtttcaggaaaaccagcacgtacaactgcctttaaacaaattggaaatgcagtacctgttttacttgcacaaaaaattgcagaacatttattaaggaattggtaa

SEQ ID NO: 305828 - DNA, 387 bp, Proteus mirabilis
atgagaattagttcaatttatacacaatctgtaggaccattagctgatggtgttattaagttagaagatgattggtctaatgagattgaagctcaagttttatttaccggtaataatggttgtggtaaatcgactttattacggggcatagctattttatgggaagcattaggtatttggctaagtactgaacaaccgttagctccagcgagcaatacacgaaaatggttagaacgttggggagggatcgctattatttttgaagattttaatctttcttctgatgataagattaaaattggacttttttatggttcagatgattttttttcccaagtagtaacaaactatttagatgtaatgtggataggtgaaatttcaaattag

SEQ ID NO: 305829 - DNA, 546 bp, Proteus mirabilis
gtgtttcataatggaggaataactttagcccaagatctaaatgatagttttgctatcctaaattttgcaggtgctaagaaagtaaaaataataggaaagccaacaatagaatcagaccgaagaggttatttaatcattcctaatttaactagttaccataacaataagttccacattgatgcgaaatcattagattataattataatattgataattatagctatcatttaattcctactaaaggagctattattgcaaaaaatattaagataactaaaggagaaagtgctttatttacatttaaccaaaacattccttttggtgcaacagcctatgtgaaaaattctgatggcaccctatccgatatatcctatgtaaatgaagataataaattatatatttctaatttacccatcttaggaaagatttttgtaaaatggggaagttccaacaaacaacagtgctcatttaactatcaattaaatgataatgaaaaacaaaatagaatttattttaaaactgtaaattgcattaaagaggaataa

SEQ ID NO: 305830 - DNA, 1713 bp, Proteus mirabilis
gtgtataagagacagtctttactcttattatttacgccctatgtatatgcaaatgcactttacttacaagcaattgaaaaccacaatggaaatattgatttttcactcttgcttaatgaaaattttctcgaaggaacctataacataacaatttatataaataacaataaaaaacaaaattctgagatatcatttaaaaacaaaaacaataacttaactccaataataactctatttgatttaaaacaatggggaataaacaccaattattacgagcctttaaaaaataagttagacaacgatatcgttgactatgatttattaaaaaaattatttaatataaaattagaaattaacaaacagtcgatttactttaaagtaccattaattgcgatagaaaaaaacacttcatattccaaagagaaattggatgatggtgataatgctgctttcattaaataccactatcaaggccattattataaacaaaatagtttaaatggacaacacatacataacctacagctatataatggaattaatttatttgcatggcgttatcgtcaagatctaaactataataataataattctttttctataaaccagcaatatgtatataggacacttagaaatattaattccattttaactatgggtgatttctatgcttattctcctaacttaaacacttataaaatactaggcgtgcaaatcaatagcgataatgcaatgaaagatggctctctagtaggttatgcacccattataagtgaaaccgcctatacctatgcagaagttagcattgagcaaaatggagaaacactatatagcacatctgtaccacctgggccatttactcttaataaccttccctctttaggtacaaatggtgaattagtattaattataaaagaagaaaatggcgaagtaagaaagaagaaaatctggaattattcttcacagtatttattaagaaagaaccaatggaattattactatactatgggtttagtaaacaatcctcaaaaaagacagtttccttctaataagaaaaaagaactattaactcaattgaatttaagctatggagtgagcaattatttaacgacaatgataggagctgaaaaaaaaggagatgatattaaagcacttattggaaataccctaggattaaatatcctgggtatagtctcattagaaaacgcttggataagagagaaatatcatcaacaatatcagtccaataagattaattaccaaaaagtattttctatggaaaatacaactatttcattaaactcatcattctactttagatttaaagagaattatgctgtaaataaagaatataagaaatatgatttaggatttcacttttcacaatcattaaataataatattgctttaacgttggggtataatattgcaacctattatcactcaaaagaaaaaagccaacgactttttattaatactagttcaaattataaaaaactttcctattcattagagctagagaatagcaaagatcagtacagcaataataatcaattatcaatttttttaaattatcctattggtcaagatctctctcattgggtaacagcaaggatcaattatgataatagagaaaaatattttcatgagaatatttcatttagtggaaatacattagaggatagccaaactaaatataaactctcgatttaa

SEQ ID NO: 305831 - DNA, 1650 bp, Proteus mirabilis
atgacaaacacagttattaagtacgttttagaccgattatatgatttaggtatcaaagatatttttggtgttgctggtgattacgccttccctattgaagacactgtttgcaacaaccaacaacaacgttggattggtaactgtaatgaattaaatgcggcatatgctgcagatggctatgcccgaattaaaggtatggcagcattatccactacctttggcgtaggtgaattaagcgcgattaacgctattgccggtgcctatgccgaaaatttaccgattttccatttagttggcatgccagcaagtggcgtacaaaaaagtaaacgtcttgtgcatcatactttaggtaatggtgattttgatgttttttatcaaattgctcagcgccttgcttgcgctcatactattttaacaccagaaaattgtgtggaagaaatggagcgcgtaatagaagcggcattaaaagagcgtcgtcctgtttatattggtataccttcagattatgctaatagccaagtagtagcgccgttatctgttaccgcaccacaaaagccaacaagtgataaagcaacattagaaaaagcagtatcagcaatcattgagaaactcacccacagcaataatgtctgtgtattaccaggctttttatctgcacgtttagggttaacagataaaatccagcattttattgataaaacaggtttaccttatgccactatgtttatggataaaagcatattaagtgaatctaacgctcaatatgttggtatgtatgacggacaattaatgacaccagaggtcagagaatttgttgaaagtagtgaatatatattagggatcggtacattactgactgactttaatacaggcagtttcactgctaatatgaaatcagaacaatttatcagtatcatgccagactatgttgaaattgattctgtgatctactcctgcgtttatatgacagatattctttctgaattaacccaacgactaccaaataaaacttatcataaaataacagcgaaaggattaggtgaagcggttgcatctgataatgataaaattacagcacaatatctctatcctcgtttagaaaaattctttaagcctaatgatattattattgcagaaacaggaacctcatccatgggattaggcttcgctttattacctgaaggtgcacaatttcataaccaaacactatggggctctattggttgggcaacaccggctgcattaggcgctgcattagcggcaccagaaaaacgtattattttaattaccggcgaaggctctcatcagttaacagtacaagaaattagtcaatttgttcgtttcggtttaaaacctattattctagtattaaataacgatggttatttaatagagagattattatgtgattaccccgaagcttattataatgatttagctcagtggaactatcatcagttaccgcaagcctttggtgcaacagattggtatagtgaaaaagtaactacagcaagtggactagataatgcgttaaataaagccgcactaacaaatagcgcatcttatattgaggtagtcacagagcgatatgaggcctctgaattagcgcaaaaattaaaagaatcaaaaagttcattatattcattctaa

SEQ ID NO: 305832 - DNA, 519 bp, Proteus mirabilis
gtgttgtatgctccaacttatagagatggtgggaagactcaattttttccttttaatggactagataaaaatgaatttgaaaaatttttaaaaaaaaatgaaataactatatatataaggccccatcatttagagaaaaattataaaaaatatatagaatgggaaggtattgaatatttaggtagtgatattatttcagagataacatattatctagaaaactttaattttttaattactgattattcaagtatactctttgactatatgctgaccaatggaaatctaatattactcccttatgattatgatatatacaaaaaagaaagaggattaaacttttcaattgatgaaataaattatggagatatagcaactactttagaagattttaaaaactctttattacaaagaaacaaaaaaaatacaaataaagataaaataattgatagattccactctataagaaaagaccaatgtacaacattattaaaaaagattaaaatatatgataaataa

SEQ ID NO: 305833 - DNA, 861 bp, Proteus mirabilis
atgttagcatttaatactagtattccttttagtaactttatgcgttctgataatgattctatatggcaaaatgcgagtttaagtactaactcctcgcataacatgaagaaacgttttaacaatactatcggattaaacggtacattattggaagataaaaacttaagttacaatattcaaacaggttattctcatgaagaagaatcggactcaacaggatatgcctcattaagttataacggttcttatatgaatagcaatataggttataactataccgatacatcacatcaaataaattatggtatgagtggcagtattttagctcactcaggtggtataacacttagtcagcctatatatcaaacagcggtgttagttaaagtacctgaagttaaaaatataaaattagaaaacaatagtggcatcacgacagacagtaatggttatgcggttttaccttatgtttctgaatataaagaaaaccgtattgcattggataccaattcattctctaacaatattgaaatagataatgcggtgaaaagcgtagttcctactcgtggggccattagtgcgatcacatttgagcctagtgttgggataaaagcaattacgacattaacccataaagggaaaccagtacctttcggggctatcgttgattcaggtaataatactgggattgtggcagatgaaggaaaagtttatttaacagggttatcaccttcagggcaattaaaagtgaattggggtagtaagaaagagcaacaatgcttagtaaattacacattaccaccacaagatccagataaactttatgttgaatatagtgcagagtgccaccctattaaggaataa

SEQ ID NO: 305834 - DNA, 492 bp, Proteus mirabilis
atgaaggaaattattacaggtttgcttctagcctcaataagcttattttctgtctcttgttcgcaagaagatacagatgtcgtcaaagtagcaatcaatactggaccagaccaagtcatttgggatgaagtgatccgtttagctaaacttaccgaaggattaaatgttgaagttattgcatttaacgactatgaacgtcctaataaagccctagaaaatagagaagtagacgtaaatgtatttcaatctattccttatttacaatcagagataaaagcccacaattacaaatttcatattgccagcaaaacgtacattttcccgttagccgcgtattcaaagaaaataagcgatattagcgaactcgaatatggtgatgtggttgccattcctaatgaagcaagtatgaaagggcgagctttattattacttgcagaaaatcacctcatttctttctgtctcttatacacatctccgagcccacgagactag

SEQ ID NO: 305835 - DNA, 567 bp, Proteus mirabilis
atgctgacagcatctggtgctattgcttatagtgatggattatttgctacttctcctgtggagttaggagatactttcggtattttacgtgttccaggacaatctggtattttagttaactctatgggtggtggtacgacaataactaatcactttggtaccgccgttattcctaacttacctgtaaataaaaaaacaactgttctattaaatactaaaaatttaccactcaatgttatgttaggcacaacatcctttgatattgcattggcaaaaggtactgttttttctcgtgagatccctgtcaatacaatgaagcaagttttattagaaataaaaaaaccagatggtaaacctgttaatacagcaaatagtgttattgatgataagggaaatctaataggtgttattatgggggacggtaatgttataataagtaatgagcaaatcggtaagccactaaaagtaaaatcagataatggtgacatctgttctgttgattattcagttccagaagaatttaatccagactttttatatgaaaaagttgatgctatttgtaagtaa

SEQ ID NO: 305836 - DNA, 258 bp, Proteus mirabilis
atgacccctgcattgtatggtattatatattcagacatattggtttgttttgttgctattactggtatactattgcaaagtgcttctgatatagataaaggcatagcctctgagttagatgttaaaatgaaaactccagctttttttaaggctattattttttttattcctgtaatgggccctaaaaaattaactttattttctaaattatatttttttatatctaagagtaatttttttatatctttttctttatga

SEQ ID NO: 305837 - DNA, 153 bp, Proteus mirabilis
atgttaaaacgatggggattattgacgacgctagcgctgacggcactgtttacacaaagcatctgggcgaaggatattcagttattaaatgtttcttacgatccaactcgagagctttatcaacaatataaccacgcatttagtcaatattag

SEQ ID NO: 305838 - DNA, 573 bp, Proteus mirabilis
gtgcaacgtgaagcattattagaccacgtacttatccaattagagcaacatgggcttgccgctacgttgcctgagttattgcagggatttgctattactgaatctgaactccaacctttttggcctgataaagacgcgttaatttttgattgtctacgccatcatggacagcaaattgatatttggcaacgtcaagtgatgttagatgaaacgctgaccacagagcaaaaattactagcacgttacgatcagctggctatgcgcttagaaaaaaatcgtttcccaggctgtttgtttgtcgcagcttgtagtgcttatcctgatgagcattcacaaatccatcagttaagccagcgccaaaagcaaagttcatttgaatactctagaacgctactacgcaagcttgatcttgaagatagtgagttagtcgctaaacaaatggagctcatcttagaaggctgtttaagtcgcttaatggtcaatcgtcgcgctgacgatatcactacagcaaaactattagctcaagatattcttaaaatcgcccaatgtcgtaaaaatggtgcgctaagctga

SEQ ID NO: 305839 - DNA, 663 bp, Proteus mirabilis
atgaatatatatgatttaagcagtttaaaactattgtctgatgaacctgatgctgatgatgatttgtatgtctggtatcaacaaagggaaatttgtgactttttgtcttctgatgaaggtgatgaatatatacttctatatgcctcattaccccatgtgttcctccatgcgatatttttacctgatacacatgcacaaaaagatagttttgcaagcttgatacattggagtggcggcccgtattcttcttggggtatttcatgttcatcaaatgacgtgactatagaaaaacctttatctaatttcggtgaaaaatctttaagttatggcgagcagatcatatttgcacgttcatttgaaggggtaaatggaagcgaaacttactacgaaataaatcaaaaaatagctcactctttagatcttcattatgtttcagaacgaaagtcgtggtgtaagttaaacgctcacggagaaattgatgaagttattaaaataatcaatatttccgtagagaataaagaagttggaacggttatttgtgccaaaaatattgttttaggggaatatgcgggaatagaaagttataagctatttagaatgtttgattttactcgatataaatcaggtgaatttaacggctggggttccaaaaaaattcggtag

SEQ ID NO: 305840 - DNA, 1026 bp, Proteus mirabilis
atgaatagtaataatatttttggtagtcttactgtggttaaaggtgtcgggagttattccagaggatttaaattatcagatatagctattcctaaaagtaaaataatttctaatatatggggaaattctgaagaggaaaaagactattgtagctatatagcacaagactggaagaataatgaaataaaggaaatttcgtgcaatccaagttgtttggcaaattacttcactgaatcagacttgccttttgaaataacgccagcattttttaaaccagaagtattattaaaatacaaaacagaccgggataggtatactcttaatagtcgtagtgtttattgtcgaggtgcatgggaattaaagacatttgatgttaattcttctggacaagttcacacatacttaatatatcttagccaattaccgtatgaggagcaattgcattggaagcaatacaatgagcgtcctaaagctccaatttcaaaacgtgctatggaaaatgatattgaagggaagtggagtaacgattatgacgcattgctgagtttgaaagataaactagagaagttgaattctcaaggggtcccatggtggaaactcagagataaaaatgcacctgataaagttcattatccttatactagctcccgcgatgaatgggctgaagaaattttaaatttagaccagttgattgtcgaaggtttggaggaaaagtggcttaggaaaaaagcaaaggatttgaagttaaatcctgatgctagattacgcgcattaaaactaattgaggtgatattagttggtgttggatttgaagccgagcatgctcgtgaaatcatgacaccatttcatgaggttcacaatgcacgttcgatcttaaaagggcatactttggggcaggagtcagaggaacttagaaagaatgcgataactgaatttggtagttataaaaatcactacgaaaaaatatgtgccaattgtgatgaatcgcttgaaattataactaatgtatttggtgacattacatga

SEQ ID NO: 305841 - DNA, 909 bp, Proteus mirabilis
atgaatattgggctatcagattttttagctattgttgcactaattgtttctatattcagcatgttatatgctaaaaaacaaagtgaacttgcaaaagcgagtcatattaataactatcgttctcaactatctcaataccactcggattatagaaaagctcttactaaaatacaaaaaaaacatagtagcgaccttaaggaactaagtgcgttagctggaagaatattgattaatataattaattatttcgaccagtatgatattaatcaacatgcaaatagacctttaaggcatttacttcatgaaagttcagaaatggtttttcgcacattccaaggtcagctaggctggcaaacagcagaaaacatatctcggcgcctacttcaaatatctttcattgaagataatctaaatcctactgaacatatttttggaaaacattcttttagagaagtgataaattcacaatatattttaaacccaaatcaatatttagaaatggatttacttaatgatatttatttttgcgacctagtatcagagataaaatcaagaacttcacagtctaaaacacaagagctagcaaatagtctacaaaaagaaatacactcgtttaatcaattacatagaagcctaaaacttgatttttcaaaaagtagcaatcaccttaaggaattaatcgctcaaggaaataaagaacattttcaactaaaagaatcgcaccttctttttaatgaaatgaaaagaacacaaacaacattaaatacactaagccatatacatttttctgagaaaatagataaaacaatttgtggaaaatatcctttcttcatttctaaaagtatttatatatgcacccttcttcatgcaatacaatgtttacactcatggggatgggaatatgaataa

SEQ ID NO: 305842 - DNA, 1695 bp, Proteus mirabilis
atgagtatgacaacagatgaaattaacaatttaagtgaagaagctgattcgtatatactaaatagagactatgaagccttggaaagtcttattgagaggttgatatcaaaagactttgattttgaacaccctctttatgaggctcattacctttacataatagcaaactgctattccgtactttacgaggctcggagggttgaatggtactcagacgacctaatgaaagccattatctattacagaaaatctcttcacagaataccaaaacctgactggaatgacatgcctgaaaatattcaggcatttaataaccttaagtcgatggttctaactaacttggctaaccatctttcttctcaaggaagagttttatgttgtatacctttttatgatgaagccatagctataaatagaaaaatagaagcgattgcatcaaaggctagaaatcagctatttcttggcgaatctctttatgacaacgggcacaaagagtatcactattttatagcctacaagcttaccaaagaggtcgcagataatatcgaagaattgtatcctgaacacagagtcgatttagagggggatgggtacttaattaaattcaaggagtggttcgaggagaactttgaagaatcttcattcgattacttttcagaaaagtataacagctcaaaaacgagaaaggaaaaacaatacctgcaatggtgtgcaaagaataagctatttattaacgacctaaatgatgtctgtgattttgaaatatcccatcaggatgttcttgctcttccttctttctctcaatccataaactcaacactcactatgtatgaagaactagcttatcatggcaacttcgatgaaataaaaaatgactactgctacgcacgctacttgttttttactgcccacagcatacctgacgaagaacaacacttctataactcaacatatcgacatgttgacgacatgtctcactcgataaacaaccttaaaatcagtcattacaaaacatcattccggatactttattcattattcgacaaaatagcttatttagtaagtcgcttttttgatcttaatgatataaaagatgacaacatgataagtattgacaatctatttcgtgacttcaagtcaagtaactggagaaaaagttggagtccaaataaaaagctagagactagcgacaatcatttcattcatgctttattttacatattaaaagatattcgcgacgtaaaaggcacttcatctgtttcaaaatggatagacccagacgctaaggcattttctgaaattaggaatgctatggagcatagatcactcaaaatagtagatgatttcggttatgaactgacaacctcatataacagttatcatgatggtgaattagaaaaacttaacctagaaataaaaaaaataaaagaacaattaaagtcctccttgcacactgaaaaaccgagaacactagaatccgacctgaaaaaacttgaatcggatcgttatgaaaagaaaaaattaagctcacattctctattaatacctttaggccaatttgagacccgattaatgacgctaatgaaactggcaagaaactctattatttacctatcgctatccattcacttcgaagaaaggaaacgtcccaaaaacaatctatacttgccaaagcacgttcccttaaaagattaa

SEQ ID NO: 305843 - DNA, 174 bp, Proteus mirabilis
atgaatttaggttatgaagcactatttccagatgaaataactaatgttagtccagcaatactttcatcactatcgccagatgcaaatgaaaatcatgatttcttttctggctcaggctcttcttatgttattggtaaaacgatcaataccgaagatgatgactgggatttctag

SEQ ID NO: 305844 - DNA, 192 bp, Proteus mirabilis
atgaacagacaattaaactaccgtttggtaagtaaagcgctatttttatctggcgctctattactaacgggctgcgtctctatacctgaatctattaaagggacaacagcaactcctgttactgacttaaatgtagttctagcggcaccgggctttatgtcggtcaagaaggtcgttttggtgggcgagtga

SEQ ID NO: 305845 - DNA, 267 bp, Proteus mirabilis
atggacttagttaaaaataaggtatcagattataaacttgagcacttcaacaaaatgttggaaaactttctcgaacgacttcctagtattgtatctagtgaagcattcattgcagaaatgaaacgtttcttaccaacagatgtatttgatagaaccctcgctcaggataagtttcaagtttacctgcaaaatactttggcgaaactatttaaaactgtgagtaacgaattactaggcaaggtcactaatagtgaatttagaatgtaa

SEQ ID NO: 305846 - DNA, 678 bp, Proteus mirabilis
  misc_feature (617)..(624): n is a, c, g, or t
atgaaaattgatcaagaaaatttcgcgctattggtgaataaagcaatgcaggtcggaaatgtatctcacatgcgttccgtgatagagaaagaactcttacactacgatattttatttgcgctagaaaaaggtggacttctaaacaaactgacttttcaaggtggcacttcattacgtctttgttatggtggtaatcgtttcagcgaagatctggattttgctggcgggaaggattttagctcagcaatgttggcagatatgaaacattgtatagaaaaatacattggcgaacgatacgggctagaagtaacagtaaaagaaccaaaagatctaaagcaagatcctaaatattctgaattgagcattgataagtggcaaatagcagtagtgacttctcctgagagaaaagatctaccaaaacaaaaaatcaaagtagaagtggcaaacattccagcctatacaagagagccccaacctctgcaaataaactatgattttttgcctgatggatacagtgatatgctaattttgacagaaagtttggatgaaatcatggcggataaaatcatttctttgccagcaaaatccagatcttcgctgaaacgattaccaccatnnnnnnnnggatttagcttggttacagcaacaaggcgcgacactcaatatggacttagttaa

SEQ ID NO: 305847 - DNA, 315 bp, Proteus mirabilis
atggccagtactactgacttcaactcttggttatctaactgggtggatggaaacgaccactatgatgtacacgctctatattcagctgttgaaactactgaagacatggggacttactcatgcgaggtgggctccagagacggaacatgggtagtaaaagctccacatgccaatgaacatctattccttgcatccaagagtgcgagatccgcatttttaaaagcccttcacgattattctgttggtcctgatgatgagatggatatagattcatggcattatatgcaccgtgcaatggaaaaagataaatcgtaa

SEQ ID NO: 305848 - DNA, 465 bp, Proteus mirabilis
atgttagaacaagtcagcgaattagcccgccaagcgggtcaggcgataatgcaaatttatcaacaatcagcgccaattgaagtacaggaaaagagtgaccattcaccggttactgcagcagatttagccgcccatcaaattattaagcaaggacttgccagtattgcgccagatattcctcaattatctgaagaagatcctcctgcgtgggaagaacgtcgccattggcaacgttattggctgattgatcccctcgatggtaccaaagagtttatcaataaaaatggtgagtttacggttaatattgcgttgattgaacagggtgtgccggtattaggcgttgtgtatgcaccagtacaaaatattctctactcagcagccaataaacaggcatggaaagaaacctgtggtcagcgtttaccaataaaagtcagccgtgctgaacccccccgtgattgttattag

SEQ ID NO: 305849 - DNA, 291 bp, Proteus mirabilis
gtgattgttattagtcgttctcatcaagatgatgaattaaaagaatatttatcgcaattgggtgagcaccaaacggtggctgttggatcttcattaaaattttgtctagtggcagaaggaaaagctcagctttatcctcgttttggacctactcatacatgggatactgcagcaggacacgctattgcgatagccgcaggggcacatgttaccgattggaaaggggtgacacttgattattcaccgagagaatcactgataaatcctggttttagagtttctattttctaa

SEQ ID NO: 305850 - DNA, 936 bp, Proteus mirabilis
atgaccctttcctctaaattagaaaaaataaacttatttaattcacatcaatatacctggataaaaaacaaagagctacctgttaatttatttattaactcagccagtgaatttgatgataactggttgaagcctaatgagactatttggaattttcgtttctcagggagaaatatttttatagatttcaactcaagaacattattcggtaatttagatccccactcgttgaaattaattaaaataattttaatttattatatcaccgaaaattcaccatcgataatagataaaatagctagagaattagccatattcctaggtgagattaaaacattaaagcatgatagtgttttgagttttttacaaaatataacagatacaaaaagagaggcatggctattttttgcgactttattcgctatcagaaaattagatgccgaagatttttttgtattcacagatagagatgaatctatcgaagataagcttttattcattcctagaccaaaaacaggtgattttggtgtttataaaaacattgataatgtactaccttcttcagttatttcattgattggaaatgggttaacagaatgggctacaaggtatacacctactttgaattcgcctaaagaaaaaaaagagctatttacaaaaataaaagaacttcagatagaaagtcagctacttgactgtatcatacttggtttgtgttttattacaggcgcaaggcctgtgcagctttccaaaattgctgtgcaagatatttgtattgatgctcaatcgaatttaacgactcgattttcggtaatgatcccatatgcaaaaaaagcgaaagtaaatattgaacggattgcagtagcattacctgatgaactaggtaaattaatttatttatatatagcgcttacccaacttacatctagttcttag

SEQ ID NO: 305851 - DNA, 1467 bp, Proteus mirabilis
atgcaggtacaactagataacttaaaaaaattcatattaaaacagaaagagatttttgatttaaaattagctgaatacggttgtgaaggcatgatttcttggcatgaccctcaatggttttttggcgaaaaaggtgctggctggtttcgtcaaggaggggctggtagcttaaatttttcatccacatataaaatgaagggtttggaaagtttagagattaattgccaatatatcgagtttatgaaggctgttattatttctgagattttcaccaaaaatatatccttatctggtatagcattaggaaaaaggcttaatgtattaaaacgctggtatcatgagttattcatattaacgagtcagacatcaccagtctatttaactgctgatattgtctatagtgcgatgaaaagacattatgacaactcatcgagtaaatcaaatgtcagtgattattgtgatatagctgtactattagctcgaattttacgaacacaaaatttcacactcactaatattgaatgcatcaataaatatccctgtcgcaaccctacacataacacaaaaaagcgtaaattggccgagatgactggcgaacatacagatgatgaaaagttaataacaattcgtacatttatgcatattgttgaaatgatttatttggcaaaaactgatgctgaaaaagtatttttgaatttcatgatgctattaatcgttactggttttcgtttcagagaggcccaatgtttaactatagatgctttggttaaacgagaaattgttgatttggataagatggaacatgcaagaagtaacggattacctatatatcatctaggcatcagatacttaggggctaaaaaggctggttggcgaattcattggttagcacccagcacaatacctctaattgaatctatttttaatgcagtaaaagaactaaccgcagatagccgaaagcgattaaatgactatagaaaatccagttttatgaattatctccctcctccacttttagatttagatcgggatttgatagaagtatcagagcttgaaaacatcatattccaaggtagtggtggtacccgtggtaatggtggtttcagacgctcaataatttcatctttcaaaaatcatggtattggaatgcaaccagttcatattgaagaaataaataaggtagataagcgttttttcttcacaaaacaacaaataaatcaatttataagagctagatatgaaaaattaaaagcgtttcaagttggtgatgaatgttcaatgatgatcaaagaaagtggccaaactcacaagtttttatacgaaagcttattatttatagctcctatcggttcttttgccttaaacaaggatttgatcattttatctaatcctgtacctattgattcacataatgttttagcttggcttggggcaacaccagatagaaagtcttttttgaaatgctag

SEQ ID NO: 305852 - DNA, 1008 bp, Proteus mirabilis
atgctaggaatgactgaagatgatggttctcgtatctctatgggaactcatttccctcgacataacatcaatacatttttagccattgctgaggtcactgaccacttacaagcgatgttaatggggagaatggatataacacagaacatccattatcagcatgtggctgaatcgcaaagttttcgtgctgcgtccttatcagcaatgatgttagaagaccgttctaataaaaaccaaacagccattgatcatcaattgtcaatttaccatatagaaaacacatcagttcaagcaccagacttgaattactcaaattcgttccttaaagaaactgggatgatgctgatcgacccaacggtaaatattgaaactaattttaaaacaaacttgcagacctatggccaaacaaataaagaggttgctaattatataaccagtaccatttctgactcatttttacctgaattaaaagccgctcatgctgctttaattgcatcacaaaaagataaagaagcatctgaattaatatcacgacatgcgttactccatcctctcgaattaggttgctgtacacgcgatgttggccgttggggatgcccttttgcgatgaaatgccaatctggtttaccctgtgggtatttcacgctctcaggtcatcccaaggagatatttatcattcgtaaacagattgctcaacgagaaatagatatcaaaaaattagaggtgttggttgatgaggatccaggatacacatctgctttaaatgaagccaaagagtcgcttttaattctagaaggatttcaaaaaaacacctttgtttcattaagggataaaaaattcatttcaattttatctcaaaatgaagctaatcctctgctacctatttttaaacgtattgaaacacaaatggctataggcaaaacacctaatacactcgcagaccttttctttattgagcataagcgaaagaaggcacaacaagctagaatggatactaataatggataa

SEQ ID NO: 305853 - DNA, 459 bp, Proteus mirabilis
atggataataacaagcgattagctggtagcgaattagataagtacattgagtctgagcttttggctatggttcgagaagggatagaacatgccccgattaaggcggctacattacacaaacgccttttgctgaaaggctatgtgacaggctcactcagtactttatcaacacctaaacgtaaacagatgatacgtgactaccaaaaacgccagttaaaccaaatggatatggacgttaatgaaattgctactctagttaatggtaggaaagcaaatgaagcgtataggaaacaagctttacgaatgcgaaacgagcgtgatgaaatggcaaaaaagttggaactgaacacaatggctgtactagatataataaatgctgttgatttaacaacgcctatcaaggttgaagaacttctttctccttttcttataagagaactaaggaaagcgaataaataa

SEQ ID NO: 305854 - DNA, 816 bp, Proteus mirabilis
atgactgatgttacaaataaagttgcggtacaggcacttcaaatactgaaagaaaaactccatgcttggcgtgatgtaccagatacggcctggcgttcaacctggcccgtgtttgagaggctgatagcccgtcacgatgaaatgaggcctgtctacaccgaactgcaggaaaaacatgtcaccgaacaccaactctggattctgctggaacagtgcatttttgcaggggcatttgccacagtagataatcatgcagccatacgtgcagactacattgagcttcagtccctgagtgaggacatttcccgcacagctttacagctggaaacgatgctccggcgcagaagcgatattctcaaccgaagcgggcgtttcactatagagagattgctgcgtctgaccgattttatggataaggcaggccgcaaaaacggtttataccagagctacattcaaccgcgactggagaagcttaacagatttgatttgaaatactggccagatattgctgatctactgcaggtgctgggagatgaaagtaccgaagtggagatacttgacgaagcgactagggcaattgtgtctgcaaggcgagcgtcgttaacagatttttttaaggatttttttaaccggctatataacatttctgatagctcatggtacgggcttaaaaagggttttaaattatctgatagttcggtagccagcctgagtaatattctctacgatctccatcccgatgaaatgatagatgaaggatatgtcaaacgtctccgacaaaggttaagagaacagggcgttacggtagtatggtaa

SEQ ID NO: 305855 - DNA, 195 bp, Proteus mirabilis
atgatgctaatccaactaccatcacagcgcccttttacctcgtggacaataggttatcaagcttacatggtatccaaaatggcgttaataatagaggtaattgttcaattgagtacaaatatgcctcatatgcaaattttcccttccagtcataacactgaacaacagcataaccttcataaaattgtgtattaa

SEQ ID NO: 305856 - DNA, 1416 bp, Proteus mirabilis
atgagcatagaagcaattttcgagaatgatgtcggctcaatagttgcgcccgcaggatgcggtaaaactcagctaataacagataccctaactattagacaacataaaccatatcttgtattaactcacaccacagccggtgttgctgcactaaaacagaggttaaaaaaattatcagttccaacaaagaacttctttgttacaacaatagatggttgggctttgaaattagcaaaaaactttcctgtttcatgccctgtactcacgtctcctgaaaatccaagggcattctatccagagttgagaagaagtgttcttgaattactccaaaatgggaatgtaaacgacattctaagagcatcatattcacgactacttgttgatgagtaccaagactgtaatttgattcaacatcagatggttacagagctgtcatcattaattccgacgacagtttttggcgatccgatgcagtgtatctttaacttcgcaggacggatgcctgactggaacactgaggttcaagcgaggtttcctctaatacatgaattaacagtaccatggcgttggaataatgcaggttcccatggcctaggactgtgggtactcgactgccgaaatatattgagccaaggtaataaaatagatctttcgacatgccctggttatgttcaccacaaaccattggtcggtgttgtaaacacagacttacaatctcaacaaactactcaatatgacatttttaatagagctcaaaatgaatctttgctcgtaataggtgattcaataaacgcaagatctaggcataaatatgctcaacgtagtagaaacattgatgttgttgaaccggtgcaactcgacgatgtggctaatgctgctcgctcttttgatggtgcgcaaggcatagatttggttgatgccattcttacctactcgggtgagatgatgaccaatgtgcaaaggccacagaccctacaaagattacgcacaattcaagctgggagaaatcgaacacctataacttcactagagagtgctctcttcaaagtcctccaggatagctctcgcaacaatattctggcggctttacagcaattagagtctaaacaaggggctaaagtttatcgcaaggctgcatttgcagcgctgaaagataccatttctctttcaagctctatgcttgaccagaccatcttggatgcagcatcatcaattcgtgagcaactcaggctacgcggcgatagacggataccacaacgagcaattggatctacactactcctgaaagggttagaatgtgatcattccctgattcttaatgctgacaatatgaatgcacaaaatttatatgttgcactatcaagagcggctaaatctgtgactgttttctctcagagcaattttgttgggttataa

SEQ ID NO: 305857 - DNA, 1731 bp, Proteus mirabilis
atgtcagtgataagagcaataagaatacagaactttagagccataaaagagtttaactggtacccaaaacctggtcttaactgcattattggccctggtgactcaggaaaatctactgttctagatgctatagacttagctctcggggcaaggagaagttataattttactgatgctgatttccatggactaaatatccaagagcctatcatgataacagtcactatcggttgcctagatgatgagctaatgaatattgaaaaatatggtttttttcttcgtggttttaaccatacatcacttgaaatacatgatgaaccacaaccagatgatgaaacggtacttacaattaaattaattgttgaacaggatctatacccagattggcgcttgtactcagaaagagcggaaaatgatagtttagagaagcgactacaatggaagcataaagagctgctaagcccagcgaggcttggaactactacatatcaacaccttgcttggggtaatagatccatcctcaataggctttcagaagataccctagatgtttcagcaacacttgctgaactaggaagacaaactagacaacatttcgcagagcagcaaattgatggcgttaatgatattctgataaaagtgcaacaaatcgcaaatggcttgggagtgcctgtcggtacacttaaagcgctcttagatgtaaatggagtatcgctttcaaacggtgctataagtctacacaacagtgataacacccctttacgtcaactaggcacggggtcatctagattattgattagtgggttacaaaaggctgcaagtaaatcgaacattatcttagttgatgaagcagaatatggactagaaccatatcgaataactcgtttgctaaatgagttaggttccaaagatacacagccgactcaacaagtatttattactacacattcaccatatgttctccgagaactacaagctcaacaattaaatgtattaagaaaagtatcttcaactactgaaatttcaggtaacacccaagaatctcatagactccatagccttgaaggaaccgatgagcaacaatcgactttgcgagtttgtgctgaatcattcttcagtaaagctgtgatcgtttgtgaaggtaaaacagaaatcggatatgttcgaggaattgatttacacagtcaaagcatgaatcatctcagtatcaatgcatgtggcgtccattgtgccgatggtggtggggatagtatgttcgcaagagcgagagtttttgcccaattaggttatccaacagccttatttaaggactcagacaaagctcaggagcatgtagaaccttctcaactagctactagcaatggtatcgttatctatgagtggggtaataactctgcgactgaagatgtgctttttatggcttgtcctgcgcaggtgattcctcaattactggatattgcaattcagcgaaaaggccaagcagcaatcgaagaccatattattgctcactcacaaaaccaaataacgcttgatgtttgtctaaatcattttcaagatgattatcgaactattttagccaaagctgcaaacaagaagtcatggtttaaagatattgaaccagcagaaacgtttgcacgaaatatcattgcccccaattatgctcaattttcagagattctcacaactacgacaaaccaactgtttcaatgggctctagagcaaggtgattga

SEQ ID NO: 305858 - DNA, 4104 bp, Proteus mirabilis
ttggctacaatagacttcaatcagattcgagctacacctagaagcaaacatgatagttttgaatctttagctatacaactttttaaggttcattgccaaccaccgcagggagcgtctttttttagtttgcgaggtgatggcggtgatggtggggttgaagcttattataaaacactctctggtgaaatattgggtgtccaagctaagtatttttttaagcttggcaatagtgagttcagccaaattaagagctctttgaaaactgcgttaaaaaatcaccctacactaactgaatattggatttatttaccctttgatctaacaggcagagtggcggagggaaaacgagggaaaagtgaagttgagaagtttcaagagtggtatgacgacataaccactaaaaatccaaaccttctcataaaactcattacagccgaatctgtcaggcaacaaatcttggcaatggataactctggcggtttcgttctctattggtttgacgaagatctcttaactactcagaaagtacgtagttgcttagactcagccgccgtttttgctgggccacgatattgtagtgatttagacattacaacagaagctcatgatgctttagatgcttttggaaatatttatgattttaatcaatggctaattaatagctggaaagcattgaagaccaacttcagaaaaaaaactcaatatacagaaaagattttttccaaatctccagataatgaaaaagcacaagcaacatacctattagaagaacttctagataaaacttctagtaaatacaatgttctagatagaagcattctttgttcaatcctagataacatcagttcgctcaagccactctgtgaaaatgcggtaaagtggcaagagaaagactttttttcggaacatggtgaaggtagtgatacgccttcatttaggcaattccaagctgagtatatgtgtgtgttccctgcagcaaatctggattattcaagagaattactttctgcaataattgagattgaagaaatactcaacagccctctaattcaatcgtaccatgcccgctcttttttgctaacagggccggctggagcgggcaaaacacactctatcgtgagttttgcaaagagaagactcgacagaggtgctcatacgctagtgttatttggtgaagattttgacaatgctgaaccttgggacgtggtgagaagcaaacttggatttggctctgatattggcagagataaattactatcttgtcttcaagcaagtgctcaagctaacaattcttgttttgttattgctatcgacgctctgaacgaaagtgaaaaagcaagaaaatggaaaaataaactgccagagataattcaacaagtaaaggagtatgattccatcaaaatcgtagtgtctactcgtgatatttatactaacataattgtagatgaacgattccctggttatgcttacaaccatattggattcaccagaaactttcacgacgtactatcttcattttcgcagcgctacaatgttgaaagcgagataactcctattttcacgaacgaattacgaaaccctttacttctgcacttgatttttaaaacacacaagcaagaaggctctctatctcttgatgtatctactactggtttctcagccatattttcaaaataccttaagcaaatcaatgaatcactaagagatcgcttagactatgttagtccccaaaatattgttcgagcagtaatgagtaaattgtctgatgttttagcatattcaggtactcaaactataaattgggaagccgctgtagatacaataaagcctatcctaggaagtgaatcatctccagaaaaatttattaatgagctgataaatgaacaactactaattttgtcatcaaatggtggtgacgagtttattgtcagatttggttatcagaagtttggtgacatactgcgtgcatcttcgatagttcaatcttaccaagaaactggaaatagtgacttctcaattcttgcggaaaaggtggctgttttaaataccatagaaaatggtgttctagaagcccttgcaagtattcttcctgaagagttaggtgttgagataacagacaaacgtctgggattagaacgagatttagctcacagtcttttcgttaagtcactaacttggagatcaaagcagagtgttactcctggtattgaaaagcatatatacggggcattaagaacaggtggattatggcaaaccgtttttgaaagcctatttaagctatctgttgtaccacaacattaccttaacgcagaaaattggttcaaggattttcaattacgacaagatgctccgtcaagagatacatacctttctctcgcattatctgaatcatacgataaaaaaggtgcgatctggtttctgttagaagctttagaaaagatagatacaacttcatggcctaaagaaagttataaattagcatccattgctttactttggtgttgttcagctacagatagacgagtcagagatcaagcaacacgttgccttagtttactttttaaaaagtacccagagataagccttcatgctgtaaacacatttatagggtgtgatgatgactacatacttgaaagcctgataatcgctatgtattcagcttgtttagtttcacctgaatttgcggagagctttatactgccactagaaagatatattcgattcaatagctcatctaagaatattttgattcgtgaacattgcctgctattgaagcaagaacttttgagattaggaattgacaaaagcagaatgtcaaatcagtttgttcctctcaccttgccagcaaaatggccagttctaagcgatgtacagaccttactgactctaaaagatttgccatcaaacatgaaactatggggagagcaattaggtcccgatttttggcgctatcaggttgaaccaaaacttagaacttttgacctgaaatcacaaaatataagccatgaaaacattgcttgttggataatgcaacaagccgaatttattggctatccaggttatggtagtggcgccctcaaacacgacttggcaactctttataaatatgggagaggaagagcaaaacctgggtatgcagaaacgatcggaaagaaatgctattggattgctttacacagacttataggtttactggcagccaatgtggaaacagtgcaatctcgttgggagccaaaactatcttttgatagattatggtcattagggctaagaaaagtagacgtctcagacatcagagatttgcttccgatggagcaatatccgctcagaagtttaatagaaaaagagattgatctaccaaagaataatatagatagttggttgcaggctgatgattattatcttgcagacaacgttctcatcatgaaagacgagaacaatacgacatggataaatttggtcttcgactcagagtttcatgctcaacaagatgaggatgacgtttcgtttgatgctgaaagttccttatgtatagctagctataacggatacttcgttgaagctaataatacaaaaacattcgagccctataatcattgtaataaccacagctaccgcacttactttgcagagtacccaaaaagtccagctttcaaacaatgcatcacagagcaagataccactgtttcggatgacgacagaatatacgctagtattcagctcttacgagggagagagtgggaatatgattattcaagcaatgtggaacaaagctctgtttacatgcctagccccgatatagttgaaaaaatgaaccttcaatgggatcagcggggcggttggattgatgaaaaccaagaactagccgcatttaattatagtaatgatagaagttctgctttatttataagaaaagatgtcttggatgaatatttattaagaattaaaaaatccttggttttttctcgtttcagtcgaaagcaattcggtagaagtttcgcagctgatgcaaaactaatagaagtaaccagcagatatgtatatatgccaacagattgttctataaaactcctaagtgaagatattgagaagtttggcttctaa

SEQ ID NO: 305859 - DNA, 759 bp, Proteus mirabilis
atgacaaataattcagccccctctcgcgaagcattaagggatcaaaaaatctcagagttacaggatgaaatagataatgaaatagcgcgggcagctcgattagccagaaagtgcaacctctgggatttacgattcttaatctatttgctaagactaaaccgcatttcaatgcttagcaataaaaacgaaacaactcagccatcaaacttattactgcatatgaatgatgatgcattgaaatacgccattcagttagcagccaagtatgctaactggcatgattctgcgtctgttaatcaaggcatgaaaaattatgatgagactcacgctcagagactgatggaggcaacgcgaaaaattaatggcttatttgatcatgctatgcttttaaatgtttctgaaatagaaaatgaatgcaatgaagatgaaaatcaacagtggaaactatctgacaggaaagagcatcctgaccgtgcactggaacgtgattttggtttaaggattgaaaaatgggcgatgtggggaaaagataacacagtcaacatccccgagctaatcggcaaacttttgcaaaagtacggaaggcttcatgaaatattcgaagctggtcataatatagcacttgatgactattgcttaggcttagtacatctctacattgcaattacagggcggttaaagtctcaatttaacgagctggatagcgatgccttaatcgacaatggtcctttgcaactttctgtaatacaactcgtttaa

SEQ ID NO: 305860 - DNA, 792 bp, Proteus mirabilis
atgatatttacagattctgaactggaaaatgagtttgatgatatttttattaagtatttacacaacaactcatacgatgcaacccaactgagtgacagtgaattacgatttaactatatttcacgcaagccatttctccgaggaaacaattttatgatcatgagcccggagttggtttttgatagcataatggataactgtcattacaccttacttgaacatgacgcatctaaaaatgcgtatcaagctgaatatggcagacagtttgttaatgaggttgcacaatccgcagaaaaaaacgggtatgtaataaaaggtcgggatatttatttaggtagctcgcgtaaaagtatcggtgacattgatctcgttttagaaaactcacaaactggccacactcttttcattgagtgtaaaaatcacaaactcccattagacgttcagtttcgaacaacgggtaaagtaaaaaagcatattgaatcaacattaaaatgggaaaggaaagtccagaaaaggatcgaccacctgaaaggcccttcacctgattatacagttgagggaatgtgggattatgttattgtttctttcatgcctcaacctctctcgcatcaatcagaattgttaattatgagtataagagagtttgaattatggctttcgaatactccaagagcacgtagcttccctgaattgtttaagcagatatatgaaacaaacatcatgcgatttagtaatgctgatattgataatttcaaggatgcaagttttgcatttataaaacccaccatttaa

SEQ ID NO: 305861 - DNA, 288 bp, Proteus mirabilis
atggagccctcgggggcatattgggtacttgtatatgaaattctggaaaagcatggctttgaggttgtcctttccattgcgcgtgatacccgaaccgttcctagaagaaaaaccaatgtgggagatacgcaattaatccagcgacttcatgtatgtggtttgctcaaagctagttttagaccagatgcgaccattactgagcttcgcgggtatatgcgtgtgagagaactatacagcagcgcatatattaagattggaaactttcatttactataccgttttgtgtaa

SEQ ID NO: 305862 - DNA, 1164 bp, Proteus mirabilis
atgacgatcggcccaactcacacttatattcaagaaggattagaaaaagggattccagagaacaaacttcgtagtattgttcgtgagtctctctctaggagtaatacctctgttccatttgtatttagcttgaagcacgtatgccacttcacaggagcaagctacccttatctcagagagattattcgccgtagtcaaacgccttatagtttccacaaaattcccaaaaaacgtggaggacacagatttttaacggttccagatataaaattaaaacgggtacaaaactggatcaatagagatatattagcatcacagattcctcatttcagatgctactcttatcactctaaatcatctattttcaattgtgctagagaacattgttcatctaagtggcttatcaaaatagatgttgaaaatttttttgactcaatatctgaagttatggtctataaagtatttcgaagtcttggctacaaacctttattagcttttgagttaggacgaatttgtacttatcaacctacgcatttaagcatcaaaaataccttaaggtggtgtaatttcaacaaaaattcgtcaagttatccttataaacgaattggaatcagtttcttcggtagacttccacaaggagcaccaaccagcccaatgctttcaaatttagtattccaggatattgatgaggaactacatagctatgcttccagtaatggggtcgtttatacaagatacgctgatgacttaactttctcgacaagtaatcgacaattttcgagaaaaaaagcgctcatatttgtaaacaaagtaaaaaaaatcttacgaacacggaacttcagcactaataaatctaagctaaaaattattccccctggttctaggaaagttgttcttggattaaatatagatggtcctaatccgttgttattaaaaggcttcaagaaaagactggaaggtcatcttcgaggaattgaaaaattcggaatacaacagcatcttgaacacaagcacttccaaactgtatttggcatgatttcacatatcaatgggttgattggatatgctagccaaattgattatgagtatggaaacaggttgaaagctaagttctcagatattcttacacaaaacggtatagtaaatgaaagtttccaatcttaa

SEQ ID NO: 305863 - DNA, 738 bp, Proteus mirabilis
atgattggttcaggaaaaagaacatctagttttattgaagctatttatcatcataaaacgattaaaagttgggtttcaggccgcaaattagatatacaagtagtatcattcatgggctcaaagcaaggtctacaacatctgacattctgggagaaaaaagcaagagttaaaatacacaatctaatgacatgcccaaccttctatgatttgccaaatcatcgaggtttgctgaagctatgtgatgattatgcgcataataatgaaagaataccgcttggctttgaaaatacagccgttcgtgttgtattcacacattctgcccctaataatttacccgcaattttacatagaaacaacttcaaatataaggctaaatcagttgctaaaaggggagtaacaaaagtctggaaggctttattccccgctcgttctataccaatacagtttaaaataaatttggaatatattgataagcaaaaagttcctacgtccgtacgatttaaacagttactgtctgtagtaaatgatggttttacaaatgctaatgatatacatctagtcctgaattggtcgtactcttcatgtcaggaaatgctcaatttaatgaataatatgaaattattgacaattaattcgtcaaaaatatgcctaactgaccgtggcaagaaagaatttactaggtggaaattgaaggactaccatattgaatttaatggtaataactattatcctacttga

SEQ ID NO: 305864 - DNA, 387 bp, Proteus mirabilis
  misc_feature (320)..(329): n is a, c, g, or t
ttgttagatagtttaatagtgataccaactaatcgggtaattaacgatataacatctaaaatagaaacgattatgttacattatgatagtatcgcaatctacccaataagagagcttttaaaagatgaagttagctactttgatgaacaggacgataaagtagttcctctactgcaacaaggtactgaacccctaggtagtgaagcatttatatcaaatataattaccaatttatcaagaaattttaaaaataaaataatattgcaaggttcacattcacctccactttcgttactcagagaaaagaggtgtcaagcgannnnnnnnnnatgtgtgaatacaacacgaacggctgtattttcaaagccaagcgatattattagttga

SEQ ID NO: 305865 - DNA, 393 bp, Proteus mirabilis
atgcatatttgtgcaggtattagcagttttcttcaattttactttgagaaactgcagcttgatttaacagtcgatatttacttacggctttataaatgttcaggaatgtatgacataattgatagtgattacagtgaatatccaattagtaaagatgatttcgataggattattgaaatacattacccgcttcaaaacggtaattctgcaattacattagggttaaaggaagaatataggaaatatattgatactgcattcgtaaatgatatatcaatcgctaaagactatagaaaagcattctacctaactgcattagctcaggtagaaacagaaaaacatccagaaggactaaaagaatttctgaatgataaattagcagagttagaataa

SEQ ID NO: 305866 - DNA, 417 bp, Proteus mirabilis
atgaaaaatgaaactaatattcgccgtggcagacattgtgtattcctgatgcacgtccatttggtctttgtcacaaaatacaggcgaaaaatatttgatcaggatgccattgaaaaattgcgaggctactttgccagtgtttgtgctgattttaatgttgaactggttgaaatggatggggaacgggatcacgttcatttactgattaattacccgccaaaactggcgatatctaatctggttaacagccttaaaggggtatcgagtcgattacttcgacgtgatcgtcctgatattgcccaacgtgattactacaagggggttctttggtcgccgagttatttcgcggggagttgtggtggcgcagcaatatccattatccgccagtacattgagcaacaggaaacacctagttag

SEQ ID NO: 305867 - DNA, 417 bp, Proteus mirabilis
atgaaaaatgaaactaatattcgccgtggtagacattgtgtattcctgatacacgtccatttggtctttgtcacaaaataccggcgaaaaatatttgatcaggatgcaattgaaaaattgcgaggctactttgccagtgtttgtgctgattttgatgttgaactggttgaaatggatggggaacgggatcacgttcatttactgattaattacccgccaaaactggcgatatctaatctggttaacagccttaaaggggtatcgagtcgattacttcgacgtgatcgtcctgatattgcccaacgtgattactacaagggggttctttggtcgccaagttatttcgcggggagttgtggtggcgcagcaatatccattatccgccagtacattgagcaacaggaaacacctagttag

SEQ ID NO: 305868 - DNA, 1053 bp, Proteus mirabilis; identical to SEQ ID NO: 296003

SEQ ID NO: 305869 - DNA, 1023 bp, Proteus mirabilis; identical to SEQ ID NO: 305051

SEQ ID NO: 305870 - DNA, 285 bp, Proteus mirabilis
ttggattatccttttgccagatctcacccagcgctacaacagatgatcgactatgctttttttattgatacaccactagatatcgcattagcaagaagaatattgcgtgattataaagagaaaagtggaaatgatattattcattatttagaagagtacttaatctactcacggccctcatatacggcaatgacagaaagagaaaagctgagtgctgacattattattgatggtaacgcatctgtgtctttaattgcacagaatatcctaaagtatattgtttaa

SEQ ID NO: 305871 - DNA, 252 bp, Proteus mirabilis
atgaatagagaattaaaaactaagttcgatgaaagtattaaacttaataataacatttactatgatgatttatattttcacctactgggttttacttataatttaagtcaaattcattcttcactacatgaattatttactatattacttttggaaaaaaaagtcggagactatttacctaatttagaaaagctcattataaatcttgatggcgacaaagtggcgacagaagaccagaacaaccatgaataa

SEQ ID NO: 305872 - DNA, 237 bp, Proteus mirabilis
atgactaatgcaacaaatgacatgcttcttgagaactcatctcttgaaaacatatcccgcattaaagcattaatgacaacacttgcagcggcggcagcaaatccatgtagaaaacgcataccaattagcatatcgatcgagtcagataatgcacaagcgctcgatgctaatgcaaaaacaatcacaccacctagaataaccggtttacgccctagactatctgccatcggcccatag

SEQ ID NO: 305873 - DNA, 537 bp, Proteus mirabilis
gtgctaatatggctaaataaaatgaaaaatttattgggtgtagctttattatttatttctctagtatgtaatgctgatatttttattaatatatctgcaacaatggttgaacctgtttgtaatatacgtagtgaaaatggtagtgctccattaaaaattggttttgatacattgacgatatcttcactgactaaatctcctgtggtaaaagatttttcactttatatatcagactgtaattttaataatacattagccattgttttaaacccaaaaggaggaagtacgcttttatataaaggaaaaaatatattagcaacaagtacggatgggttaggtatagatattaatgaagtgactggtggaactattcgttcactggaaacaagtaaaaagcataaaatcaatccagaacgaattaattcaactctttatcgtgttgacttacaagctcagttagtaaatacagtgcctattaatcaattaaaactagggaagttcaattcaatagttactatttcagtgacttataactaa

SEQ ID NO: 305874 - DNA, 4965 bp, Proteus mirabilis
atggctgataaacatgttggtgacggtgaaaaccaattcaaagttgttgcaaccacccctgatgtttgtcaggtagggtgttctgctattccttttgatagttttcaaagcttagatgcacaaaagcaatatgccttgagtgttaaagcacgtggatattgtactttgaatgttggttcaataatcaaaggaacgcaaagtaacacgggggccggtgtattatctggaacctcattagtcggtggagattgtcaaattattacagggagcccatcggtccgtattgaaggtcaacctgctgcacaagatggttcattagtcgcaatgaacaataacaatacattagggactttaattactaatgttgcacctcctgctgagccgattgagagcaataaaatcccctgtaacaatccgcccgtgacatcagaattgttagaatcactgcaagagatgcaacgagaagaacaagaaagttttattgggcgactccgtcaacaaaaacagcaagcggataaaaaaagagatgattctctaaatgatattgacaaacaattaactgaatacattgataatattcgaattgaacacattaatacagattattcatggtggaacagtttatataatacttcaatggatggaataactggcctgactcgtggtggtcttggttttgttgaaagtacaacaaagtcagctgtggaagcttattattacataaatccaaccgatctagttcaaaacgtggctctaaatgcgagcaaaaaaaccatcgagggacttatcgaagcagaaaactggaggttggggaataactgtattgaaggtgttaaggaagacgctaaagccaaatatcgtgcattaggtaaacttatcgatgaagaaaaagaaaaattagagaataaatggaaaaaaagtgatagcgataaagtcgaaatagtaacaagaggtgggcttgaaatagcgactattgccgctgcttttttaaaagtggggaaagtcgctgaaggtgctaatgctattaataaagtagcagaaggaactaaaataactgaaatatctgaaggcacttctgcggtaaataaagctactgacgtaataaaagcgacagagaccagtaatatatccaaaggaagtgaggcaatcaaaggggcagaaatctccgccacagagaaaggaagtaatgccgctaaaggtactgaggtgatccaaagcccagaaacaccgaaaataacctcatcagataatggcattaaaattgaaggaaaaacggaaagcgtatctacagaaacgccacctaataaagctaataatagccaaacggagaataaatcgacatccagcagcaaagagtccgatggaaacagtacttctagtgcaacctgtaaaggtgagcctgttaatgtggctactggtgattttatccaacagtggccaattattcagataccgggcttgttgccgttatctctacatcgtacatataaatccacatcaaatgcaaagggactttttggaccgaagtgggcagacgaatggtcacgctgtttacatatacttgacggaaacatcatctatcaagacagtgatggtgctaattttacatttataactcccacagaggagatccgtgcaagaaatgcccatgctccccattttttactcaccggacaacgtgatggtgatttaaccctttttgatagtacgcaacaacagtttctacattttaatcacagacaaggaaaatatcgtcgattaagtgcaatcactgatttaaatcagcatcgtattgattttatatataacgagcaaagccagcttgtcagtgtgaagcgtcatgatggcatagcgttaatactcgaatatcaacaggataaattagttcgcatttgctctgaaagcacaacctcatctcctcgagattttgtacgttgcgaatacgatactcatggttatcttagtcaatgtcatgcctatcaacaaaaccacttatggcatcgttattctcctgagggactcatggtcgcttggggggatactgacagtacagaagtgatgattgattatgatgaacaaggacgtgttgtcgccacacgttcaccgtctggtttttggaatgatcgctttatctatgatgattatcagcgcatgacaacctacattgacggtgagggtggattttcacgttattattataacgatgataatctggtgactcgcactatcgatccattatggtgtgaaacgtatacggaatgggaacagcggaaaaagatagcagaaatcaatgagattggtgagcgcacagagtatggttatcactataatggactgcttgcctatatctatttacctgatggtaaagccatttactatgattataatgactatggtcaacttacccatttcacatcggcctttggcgatgaatggcagctaagctatgatgacaatggcaatttaaccatagtgacagatccgcaagggcgtcagcaggtctatgaatatagccaacatggtgaattgctcaaagccattacgcccaatggtgcgcaatggcaataccactataaccctgcacatcaactgattaaaaccaccaatccttatcaacacagcacagaatatcatagtgatgaattggggcgtttactgcactacactgatgcgttaaatcacaccacacgctatcaatacagcactgagcatgccagtaccaacggcagtctcagcaagattttattacccgatggggtcgagcaacagatagactatgacagtgagcgccgagttatcgcggtgacggatggtgaaggaaaaaccacccgttatcgttatgggccttttgatgtcttactggcaatgatacgccctgacggcagtgaaattcgctttgaatatgattcactgacacgacttaaaaaagtagtgaatgcgaacggggaggtttatctttacgaacgggataaagcgggacaaatcattcgtgaagttgattttacggggcgtgagatttgttatcgctatgaccgactaggacgtcgcattgccactcgctatccggataaccatgaactgcgttggcgctataatgaaagtggcttagtggttgaacaaagcgaatggtttgaagatgagcaagaaagccgctgcttatccacgactcaatatagctataacgcacgtcaacaattgataaaagcgactaatcctgactcggtggttgaatttgagtatgacgaccaaggtcgtttatgcagtgaacgtattaatggacaagagattgttcatcaatggaatgatactgataatacactggcattgacccgttttggtgaacgggagttgcattatgcttttggggcactgggggagttaacttcactgcaagtcaatcagcatgcaccacttcaatttagctacaacgcggtaggacaagagtatttacgccgtagtcacgctggatttgtcaattccagtcactatacggccactggtttactggctcatcaacgagcagggcgaggcaccgaacagtttttacaatcgatacaagcccatccccaacaaccgccattttgtacggatgtgcaccgcagttatcaatatgatcgcgcttataatgtggtgggcattgaagatgatcgctggcgacagacacgttatcactataatgccaatgaccaaatcactgagacacaatacagtccactatggggtaatcaggacgaaaaattccagtatgataacaacctcaatatcacggagcacttaacaacgccgtcctcgtcgatggtgctttcagaagcacaaggggcgatgctacagctatttcagcaacagcaagcaggacgggtgactcgccgttacacagcgaagggatatcaagattaccattatgatgttaatgggcgattagctaaaaaaattgtccatacacgcggttttcgtcccagagagtggcgctatttatggaacacacaaaatcagctaaccgcatgctttacaccgaaaggggattgttggcactatacttatgatgcttttggtcgacgtctgagtaaaaccaaaactgtcgacagtgacttagcccatattgacccattatttccgcagattaagcctaaaatcaccacgtggcgctatttatggtcgggagaccaactgatagaagaaacgccgatatatgccgatggcactcttgctaatgcgcaacaagttcaatggctgtatcaacccggagaaataacgcccaccgcgcgttatcaacagggcaaactgcactatgtggtcaccgaccaccaaggcaccccgcgagagatattcagtgaaggcggacaagccagttgggcaggaaggttgaatacgtggggccaaatgcagttttggcgttaccgcgacggtaaagcggagaatgaccctaattataccgaatgtccttttcgctttgcggggcaatatgaagatgaagaaagtggcttgtattataatcgctttcgctattatgatagggaaacaggacagtatctttccccagaccccatagggttattgggtgggctgaatccgtatgggtatgtgcattgtccgacggggtgggttgatccgtttgggctggcgtgttgtccaccaccaaaaataaaagctacacaaatcggattaagaaaccctaaacagattgatggtatgaaaaaagatatgcttgacggcacttttgatttttcacttcccaaaaatcaagttggtggctttgtagattccaatggaatttattatatgggggaagggcatcatagaatggttgcagctcaagaaatatataaagaaacaggcgatgctaaatatattaataaattaatagaaaatggttcatggacaagaacaaattcaccaccaactgatgccagagctatgccatccagaagtttctttagtaatttaagaaacaaattaggattttaa

SEQ ID NO: 305875 - DNA, 519 bp, Proteus mirabilis; identical to SEQ ID NO: 299944

SEQ ID NO: 305876 - DNA, 798 bp, Proteus mirabilis
ttggtactaccacagttatcagtacgacccgctgggacaattgacggcgcattagggtcggtgcaaaccgaacactttctgtatgatgcggcggccaatttactgacccgtccacacaccgaagcaccgcataaccaagtacaaggcagtgataaatttgattatcgttacgacggttttggtcgcatggtctcccgctatgaaaaaggcagtagctcggggcaacgctatcactatgacaatgaccaccgtattatcgcggtggatatcgaccaaggtcccttagggtatcagcgagcggaataccgctacgatatcttaggacgtcggattgaaaaacggttatggaaagccagtgcgattgccaacacagtcacctatcaccaacatgagccggatgaagtatacacctttggctgggtagggatgcgactggtgtctgagcacagcagcgcaacgccccataccacggtttatcatgcttacaatgaccaaagttatacccctcttgcccgcattgaatgcacggataacccgcttaatccgcaacgggcgatttattatacgcacagcagtttaagtggcttaccggaagcgttgaccaacagtgagggtgaaatagtttggcaagggcaatacagtgcttggggacaattacagcgtcaaacccgccccacaagcacatttaatcgtgaacagaacctgcgttttcaagggcagtatttcgacaaagacaaatttgtcgggaacaaatttgaacagcgcttgcgctggcccgtagggcgagtatcaggatga

SEQ ID NO: 305877 - DNA, 135 bp, Proteus mirabilis
atgcctctcttagctagctattatgcgctgaatgaaaatattttttcaagagcaatatttgctttttgtagtcaaatttctactaatgcagtgcataatatgggatgtggtaatttattgaatgatataacttaa

SEQ ID NO: 305878 - DNA, 336 bp, Proteus mirabilis
atgcattgtggtgcatgttgcgcctattttagagtctctttctattgggctgaaatgaaaagtggtggtggtgttgttcctgacgaatttaccgaacccttaaccccttttctatcatgtatgaaaggaactaatgagaaacaaccacgctgtgaaaaattgattggtgaagttggtgaatgcgtgagttgtgcaatttatgaacagagaccatccccttgccgtgagtttgaacaatcttgggctaatggcgtaaaaaatgaagcttgcgatcgggcaagagccgcttttgggcttcctcctcttcctaatatttctctaccgcattctgcgtag

SEQ ID NO: 305879 - DNA, 828 bp, Proteus mirabilis; identical to SEQ ID NO: 302343

SEQ ID NO: 305880 - DNA, 405 bp, Proteus mirabilis; identical to SEQ ID NO: 296475

SEQ ID NO: 305881 - DNA, 132 bp, Proteus mirabilis
atgaaaagacagaaacgagatcgtttagctagagcattatcgaaatgtccctattttgccattgatgcacgttcacattggctaggaggttggcgacaggccatggaagatcgtcctgggcttgcaaaataa

SEQ ID NO: 305882 - DNA, 1557 bp, Proteus mirabilis
atgagaattaaaaagcctcaccttcgtccgatagtcataaccttgtccgttggtgggattttgttaacttctatttttctgattgccgttattatggtttttcagcgcgaaaatatagaaaaagatttgctttatgctaattcatcgtacgctatgaaaatgtcagatgtaatgagtggttatattgaaatggctcaaggtgaattagcatatggagcaaaaaaaataaaatcaactaatgatattgactcacttaaagatgaggcggataggttaagattgcagtctggtatgtttaattcagttcttgttgttagtaatgatgctgttgttctggcgacttcgccagaatctcttgatttagttggtacccgcttgaattcaagtgccagcaaattggcggttgaggaaaagaaaccattcatatcttcaccgttaaaatcagttgctgggaatttgattattttgttgtcacatcctatttatgataagggtggcaattacatagggtatgtcggtgggtctatatatctaaaaaaacatagtttatttggcgatgttttgagcaggcattttttcaagaacaacactgaaattagcattgttagtgatgatgggaatgtgatctttaataacgataaaagtgctgttgatcggcctatggttatgtctgatgatttgaaatcaaagttaactgcgtctgatagaggtgagggggcatttttttcttcggggcatagatatcttcttggttatgctagtatgaaaaataccgcttggaatgtgttggtttatagtcgtgctgacagtgtgactactattcttattgcttatgctaaaagtgtacttgttctgctaattataataattattgtgttttcacttatttcatatttcattgcctccagtatttcacttcctttagaaaagcttgctatatctaccaatgctaaagatatcggagcttcgctagtttatattaaagctatcaatgcttggtatgccgaagctgataggcttaaaaaggcgctttttacgtatattaaggtaatgatggaaagagttgattctctaaatgaggtggcgcttaaagatccccttaccggcgtgaataatagattggggtttttaagtaaaatacagaatcataagcgggattcagggtgttcagttattgtaattgatgttgatttttttaaagagataaatgacagtttcgggcatggggtcggagatgaggtgcttgtttctttggctcatattattaattcctgttgccgtagtgaagatgttgtttgtcggtttggtggcgaagagtttgttgttttcctgccgaatacatctgtggtaacagctaagtgtgttgcggagcgtattaggagtgttattgaaagtactgtcttccctaataacttgcgggtcaccatatctgctggtgtggcaacacaagatgatcctcttggtaggatcgattttttgctgaaaaatgctgacgatgctctttatcaagccaaaagggaggggcgtaataaagtgattgtatatagcgctatttga

SEQ ID NO: 305883 - DNA, 1281 bp, Proteus mirabilis
atggcaagctttgagcgggttctgatgcccggacttgataaagaccagtacagcatcctgtgggtggagcatcgtgacaaggggcggcttgagctgaattttctgatcccgaacacggagctgctgaccggcagacggctccagccgtattacgatcgcgccgaccgtccacgcatcgatgcctggcagaccatcgtgaacggcagactggggctgcacgacccgaacgcaccggagaaccggcgggcactggtcacaccgtctgcactgcctaaagcgaagcaggaggctgcagaagcgattacacgcggtctgcttgctcttgcctcatccggggagctgaaaacccgtcaggatgtcactgaggcgctggaaagcgcaggttttgaggtggtccgcaccacaaaaagcagtatcagcattgccgacccggacggggggcgaaacatccgactgaagggagccatttatgaacagtcttttaacgctggcgaaggacttagagcagaaatcgaaagcgcagcagcagaataccggcgagatgctgaaagccgcattcagcgagcacgagaaatctgtaaaagcggaactgaacgaaagcgcgaagagaatcagcgccgccatcctcgaccacgaccggaaactgtcctcagccatgagccagcgcacgaaaggcatggtgcgcatggtcagccagacgtggctgaccatcgtcctggtctccgcgctgctgatcgcctcgagcgcgggcattctgtggtggcaggggcagcagatactcgacaactacacgaccatccgggagcagaagagcacgcaggccatgctgtcagagaggaacagcggcgtgcagctctcgacctgcggcgagcagagacgccgctgcgtgaaggtgaacccggaagcgggacggttcggagaggattcgagctggatgatactggcggggaaatagcacatgacggagctggaaaaacagttgctgagcgcattagagcagctacagcaggactactcgaaaaggctggacgagtgggagagcgccttcgcggaatggcggacgatgtctggtcttatgcaacgggagaacgcagcgctgagcgagcgcgtcacgggcttgagcaggcaggtgcagagtttgagcgagcagctgcgccggttgtcgagcgactgaatgccgtcgagctgcaccgggagcaggagcgcgtggtgcagcatcagaaagcgctggagctggagcgatctcagcgacagcggacgtataacagcccttcactgtga

SEQ ID NO: 305884 - DNA, 1566 bp, Proteus mirabilis
atgttagataataatttaaaagctcaactgaaagcttacctagaacgattaacccagccagttgagttagttgcaacattagacgacagcaaacattctgctgatatccaagccttattaaaagaaattgaaccgttatctgataaagtcacataccgtgaagataacagtgctaatgtgcgcaaaccatcttttcttattaccaacccagggaaaacaactggcgttcgttttgcaggctcgccattaggtcatgagtttacttctttagtattagcattattacaaactggtggtcatccatctaaagaagccccggaattacttgaacaaattcgtcagttagacggtgagtttcatttcgaaacctattattcgctctcttgtcataactgccctgatgttgttcaggcattaaacttaatggcgattttaaatccgaacatcacccatacggcgatcgacggaggcatgttccaaaatgaaattcaggaacgtaatatcatgggcgttcctgcggtattcttaaatggcaacgagtttggccaaggtcggatgactttagctgaaattgttagcaaagtagatagcaatgcagaaaaacgcactgcagagttattaaataaaaaagatgcctttgatgttttgattgtcggaagcggccctgcaggggcgtcagcggcggtatatgctgcacgtaaaggcttaaatacaggtcttatcggtgaacgttttggtggacaagttctcgatactgttgatattgaaaactatatctctgtacctaaaacagaaggcgcaaaattagcaggggctttaaaagctcacgttgatgattatcaagttgatgtcattgacagccaaactgtcagccgtttaattccgggagcagcagaaggtgatctacaccaaattgaaaccgcatctggtgcgattttaaaaacccgtagcttaattattgccacgggcgctcgctggagaaatatgaacgtaccgggtgaaaacgagtaccgtactcgcggtgtaacatactgcccacattgtgatggtcctctatttaaaggtaaaagagtggctgttattggtggtggtaactccggtgttgaagctgccattgacttagcgggtttagtggagcacgtgaccgtactagaatttgcctcagaaatgagagccgatgctgttttacaaaagaaactgcgtagcttaagtaatgtcgatgttatcttaaatgcccaaacaacagaagtatatggagatggcactaagttaacaggactgaaatataaagatcgcactaacgattcaatgcatgatattgccttagcgggtattttcgtccaaattggtttactgccaaacacacaatggttagacggaactgttgagcgtaataaaattggtgagatcgtggttgattcacgtggtgaaaccaatattaaaggggtatttgctgcgggtgactgtacaactgttccttataaacaaattattatcgccgcaggtgaaggtgcaaaagcctcattaagcgcttttgattacttaattcgcacaactgcaaaataa

SEQ ID NO: 305885 - DNA, 852 bp, Proteus mirabilis
atgaataagattaatcaaagtaatgaacatagtagattagcttcgccttttgtttctgaagaagtaaaaaatgttattaaaaatactactaagcaagcaaatgcaattaataatataagtaattatgtgactactcaacaacagaaggagaatcaaagtaagtttgatataccacttcttagagctcctcatgaacaggagaggaatgagaaaagaattaatattcaagatgatccacaatataaaatgacgacattttcactagaaaatgatgaagacaatactaagccttccttagcagaagaagaaccgaagaataataaaaaaaaagatgatcatcttgacgtatctgcacaacaaaattcatcattacctacttccggtcccgatcatttagaaaataaaaaatccaacaaagattatgattttttatttttacaattatcttaccagcatgttatacatgaagatattttgaataaaattaaagatccagagaaatttgattattacagagataaattacaaaagctatctaatggcatagatgatttaaaagaactttttaaatctggcttcaatgagcttgataaaaccaaaggtgcttttgttgattactggatggaagtttataaccaaataaaagaaaagaatttcaaaaaagagtctgaagttaaaagttttttaaataattgcaatattcctgattcattaattcaacagttattattaggaaatattcactctaaagcggatatggaaaaagcccttgaagatgttttccctttcttaaactttcctagtgatttttctaagctttcattagatgaactagataatttatcttactga

SEQ ID NO: 305886 - DNA, 1206 bp, Proteus mirabilis
ttgatcaacaaaaaagaaagtgaatcaataaaaaaacaattagcagaaataagaggtctatttaaagaactgactatttcacaaagttccttggagcttgaaattgcatctaactctttatccggtatgtcattactgacatttctgttatctaagacacgtgagttgacgttaaaggtcatgttacatcgttcggaaagtgaacagaaactttttaatgaaatgcaagaggtgactgaaaaatcacttaaagataaagttgaagagcaaaaatcattaatcaaaaaacaagaagaaattcagttttgggctggtattggtttaaaaatattaggcggattattaacgcttgttgcaggtgtttcttctatttttaccgctggctcttcaatggtattagtaggagtcgcaacaaccttatttgttgctgatactgggttaactattgctgatgaggtgtatcaatctattcataataaatcgtttatggatgagattatgcaacccatatcagatgcggttatggaagctatcgataaggttagtgatttcttagtgagtttagttaatagttctttggatggactcaaagaattagggctagataaaaaaatcatcgaagagatgaaaaattcaatacaagacaaattgaaaatggcaactaaaatactggtcacagtcgttttatttgttgccgctacggcattgagttttgttattgggcctgctatgaaaggtatttcagatgcggttaataaaatatcgaatcagcaaattagacaaatactaaaaaaagtgctcaatgatggacttgaagcggtattggggaaaatgatcaaagatatcattattaaagcgcttgaagaagcactggaaaaaattgataagcagttagctaaagagatttctaaaaaagcaagtattatgttgaatagaacggtggttgcttctaagttaaccaattcagcagcaacaaatactgttaatatttatggttctgttatcgcgtcaaaaataatccagtctattgccggtagtaaaaaattaactgcagttttagatattattcaaaaattaatggataagataatggaaacttatcatgagaatattgattctataacagatattttaaaaaacctcagcgataaatcttcagtaagtaataaattaaaatcagacatgataagaaatatatctatttaa

SEQ ID NO: 305887 - DNA, 177 bp, Proteus mirabilis
atgactcaaccaattacagcaacagacttttcaattaatgatatgaaaacattaattgaaacaatgcaaatttataaaaaagataaccatgacaaagggataacacgtattgcctatagcgaagaagatgaagcagcttatcagaaaagttatccgctaaatgataagctgctttga

SEQ ID NO: 305888 - DNA, 174 bp, Proteus mirabilis
atgttgagtgaagaagaatttaaccatcagaaaggcgagttaatcaaaaacattactggcaagagcatagatggcgatcacctgacgtttcttgctgagattgctaagctaaaacagcaaaatatgttaactaatgaagaaatagccaatatcaaagctacggtgatgaattaa

SEQ ID NO: 305889 - DNA, 276 bp, Proteus mirabilis
atgtccacatgtcaaaaacctcatcgctataacaacctatttgcagcacttcctgaagatcaaagccatccattcagacataggtgtgctggctgtgcttatgaattaggttatgacgcaggtattaagaatggtgacccaagcgcatctgatgcaatagattcaatattggaaagtcaagcgggtcaagttcgccatagaagcccgaaagttgcctattatcaaggttacactgacggattgaatgagtattacaaacaaaatcctgatagttaa

SEQ ID NO: 305890 - DNA, 549 bp, Proteus mirabilis
atgattatgtacgcctctgactttgaagaaatacctagtgcattgaaaaataacgtagaactaagaaaccatatcatatcattaattaaaacaaagaatattgtaggaaaagtgacagaaggatcaggacggttagagaaatttagagtaatactgactaatttagttaatggtcaatcaactttagcggatgctattgcaactactgagtcagagcttgaacgctatacatctaattatcctgataataatagagtttttgcaaaaggctgggcagaacgactagtgagaacacaattaagccgattttataatcaatccattatggagatggaattaagtaaaggaagaacagagtgctatgttccaccatcaaggaatgaggatgcttcatcaaattgctcacaaattcttgctggaaaatctcacgatattagtcatttactaaatttactcgtttcttcttatgaaaatggtatatggggggataacacgcctaaaattcctgaccacccacattgtactcatgttgtaaaacctattagttga

SEQ ID NO: 305891 - DNA, 1227 bp, Proteus mirabilis
atgtctttgaaacgtaaaattgcgctggggaaaaatgtattagaagctgctcaagagagagtccagtggatatttgatacttttgaacaaatcactctctccttttcgggagggaaagattctactgcgctttttcatcttgttgccgcacaagcgcgaaaacaacatagaaaatttaatgtgatgtttcttgattgggaagttcaatattctgcgactatagatcatattataaaaatgaaatctatctaccaagattgtattgaacagttttactggatagcactccctatcaccactgaaagtggcatttctcaatatgaacctacatggacagcatgggagcctggtaaaaaatgggtaagacaaccgccagaagatgcgataactgaccctcactttttccctttttatcacccaaatatgctttttgaagattttacccctgcatttaaccagtggatcacaggtaatcatcgcagttcgattatcctgctaggtataagagcggatgaatctttaaaccgatttattgccattagtaataatcgaaagttacgttatgccgatgatattccttggacaacggcatcagcagaaggcttttattatatggcctaccctatttatgattggcatgttaaagatatctggacttatatagcgcgtttcaatttaccctataaccctatttatgatctgatgcaccaagcgggcgttagtttaagtcaaatgcgtatttgtgaaccttttgggccagagcaacgtaagggactatggttataccatgttttagaacctgagacgtggagtcttgcttgtgaacgagtgagtggagctgatgccggaatgttatatacaaatcctcgtaataaatcaggtttctatgggcgacatcaaattagcaaaccttcccatcatacgtggaaatcttatgctcactttttattagccagtttaccagagaaaacagcagaacattatcgcaataaaatagcggtctatcttcgctggtatgccgaacgagattacccaaatggcatacctgatgcacaagaaggtgatactagcactaaacaaatcccttcttggcgacgaatttgtaagaccatcttgcgtaacgatttttggtgtagaacattagcatttagtccaacaaaatcacattgttatgatcgatatttcaaacggatacaaggaaaacgaaaagactggcaacttatttag

SEQ ID NO: 305892 - DNA, 642 bp, Proteus mirabilis
atgaccattgaaactataatttctgttttaaaagagtacctagcaaaactaaatgatgaacaaaaaattgaagctctcaataaaataaaaatatcgcttcatcaaataagcccatttaaaaatgaacctactgactgtgttctttggataaagcaacaacaagttatcgctaatgactataatcccaatgtcatgtctccgacagaaaagagattactagaaacgtctctggtaaaagacggttatactcagcctgttgttgtcttacctattcaacaatccaaaaataaaccatcacaatggcaagtcgttgatggttaccatcgttatttattgagtaaaaaaaatagcttaaacaagcgaattaacggctatttacctattactatacttgatgttgaaagtcatactatggctgaccaaatggcagcgactattcgccataatcgggctagagggcaacatcaagtggcagcaatgtcggatatagttagagatttatcaagattaggttggaatgaccaaaagattggtgatgaattaggtatgtcacaagatgaagtactacgtttaaaacagattagtggcttagctgaattattttcagagcacgacttctcagaagcttggacggttaagtag

SEQ ID NO: 305893 - DNA, 1122 bp, Proteus mirabilis
ttgaaaacgataactattaaaatcagtctttttgtattgtcactgtttttccctctcctaacaaaagcacttgttattccagataatggaacggggtatataggtgaattaacacctcctcaatcatatatgtcacttagtagtagtggtaatacctatggagcggctgtaggtgttaataatgttgtagattattgtagtaaaaacagtgcacaatggcagagttttttattcccattcccaggaagtcaagagggggagtacggattaaaattatataataaaaatgcaagtgaagcggaaaatagggaaaattatttagttgcagctatcaatggaatagtatctatcgatgcggtgtattatcagaatggaacatattctccgactcgaattactctgcgccgaggaaaagaggtttctagaacagctgagtatgcggatcaatttgtctatcgtcacccaatgtgctggtatggttatatatcacgtgtaaacaatactagtttgagaataagctcttattctatttatgcagtaggtcatgttaaacctggtatttacgattttgtagctccaatatattttactacagctcaaactgcaactgatgctcctccagatctatcttcagttcctttttcatttggtaatggtcctattcacgtcttaaaaacatgtaatgtttcccctgctagctcaacaaatatacaatttgccgctcaactagcacaaaattttaagtcagccaagttacttgagcaaagtgtcgctagtatgcttgtctcttgtcctcattcaggaaatatgtatgtgacattaaaaccctataatgagctagtcaatgggagtaaaactgggatgacaatgtctccaagtatccctttgaaaaataaagaagttgcaccttatatcacggtatctgatgcaactaaaacaataactaatgcagtatgtaataacaattcctccgaagctttagagttttatgcaggacaaccttcaggcaaatataatgggggaactgtttataagtcattatcattcaacctttgtgccaatgggaatatacctacgaatacttataaaggaagtattgatgtatcgttcctgattgaatga

SEQ ID NO: 305894 - DNA, 1716 bp, Proteus mirabilis
atggcgcaacaagcaattaaaagagcaataacgtattcggttgtaataggcacacttctctcagggcataatgctattgcctcagaaagtgaaacgccaccgctattcacatcagaaacacctgcattagtacccgcattcacagaagatgtggcaacacaagatacattaaattcaccattagtgagtaagcaggaagttagtactaaactacaatcttggttaccaagcgaatataaaccactttactttaagcaactcgtggatgtttatcaaagcaatgatttagcactgatttggcaagatgaacaaattacaaaacaactagaacagcaactggcagaggttgccttaactggaattcaaccacaatttggacgttggttaacgctattagaaacagcacaattaacgccagaagcacgagatattattttatctgacgcttttttaggttatatcagctttgttgaacagattaatcaatcaggaacaacactgttatatcgcgctgcgatacaagcattaccggcaccgactgtgcaagctgtcgagcatttccaactcaatctacaacaaaataccttagggcgctttgtcgtctcctttgcaccctcacacccttactatccattaatgaaagaggaagtgcgcaaacagcttcatcaagaggttatttggcccgtcatggaagggaaaaattcattaaagccaaaccaatcggcagaagaagttattgcattaagacaaatattgcgtaacttaaatttactgcctcaattggctgaaaatgagcaagaagtagcaacaacgatttatgatgagcctttaattgctgctgtaaaatcgtttcaagcggcccatggattagaaactgacggtattattggtagacagacgcgtaattggttaaatatgacaccaatacagcgtgctggaattatggcattaaatatacagcggttacgtttaaccccacctattggtgacactggaatttgggtcaatattcctgattactccctctatttttatgctaataatcaactgattttagattcaaaagtgattgttggtcgaccagatagaaaaacccccattatgagtagtgcgcttaataatgttgtggttaatccgccttggaatgtacctacgagtatgacgcgtaaagatatagttccaaaaggaaaggctgatcctagttattttagccgtaaaggttatacgatttattcagggtgggggaatgacgcttatccaatcaatccttatgatatagattgggaaaacatctctgcggctaattttccatatcgcatttggcaagcccctgggccaactaactccctaggccgatataaatttaatatgccaaactctgaagcaatttatctgcatgacacaccaaaccacaatttatttactaaaaatatgcgagcaattagttcaggttgtattcgtgtgaataaagcggcgcaattagcgacgatattattaggtgatgcaggatggaaacaagatagaattgatgcagccttaaaacgaggttcaacacaatatgcaccaattccagaacgtatccctgtctatttatattatcaaacagcttgggtagcagaagaaaatgcccctcaatatcgagcagatatttataattatgaccaaagcattaataatgcaacctcttttttagagaatattaagaaatatttgtaa

SEQ ID NO: 305895 - DNA, 483 bp, Proteus mirabilis
atgacagcagttggcactaattttgatattaatcaacaaattttttatataaaagaggggagtggaacattagaacatctgattattaatgaggcactgaaagatgaaagccaattagaacctctttttgtgacaataagacacagtgaaagttactggcttatattacatctgattagttatttggatgagaaaaaaagcaatattgcacaaataggtgaacgatatggtgtatcagggacacattttagacggctgtgtaaacgttatttaggtaattgtggtaaaagtcaattacgttcatggcgtgcggcgtcttctattttgacaacgctatcaacagatgaatcattgactcaaattgcagtcgataatggttttagttcagcatctcatttttctaatgaaattaagacattatttggtattacaccaactgaatttcggcgaattggccaatatctttatgaacataaaaaataa

SEQ ID NO: 305896 - DNA, 384 bp, Proteus mirabilis
  misc_feature (372)..(381): n is a, c, g, or t
atgatcagtgtgttgcctcgtattagtaatactaaccaagagattgagatgattatcaatcttgaagatggcgccgagaaaaaaagtgatgatgaagatagagaagaagggattgaaaaattacctgttattaatcgcacaaatatcagcaccgtggcccgagtttctgaaggcggtagtttattaattggtggatatacacgagaagataacataaaagcagaaaacaaaattccttttttaagtgctatacctttagttggccgagcatttagctatcagtcagataataataaaaaaatggtgcgtatttttatgttacaaccgcgtttattagataaaactgatacgcacggattggactctttaacnnnnnnnnnntaa

SEQ ID NO: 305897 - DNA, 552 bp, Proteus mirabilis
atgcgtgatggttcaaaattttatgccaacattagcactagtccaggttcttctgtagattctaaaacattattaagttcaatggataatgtgaatattaaagcactcaaagcctgtgacgttatcccccaaacgtctaccaatattcagtttccgactcaaatcgcgaaaaattatgcaacacctactaaattagcagataatttagccagtatcagtgtcaattgcccttatgctaataaaaatatctatctcaccctgagcccttttaataatttagtctcaggcagtgaaacagggatggagctatccaccaatggctctgaaaatatcaccacactgccttatgtggtggcttctttaaaatctgcacaatcaagtatttgtcaagccaatgcacaagaggccttgcgactcgtcggtagtaataaactagcgcaacaaaatatgaagagttttacacaaaacataatttttaacctttgtgctaatggcaatatcaaagccaataaatatacaggggcaattaatgtagcaattttaattgaatag

SEQ ID NO: 305898 - DNA, 282 bp, Proteus mirabilis
atggttctaaaaaagagatgttttagacaaattgctcctgcgcttattttttctttactaacaattggtactttctcggcgaatgcgaatatcgatgttcgcgatgaaaccttatttgaagcacatcagcgttttaaaacacaaattataaatgatagttttgacaatactgaagcaccttgggaagcgccagcagaaatattcaatgtagttaaatatccggccaaactaggtgatatgtatgcttatttaacccctccgccggcgaataaaaaaaaataa

SEQ ID NO: 305899 - DNA, 702 bp, Proteus mirabilis
gtgatttggctgaatggaggatatggtgggataggaggagatgattatttttggacaccacaaccagttgaaaatgaccaaacaggagcgacgtttcgtgatcctaatatggtactcatgataccttcttttcgtggtgaaaataccaaccctggtcgctatgaaatgttttatggtgaattagaagatttagactcagctagagaatatttagcgtcattaccttatattgatcctaaacgtatttacgtagtaggacatagcactgggggaacgagagcattattggctagtgaatacagtgataaattcagggcaatattctctttaggaggaatacctgatcttaaactacgcacagaagggcggatgatggttgaattaccctttgataaaaacaacgaagaagaatttaatgtccgctctgtataccgctatattaaatcaataaaaacaccaacattttattttgaaggtcatgattatttttggaatgaattcaatgaattacgtgtggttgcaatggaacacgatattcctctgaaaatttataatataaaaaatggagaccattttaatattattgtccctgttagccaattaattaaagacaaaatcttgcaagatactgatacaaataaagaaagcaatattcgattcacgaacgaagaaattaagtggatcaataaaatggtgaaataa

SEQ ID NO: 305900 - DNA, 327 bp, Proteus mirabilis
atgatacgatgtgttcgcttatggaccggagaagatggtaactctttatttgaagaaggtatcatcgaatttaaggatagttcacgaggcgataggcatcaagatcccgttcctcgttatgttattacgttatcaggaacattagagtttgaaacaaaagatggctcaacttttatcattaaacccggtgatgtgctgttagcgcaagataacagtggcactggtcataaatggcgtcttatggatgatgaaccttggcgacgagcttacgttgtttacaaagaagatgcaggattatgttttaaacctaccaaaacaactaagtaa

SEQ ID NO: 305901 - DNA, 210 bp, Proteus mirabilis; identical to SEQ ID NO: 301952

SEQ ID NO: 305902 - DNA, 213 bp, Proteus mirabilis
atgtctaattcaatgactggtacagtaaaatggttcgatgaaggtaaaggttttggttttattactccagcagatggcagcaaagatgtattcgtgcatttctctgcaatccaaagtgataacttcaaaacattagctgaaggccaacaagtttcatttatcatggaaaatggtatgaaaggccctgcagcaggcaacgtggtggctctctaa

SEQ ID NO: 305903 - DNA, 141 bp, Proteus mirabilis
atgagccgttttattattcaagaaagattaagtgataaggcacaacttaaagaatttaatctagagggttatcaatttaatgccgccgagtctgaaggcaatacccttgtctttaaacgtgcagaacatttagcaaaataa

SEQ ID NO: 305904 - DNA, 150 bp, Proteus mirabilis; identical to SEQ ID NO: 299404

SEQ ID NO: 305905 - DNA, 303 bp, Proteus mirabilis
atgaaaaaagcccgttttactgaagctcaaatcgttaatattttaaaactcgctgattctggtatgaaagtggaagatatttgtcgccagaatgggatcagtaatgctacttattataattggaaatcaaagtatggtggtatggaagctaatgatattaaacgattaaaagagcttgaagatgaaaatgctaaactgaaaaagctatttgcagaagtcagccttgaaaatcatgccatgaaggagcttttcgcaaaaaagggttggtgctggctgagaaaaagtcctgtgctcaggctttaa

SEQ ID NO: 305906 - DNA, 825 bp, Proteus mirabilis
atgaaaaagacagctattcttattgatgcgggattctttatctcccgagttagcgctgtaaagcgaaagcattttaaagatcatgatttaaatgcatctcatctaatgaaattaatatggggacttgttcagtatcacttgaacaaaagacatggctctcatgagcatagagctccattggaattataccgaatttacttctacgattgcccacctcttgatatacaaacaaggtaccctttgccagcagaaaaagggcacacatcaccaccaaggaaaaattttaaactagagccatcttatattctaagaacagaacttcatgaagaattaaggaagagtagaaaaacagctctcaggatgggaacactagttgatagtaaacgttggcaaataaatgaacacacactcaaagatcttcttgccggcagaaaaaaatgggaacaactaaccaatgatgattttcattacgatataaaacaaaaagctgtagacattaagctaggcatggatataactatgcttgcatatgaaaaattagtggatgtaatggttctggtagctggtgactcagatttcgttccagcagctaaacacgcaagaacaaaaggaatagacttcatcttagacccattaaggcaagacgtatcaccaactttatctgaacatatagatggaatccaatcttatggtttaatatctgcaattgcagatatactacaagtaactccagaccctgtaccagattggtgggaagagaaagtagccagatcagaggctaggaaaaaaacacgtcagcgtagaacaagacctaaaagaagataa

SEQ ID NO: 305907 - DNA, 504 bp, Proteus mirabilis
atggcaactcttttagagagacacgagatgattattcgaatgatgaatgacagggaaaggctaatgcagcccattagcgacgaaaagtttcaagaacttgtagataaacttggaatggatcaattagctaatgacgttggctacttagtcaatattggattaattaaccacaatgcgattcggtttggcattggcggtggctatggattcaatacaggaagcatgtcactaaccgctgcaggagttgattatgcaaacatggatacagtaggaaaccaaataaatacagtaacaattaaaattcaccaaaacaccattgataatctagagacaatgatccgctcagctaacattcctgaagaggataaaaaatctctgctttcactggtaagagaaaaaggttctgaggctgttgttggtaaattagttgatacagtgtttgctaatgccggaatagcggctgcattattcatggaggcagctaagagcaaatttggtttgtga

SEQ ID NO: 305908 - DNA, 288 bp, Proteus mirabilis
atgatagaagcccaatacatgggatgtcatgtaattacttataatagaggagggcaaaaagactccgtttataaaaaaaataatgtaattagaataagtagtgatataacaaagaaaatttctaacgttctaaatgataaaaatgattatataaaaaattctttttttgaacgctatgatttcataaatattgctaatgaatgggtaagcctatttcaaggtaaaaaaaataacaaaaaacacttttttgctattaaatcaagaatatctgggataataatgaaatga

SEQ ID NO: 305909 - DNA, 1104 bp, Proteus mirabilis
atgaaaaaaatagtcattttgataccgacactaactactggtggtggagaaaaaatagccactgaaaatgctaatgatttgtcgagtaatggatatgatgtaactattattgttcctagaggaaatattcaacaaaaactatcaccacaagttacagtttatagcggaagtagtagaaatttactttctgattggcttttttgtagagaaaaattaaacaaggttaatccagatgtcgttttatcttatatggaaagagcaaatttcatcaatataattacttcatggcagaaaaaatggcgaataataacatctattcacacagtcccatccgttgcttataaaaaaagaggtttactcaatagaatatttatattttttacaatgaagctcattaaaatcaataatattcctgtaatttgtgtatccaaaggaataatgcatgaactgaataaaaaatacagaataaaaaataactattatgtccctaactatttatcagttgatttaaaaaaagatatcattcacttaaacgtagaaaagaatattgttttcggatttgtaggaagattaagtaaaataaaaggatgtgatatttttattgatgctattttgttagctataaaagaagatatagcaaaaaataaaattttttggattattggtgatggtatacagaaagatgaacttttagaaaaatgtaaaaaagaggatattcttgatagaattaaattttggggaaataaagaaaacactagtgatttatttcgtgaaatcgattacttagtaattccctcttatgttgaagggtttggactagttatattagaaggactatattacggatgtaataatatatattctttatgtaaatatggccctgctgaaatcatgagtaattttcatcaattcaatgattcatatgctattccagatcctagtattaatagagccaccacagtaaaacaattatctcaattaattaaaaagttaaataacaaaaaaaatttaatgactcttcaaacaaaaagagagattatatcaagggcatttagtagagaatcatcgttgaaaaagatgttagaaataatagaaaaggaatag

SEQ ID NO: 305910 - DNA, 594 bp, Proteus mirabilis; identical to SEQ ID NO: 15928

SEQ ID NO: 305911 - DNA, 1338 bp, Proteus mirabilis
atggaaccgacactatgggtactaggtactctgattataagtatcttgctcattgtttttactataataaaacttaagtttcatccatttttagcactactacttgccagtttttttgtcggtatggcaatgaaaatgaacccattagaaatggtcagtgcaattgaaaatgggattgggggaacgctgggatttttagccgccattattggtttgggtactattctcggtaaaatgatggaaatatcgggggcggcggagcgcatcggtatcaccttacaaaaatgccgttggttatcaccggatgttattatggtattggtgggactgatttgtggtattaccctgtttgttgaagtaggggtagtgctacttattccattagcattctctattgctaaaaaaacaaacacctcattattaaaactcgccatccctttatgtactgcattaatggccgtgcattgtattgttcctccacaccctgcagcgctttttgtcactaatgagttaggggccgatatgggaacggtgatcgttgccggtcttgctgttggattattagcctcattagtgggcgggcctcttttcttaaaagtattgggtgagcgcttaccttttaaaaccgtaccagaagcattttctgatatggaaattcgtcaagaaaaagatttaccttcacttggggcgacattatttacggttttattacctattgttctgatgctgattaagaccgccgcagagcttaatatggaaaaaggtacttcggtttatattgcattacaatttattggtaacccgattacggcaatgtttattgctgcttttgttgcttactatattttaggtattcgccgtaatatgggcatgagtaccctattgaaaaaaacagaagatagttttagctctattgccaatattttgttaattattggtgctgggggcgcatttaacggcattttaaaagggagtggtttaagcgattcattggcggtgctcctctctaatttggatatgcatcctattttattagcttggctagtagcgattattctgcatgcagcagtaggatcagcaacggttgctatgatgggggcgaccgctatcgttgcaccattaatgccaatgtatccagatattagccctgaaattattacattggcaattggctctggggctattggctgtacgattgtcacagactccctattttggttagtaaaacagtattgtaatgccacattaagcgaaactttccgtttttatagtatcgcgacctttattgcttcatttgtggcattagggggcacttttatgctttcttttgtcatataa

SEQ ID NO: 305912 - DNA, 561 bp, Proteus mirabilis
atgctaattactatttcaccagctaaaacactggatttcgaatcgcctttagcaacaacgcagttcacccagcctgaattgctaaaatattcccaacaacttattgcagaatgtcgaaaactgtcgtccagtgatatcgcaagcttaatgaaaattagtgataaattggcaggactaaatgcggctcgctttggtgaatggcaacctgactttacacccgataatgcgcgacaagccattttagcgttcaaaggtgatgtttataccggaatgcaagccgctgaacttttcactgatgacgactttcaatttgcacaacagcatttacgtatcctttccggtttatatggcgtattgcgcccactcgatttaatgcaaccttaccgcttagagatgggcataaaactgaacaataaaaaaggcagtgatctataccagttttggggtaacacaattactgaaacgttaaataacgcccttgaagctcaaggggataatatcttggttaatttagcctctgatgaatattttaaatcagtaaacctgataaaggcgacttaa

SEQ ID NO: 305913 - DNA, 1290 bp, Proteus mirabilis
gtgtgttcgggtcaacattcttgtcatgaagaacaacatgagcaaatattgtgccctcagtgcgatctggtagtgagtgttcctgaattagcccaaggaaccaaggcgacctgtccacgttgtcacactttgctaacagcacgttggcgacaacctttttatcagcctgtagccttggcgattagtgcattatttatgttgttaatggcttgccaatttacttttgtcagtatggaagtggcaggaattaccaataacattactttaatgcagatcccaaatgtgatgtttagcgaaaattatgttgagctaggcgctttctttttactctttgtacaagtggttcctgctttctgcatgatagcgattttactgctttgtacacccattaagctgccaagaaaattacaaatttggctatcacgaattcttttccaattaaaatcgtggtgtatggcagagatttttttagccggtattttagtcagttttgtcaagttaatggcgtatggtgatatcggcttagggttaagcttcctaccttatgtactttactgcttattacaaattcgtgcatttcaatgtttagatcgccatacattatgggaaaaactagaatcgcgacccgcttatcctaaaattgaatcaggtaaaacaggtttaaagcaaggggtaagattatgtcgttcttgcactgctattttaccggctgatcaatatgaatgtagtcgttgtgaagtaaaagggtatgcgagaaaacctcatagtttgcaatggacgctctctttcttaattacttctttaattctttatattccggctaacctattgccgattatggtgacggaatcgctgggtaataatctttactcaaccataatggcaggggttatcttactttgggaagatggctcatatcctgtggcaatggttatttttattgccagtattatggtacccagtttaaaaatggtggctatcggttggctatgttgggatgcacataaagccaaaggaaaacgtgatccggcgagaatgcactttctctatgaagtggttgaatatgtagggcgttggtcaatgattgacgtttttgttatcgctgttttagcttcattagtcagaatgggacgtctgatgagtatctatcccgattttggtgtagtgctatttgcattggttgtcgtattaacgatgttctctgcaatgatgtttgatcctcggttaacatgggataaatgtactgccgatgatgataaacccatgattaaggagcctaagggtgactga

SEQ ID NO: 305914 - DNA, 1143 bp, Proteus mirabilis
atgatcaacgtatcacgcctttatatacaccctgtaaaatcaatgaaagggactcgtctttctcaagcctttgcccgtgaaagcggcttcacgtttgatcgtgattttatgataacgacccctgaggggacatttatcaccgcacgtaaataccctttgttgctgtgttttattcccactgtaatgacaaatggtatttatattcaagcacccgatggtgaaggaattgccattacttatcaggattttcaatcttcattacaaccaactgaagtgtggggaaatcattttaccgcttatgttgccccagatgaaataaatcaatggttcagccgctatttaggcatggatgtacaacttcgctggacgggtgaaaaatcaacacgtcgagtaaaaaaatctcctgaaaccgcggtttcgttcgctgacggttacccttatctattgattaatgaagcctcatttcagtctctgcaacagcgttgcccagcttcaatcaatattgagcaatttcgcggtaatatcatcatcacaggtgcaaaaccttttgcagaagatagctggcaaacaatccgtattggctctgtcgtcatggacttagtcaagccttgcagtcgctgtattatgaccactatcagtatcgataaaggcattaagcatcctaccacagaaccgttagcaacactgcaaacattccgtacagatgaaaaaggcgatgtggattttggtcaaaatattatcattcgccaatcaggtattattcgtgttggggataaagttgaaatattagcttataaagaagcaaaacattatttacaaacaacagagcaaacaaccgaaccagcaactgacaatgcggttacagcagcctccgctcaagagccaaaacaagctgtcactattgaatttaatggcatcagctttgctgggaataatcaagaggtgttgttagagcaactggaaaatcacggttatgctattccctatagttgtcgtgcggggatttgtggctcttgtgttattcaattagatgaaggtgatgtcaatgcattaaaagcaggtgccataaaacgttctggcagaatactcgcatgtagttgtgttcctaaaggcaatgtaaaactttcacttaataaaaaataa

SEQ ID NO: 305915 - DNA, 3360 bp, Proteus mirabilis
  misc_feature (3330)..(3349): n is a, c, g, or t
atgaatataatcttttttgaaaagaattcaaacgagaaagtacaattacaacctcatgctaagcatactataacggcgaaagcaggggatgtgtatcagttaattgattcagatactcaactttctccattagatattcaagcgcatcgtaaatcggatgatcttattttatctagtaaagaacaaaatatagaagttgttattaaagatttttggcaagaatgccaaccaggggaacaacaatgttacgccactttaaatgttttagattcaaatggtgtaatgggacaagcaactattactcaagatggtcctgttttagaacatttagttgctggtgaaacaggtactctttctgataatgatgatggaattggtctatttttatgggttgctggttcaatcggtagtgcattagcgatctttttagctaatagaaatcatggtggtgacaataataaaggtaatgaggctgatattaccgcgccgagtaagccaggattaactgctgaagatgatggttctgtttctatcgatttaccaaaagatgccaataaaggtgattctgtagatgttacttttgaagatgaggatggtaattcaaatactgtcacattagaaaagggagataatggctggacatcaagtgatcctgaattaattcctgatacagataacaatcaagtcactatccctaatgataagataaaagataatagtgatgttaccgcaagtgcgaaagatccgagtggtaataaaagtgatgatgttactgtaacagccaaacctgatcccgtatcagatatacctgttttaagcattccagaagttgacgatggttatgcgaatgcagaagagctgaaagacggtttacaagcagaagttactttgccagcgggtacggttgaaggggcggaaattaccttaacggtcactcgtccagataatactacagaaacgattacatacactgtaactaaagatgatgttgctgcaggtaagatttcgattgatattcctaaagatgcggtacaaaacggccaaaacagtgtcgatgtcagcataactcaaggcaataatccagccaaaccaggaaacaaagtagattttgctgttgatggacaaatcccgggcgatacagatggtgatggtacggtggataccacaccagtggtgatcattccagaagctgcggacggtgtaaatgctgacgagctaaaagatggcgtacagaccgaagtgactgtaccgggggggagtgcggcaggtgacacactgacactcactattactaaaccagacggctcaaccgacactgttgaacacacactgactgcagatgaagtggcggcaggtaaagccgatgtgactatccccgcagataaagtgacagcagatggtaactattctgttaccgcagaaattactgatccggcgggtaataccagtggtcaaggtaaacctactgactttatggttgatacgcaaatcccaggcgacacagacggtgatggtgtggtggatacaacaccggtagtgaccattccagaagctacggacggggtaaatgctgacgagctaaaagatggcgtacagatcgaagtgactgtaccgggaggcagtgcggcaggtgacacactgacactcactattaccaaaccagatggctcaaccgacaccgttgaacacacactgactgcagatgaagtgacggcaggcaaagctgatgtgactatccccgcagataaagtgacagcagatggtaactattctgttaccgcagaaattactgatccggcgggtaataccagtggtcagggtaaacctacggactttatggttgatacgcaaattccgggtgatacagacggtgatggtacggtggataccacaccggtggtgaccattccggaagctgcggacggtgtaaatgctgacgagctaaaagacggcgtacagacacaagtgactgtaccgggaggcagtgcggcaggtgacacactgacactcactataactaaaccagatggatcaaccgatactgttgaacacacactgactgcagatgaagtggcggcaggtaaagccgatgtgacaatccccgcagataaagtgacagcagacggtaactattctgttaccgcagaaattactgatccggcgggtaataccagtggtcaaggtaaacctactgactttgctgtcgataccgtggcaccgtcggctcctgtattaaaagcagaggacgatggttcggtttcagttgacttaccaacagatgccaataaaggtgatacggtagaaattacctttgaagatgaaaagggtgataagcacacggttaccttagaaaaaggggataacggttggacatctgatacaccggcgttgatcccagacagcaacggcgataaggcgaccattcctgcggataatgtaaaagacaacagtgaagtaacggggattgccaaagatccgagtggcaacgaaagtgacccatcaacggtgacttcgaaaacggacggtgtcgctgatgcgcctgtactgactatcccagaagtggctgacggttatgcgaatgcggatgaactgaaagacggcttacaagcagaagttaccttgccagcgggtacggttgaaggggcggaaatcaccttaacggtcactcgcccagacaaaaccactgaaaccgtaacgcatacagtcactaaagatgaagctgctgcgggtaaagtatctgttgatattcctaaagatgcggtacaaaacggccaaaacagtgtcgatgtcagcttaactcaaggcaataatccagccaaaccaggaaacaaagtagattttgctgttgatggacaaattccgggcgatacagatggtgatggtacggtggataccacaccggtggtgaccattccggaagctgcggacggtgtaaatgctgacgagctaaaagatggcgtacagaccgaagtgactgtaccgggaggtagtgcagcaggtgacacactgacactcactattaccaaaccagatggatcaaccgacactgttgaacacacactgactgcagatgaagtgacggcaggtaaagccgatgtgacaatccccgcagataaagtgacagcagatggtaactattctgttaccgcagaaattactgatccggcgggtaataccagtggtcagggtaaacctacggactttatggttgatacgcaaatcccaggcgatacagacggtgatggtgtggtggatacaacaccggtagtgaccattccagaagctacggacggggtaaatgctgacgagctaaaagatggcgtacagacnnnnnnnnnnnnnnnnnnnngtaaatgctga

SEQ ID NO: 305916 - DNA, 729 bp, Proteus mirabilis
atgatgaaatcaaaaataaaacaaatgattgctcactactttaaaactaaaaaagagcctaaaaactatgatttttaccctaatcatatcgccgtacttgagaaaccgccgacaccttatagtcgtattattgcaataataatttcattaagtgtgattatatttttactctgggcatatataggtaaattagatgtgctttcttcagctataggaaaattagtggtttcaggttattcgcaacaaattcaaatttatgaacatagtcgcttaagcgccattcatgtaaaaaatggccaacaagttaccaaaggagaagcgttattaacacttgatattttaggtgttgatgaggagattaataatctaaaaaataagatagaaaatctattattactaaaaattcgttatcaagcattaggtcaaaacacccgacctgatgcaattgatgattttaatttactaaataaagaaaaaaaagaagcgattctattaagttatcaaaaagaaaaggatgaatttgatgctagtattaatcacattaactctgaaatagaaaccaacaataaaaacaagcttcttactcaccaagaaatcaattcattaaatgaattaaaaaacaatattgaaaaacgttttaatataaagaaaaaactctatgataaaaaaatcattagtaccatgtattttatccagtcaagagcaacaatatataaaaaatcgcgatag

SEQ ID NO: 305917 - DNA, 390 bp, Proteus mirabilis; identical to SEQ ID NO: 299355

SEQ ID NO: 305918 - DNA, 1338 bp, Proteus mirabilis
atggctggtattagtgcactaggaataggctcaaagctgccgcttggcgagacattaatgcaattagaagcagcagaaaataagcgccttgaacctttagacaaacagatgaaaagctacgatgcacaaattactgcatatggaaaaattcgtagccaattagataaattacagaaagcatctgaagaattaaaaaaattcgataaaatcgtcgccaccaaagttgatgatgagtttgatgcctttaaagtaactactgatggtaaagcaagcattggtaattatacggtctctgtaacagagcttgcccatgctcaaacactgaaatcaaaagccgtcagtgatatcaaagatcctattggtgaaacattaggtgaaggcaaaactcggactttagtgatcacccaaaaaggtgaaaaagagcctttaaaaatagagttaacagacagccaaacttctattattgaattacgtgatgctatcaataaaaaagaaggaaacgtttctgccactattgtaaaagcccaagatggcgttaaccatttagttctgacttctcgtaaagaaggtacagattctcagatggaaatcactgttgaaggtgatagtaagcttaacgattttattagctactccactgaaaaaaccagtggcgcaatgacagagatcgttaaagcaaataatgcaaagttaacgattaatgggattgaaattgaacgtcaaactaatgaaattaaagatgcgcctgaagggatcacgttaaatcttaagaaaaaaaccaatgataataaagatggcgtagataaacctgaaattattacggttgcgcgtgatattgagccaatgaaaaaggccataaaagcctggacagacgcttataatgaattaaataaaacctataaagatttcaccaagtacacccaagttgaaaaaggtgaagatgcctctaaagacaatggtgtgttattaggtgataccactagccggatgattatgtctgagctaaaaagctttatcactcgttctcaatcttcatctgagattgatacccttaataaaatgggcattaaatttaaagtagatggcacattagaagttgatgataaaaaactcgataaagcattaaaagaaaaacccgctaacgtcaaagagttttttatgggggatggtaaagaaacaggttttggtactcaaacctataattacctgaaaaaaacgctgcaatcaaacgacggaacacttgatattgccactgatggtgttaaaaaacgtaaaaaatcgttagataaccaaattaaaaatactaaacgtactattgaagcgacgatggaacgttaa

SEQ ID NO: 305919 - DNA, 339 bp, Proteus mirabilis
gtgaatattaagttaggttcaattcattccgtaaaaggcgaaacacataccgcaactttggtgttagatacattcaataaatcacatcatttaaaaatgatttttccatggataaaatgcaaacccaaaaataaaatttctgattctgatgcaaagagattaaagctccattacgtggctatgacacgcccttcacatctattatgcttggcaatgaaaaaaagccatgtcgaaagtaagaatggagaaataaatcaaaaggaagtcgatgcattgaaaaaacaaggatggagcaaagtggctatcgtcgatagtacaggtaagtgtgattggttgtga

SEQ ID NO: 305920 - DNA, 1011 bp, Proteus mirabilis
ttggatattttaattaatgaacaacaaaatattaaggtaaaggagaccgcattatccgttgatttagcgtttgaacaaactgaacagcaaacaacggtttggattgatcctttagaggggattgcttatgaaaataatgcaaagccgataaatggcacgagtacatttcaataccctacggcatttcgccaattagaagataatgaaattagccgacaaaaagcaaagctcgatcttacggcaaaaaaacaacaacacattcaagctacagaacatcctgtctataccttacctgaaaatgccacgttgatgggaagccaagcgatgacggcattactcggtcgagtaccgatagacggtaaagtcaccgatccctatccttttaaaatccttattggtaaggaaaatctcaccgcaaatggtattgaattacctgatgttgaaggtgctgtggtttcaggtacagcaacaggcgattgggtattatcttgcgtccgtggtgatattcattccattacctttgtgtttaaagatggctcaattcggactgtacctaaatcggcaacatcgacagatggacgccatgataaatcgcaaggtgttagtatcggttggctctctgatgaacagggcgtgccctgtctctctggtactcgtaaaagtaatgcctccacttatctaccgactttatttgcactttctgccagtagtgctgcatcgtcgatgatggcggaaagccaaaccacaaaagcaactgatggtttatcagtgatgaattcattaacggggaatgcaggaaaggcggtattaggtaaagcgttatcgggaggaagcaacgaaatcgcagagtgggttaaagcacgatatggccaaatgtttgatgcgatttatgtgcctcctggtgcaccagttgcggtgcatattactcgtgctattcctatcgattatgaagcgcaaggacgtaaagttaaatacgatttcgatataagccagcagaatgaattggactaa

SEQ ID NO: 305921 - DNA, 537 bp, Proteus mirabilis
gtgttacatcaaagtggaataactttggcacctgatttaggtaatacttttgctattgtaaatactaatggcattgccggaattaaaactaatcgttcttcacaaaccactacagacaataacggtaatttaatattaccgcacatcatgccatatcgtaaaaatactattggactaaacataaattcgttacctgaatttagtaatactaaaactcaaagtaaaatcatcgtacccactttaggtgcggtagcaaaaatcaatttccctataaataggggctataatgttttatttacctcaaatacaccaattccttttgctgccaatgtaatggcatttgatgataataataatctcatttctagtgattctgtctatgaccacaatagaatattcctctccggaataaaagaaagcggaacggtacaagtaaaatggggagatacagaggagcaacaatgtttcttccattataacgtaaaaaatgaaagtaaaaataattcaattattaagaaacaaatttattgccaataa

SEQ ID NO: 305922 - DNA, 921 bp, Proteus mirabilis
atgagcatcccaaaagagcaatataattttaacaaattacaaaaacgcttacgccgtaacgttgggcaagctatcgctgattttaatatgattgaagatggcgataaaatcatggtgtgcctttctggcgggaaagatagctatactctcctatctatcttaatgaatttgcaaaaaagcgcgccaatacaattttccttaattgccgttaatttagatcaaaaacagccgggcttccctgagcatattttacctgaatatcttgagcaactgggtgtagagtataaaattgttgaagagaatacttacggtattgtaaaagagatcattccagaaggtaaaaccacctgttcactttgctctcgcttacgtcgtggtattttataccgtacagccaccgaagttggggcaacaaaaattgctttaggccaccatcgtgatgatattttagaaacgctgtttctgaacatgttttatggtggaaagctaaagggcatgccacctaaattaatgagtgatgacggaaaacatatcgttattcgtccattggcttatgcccgagaaaaagacattgagcgttttgctcaagcaaaaaatttccctattattccgtgtaatctttgtggctctcaacctaacttacagcgccaagtgatcaaagagatgctaagagattgggataaacgttaccctgggcgcattgaaaccatgtttagggcaacccaaaatattgttccgtcgcatctatgtgatacccaattatttgactttgctaatatcaaacagggtgatgcgattattaacggcggtgatctagcatttgataaggatgatattccaacaagccctattctttccgatgatgaagatgaacgtcctgattttagccaagctagattggatgttgttgaggtaaaataa

SEQ ID NO: 305923 - DNA, 3255 bp, Proteus mirabilis
atgaacaaagaaatagctttaagtcaccatcccattaatcagaaaaaaaataccacaaactctctatttcaactctcccttattacttcggcacttcttttttctggctatgctgttgcatattcagaagttggacaattaggtaataaacaaagttgggaaagccctgaatatcaaaaagactgggggcttgcagccatgaatgcctctagtgcttatgctctgggttttcatggtcaaggtgctaaagtcggggtgatggactctggtgcactgctctcacatcaagagttgagtggatctcgttttcatgcagtaaaagccaaaggtgaatatggctctacgggaatgcgctatccacaagaaatgggcggacattatgaaaaaggccaagtctttgatgttgatggtaattggatcaaaggggtgaatgatacccatggcacacatgtcactggtactgtgggggctaaccgtgatggtaatggtatgcatggtgtggcgtggggggctgatatttatttagggaatactggggcaacagacagcaataactatggcccttatcaagactatacctatttctatactggctggaaagcgatggtcgatgcgggtgcgcaagtgattaataatagctgggggactaacccgcgtattattaatacagataaaacagaggggcctgatggtggtaataccacgatacatatgcctgttaacaccacggcacagacagaatacgaatatttctactttaaaaaagtctatggtgataaaccttcctttgttgatgctgcttatgatgcagttaaaggaacgaatgttgttcaggtctttacaacgggtaatcgcgactttgctcaaccttattatcgtcctctttatccttattttaatcccgaagccgaacagaattggattgcggtggcaggattgaagcaaaatgcggataacaccggttatgtattagaaaaagtcttcaatgaagcgggtaatgcaaaatggtggacagtggttgcaccgggtcgaaatatctattctacagtggttgataaagagggaaatccaggttgggatacctttagtggtacttcaatggcagctcctcatgtgacgggggcgatgggagtattaatgtctcgttatccttccatgaacgccattcaagttcgtgatgtcatgttcactaccgctaaccatcgtgatcctgatggctctttatatgagagctggacggccgcagaaggtactcctgatgtacgttatgggtggggaacaccagatttagataaagggatgtatggtccgggtcaattgctaggtaaatttgaatataacctaaatgcgacaccgcttgatgtgtggactaatgatatttcccaaacagctttagatctacgtaagcaagaagatctcgcatggttgaaagaatataccgaaaaaggtattgcggcaggaggtgattatcatctcggtactgattttgtgattaatgatggcaatcctgatcctacatcgcatattgttagccaagaagatgctgaaaaatggcgtcaagaatattaccaaaaacgcgctgatgctattcaagctaaaattgatgctggcttatatgatggtgctttggtgaagcgaggcgaaggtatgttagtcatgacgggaaataatagttaccgtggtggtacaactgtcgaacaaggtactttatatggctttagcggatcttttgggacgcaagccgtcaatgttaatggtgggaaattaggtattattgagcgttataacgatacttttactcaaaaaggccaattaacctcaaaccaaaaccataaagtaaacattaatattaatgataaaggtcgttatttagtgaccgcaggacacaatgttaatattggtaacttagtgcttaatcaaggagccgatattgatgtgggggcggataatgttgggcaactaaaagatatttatcttaataatagtgttgttgtcggtgaggtgaatacagatagtttagttgataatcgcactaaaacgaaaatgttagccagtaaccgtgtggttgcagagtcagccacaaccactactgtcaccaatagtgattatgctttatttgataaacatatcacgataacagataaaaccatcagtggtagtttaactaagaaagaaaatacgactttagccacctttgctgataatgaaaatggtcgtgctattgctaatgcattagataatacagggaatggtgagctatttaatgctgtattaccgatgaatgaaaatgatctgaaaaccacttatcaatcattgggtagtgatatgtatttaaatgccaataatgccagtattgttaatgtattgggtttaactcgtacagtgaaagatcaggctattggtatcggtgatggtcgtcatgcacaactaggtaatagtaatgcgcgtatttggatcagcggcatgggtcagtggggtaagacggattatggccacagtgatatggatgttgatttctatgttgggttattaggtgctgaaattgatgttactgaaaatactaaagcgggtctatttttcggtgcaggctccaccaaatataaaggtaatcaatatggaaagatagatagtaatgatattcatattggtgcttatgggatctctaatctttatgatgttgcctcattaaattatggatttacacatacaaaccaagatagagatgccaaaagaacactctggataggacaaactgcaggttataactcaaccagttacgatgcgaaaattagtcaattctttttagaaggtgcttatactcaattgaatactagccagtactcaattgaaccttatgctggatttagttggttaagagtatccactgataatatcaatgaaaatgtgggtaatatgaagtttaccactaaaacagatgcacaagatattcaagttgctacggttggtttacgtggtggatatccatttatggcaggcaatattaatatggcattaaaaggtgatatatcagcaagccatctgtttggtgataatcgccctgaatcacgtctatggttatccaattcaggtgaggcatcactacgaggtggtaaactagataatttatttggtgttggtctaggtgttgatgcgcagttaagtaaatcaaccactttcggtatctcttatcaaggtcaatataatagtgatatcaattcgagtggtattaatgcaatattgaaaattaatttctaa

SEQ ID NO: 305924 - DNA, 783 bp, Proteus mirabilis
atgaaaataacatttttccataatgatgaaataggtctaatacatactgatttaacaaaaaaaccctcatcaggcactgtttcatctttattaaatttagctaaaggattagctatattaaatcatgatgttgttatattatctaaggctaaaacttgtaaaatacataatataaattatgttgaaattaaagagaccaatgaattaattacatggtataaagaaaataatactgatgtcctagtgaccgttggtcatgctaataatgttttaccgttattagttaaatataaaaaatcaaggatatatcattggcatcacaactatctagatatcaagcatgtagtaactttactaaaaaaaaacaaaatagatggtattgtaactgtttcaccgcatcacatgagttcattatacaaatactttattttaaataaaataacatatataagaaatgctattgattatgatttattagcaccatataaaagaaatattcagcacagaaatggtctagcttttgtaggaaatatatcaaaatcaaagggatttgatgaagttataaatgcatattttgaatatataaatagtggtggaaaagagatcttacatatatatggtagcactaacttatataataaaaacatgcactcttctctaaacttcaatgaatttgaagttaatttttatgagaagattaatatgttaaaaacaaaaaacaaattagtgtttcacggaaagctcccaagagatatattatataaagaattaaataagaggtga

SEQ ID NO: 305925 - DNA, 1614 bp, Proteus mirabilis
  misc_feature (1588)..(1597): n is a, c, g, or t
atgagtggaagatctacaagcattttgggaactatattatttataatttattctcaaaatgtatattctgtagagtttaacttagatgttgttgactctaaatctaaagataatattaactttgctaggtttagtgaagccggttatattttaccgggtaaatatcagcttaacttagtacttaatggacaagggatcggttcatcaacatatactgttaacgtattagaaagagaaaataaatctcaagatgaaaataaaaaactgttatctcaagcctgtttaacaggtgatattatttcatctttaggattaaaggaaaaaatagaaaataatctaccaacatggaatgatggaaaatgtattgacttattaagcctagatggtgttgaagttacaacaaaattaaatgaaggtatattatcaattaaaatacctcaaatatggcttgagtatacaagtgctacttggttaccaccatctcgctgggatgatgggatctcaggtttgatccttgattataatattaacaccaatgttaatatccctcatgaaggaagcaatacgcaaagtatttattacaatggtactgttggttataacttcggtagctggcgtattcgttctgattatcaagggaattataatcgaacctctggtgatgcggaaaacaataaagatttattaaattttactcgagtttatggatatcgcgcgatccgcagtttaaagtctaacctaaccatcggtgaaaactttataaactccaatatatttaattcctggcgttatacggggattagtttagaaagtgatgatcggatgctctctcctcaactaaggggatatgcaccacaagttacagggatcgctgaaactaacgcaagggtagttgttaagcatcaaggacgtattctttacgattcaacagtacccgcaggtccatttgccattcaagatttagacagttcggtgcgtggtaaattggatgttgagattattgagcaaaatggaaagacgaataaatttcaaattgatacagcctatgttccttatttaacaagaccgggacaagttcgttataaggttgttgcaggacgctctagagataaattacataatacagaaggacctatatttggtacgactgaagctgcttttggtttaagtaatgcttggactatgtatggtggtaccattttcgccggtgattataatagtgtagcacttggggttgggcgcgatatgttcgctttcggtgcggtatctgccgatattacacaatcttatgctcgattacctgatcgtggcactatgcaaggtaagtcatggcgagtcagttactctaaacgttttgataatttggatgcggatgtaaccttcgctggataccgatttaatgaacgtaattatatgacgatgcaaaattatttagatgcacgttatcgtgatgattttactggaaaagagaaagaactctatacagtaacctttaataaaggtctttctgaatataacacatcaattggggtgcaatataatcatcagacatattgggatcaaagtaattccgattattattctattnnnnnnnnnngatgtttttgcagttaa

SEQ ID NO: 305926 - DNA, 291 bp, Proteus mirabilis
atgaataattacaaaacaaaaacggaatatgagcatactttggagtcagcaatagccacggttggagccgctattgcggatatttccagagtaaaaatactctgtgctttgatggatggaagggcgtggacagccaccgagttgagcattgttgcggatatctccgcatctaccacaagcagccatttatcaaaattactcagtagcggccttatttctgtgatctctcgtggtaaatatcgctattttcgattagctagtgatgatatagcatgtacgtgcttttcttaa

SEQ ID NO: 305927 - DNA, 828 bp, Proteus mirabilis
atgtcgaaaattgatggaacaattaatcgaataaaagatcaacaaataggtagctcaactaaaaaagtattattagttgaaggcagtgatgatgagttagcttttggcgcttttttaagaaaaaagtttcctagttgggaacagtattgggttattgctagcacgggcaagaaacaaaatgtgttggatattttagcccaagaacaagattggcttggtattgtcgatagagatgaatgggataatgctaaaattgaggaaaaacaagaacaattacccaatttattcattcttcctcgtttttgtattgagaactatcttgttcttcctgatgaaatttggtctgcattacctgaaaataagaaaaatagcatagaaaatggatgtgaaacattaaggaaagatatcgagactcagcttgaaaattggcgaaatcatgctgcggtatgggcaatcattaatcctttatgggaaggattaagaagtttgggatttaaagaatcgttattagaacttaatacaagcaatgatacagtaaaaattgaacaaattttacaaaagtggcatcaatatcttgagccttctcaattattagaaaaactcaaggataaaaagcaagaaataaatgcatgcacagtagatcaacaattaaaacaatatatacacgggaaacatttttttaaaaatgtagtttatcctgtgcttatttctcatattggtaatataaaagaaaaagaacttaaaaaacagttatttaattcacaacctattccggaagatcttgatttcctttggcaacatatgatgactaatatcaatactatttga

SEQ ID NO: 305928 - DNA, 255 bp, Proteus mirabilis
atgatccctgttgtggcattattcacaccatctttaccaaaaaaactgagtgtgtatgcaggtaatacagcattacacgtaaaagaaatatttatattttttcctgcaatagtattcatttttacgtcactagcggtttgttcaccaaatgcgacgtcattaacagacactgcacaagaagcattatttatcaacgtcatcgatgttggtgcactaagagcaacgctttccttttgtaacgtattgcccatttga

SEQ ID NO: 305929 - DNA, 411 bp, Proteus mirabilis; identical to SEQ ID NO: 298166

SEQ ID NO: 305930 - DNA, 534 bp, Proteus mirabilis
ttggtttcactcatcactgatatagctcgacgtattttaactttgaatcctaatttagataatccattggattcttacggtattgtagtgatagatgaaattgaacttcatttacatccaaaatggcagcaaaatgttgttaatgccttactaaaatcttttaaaaacgttcaattcgttataacgactcacagcccacaagtattatctacgattgataagaagaatataagaatgtttgttaaaaatgatcaaggggaaatgagatctgtctctcctactttccaaacaaaaggtgttaaaagtgcggatgtgatggctcgtataatgggggctgattcaatccctgatgttaaagaagcaagagatgttgatgaattttctcaattattatctgaaggtaaaaaagatgatgcgctttctcttttagatgagttaaagcttcattttggagaagagcatcctgttattcttgattgtgaaaactctataaaaatttatgaattaaaagaaaggattaggaataagggctag

SEQ ID NO: 305931 - DNA, 255 bp, Proteus mirabilis
atggaaggtgttcaacttaggcttgcggagcctcatgaagcaaaacgattatggtatttaagaaataaagcgttacgttttggctgtcaacatgtctatccgcccgatatattagccgcttggactcctgatgaaatgcctgacggctatagacaatctattattaataatcctttctatgttattgatgataaaaaattatctattcccgtagcttctggatttttagatcttaaaacaggctttgctgattga

SEQ ID NO: 305932 - DNA, 252 bp, Proteus mirabilis; identical to SEQ ID NO: 305467

SEQ ID NO: 305933 - DNA, 126 bp, Proteus mirabilis
atgtctacaatgaaaactgaagtcgttgttattcgtttaaccaaacaagagcgatatcaagtaaaaattaacataaaactacaacaaagtaggatatcgacacactattgcatgaaattggtctaa

SEQ ID NO: 305934 - DNA, 417 bp, Proteus mirabilis
atggttaataagaatactaataaagatatcgtttattttctctttccaagtgtcattgcattgtcattgacgctgtccttttcatcatatagcgcaaaccgatttaatcctgcatttttggctgactctcctgatgccgtcaccgatttaagttattttgaagcaggcaaccgcattaaacccggtgattatcttcttgatattgtttttaatcatgagtatctgcgtagtgaaaatattcattttattagtcaagataaccatgttattccttgtttaaatcgagatgattatcaatcactcgggatcaatattaaactatttgctgattttgagaaattctcggcaaatgaatgtattgatattgaaaaaatcattccagattctgttgttaattatgatattgatcccgagtga

SEQ ID NO: 305935 - DNA, 711 bp, Proteus mirabilis
atggcatcagaaatgatcgcaatggatattgatattagctttgctcctgtcctagatcttggtcatgactgtattgctatcggtgagcgctctttccatgagtgtccagaaattgctatggatatggcggaaagctttattaaaggaatgcgctctgcaggtatgaaatcaacaggtaagcattttcctggtcatggtgccgtcagagccgattcccataaagaaacgccacgtgatgagcgctctttaaacgatattcgtcaacgtgatatggctatctttaaagattttatccaacgtcaattattagatgccattatgccagctcatgttatttattctcagattgatgagcgtccagcaagtggctctccttattggttgaaatcaattttacgtgaacaactcggtttccaaggcgttattttctcagatgatttatctatggaaggtgccgctattatgggaagttatgcgcagagagcacaacgttcattagacgcgggttgtgatatgcttttagtgtgtaataaccgtaaaggggcggtaagtgtgttagataacctgtcctttgtcaaagcagaacgcatttcggcgttgtaccatcaccgaggtcgttacacattaagtgaactgcaagcatctgatcgttggaaaaaagcgaatcaaatgctgacccaattacaggagcaatggcaggagcgcgcatga

SEQ ID NO: 305936 - DNA, 480 bp, Proteus mirabilis
atggctaaccgtctaagtattattgagaaaattgaacaggagcgattaaatattgcgacaccttcatctttttgtcttgggattattgattgtgataaattcaaaacgattaatgatcaatatggccatgctattggtgatcatgttttatgtgagatagcgcagcgtttattagccttagaacgccagcaggtttactgtgggcgacttggtggcgatgaatttgcggtacttttccctgctggattacgttcttgctctttattgttattggagatcatcgaatcgctatggcgagggatggaaaaaccgataaaaatcaataaagaaaaaataatcgttccttctattagcttaggtattgctgaataccctaaggatggcaagacattatctgaactattaaagtcagcagataaacagctttatgcaataaaagagaaaggaggaaataaatacggtttttattcagagtattaa

SEQ ID NO: 305937 - DNA, 267 bp, Proteus mirabilis
  misc_feature (248)..(257): n is a, c, g, or t
atgagtgaattagtaattaataataatattgttaatgacttattaatgaagcaatttactaattatgtatttatgatgatagtaacagatataaaaggtaatattatctacgctaataaaaaatactgccaatttaatcatattaattttgaaagtataaaaaataaaagatataacttgttttatttagttgatgaaaatcaagatgtgttttctaacattagtgataataaagaggtaataagatnnnnnnnnnngatttattaa

SEQ ID NO: 305938 - DNA, 1050 bp, Proteus mirabilis
atgatctggtcgcactgtttcaataatcaaacacgtgaggaagtccttgatctagtttgcttggttgtttttaatgctaataacattgaagaacaggattgtaaaaatgcattaaaacgcgttttcaatatcaaatataaaaataacttttactccaaagtaaataaaatagatgaatacataaaagagtcaataaaatcaacacttaatagaagtctaacaccactaaataaaaatgtaatgataagattgacaccattcaacccatcagtgtctgactatatcatcaatcgctatgctactgatgaaacctctctttcactttacttttcagctcttaaaacaaatcaatcaattaacactttattctctttgcacagcaataggaaaatcaattcagatgtatttgtttcagtacttgagtcagtactcaatgccgttgatcttaaatgcttaaatgattactcaattcatcttcttcattcggtcatacattccaatttaatctccaccaataaaaatagaatggtctatccgagcttatttttaaacattaaagaagaatatctaacttacgattacgaagttggtgagtgcgtgttatgggctgtaaaaaataatccaagtctattttccgatcaattcatctctgactttataaattatgccatgaggtctagttggagatatactctcagccatgacgattacctccccttagcacacttaatcaatcttcgacctacaataaaagaagaggaagttactcaggaactaatggaacatatcaaagaatattggcacgaaaattatgacgaaagatctaaagctgatgacattgcatatgacatgctacatgatttaattaatgaatacgatcttccctttgaggacaatgaaattgaatatatgtatagtaaagtcgatgcatctgcacacctctctgacttttatgattatgatgacgatgaaagagagctcttctatagtcgcagagatgaaaaagaacatagcgaaagctatataaacgatttatttcaaaaacattag

SEQ ID NO: 305939 - DNA, 975 bp, Proteus mirabilis
atgataaattttagctcattttatcaacatattgcgcaagatgaacggttatttcattggcttgatacgctgccggcacaattatcagaatggcgcgcccatgctttacatggccattttgcttcatgggaaagaatgctggaaaacttacctgagattacgcccactgaacttaatttaaagcaaggtgttatcgccaataaaaccccagcattaagtaccggtgaacaacttggtttaacgaatattctaaaagcgttaatgccatggcgcaaaggccctttttctctttatggtgtcaatattgatactgaatggcgttcagactggaaatgggatcgcgtattgccccatctttcgcctcttaaaggccgattagttttagatgttggttgtggcagtggttatcatatgtggcggatgcttggtgaaggggctgattttgttgtcggtatcgatcccactcagctctttttatgccaatttgaagcagtcagaaaattattaggtaacgatcagcgtgcccatttaatccctgtcggcattgaacaaatgccagaactaaatgcttttgatacggtattttcaatgggggttctttaccaccgtcgttcaccacttgatcatctttggcaattgaaaaatcagctcgtttctggtggtgaattagtattagagagtcttgtgattgatggtgatgaattccaatgtttaattcctggtgagcgttatgcacagatgcgtaatgtgtactttataccgtcagccaaaatgctcaaagtatggttagaaaaatgcggttttaaagatgtacgcattgttgatgaaaatgtcacatcactcgaagagcaacgtaaaacggattggatggtgactgattcattagaagcattcttagatcctctcgatcacaccaaaaccgttgaaggctatccagctcctaaacgggcaattttaattgcgactaaaccttaa

SEQ ID NO: 305940 - DNA, 642 bp, Proteus mirabilis
atgaaaaaactttctgcgcttattctagcggctgcaacacttgcaccgtctatttcttttgctcatcaagcgggtgattttttattccgtgcgggtactgcaacagttcgtcctaatacaggttcagatactatattaggtgggcattttgatgctaataacaacactcaattaggtttaacctttggttatatggtaactgataatattggggttgagttattagcagcaacaccttttgagcataaagtttctttaactggtgtgggcgaaattgctaaagttaaacatttaccgccaacattaatggcacagtattactttggtggtgctgaagataaattacgcccttatttaggtgctggtctaaactttacgaccttctttgatgaaaaattcaataataatccagcggtaggccaacatggattaaatgatcttgatcttaaaaactcttggggctttgcagcacaagcaggtttagactataacctagataaaaactggatgctgaatgcttctgtttggtggatgaatatcgaaaccgatgtcaaatttaaagatggcgatggaaaccactataaagtggatactcgcttagacccatttgtgtttatgttcggtgttggttatcgtttctaa

SEQ ID NO: 305941 - DNA, 1521 bp, Proteus mirabilis
atgagtattgaaagaacagcgaaagtaggctctattatactattagctattttcttagtgacatcagctttatcatcgttttttatttatcaaatgcaggataattttgcttcattaaactcgttaaccacgagattaaataatgtacaagaggcaagatatgaactagcaaccatacgctctcatgttaactttttagtcaatattggtcatgaaaatttagatatgcaagaaaccaaagctcgattagtttctgaagctaaaacattagcggctaaatcaaaagcgacaattaacgcttgggaaagggaaagcaaaatcagtgctgacgcacaaagaaactcagaacaattatcggcactatttatcaaactcgtcgatactattattgcgcctattgatacgctagcttatgaaaatattgatttatcgaaagatttttccaaacttgctgagttgtttgatgaatacttagtgataactcaaaatgttaatgatcaaatagaagacgaacaaaaatggatgtttcaactctttatttacactacatgtattgctttagtgatactgattggactgctttatttagtgatccgttgggttaataaaacctttctctttaacctcaatacgctctctgccattttgcaaaaagtgggagaagggaatttaaacttctcgttacccaaaaatagaaaagatgagtttggtacactattttctcatgtcggtgatatgcaaaatgcactgacatcgactattggtttggtgaaagaagaagcattagtgatcaaaagcggttcagcagaaatcgcagcgggtaatcaagatctctcttctcgtacagaggagcaagcgagtgcattgcaacaaacggcagccagcatggaagagataaaaattgcggtagtgaataataccaataatgccgtattagcaaactctatcacagcacaaacgcgtgatttggctatcgatggcgctagcattatgaatgatgccattacttcgatgaaaaaaattgaagtcggtacgttaaaagtcgctgaaatcaatgacgtggtaaacaatattgccagtcaaaccaatattcttgcgttgaatgcggcagtggaagccgctcgtgcaggggagcaagggcggggttttacagttgttgcaacagaggttcgcaatttagcagccagaagtgcggaagcagctcgtgaaattaatcagattattcgagcttctgtggcggatgtcgcacatggtcgtgaactggttaataaaaccggtgagcatatacaagaaattgtcacctcaattaccaaagtaagcgatattatgcagggaattagcattgcatcggaagagcaaaaagtgggaattgaacaaatagccgttgcgataaaccaaatggattctgtggttcagcaaaatgcggctttagtagaacaaggagccacctcaaccatgatgttagatgaaaaagcacaaaatctgaccgataaagtatcagtttttcaaatcaaagaataa

SEQ ID NO: 305942 - DNA, 864 bp, Proteus mirabilis; identical to SEQ ID NO: 296545

SEQ ID NO: 305943 - DNA, 3057 bp, Proteus mirabilis
atgatcccacgtatatcgcaagcaccgcaagtcagtgaactcacaaccgaatttttaaatacactccgacaaaatggttttacaggtgatatatcgagcacttatgccgatagactcactatggcaacagataacagtatttatcagttgctaccacaggcggttatttttcctcgttccacagcggatgtgactattgtagcacgtttagtggatgaacctcgttttcattccctctctttgacaccaagaggtggcggaaccggcactaatggtcaagcgttaaccgagggtatcgtggtggatttatctcgttatatgaaacgtattattgagataaacccagaacagcgatgggtaaaggtagaagccggtgtgataaaagatgaacttaatctgtttttaaaaccctatggcttcttttttgcgccagaactgtctaccagtaatcgtgcgacattagggggaatgatcaataccgatgcttcagggcaaggctctatggtatatggcaaaacctccgatcatgtattaggcgtcagagccgttttactaggcggagaattgcttgaaactcgcgcgatggacagcgctttagctgaaactattgcgaaagaagattctgctgttggtcggatatatcaaacggtattatcccgttgcaaagcacaacgtcagcttattctcgaaaaatttcctaaattgaatcgctttttaacgggctatgatttacgccatgtgtttagcgatgacatgaagcattttgatcttacgcgtattctaaccggctcagaagggactttggcctttattaccgaggcaacactcgatattacccccattccaaagcagcgcagtttagtgaatgtgaagtatgactcatttgattccgcattgcgtaacgcgccgtttttagtaaaagcaaaggcgctttctgttgaaactgttgactccaaagtattaaaccttgctcgagaagatattgtctggcattccgttaatgcattgattacggatgtgcccgataaagatatgcaagggctaaatattgttgagtttgccggtgatgataaaacactgattgcctcacaagtggaggatttatgtcagcgcttagataagctgatgaataatggcgaagggggcgttatcggttatcaggtttgtgataacctcgccgatattaaccgtatttatgccatgcgtaaaaaagcagtagggctattaggtaatgctcaagggcatgctaaacccattccttttgttgaagatacctgtgtgccaccagagcatttagcggattatattactgaatttagggcattacttgatagttatcagctcaattacggtatgtttggtcatgttgatgctggcgtattgcatgtgagacctgctttagatatgtgtgatccgcaacaagaacaactcatgaaaaccatttctgatgagattgttgcattaacggcgaaatatggtggcttactatggggggagcatggaaaaggctttagagcgcaatatagtccagaattctttggcgaaaccctttatcacgaattacgtcaaataaaaacggtgttcgatcctcgaaatagacttaacccagggaaaatatgtcctcctcttgaggttgaggcgccaatgaaacaggtcgatgctattaaacgcggcacatttgatcgcaccattcctgtatcggttcgcgaagattttcgcggtgcattagagtgtaatggtaatggattatgttttaactttgatgttaaaagtccaatgtgtccttctatgaaaataactggacaacgtattcattcacctaaaggcagagcgacattagtcagagagtggttacgtctacttacagagcaaggagtaagccctcagcagttagaaacaagtcttacaaataataaacctagcttacggggattgattgaaaaaacacgcaatacatggaaagctaaacgtggagaatatgatttctctcatgaggttaaaatagcaatgaatggttgtttagcctgtaaagcgtgctctacacaatgcccgattaaaattgacgtgccatcatttagagccaaatttactcagttatatcatcaacgctatctacgtccgctaaaagatcatattgtggcaaatgtcgaactcaccacaccgttaatggcaaaagtaccaagtctgtttaatttctttattaagcaaccattggtgcaatcgttgagtaaacgtactattggtatgatagatctgcctctattgtcatctccgacattaaagcagcagttagctggacatagcgcgttaacgatgaccttggaagagttagagcagttatcagaaaagcaacgaagctattatgttatcgtggtacaagatccatttaccagttattacgatgctaaagtagttgctgactttattaaattgattgaaaaaattggttttaaacctgtgctattgcctttttcacctaacggaaaagcacagcatattaagggctttttacagcaatttagtaaaactgcacaaaaaacagcaacgatgcttaatcgagttgcacagttgtccattccaatggtaggagtcgaccccgctttagtcctttgctaccgcgatgaatatcgggagatattaggggataaacgcggtaactttaaggttcaactggttcatgagtggctaaatcagttagtcagtgagccgattgagatctgcgaagatgctgaaaaatggtatctttttagtcattgtactgagtcaacggcattaccgcaaagtatgcaacagtggcaagcgatattccaacgttatggtcaaccacttgaagtggtaactacggggtgctgtggtatggcgggcacttatgggcatgaagtgaataactataaaaattcattgggaatttatcaactgtcatggggaaatgcattgaaaacactccctacagcacgttgcttgagtaccggatattcttgtcgtagccaagtaaaacgtattgataatattgagttaaaacatccactacaggcgcttttggagattatgcaatga

SEQ ID NO: 305944 - DNA, 273 bp, Proteus mirabilis; identical to SEQ ID NO: 302441

SEQ ID NO: 305945 - DNA, 519 bp, Proteus mirabilis
atgccaactccttgctatatttccattgaaggaaaaactcagggcaacatcactgcaggcgcgtttactgcagattctgtcggcaacatttatgtacaaggtcatgaagaccaaatgttggtacaagaattttctcacgtagtgacggttccgactgatccgcaatcaggtcaaccttctggccaacgtgcgcataaaccgtttcgttttaccgtggcattaaacaaaaccgttcctctgctgtataacgcactggcttccggcgaaatgctgccaaaagttgagttaaaatggtatcgcacgtctgttgaaggtaaacaagagcacttctttaccaccacactgactgacgcgacgatcgtgaacatcgattgccaaatgcctcattgccaagatccggctaaagccgacttcacgcaacttatcgaagtctccctctcttaccgcaaaattgactgggagcacactgttgctggaacgtctggtgcggatgactggcgtgcacctctcgaagcgtaa

SEQ ID NO: 305946 - DNA, 408 bp, Proteus mirabilis
ttgcgagataacaaagtaataagtgatgttatctttcaatcaattaataaagatattaataacttatctgatgtattgggtggctgtgaacgtatttcaaatactcctgtaccttttgcctatacgctcatattgcaacgtacggtatatctattctgtgctctgctaccttttgcattggttgccgatctccactatatgacgccatttgtttccgtatttatctcttatacttttttatcttgggactcattagctgaagagttagaagatccattcggtgtttctgccaatgacttaccattaaatgcaatatgtaacaccatagaaaggaatttattagagatgcaagatatcactccactccccatcagagttaaacctgaccaatattataatttattgtaa

SEQ ID NO: 305947 - DNA, 801 bp, Proteus mirabilis
atgtcacgtagcttatacccaactaccttgtttcattttactaaagagttagaaaccttatttaagatacttgaatcaagcaattttcgaatttctttcgctaaagaatttatacaaggcccgcacacaaatagaaatattgccataccgatggtttcattttgtgatattaggctaacacagcttaatcagcatactgaaagttatggtcattatggcatcggattatccaaaagttgggcaaatgaaaatgggctaaacccagtgatttacatgtccaaatcctcttctgttttcgataattacaatctagaacttaggaagttaaaaaaagaaaacaagaagttacataagtctttagaaaaaattaagttatcaggaacagatgctcaaattaataatgcaaagcggaaatatcaagcggcgaaacgtaattacaataaaattatagatcctttgcgatacatgaaaaattaccaggcaactttgaaaagaagaaataggtcagagcaaccaaactatatttttgcagatgagagggagtggcgatttgttccggatatagaaatgtcaaagggaaagtcactgatcgttgctggacaaaacatagtaactcaagatgacaagagaaagtacaacgaagaatatgaaagcatcaggttgcctttttctcaaaaggatattaaatatataattgttaagcatgaaagtgatgttgaaaagatgatggattttctgtgttcaaaaaatatattgtttccaagggttctttcaaccgaattgatagcgaatgatatgtaa

SEQ ID NO: 305948 - DNA, 165 bp, Proteus mirabilis; identical to SEQ ID NO: 305612

SEQ ID NO: 305949 - DNA, 714 bp, Proteus mirabilis
atgaataatcaatcaaaaaaatatgacagaacatatcactatcctttttcaccaggcacaacaagcgatgatcgtattaatgccaattggtggcaagatatctgcaaaataaagcatcttattcatactgaaaaattagatggtgaaaataattgcttaaatcgaatgggggtttttgctcgctctcatgcgactccgacacaatctgcgtggacagtacaactacgccagcgttggcaatccatcagaaatgatttaggtaatttagatatttttggtgaaaatctttatgccattcattctattgaataccaacacttggaagagtatttctatgtttttgccatacgttgtcaggataaatggctaagttgggaagaagtgcaattttatgccactttatttgatttacccaccgtaccggaaatctcgctaccaaaatcggaaaataaaatagagtttgaaaagaatattgttttacacgcacaaaagcatagctcttttcaatcacgagatgtgttaaccaagaaaccaagtgcgatggaaggcattgtcacacgagatgctcaagcattttcattagatgaattttcacatcgggtgtttaaatatgtgagaaaagatcatgttaaaacagatgtgcattggaaacgtaattggaaaagagcgccactgatttgggaaaaaacacaggagtctcatgatgcttcataa

SEQ ID NO: 305950 - DNA, 1212 bp, Proteus mirabilis
atgtcagcaggaaatacgcaaaatgaagctcgagtgcaagggctttctgaagtgtttgaacgctatgtcaaaaatagaattatcagcgaaagaattagcttgcctaaaatcccccatgaagttttagctcgttatcctgctgttattgaagctattacgacattagaaaaagaaggcttccctatttttagttttgatgcttctttagggggacaattctccgttatttgcgtcgtgctgtttaacccacaaaatgggacttgtttcgcttcttttggtgctcatcccgattttggtgtggcattagagcgtactgttactgagttattgcaaggccgtagccttaaagatctcgatgttttcaatccaccgagttttgatgatgaagaagtcggtgatcacactaatcttgaaacccactttatcgactctagtggtttaattagttgggatctgtttaaaaaagatgcagactatccatttgttgattgggatttcagtggttcaaccgaagaagaattccacacattaatgtcactgtgccagcaatgtgatgcagaagtgtatattatggattataaccatttaggggtttatgcttgccgtattttagtccctggcttatccgatatttatcctgctgaagatctgcaactagccaataacattatgggtgtccattggcgtgacaccattctttctttaccaacaagtcatggcacaaaagaagagtacctctcacttattggccaatttgatgaagatggcttagatgactttactcgtatcagagaaatgattggtattgcaccgggtaaagataatggttggagtcatttacgtgtaggtgaattaaaatcaatgttagcactcgctggtggcgatttagaacaagcattagtttgggttgagtggacacaagattttaacgcatcattatttacaccagcgcgtcaaaattattatcgttgcctgcataatcttttactcctacgtgaagagcatgagcgtgagcctgcacaatatatggaggctttttctcgtatgtatggcgaggaaacactgcaagctgcattaaatgcaattgaaggtaaacaacctttttatggcttgcaacccatagctccatcattagcgaatttgcctgttcatcaatctttattagccgcgtatgaaaaattacaacaagcaaaacgtcaatcgaataaataa

SEQ ID NO: 305951 - DNA, 894 bp, Proteus mirabilis
atggatattcgtgttttacgctattttattgaagttgttcaattaaatggatttagccgagccgctgatactttatttattacacaaccagccattagtcgtagcattaaaaaattagaggatgaattaggcactgttttattaataagagaagtggatggggtaaaattaactgatgacggtgctattttatatgagcatgcaaagcagatcctcgctcaatttaatagtatgaataaagcattaaatgataaagatgaacctttaacaggcgccttaaatgtcggattacctcctgttatagcctcaacctattttgctgatattatcatggcgtttagctctcgccatcccaatgttgaacttaaaatttttgagctgggcaccaaacagatggaagatgcgatgttagaaggcacggtagaaactgctgcagtgatgttaccttttaatgataaagattttgaattaaccattttttcagaagatcacttgatgttattagtagcacaatcccatcctttggctaaagataagaaggttaattttaaacagcttattacagagcggtttatctttttttcagaagattttcgtattaatgatttggtacgtagtgcttgtgggatttataacactgaaccacaaattgtggggagaagtaatcatttagatttaattattgcaatggttaaagccggtgtcgggatcacactgttacctaatagcatgtgtaataaatatcctatcgatgatttagtggttattcccattacttcccctaggttatcttatcaattagctttagccaccaatcaaaatagttatcaaagccgtagttgccaagcatggaataaattagcaatagagaaattaatgaaagagaatatttaa

SEQ ID NO: 305952 - DNA, 525 bp, Proteus mirabilis
atgataaatattcatacattgggtcctgcaggaacaaactgtgagaaagccgcttattattggctaaataaaaataatcaacaaggaaatattattcttcaccctacattagaaaccgcagtaaaagaaatggaggtaagccaaaatagtattctattaggttgtattgtttatccttttttacacaatattgtttttaataatctctcttttatcaaattaacagattgttttgttatggatacccataacatgctatttgctagccgatttaataatattaaggagataaaaaagttaggttctcatcccgcaccacaagatctatttagaaaaataacagaactcgataatattgaaagagttctttttaattcaaatagtgaagcagcacttcaatgtggtttagggcgagtagatggctgtattaccacacttagtgcagctaaaaaatatcatttaaatattttatatgattttggccctgtccctatgggattttctattcattcaaaattaaattaa

SEQ ID NO: 305953 - DNA, 801 bp, Proteus mirabilis
ttgttaaccgggatatttaaaaatattaatgaaattaatcatgcaatagctgatagagagttgacacagcaattatcagaaaaactgctccaagagaaaaaatttattgaacagttatttaaagatgaattaactgaatctatagaaattatagaaaagcacatcagttttattaatgataaaaaacagctcttaacaaccaccactattattagtgaaatagataaattaattagaaaaaaagaagaaatatctattgaaatcaatgagaaaattgccaagcaaaagttatcgattaatgaaattaaagaacaactcgatataattactaaaagtgaagatattatttataataaaaatatcctcgatttttttacctctcacctgccaagtaaacagacaatttctaaactgcagttggcttcttcagaaaaagatattctctctgtttttgtcgatctgctaaagcaattttttacccatctggagaaagggttttcttaccaaaaactggtagagacacgtcatactcttattgataactatctgatacagataaaaaatctaaccaaactagaacagaaaaaacaagctctcttatttaccctaagtcgttattatgcagtcacagaaatcaatcaatatattgatatgttaaatcaacaattatcgctattagagcagtattggcatacattaatagagcaactgatacaattaaaacgcaatctttccgaggcaaaaaacgtgctctcacctcatcttgtattccttaatcacttttcacaccattatcaataa

SEQ ID NO: 305954 - DNA, 201 bp, Proteus mirabilis
atgttactacaaaccattttagcagcgctgggccctattatcttagggcttttagttggctggctttccggtaaatatggatttattaaaagagagtattcacaagcctttgctgattttgtcgttaaaattgctctgcctttttcactctttttagcggcaacccaagcttctccgtcggttttctttaatatcgactag

SEQ ID NO: 305955 - DNA, 537 bp, Proteus mirabilis; identical to SEQ ID NO: 301825

SEQ ID NO: 305956 - DNA, 555 bp, Proteus mirabilis
atgagtggcagtattttagctcactcaggtggtataacacttagtcagcctatatatcaaacagcggtgttagttaaagtacctgaagttaaaaatataaaattagaaaacaatagtggcatcacgacagacagtaatggttatgcggttttaccttatgtttctgaatataaagaaaaccgtattgcattggataccaattcattctctaacaatattgaaatagataatgcggtgaaaagcgtagttcctactcgtggggccattagtgcgatcacatttgagcctagtgttgggataaaagcaattacgacattaacccataaagggaaaccagtacctttcggggctatcgttgattcaggtaataatactgggattgtggcagatgaaggaaaagtttatttaacagggttatcaccttcagggcaattaaaagtgaattggggtagtaagaaagagcaacaatgcttagtaaattacacattaccaccacaagatccagataaactttatgttgaatatagtgcagagtgccaccctattaaggaataa

SEQ ID NO: 305957 - DNA, 375 bp, Proteus mirabilis
  misc_feature (308)..(317): n is a, c, g, or t
atgaaattaagaaatgcaataataattggcgtaatatacacaccatcaatatgccaggccgtagaacaaactaactataaatattattctgatcatatttctattaatcaagactcttcaacaatagttaaacctaatgaaattaatcctaaacaagcagaaatattaatagcaccaaaaaattccaaaggtatttctcataataaatatgatacatttgatgtaactgatgctggcattattttaaataataaagaggttgccgctgagactattattaatgaagtggttaatggagcaacgtcatnnnnnnnnnnatatcgcggtagctggcaatgcagctcatgttgttatagccaacccaaatggtattga

SEQ ID NO: 305958 - DNA, 381 bp, Proteus mirabilis
gtggtcacacaggtgctgggcagcaaatcggtccgcacctgcaccaatccggcggattgtcagagcggcggtgaggcggagcaaccgggcagttcccagccaggaaccgggctggcaccggtgctggagaccaccacccgggaaaatttggaacagctgcataaactggtgaacagccggggcgcggtcggggcggcagagttggcgaaactgaaaaccggcagcctgacggtctcccggggggtgattgaagcgctgcgccgggatccggataaaacggtattaacacagcgtctggccggtgatcagcatccggcgcatcgtcagcgccagctccatcgtgtccgccatcgccagctcaccggccagacgctgtgttaa

SEQ ID NO: 305959 - DNA, 189 bp, Proteus mirabilis; identical to SEQ ID NO: 302543

SEQ ID NO: 305960 - DNA, 156 bp, Proteus mirabilis
atgataaatgaaataaagttttataaagatgaaaacttacacgccattgcaaattacaaatctattccatttaatgaaacacatgaagatgatggttatattattcgcgttattgaattatttaagtttactaaaattaaaaataaattaatgtag

SEQ ID NO: 305961 - DNA, 945 bp, Proteus mirabilis
atgattgaacgattatccccttggaatttaggggcaacgctgtatatgcccgcaacacgaaccgatatcgccgcaacaattattgatcaaaaaattgatggattacgttcattaattatttgtttagaagatgccgtcagtgatactgatattccacaagcattacaaaatctagcaacattattaaccacattatcagactataaaaagcatcatgattgtactgaatggccgttgctatttatacgcccccgccatacagaaatggcgcaatggctggttgaacatgtagatttaaccgtgattgacggcttagtattacctaaatttacccaagcttcattacccctttggtggcgtatcatcaaacccacccatttatgtatgatgccaacattggaaacagaagaagtgttcgacgttcttcaaatgacctcactggcagacttgctactagcccacccttgccataagagaattattgccttacgtatcggtggaaatgatttaatgaatgttatttctcttagacgtaatcgccatttaacactctatgatggacctatgggatacgtgataaaaatgttggttgctgtatttggtgctcgtcagtttgcgcttaccgctcctgtttgtgagcatattgatgatcaacaaattatggatagagaattagccctcgatattgccaatggtttagtgggtaaaaccgctattcatcccaagcagatagacaaaatagaacaggcattaatggtatctcagtctgatcattccgatgcgttgcgcatcttaaattcaacacaagccgtatttaaatctcatggtgccatgtgtgaaccggcaacacatcgccgttgggcattaagtattttaactagagcaaaactgtatggcattattcccaattcaaaaaatagtgttcaacgatttaatacaccataa

SEQ ID NO: 305962 - DNA, 1131 bp, Proteus mirabilis; identical to SEQ ID NO: 301301

SEQ ID NO: 305963 - DNA, 657 bp, Proteus mirabilis
atgagattagctctcatcattgatgattatttgcctcatagtactcgcgttggggcaaaaatgtttcatgaattagcattagagttacaatcactcgggcataatataaccgttattacaccagcagaaaatcaacaatatagtttatatgttgataatttagatggtattactgtttggcgttttaaaaatggtcctattaaaaatgtcaaaagaatatctagagcaataaatgaaaccttactttcttataatgcttggaaggcaatcaaacatttagttaataaagattcttttgatggaatcatttactactccccttctatattttggggaaaattagttaataatctaaagaaaaaatgtcaatgtccttcctatttaatattaagagacttatttccccaatgggttgttgatgcaggaatgttaaaatcaggctcattaattgaaaaatatttccgtttttttgaacaatactcatataaacaagcatcgataattggtttaatgtcgaaaaaaaacttagatttcttttatacacataaaaataataagtactataaatgtgaaatattaaggaattgggcaaatacttcagaaattatcctgatgctcattttctttttatcggtcaaggcgatgaagttgatttaa

SEQ ID NO: 305964 - DNA, 2463 bp, Proteus mirabilis
atgtataaatatgtcgagcctcaactacccgatgtcgcgacattaaaagatgttcgtttacaaactcctatgcaggtctttagcgcagacggagagttaatggcgcaatatggcgaaaaacgtcgtttgcctcttaccttgcaggagatgcctccgcaattaattaatgcctttattgccactgaagatacgcgttttcgtgaacatcatggtattgaccctattggcatctctcgtgctgttgttgttgcgttaacatcggggcaagcatcgcaaggtgccagtaccatcacgcaacaattagcgcgtaatttcttcttaacacctgagaagaaattaatgcgtaaaatcaaagaagcctttttggctatccgtattgaaaaagagcttactaaagatgagatcttggcactttatctcaataaaatttatctaggaaatcgcgcttatggtgtgggtgctgctgcatatgtttactttggcaaaagtgtgcatgatcttagcttaagtgagatggctgttattgctggtttacctaaagccccttcgacactaaacccactttattcgtatgatcgagccttaaaacgccgtaatttagtgttacaacgcatgttggaagagaactatattacccgcgaagagtatgacagtgctaaagctgagcctattgtggctaaatatcacgccccacaaattgatttttcagcgccttatttgactgaaatggtcagaatggagatgtatcagcgctatggcgaaaatgcctatacggatggttataaaatttacactacagttatccgcaaagatcaattagccgctgaacaagcgctacgtaataatgttattgattatgatatgcgccatggctatcgcggtgctcaagaggtgctgtggcatgcagggcaaactccttgggatgataaagccattaacgataagctaaagggtatacagacttatggcccattaatccccgcagtggtgttatccgctgatgctaaagaagctcaggtggtattaaaaaatggcgataaaataacactcgatttaaaagcggttcgttgggcgcgtaaatttatttctgatacggctcaaggggccacgccgagcaaagttgatgctgttgtacatgctggtgagcaaatttgggtacgacaaaatagtgaaaatgattggttattagcacagcttcctgaggttaatgcagcttttgtcgcattagatccacttaatggcggtattattgcgctggtgggaggttttgattttgaattgagtaagtttaatcgcgtatctcaatcgttacgtcaagttggttcaaatatcaaacctttcttatatgcggcggcattagataaagggttaacattatcgacattactaaatgacttacctattagtcgttgggatgcgggagctggaactgattggcgccctaaaaactcaccacctacttacgcagggcctattcgtttacgtcaaggtttaggtcaatctaaaaacgtagttatggtgcgcgctatgcgggcgatgggggttgattacgctgcagattatctattgcgttttggttttcctaatcaaaatatagatagaacagagtcattagctttaggctcaccttcatttacaccaatgcaaatggctcgaggttttgcggtaatggcaaatggtgggtatctcattgagccatattttattcagcgtattgaaaatgctgatggtgaagtgatctttactgctgagccgaaagtcgcttgtcctgaatgtaccgatatccccgtgatttatggtgatactacgcgctctattgcattatctgatgattatatggaaaacgtcgcacaatctcagcaagcgcaaccggcagaaacggcgcctgatattgagttagagcaagcacctcttgctgaaacagtcaaagaaagcccatatgctcctcatgtgataagtacgccactggcgtttctaatgcatgatgcgttaagaaccaatctcgttggtgagccgggatggtctggtacaggatggcgtgcattgcgagatttaaaacgtcaagatatcggtggtaagacaggaacgaccaatagctctaaagatgcttggttctctggatatggtgctaatattgtggcgactgcatggattggttttgatgatagtagtcgcaatttagggcgaactgccgcaacgggtggtgaagcgggtgccaaaacggcacaacctatttggaatgactttatgaaagttgctttagaaggtgttccggtacaaatgatgccgatgccaaaaggcgttgttgctgttcaaatcgatcgcaataccggtaagttggcgggagatggaccatcaatgaaagagtattttattgaaggcactcagccaacagaaaaagcaaaaagtgaagtgggtacacggatctttgaggataatggcgaatctaacgagctattttga

SEQ ID NO: 305965 - DNA, 2214 bp, Proteus mirabilis
atgcataaaaaggatatttcgcgaaaacagcgtttaataagctattgtgttatttatttaaccgctatttacccattgcatcctgcttggggttctgtcattacttcatctgataaaacgataacaataaatcagcaaaataatattcctattattaatatagcaacacctaatgacagtggtgtttctcataataggtttaatgtctttaatgttaataaacagggggcagtacttaataattcgcaagttgataccaatagtcaattggcaaaaaaaatatctgctaataaaaatttaaaaggtaatacggctaatttaattattaatgaagttgtcggtaatagtcgttcacagttattaggtaaattagaagttgcaggacaacaagcggatgttttaattgctaatcctaatggaattagttgtgatggttgctcatttattaatactccatcaattactctcacgacgggaaagcctcaatttagccctcaaggtacctattcggcactagaagtaaaaaaaggcagtattgttattggtaagcaaggtatgaatgccgatttacaaaattatgccgatattattagtcgtagtattgaaataaatggaaagataaatgctaaaaatctctctttaatgcaagggaataaccatattgatttcggcaaagggacagtaaatagcattaatggagaaggtgtaaaaccgaccgtcgctattgatacaaaagcattgggtggaatgtatgccaatcaaatacgcttagttagcacagaaaaaggggtcggtgttaatttaactgatattcaaacaaagcaaaacagtatcaatttaacagttgatggcaaaattacctttaatggcaatattcaatctgagcaagatattaatgttagtagcaaagcactacaaatgaatagtaatgccagcttaaaagcgcaaagagatattacattagcaactaatacgctaacgaatcatagtgatattatcgcagaaaaggatatgcgtttattcgtagataaattcactaataaaggtgaaaaagcgcttattcaagcaaaagataatttatggatacaaaaaaatgcacagggtgaaccaagtagtttaattgaaaatcaatcagccacgataaaaacagaaaagggtgatttgattattagaaccaagaaattggttaatgaatctattactcctttatttaaagaaataaagcaagagcctgattctacatcgtctataaatataggtactcattttcttcatccttacaatagtcctacgaataatttccttataattattttacttgctgaattaaaagaactctctgataaaaagtggtttgatatattagatttaaaaaataatggaggtgttaatgtagaacgctcattatttgaaaagaataaaaagtatgttcctagtgttatttattctggtaaaaatttatatatacaatctaacgagttttttaatacccaatctgatatttttgcaactaatgatcttatcgcaacgggaaacaatgcaaaagtatactattatcggtttggacaccttaataaatgggatctttattctcatgataatgctcatgttttttatcgagatgatgtaaataaatataatattgatgaaactaaatttcaaaaaatagttcattttattccctttactaaaactggaagtcattatgaatttattgtagatagtgcttctgaatatatgataaaagcaggtaataatttagttttagattttaaagatagtatagcgttagaacgtaaatttccatttttagaaaaagaaattaaaaagtatagaagaatatctgattttgaaagtactatattagctaaaaatatactattaaatgctaataatttaaatatctcattaaatttaaaatcaagtaactctttatctgttattgctaataaaaatataaatataagtaattcaaatttattatctggtgatattataaatttaacagcaattgataatgttaattctgaaaatatagatataacggcaaagcatttttccatcataactaagaatggagatattaattattcatttagccctatagcctcttatactctgaatagcattaaggcaccatttattgatgtgtctgaaaaaatagacttttattcaggtaaaaacatttacatttcaaatgtaataattaattaa

SEQ ID NO: 305966 - DNA, 204 bp, Proteus mirabilis; identical to SEQ ID NO: 301349

SEQ ID NO: 305967 - DNA, 828 bp, Proteus mirabilis
atgacttattcacgtgaagtattactcaaaaaatttaatgacatgatcgcacgtaaagagcctattattggtggcggtgcgggaacaggtctttccgcaaaatgcgaagaagctggcggtatcgatctgattgttatctataattcaggtcgttatcgtatggcgggtcgtggctctctggctggattattagcctatggcaatgccaatgaaattgttatggatatggcaaaagaagtattgcctgttgtaaaacagacacctgtgcttgccggggttaatggtacagatccattctgcaattttgataagtttttagatgacgttaaagccatcggttttgctggcgtacaaaacttcccaaccgttggtttaattgatggtaacttccgcgctaatctagaagaaacaggtatgggttatgctcttgaagtagagatgatccgcaaagcacatgaaaaaggcttactcacaacaccttatgtttttagtcgtgaagatgccattgcaatgacacaagccggtgcagatattattgttcctcatatgggtttaaccacgggtggcaatattggtgcagaaacagccgttactttagatgattgtgtcgcccttattaacgattgggcaaaagcagcaaaatccgtacgttctgacgtgattgtactttgtcatggtggccctatagcaacaccaaaagatgcgcaatatatccttgataactgtcctgattgccatggtttttatggcgcaagttcaatggaacgtttaccaacagaagtcgctttaactgcaacaacaaaagagtttaaaaatattaaacgctaa

SEQ ID NO: 305968 - DNA, 1212 bp, Proteus mirabilis
atgaaacagtatgctggcttcatttatattgcgactacgcttgatactaaaagcgctgaaattttttatgtcagtgaattaataaaaaaagcaggccttcctgtcaaaaccgtagatttgacaaccaaacctacagcattagaaagagaagctgacgtcacagctgcacaagttgctagttaccatcctgatggaaaaaacgccgtgttttgcggtgaccgtggaaaagctatcgcagcaatgtccgtcgcttttgaacgttatttaacccactgtgacgatgtcctcgctattttaggattaggcggctcagggggaacagcattgattacaccagcaatgcaatctttgccaattggcgtacctaaattgatggtatcgactatggcttccggtgatatctccggatatatcggcgctagcgatatttcaatgatgtactccgtaacagatgtatccggcttaaaccgtatctctcgtaaggtattgagaaatgcggccaaccaaattgccggcgctgtttatttttaccaagaagaaaatagtgttgataaaccagctgttgcattaacaatgtttggtgtaactacgccttgtattcaacaactgactaaaaaacttgaaaataattatgactgtttagttttccatgcgacagggagtggcggtaaagccatggaaaaactgatagacagccacttacttcatagtgttcttgatctaacaacaaccgaagtatgtgattatttatttgagggtgtccttgcttgtgatgaagatcgttttggtgccatcgcccgcactaaaacaccttgtatcgtctcttgtggcgcgttggatatggtgaactttggtcgccctgctaccgtacctgagaaatataaagatcgtcatttctatcaccataattcgcaagtcaccttaatgcgtacaacaccaagggaaaatcgtcaaatggggatctggatcgctgaaaaattgaatcagtgtgaaggcccactgacgtttatttttccacagggcggtttttctgctttagatattgaaggggggccattctgggatcctcaagcaaaccaagcattttttgatgcatttataacaacatttaaagagaccgagactcgtcaattagtcatcagtccttaccacataaattctgctgaatttaatcagcaagtttatgatttacaccaggaacttatttgctaa

SEQ ID NO: 305969 - DNA, 636 bp, Proteus mirabilis; identical to SEQ ID NO: 296596

SEQ ID NO: 305970 - DNA, 1026 bp, Proteus mirabilis; identical to SEQ ID NO: 301357

SEQ ID NO: 305971 - DNA, 3687 bp, Proteus mirabilis; identical to SEQ ID NO: 305046

SEQ ID NO: 305972 - DNA, 1104 bp, Proteus mirabilis
atgaacgattcttatgaaggtaaaaacggcaaagtaaaagtgatgtatgtccgcagtgaggacagtgccgataataaacctaaaaaaccatcccgccgccctaataatgctcgtggtgatactgaccgtagtcatcgtcgtgacgataaacgcggtgataacaaattttctcgtcgtgatgaacgtggtgcaggtaagtcttcaggacgtaatccatcacgcagtggatcaagctcctcacgtgataacaatagtgaaggtggtaattattctccatggaaaacgatttctcgtcctggagatgagccattaaaagagcatgatggaattaccgggaaaagccaaatagatccagaacagcttcgccgtcagcgtttagaagagacgcgtatctatggtgaaaatgcttgtcaggctatgtttaaaaaccgtccagaagctattgtccgagcttggttcttacaagaagtaacccctcgttttcgtgaagcgttaaaatggatggcggcaaatcgtaaagcttaccatgttgttgaagaagaagagatggttaaagcggcgcgtacggatcatcatggtggcgtttgtttcttaatcaaaaaacgtgttggtcatgatgcgcaaacctatttaaaagatgcaccaacaaaagattgtgtcttagcgcttgaagatgtgggtaatccacataatgtcggtgctattatgcgtagctgtgctcattttggtgtgaaaggcgtcatttctcccgactcatcagtgttagaatctggggcagcagtgcgtaccgcagaaggtggtgccgagtatattcaaggaattgatgctgataattttgcccaaacattagagcagtttaaacaggctggctataccttagtgacaacctcaagtcacaaaggaagtgtgccactagcaaaagctcaattacctgaaaaaatggtattaattttaggtcaagagaaagatggcttaagtgatagcacgttaaagcaaggagatatgagcatttacattggtggtacaggccatattgaaagcttaaatgtctctgtggcttctggcgtgttattggctgaatggtggcgtcaacatcacggctaa

SEQ ID NO: 305973 - DNA, 1026 bp, Proteus mirabilis
atgaaggtaacacaaatccttttttgtaataatgaaaatagtattacagataatgaaataaaaaacctatttaatatctttgatactcaggtcattaataatagtagagtggatgttaatcttgagactgccaaaaatcaaataaataaactcgctaatgcagttaggaatggaagctcaaaagatttggattatttagtaaatatcatgtttcatgatgatataaaaataagcttatatgcaactaatcagctctacttaatttatccaaaattaaacaactcgataagagaagatattaaagaattagtcaaattactctatgaaataaaaataaaagaggatcaagagtattttaaagaacgacctttattaagtgcaatggcttgtgaggaagcgattgctagacaaaagggaaaaggggagaatgtttttatctcagcggttgataattatttaaatataaaatgtaatgatagcgtattggccaatagtaatgaaagcgtaagtaataataatcgatatatatcttcatctgaattagagtcttgggcgtcatttcaaccctatcagtgtgatatttgttcctatgaatcaatacttaaaaaaatagaaaatagcaaaggatccgcggagttaaaaaattatgtggttttagtcaataataaccattgggttgcgttattgacttataaagatagctgttttttatgtgattcattgccctcaagcaaaaaagatgaacgtatcaatatagaatataatctacaagaaaatgtacctaatggatgtggtcttttggcgcttaattatattgatagtttacataatgaatggaataaatttaatcatgaaaaagaagatgatttaatatccacaatagaaacagtattacaaaaaacaggaaaagactttctaaacctaagttgtggtgagcaaaccacatttaatcatgatgttaggaaaaaattgattatggatacacttttttgtattgttaaatctaatgatgaatggctatattag

SEQ ID NO: 305974 - DNA, 543 bp, Proteus mirabilis
atggttccttaccaacccgtattaaccttttggtttgaagaatgtaccccaaaacagtggtttcaaaaggatagcgcttttgataaagaaattaaggatagatttggtgagctatgtattagcgcaagtcgcgcagagcttgcctcttggcgcgagagcattgaagggcggttaggggaaattattattctagaccagttttcacgtaatatttggcgtgatacaccaaaggctttcgcccaagataatatggcgttaattcttgctcaagaagccattcggttacccgaatatctcaccctgacaccagtaaaacgcaaatttctgatcatgccatttatgcattcagaatcacaaaaaatccatcaagatgccattgcgttgttttcacaattaaatgatgacgacacttatcaatatgaattacgccataaagagattatcgataaatatggtcgttatcctcatcgtaatgaaattttagggcgtacttccacaccagaagagttagcgtttttacaacaacccggctcctcattctaa

SEQ ID NO: 305975 - DNA, 525 bp, Proteus mirabilis
atggttcagggaatatctaactcaaataagatgacgctatctagtgaaaaaacggaaagtgatattccaactgagtcttatagcgtaaataggtatttgaataaatgtcagcttacacctgaaagtataaaaaaattagcagcgaaattagatatacttaaaaaaatatcgagtttaaaagacaatattaccagtcataacgatgagcaagatcttcaggaagataaaacgccagaaaattatgaaggtttgctattaagtcatcggtatttattatcatctggtggttctaaaactaaaaaaatatctttagatataaatataaaaaaaggatttaactctttatatataggaagagaagaaaaaaaagcacagctcactgatcagagaataaataaaaaaacatctaagatagataaatacaaactacaaccccatgtaggaatagaagaaaaaacaatgttaaaacgatggttaatgaattcttatcggcaaaaaagagttcagtatttcctattttcgtag

SEQ ID NO: 305976 - DNA, 336 bp, Proteus mirabilis
atgccaccattaaccgtcgttgaaatggcaacaataggctcagccaaggcattacatatggaagataaattaggctctttagaatcgggaaaacttgctgatattattgttgttgatactaaagctcctaatatggtgcctatgtatagcccatatgcagcattagtttatggtgcgaatggaagtaatgttcgtcataccattgtagatggtaaaattttgatggaagatcgccaactgttaaccgcagatgaacaagcgattatcagtgaagctcaaaatttcgcgaataaagtacgccaaaccgttgttgatagtggtgaagttgttaaatag

SEQ ID NO: 305977 - DNA, 456 bp, Proteus mirabilis
atgccgatatgggttgatgctgatgcctgtcctaaagttattaaagagatactttatcgggcagcagatagagaaaaagtggtgatcacttttgtggcaaatcagcgattaagtatacccgcatcgccttatttgcgcacattgcaggtttctgcaggttttgatgtggctgataatgaaattgtacaacgtgcaaaccaagatgatttggtgatcactgccgatattcctttagcggctgaagtgatcgaaaaaggggctattgcgctaaatcctcgaggtgaacgttatacagagtcaacaatccgcgaacgattaaatattcgtgattttatggatacgatgagagcaagtggcattcaaacaggaggaccggcaagtttatcacagcgcgaccggcaactttttgctaatgagttggataaatggttactacagcaaaaacgtaaaaaataa

SEQ ID NO: 305978 - DNA, 462 bp, Proteus mirabilis; identical to SEQ ID NO: 300354

SEQ ID NO: 305979 - DNA, 495 bp, Proteus mirabilis
atgacttcagtcacttctcgctgtatctcattgttattattaatcacattattattaatacttcctctcgcatccaatactttttgttcaccttcaattgtgctactttcagattgtatagtttggtctgcaacccttgctaatggctctgccaaagatgaaatagtatttcccatcactatggttggattggaatgcccaataagctctttccccatccctttaatagaaaaagtggctcccataccatgtatagccatagaaataccagcactagtaattgcagaaccaatcataatattggcttttttattaagattatcttttactttatcggctatatccaattcaatgttcattagcatcacacccatttctctggatgcttcaaatttttttatcattgtttctaaatatttaacaatgagatctattaattttatcatatcgtctgaaacaaaattaaaaatccccgttttttctattttagcatga

SEQ ID NO: 305980 - DNA, 222 bp, Proteus mirabilis
atggttaacttacatgtatttggaaaaaattgtcccgaacattggcgccacctattattcaagcaatggttaactacacatcctgatgatttagccaattatgcggcgattaaacagcttgctaagcataatgtaaagacgactcaagattataacctgaaaaaacagagccttgcacgtacaatttatcagaagatttttacctcattgattggcgactaa

SEQ ID NO: 305981 - DNA, 432 bp, Proteus mirabilis
atgggattagatattgtcatgtttaaagatcaatttacaccacaacaaaaaatggatatttgcacttttgaagaaggtgatccgacggaaaacccttgggttaaagggaaaccggcccaaatacacattgaaattgtcccccataatcctaattggcttatacaatttaatgaacaaaaatcgttaattcagaatgcattgtcagatatagcattatcaattgagcacataggatctactgcggttgcaggattggctgctaagccaataatcgatatcgatttaattatagaaaatcctaaagatgaatcatcttatattcctcaattagaagcattgggctatgaactcattattcgtgagccttcatggtatcagcaccgtatgcttaaacctgtctcttatacacatctccgagcccacgagacgtag

SEQ ID NO: 305982 - DNA, 1113 bp, Proteus mirabilis
atgtttaaaaataatgttcgtggctttatcccacctgaaaaatgggataatggaattaatgcatttttactaaattataatttcacaggaagaaatagtaagaaatttaaggataacgttgataataataattattttttaaacttaaatcctggtattaatcttggttcatggcgatttagaaatgaaagttcatggaactatgccagtggtgaaagtaagcaaaataaatggaggaatataagaacatatgtacaaaaacctattattccattacgtgctgaattaacccttggtgactctttttctaatggaaccatttttgatagtcttggttttagagggattaagctagaatctgatgataatatgttgcctgatagcatgagaggatttgcacctacgataaagggtattgcgaatagtaatgctattgttacagtcaagcagaatggttttgttatttatcaaatttctgtacctccaggtgcatttgaaataaaagatctctatgccacatcaagtagcggtaatttagatgtcacaatcaaagagaataacggtaaaattacacaatttgttgtaccttattcaaatgtgcctattttacaacgtgaaggacgcttaaaatacgaattgattggaggggaatttcgtagcggagcagattatcaagataaacctaattttggtcaattaagtttagtatatggcttgccttataatatgacgttatatggaggaagccaattttcaaataattatcaagcctatgcgattggtttaggtggtaatctaggcacctttggggcgatatcagcagatgtaatacaggcgaatagtatattgccaaacgatgagcataaaaaagggcagtcattccgattactctatgctaaatcgattaatagcacaggcactaactttcaaataatggggtatcgatattcaacgcaaggctattataccctaaatgaagttagttataaaaaaatggcagggcgtgaaatagtaacagataatggaataataagagatgaggataacttatctaactactataatttaaattattgtcttcaaggagagttcctgttagtcccacttgattga

SEQ ID NO: 305983 - DNA, 153 bp, Proteus mirabilis
atggaaaaggttcaaccaaatgataaaaggaaaaatcggtttagtcaggcgcaaatagaactatggaaaaaggagcaagaagaccaagaaccacgagatgcctggcttactgaaagtgaagaggcgataaaacgtcacatgaaagacttatag

SEQ ID NO: 305984 - DNA, 198 bp, Proteus mirabilis
gtgggggggtttgagtgggatgattttgatggaattaataatactaataatgacaatatggattctaaacgtaatctttctgaagtaagtgaaattattcagggaaaattaaataaatatgttaaaggcgatggaatatctgatttaacctctattctggaacaaatagaactagataaattaggaggaaaatggtaa

SEQ ID NO: 305985 - DNA, 894 bp, Proteus mirabilis
ttgctttggggggcaaaatcaaaaacgcatcagaaatatgaaaatacagtatctaaatatacggaagtaaataattcagatagtgaaaatggtgttatttctataggaagagaaaaaacatctaccgagccaatgataaatagaagaatcacaaatcttgcaggaggagtaaaatctacggatgctgtgaatatggctcaattagatattgttactaaagctataggcatgagtgaagatgaaattaaaaatatagaaaaataccctaattcgtcgttagttgcaaaaataaaagcagaacagagtgctcggattgatacattaaatatagaaaaaggtgctcgaaaacaaggtgacataaacacattaaaaatggcgaatcactatactgataataaagttataagtagtaatatacgtactgataatttaattagcgaggagcagaaatctcgtcagcatagtgatgccgtattatcccagcgtttaaatgaggaaatggaatatcgcagaaaaagcgatgaagaaacattagagagtgcgaatagctacactaattatcgcattaatacattagattcaactatcgataaaacgttaaataattttcaacagaatactgaacaacgattttcacaaatgaataataaaattaatcgagttgaaaaacgtgctaattcaggtattgctggagttactgcaatttcatctattccttatgttaataaggagcatttttcatttggcatgggagtaggacattatcgtgatgctcaagcaattgctgctggagtgcaatataaggtggaacagaatactaatgttcgtgttaatgcatcatggaacaatggtggtgatacaaacttaggtgctggttttgccgttggctggtaa

SEQ ID NO: 305986 - DNA, 156 bp, Proteus mirabilis
atggaactaaaatgcccttattgtgattcaaaaaatgtcatcagagaagtaattggtgggcaaaaatctggtgattggcattgtaatgattgtaatttttcatttagtaaagagtcggcagagagagctgctaagcgaagtgaaagcgataaataa

SEQ ID NO: 305987 - DNA, 381 bp, Proteus mirabilis
atgtcattcttattaaaaaataatctaacttatggttatggtagcttttggtattcaatgggaatgtctgtaaattggctttcgaatgatcaaatacatgttactcctgtattttttaatcctaaaactggaaatgtatactttgaatggactagaatccaaactttaacaacttggcatacaaaagagtttattgatggaaaaccacaaagacaattcttagcaataacaccagggcaaactggtggtgatacatgccctgatgttaaaatatgtgtagaaggcgcgcaaaagcaaattggcaaagctgatgagatattgaaatataacaatactatatttcttgtatataataatcctattattacagatataaaatag

SEQ ID NO: 305988 - DNA, 240 bp, Proteus mirabilis
gtgggggggggattagagcctggccttgctgaaaacattgaacaacaagccttagatgcggtacgccgtcaagagatgtcagggggcgtgccagtactcttggttaaccatgcactacgttcgctgttatcgcgctttttacgccgtagcttgccacagttagcggtattatcaaatatggaaattagcgaaggtcgtcatattcgtatgacatcaatgattggtgggcaaaataattaa

SEQ ID NO: 305989 - DNA, 834 bp, Proteus mirabilis
gtgcaggctgccgcacaggcagatgcagatgcgggcagcagcaataccggcgcgcgaacctctaataagcgtaaagaaccttcgcctgaagaactggctatgcagcgtcgtctgggcggcgagctggcccaaactaatcaggcggccacaagcaatagtcccggagtgcagccccaggacaacgaaacaagcgaaggtagttcggcactcgctaaaaacctgactcctgcaaggctgaaggctagccgcgctggagtcatggctaatcccagcctgactgttccgaaaggcaaaatgatcccctgtggtaccggcaccgagctggataccactgttccgggtcaggtttcctgccgggtttcacaggacgtttactcagctgatggactcgttagactgattgataaaggctcatgggttgacgggcagattaccggtggtatcaaagacggccaggcgcgcgtgtttgttctctgggagcgtatccgcaatgaccaggacgggacaatcgttaatattgacagtgccggaacgaactcactcggcagcgcggggattccgggccaggtggatacccatatgtgggagcgtctgcgtggtgcgatcatgatttcgttgttctctgacaccttaacggcgctggttaaccagacgcagagtaataacattcagtacaacagcacagaaaacagcggtgagcagctggcgtctgaagcactccgctcttacatgtctatcccccctaccctctacgatcagcagggtgatgcggtgagcatttttgttgcccgcgacctcgatttcagcggcgtttatacgctcgcagacaactaa

SEQ ID NO: 305990 - DNA, 996 bp, Proteus mirabilis
atgactgatgcagctttctatcaacttggcccactgcgcgagtatttagaagatcctactgtttttgaaattcgcattaaccgctttcaggaagttatctgtgatacgttcagcggccgcagggttgtgcagaacgcggcgattacggcagattttattaggaaccttgctaaatcgttggtgagcagcaacaagctgaccatgcaggccattaatgacgtgatcctgcctggcgggatcaggggcgttatctgtctgccccctgcggtgattgacggtacaacggccgtagcgtttcgtaaggatttggcggcagataaaaatctggagcagctgaccagcgaggggattttcagtgactgccggaagattaccggcagcaagcaaagcctaacggatgatgatttttttcttaaagagctgcacagcagcgaaaaatggcccgcattcctgcaaaccgccgttgagaagaaacgcactatcgtgatctgcggtgaaaccgggtcggggaaaacggtactcacgcgcgcgttgttaaaatcgctacataaagacgagcgcgtaattattttagaggacgttcacgaagtcacggtcgatcacgttatcgaggccgtttatatgatgtacggcgatgcaggaaagatcggccgcgtcagcgccactgatgccctgcgagcctgtatgcgtctgacaccgggccgtatcatcatgaccgagcttagggatgatgctgcgtgggattaccttaaagcacttaataccggccatccaggcggtgttatgtcaacgcacgctaactctgcgcgcgatgcctttaaccgtattgggctgcttatcaaggcgacccctatcggccgtatgctcgatatgagcgatattatgcgaatgctctactccaccattgacgttgtggtgcatatggaaaagcggaaaatcaaagaaatttattttgaccctgaatataaaatgcagtgtgtgaacgggagcctgtaa

SEQ ID NO: 305991 - DNA, 531 bp, Proteus mirabilis
atgaaaaagttagcaacctggcttctggtcgcaacatttacgacagccgccctgcccgcctttgcgttggaaccatccgttcaggttggctactcgcctgaaggaagcgcccgcgttctcgtcctgagcgccattgactccgcaaaaacctctatacggatgatggcttattcttttaccgccccggatattatgaaggcactggtagcagccaaaaaacggggagttgatgtaaaaatcgtggttgatgaaaggggcaatacgggacgtgccagcattgcggccatgaactacatagcgaacagcggcatccctttgcgtactgacagtgattttcctatccagcatgacaaggtgatcatcgtggataatgtgaccgttgaaactggcagctttaatttcaccaaagcggccgaaacgaaaaactcggagaatgcggtggtgatctggaacatgcctaagctcgctgaatcattcctcgaacactggcaagaccgctggaatcgggggagagactaccgttccagctag

SEQ ID NO: 305992 - DNA, 318 bp, Proteus mirabilis
atgtccacgccgaacgtggcagagtcttaccagagcaagttcaagggccgcaacggtcttgataaggttctgggcgacagtgaaacgacccgtgtgaagattaactctgtgatcctcgataaaccgcacggcgtagcaacgatacgctttactacggttcgccgcgtgcgcagcaatcccgttgatgatcagccgcagcgctggattgccattatggggtatgaatataaatcgctggcgatgaatgctgagcagcgttatgtcaacccgctgggtttccgcgtgacgagttatcgcgtcaacccggaagttaactga

SEQ ID NO: 305993 - DNA, 1035 bp, Proteus mirabilis
gtgtctgaacatgaaaagtggtttgatgaagtacaaccatcccatgaaagattaaccgagtcagtggtcactattatagagaatttactcaagtcaaaaggtgttgattacttatccatttcaggcagaactaaagaaaaaaaaagtgctttagagaaaatcgcaagaaaaaaatataaagaaccatcaaaagaaatgacagatttatctggaataagaattatcgtttttattgaatctgatataaaaaaagtttctcaaataattgaagatgcttttaatattgataaagaaaattccagtaatcaagataaaaaactatcagtagatagaataggttatcgttccgttcattttgtttgtgatattggtgatgagcgagctagtttacctgagaatgatgggcttaaaggtttgaagtttgagtttcaagtaagaacaattttacaacatgcgtgggctgaacttgctcacgataatagttataagtttaaagaaggattacctccagaccttgaacgccgtttatatttatatgctggaatgttagaaatcgcagatagaggactcaatgaattatctcaagaagttacagagtatagaaaatctattcatgtaggtataaatagtggtgatcttgagcacgcgatagatataattagcttagatgagtttatgagaaactgggcaaataagaataatataaatcttatgtttactccagagccttctgtggatatttctacggttatagatgaattacatgattttggagtaacgactataaaaagattaagcgatattatcccagaagactatgccaataaaattaaagtccttccggaatcaccgacaataatggggattattagagattggatgatcctaaatgatttagagctatatcatgagattgctgattttgcatggcaaatagctgaacgtgatttacgttactttgagcagattatggattctaatacatatgataaattttgtaatgttttttcagattggatgatagataaagaataa

SEQ ID NO: 305994 - DNA, 1848 bp, Proteus mirabilis
atgttaagtttttttgaagaaggtgttaattattcaaataacacattgttaacaaatgacaactttattaactttgattatgcacgacttcagacagtaaacttacagtaccgtgatcattataatttaaagcttatatataatgatataatcaatggtaatgatattaacaaaaaatacattttgaatttatttttatttttagttcatcttgattatagtttcaaaaataaaaattttaaaagctatacattaggtgatggaaatgatgatattttacactcaattactgaggttgatattgataatttaattattatggttgataacattcagtatccaaccttaaaattcaaagcgtatgattttatttcaagcagaagaagaaaggagaaattgaagtatattaatctggcattaaatgaagcaattaattttaatctgaaacatgaagagtggcattattattatggcatagccatgaaaaaagccgcaaatataagcaatttaaataatcccgacattaaaattctatctaacaaactaaccaataaaataatcaatattataaccgatgaaactaaaggaaaaataccttacgacataaattacaattggtgctttacattatttacttttttacatacaactcaaataactgaatatcaaaactggattccaatatttaactctttgatagaaaaattgattgaaactaataatataaatcaagctaaagactatttagatttattatcatgcatttaccgaaaagaaaaaaatgaacacttggaatattacacatataaaagaataggagatttatactatgacttggcatcaaaatcaacaggtatagaatcattattccttttcaatatatctttattatatttcagaaaaatccctaaaaaagatagggatacatttaatataaatgaaaaaataaaaaaaatagaactaagtttgcaaccagaaggaagaaatacaatagataacttaaaaaatgcaactaaaaatttcaaattccctagagaatatactgagtacgtaaattactgtgtagaacaaatccgaaataaaagcagttttttagatcagttttgttccttactatttatggacagaaccataaaaaaatcaaacatattagaagaagcaaaaaaacaagcaaataatgccattttaagacatttatctgttaaagtaaatctagctaaagatggtagagtcataaatcgaatagcaccgttaaatttacatggtgattctatggacacaaatgactacactgatgattgttttatgataataaaaattcaaacctctctcactgaacatttaataatttctattattgatgaaattaataagaaatataacaacaccgttgaattagaaaatagtattaattatattattgagcactctctttttgtaccaactgaacgacaatatatttttaagaaaataattacattaggattaaaaaaagatttttctacagccatttacttactgtgtcctcaattagagaatttttttagaagcatactaaaatatagtaatgttagcacgaccaccattaactctgatcatgaagaaatggaagcaggtttaagtactttattagacaaaaaagaagcctgtgatattttcgatgaaaaccttctatttgaaatgaaaatgctattcactgagtctggcggaccaaacctacgcaatgaagtagctcatggactattagatgatattgatgccatgcaaccaatagttacgtatgcatggtggcgttttgttcgcctaatagtagatggttgcttctgtaaaattacagattctgaataa

SEQ ID NO: 305995 - DNA, 378 bp, Proteus mirabilis
atggatattcgtgttttacgctattttattgaagttgttcaattaaatggatttagccgagccgctgatgctttatttattacacaaccagccattagtcgcagcattaaaaaattagaggatgaattaggcactgttttattaataagagaagtggatggggtaaaattaactgatgacggtgctattttatatgagcatgcaaagcagatcctcgctcaatttaatagtatgaataaagcattaaatgataaagatgaacctttaacaggcgccttaaatgtcggattacctcctgttatagcctcaacctatttcgctgatattatcatggcgtttagctctcgccatcccaatgttgaacttaaaattttttga

SEQ ID NO: 305996 - DNA, 540 bp, Proteus mirabilis
atgttgaacttaaaattttttgagctgggcaccaaacagatggaagatgcgatgttagaaggcacggtagaaactgcggcagtgatgttaccttttaatgataaagattttgaattaaccattttttcagaagatcacttgatgttattagtagcacaatcccatcctttggctaaagataagaaggttaattttaaacagcttattacagagcggtttatctttttttcagaagattttcgtattaatgatttggtacgtagtgcttgtgggatttataacactgaaccacaaattgtggggagaagtaatcatttagatttaattattgcaatggttaaagccggtgtcgggatcacactgttgcctaatagcatgtgtaataaatatcctatcgatgatttagtggttattcccattacttcccctaggttatcttatcaattagctttagccaccaatcaaaatagttatcaaagccgtagttgccaagcatggaataaattagcaatagagaaattaatgaaagagaatatttaa

SEQ ID NO: 305997 - DNA, 2778 bp, Proteus mirabilis
atggataaaatcgaagtacggggcgctcgcacccataacctaaaaaatatcaatttggtcattcctcgcgataaacttattgttattacgggactttctggctcaggtaaatcctctttagcctttgatacgctttatgcggaaggccaacggcgttacgttgaatcgctttcagcttatgctcgtcagtttctttccttaatggaaaagcctgatgttgatcatattgaagggttatcgcccgctatttcgattgagcagaaatcgacatcacataacccacgctcaacggtcggcaccattaccgagatccacgattacctacgtctattatttgcacgtgtgggtgaaccgcgctgtcctgatcacgatatccctttagcggctcaaacggtaagccaaatggtggataatgttttagcgcaacctgaaggtaaacgcttaatgttattggcgccaatcgtaaaagagcgcaaaggtgagcatgtaaaattactcaataatcttgctgcacaaggctatattcgtgctcgtatcgatggtgaagtgtgtgatttatcagatccccctaccttggagttacagaaaaagcacaccattgaagtggtcattgatcgctttaaagttcgtgacgatctggctcaacgtttagcagaatcttttgaaacggcgcttgaattatcaggaggcacggcagttatctctgatatggacgatagcagtgctgaagatattgttttttctgcaaactttgcctgtcctatttgtggttatagcatgagtgaactagagccacggttattctcttttaataaccccgcaggtgcgtgtcctacttgtgatggtttaggggttcaacaatttttcgatcctgatttggtgatccaaaatcgagaaatttctctggccggtggtgcgattaaagggtgggatcggcgcaatttttactatttccaaatgttgcgctcattaggcgagcactatcattttgatgttgaagctccctttgactcattacccgacaagatccaaaaagtgattttatccggttcaggtaaagaaaatattgaatttaaatacaccaatgatcgaggggatgttgtggttcgccatcatccttttgaaggggtattaaataatatggagcgccgttatcgtgaaacagaatcgagtgcggtgcgtgaagagttagctaaatatattagcaatcgtccttgcgcctcttgtggtggtactcgcttacgtcgcgaagctcgccatgtgtatgttgaaaataccacgttacctgaaattgcggattacagtattggtcatgcgatgagctttttccaaaatctaaaactcagtggtcagcgagcgaaaattgccgaaaaagtattaaaagagattggtgacagattaaaattcttggtcaatgtgggattaaattacctcactctttctcgttcagcggagacattatcaggcggcgaagcgcagcgtattcgcctagcaagccaaattggtgctggattagttggggtaatgtatgtacttgatgagccttcaattggtttgcatcaacgcgataacgatcgcctactggaaacgttgatccacttgcgtgatttaggtaacacggtgatcgtcgttgagcatgatgaagacgctatccgtgccgctgatcatattattgatattgggccgggtgctggcgttcatggtggtgagatagtcgctcagggtacactggaagatattgttaataatcccaactcattaaccggtaaattcttaagtggcgaacgccgtattgctatccctgaaaagcgtgttcctgttgatcgcgaaaaaatgctcactattttaggggcgaaaggtaataacctaaaaaacgttaatttaaaaatacctgttggtttatttacttgtattactggtgtatctggctcgggtaaatcaaccttaattaatgatacgttattccccattgctcaacgtcaattaaatggcgccactaatagcgtgccagcaccttatttagacgttgagggattagagcactttgataaagtgattgatattaaccaaagtcctatcggtcgtacgccacgttccaaccctgcgacttataccggagtatttaccccgatccgtgaactttttgctggtgtaccagaatcacgaactcgcggttatacgccggggcgctttagttttaatgtgaagggggggcgttgcgaagcttgccaaggcgatggtgtattaaaagttgaaatgcactttttacctgatgtgtatgtgccttgtgatcagtgtaaagggcaacgttataatcgtgaaacccttgagattaaatataaagggaaaaatattcacgaagcgctagatatgacaatcgaagaagcaagagagttttttgatgcggtgcctgcattagcgcgtaagctacaaacattgattgatgtgggactctcttatattcgtttaggacaatctgccactacgttatcgggtggtgaagcacaacgggttaaattagccaaagagttgtcaaaacggggtacaggccaaaccctctatattttggatgaaccgaccacgggtttgcactttgccgatattgagttacttcttgatgtgctccatcagttgcgtgatcagggtaatacaattgtggtgattgagcataacctcgatgtgatcaaaaccgctgactggatcgttgatttagggcctgaaggggggcagtggaggtggtcagatcttgatatccggtacgccagagcaagttgctga

SEQ ID NO: 305998 - DNA, 849 bp, Proteus mirabilis
atgaatattgaaaggaaaatactagtcaaactaaaaaatatacattcacttgatcaaaataaaaaactattacgctctggttaccataatcaatataatacatttttatctaatatttcttttgttccagtattatcatcatcacaattaccacctaaaaatcatctttctcttacatcaaatcatttaaatgattactattatttaaatttacctaatgataacacatatacattagatgaaattattaaaatattaaaacaacatcctgatatagaatatgtgcaaaaaattccaaaattacctgtacagccacctaatattacgccggatttaactcgccatcagcattatttaaaaaccccaaaaataaaatcaaatgaaataactgggttaggtattatagacgcttggaataaaaatgcttatggacaaggtatacaggtggccgatattgagtgggattttgatttatcacatcccgatttgttagctaataatatcacgccactttttcctttaactgaaaaaaccgatcaagccgaccatggtacggcagtggcggggttaattatggggaaaaaagacggtaaaggtattactgggcttgcttataaattagatatgttttatgccatatcagaattaagcagtggtcgtattgaagcaattattgccagtaaacagaaattacacgcgggtgatattgttttatatgagatgcagacagtttgtgaacatcatgcttatgttcctgctgattatgaaatgcatatctgggaggcaactcgtacattaacagaagcggggattattgtgatcatggctgccggcaatggggggggttga

SEQ ID NO: 305999 - DNA, 333 bp, Proteus mirabilis
atgtttgttgctgcattaatttttgttttaacgatcaccttggttatctggcagccgaaagggttgggtattggttggagtgcaacggccggcgctatattggcactcctttttggtgtgatcagttttcaagatattccgactgtttggaacattgtgtggaatgccacagcgacatttgttgcagtaattattattagcctacttttagatgaaagtggcttttttgaatgggcggcattacatgttgccaagtggggggggtgggaaaggaagattactattcagttatatcgtgctacttggtgcaatggttgctgctttatttgctaa

SEQ ID NO: 306000 - DNA, 1107 bp, Proteus mirabilis
atgaaaaatgttggttttgtgggctggcgtggtatggtcggctccgttttaatgcaaagaatggttgaagaacgtgattttgatgggataaaccctgttttcttcaccacttctcaattaggtgaagcagcacctgcttatggcaatcatcgtagtacactgcaagatgcttatgatattgatacgctcgcctcactcgatatcattatcagttgccaagggggtgattacacccatgatatttatcccaaattacgtcaagcgggttggcaaggttattggattgatgcggcatctgcactacgcatgaatgatgatgcggtgattattcttgatcccgttaatggtcaacatatccaagatagcctcaataaaggtattaaaacctttgtgggggggaattgcaccgtaagcttaatgttgatgtctttgggcggactttttgctaacgatttagttgagtgggctagtgtctccacttaccaagccgcatccggcgcaggtgcgcgtcatatgcgtgaattattgtcacaaatgggtgcattacataaccaagtggttaaagagctagaaaatccagcttcggcaattttagatattgagcgcaaagtcactaactttactcgcagtggtactatgccgacagagcaatttggtgttccactggctggtagcttaattccttggattgataaacaattggaaaatggccagagccgtgaagagtggaaaggccaagctgaaaccaacaagatcttaaacaccggttcaaatatcattcctgtggatggtctttgtgttcgtataggtgcattacgttgtcatagccaagcattcaccttaaaactgaaaaaagatttaccggttaacgaaattgagcaattgcttgcccaacataatgattgggtaaaagtagtgccaaacgatcgtgaattaacaatgcgcgaattaaccccagcagccgtaacgggcacattaagtacccctgtaggacgtattcgtaaactgaatatgggacctgaatttatttctgcctttacagtgggtgatcagttgttatggggtgccgcagagccactccgtcgtatgctgaagatcttagcttaa

SEQ ID NO: 306001 - DNA, 675 bp, Proteus mirabilis
atggaggaaaaagataattatattgagttgatcaattatttttatttttctgtattggagtgttattgtgaagaatactttggcaacaaaatagaaaaaaatttaaatgaactaattgctgtatattttatcacattgtcttatttttctctagatgatcaacttgttgtttttaaaagtctaattaaaaatattaaagctaacaatgaatttattgatgataagttttcagagactttaataccacttgttttttatctttccaagaaaaaatcaaactcagttaatgataaattgaataatgatattgagtgggggataaaagaattcaattttaatttaaaatataaaaaaattgttgatggtttttttcataatgaagatataagctcattattaaataaactttgcaattatcatatatcgataaattatcctaaaattaactcaactgaaaactctaatcatgtaatttacaaattaataccttgtgaagtaatagtgttacttagaatgagagagttaaataaattacctattaataatattgatcatcaactaataaatagatttaagatgtttttaaataaagatatacctttaagtaattttaatcgttcattaagaaaatctattttacataaagcattacataaaattagtcagaatcactga

SEQ ID NO: 306002 - DNA, 1419 bp, Proteus mirabilis
atgagtaaaataaaaacccgttttgcaccaagtcctacaggctatctacatgttggtggtgctcgtactgcactgtattcctggttatttagccgtcacaacaagggtgagtttgtactgcgtattgaagacaccgatttagaacgttctactcaacctgccattgatgcaattatggacggtatgaattggttaaatctaaactgggatgaaggtccttactatcaaaccaaacgctttgatcgttataatcaagttatcgatcaaatgttagcagctggtactgcttatcgttgttattgttctaaagaacgtttagagaaactacgtgaagatcaaatggcgaaaggtgagaaacctcgctacgatggttgttgccgtcacggtgatcacaaccataccccagatgaaccccatgtagttcgttttttaaatcctcaagaaggatctgtgatttttgatgacaaaattcgtggcccgattgagtttagtaaccaagagcttgatgacttaattatccgccgtactgatggttcgcctacctataacttctgtgtggtgattgatgactgggatatggaaattacacacgttattcgtggtgaagatcatatcaacaatacccctcgtcagatcaatatattaaaagcacttggtgctccagtacctgaatatgcacacgtatccatgatcttaggcgatgatggtaaaaaattatctaaacgctataacgcagtgagtgtaatgcaatatcgtgatgacggttatttaccagaagcgttattaaattacttagtacgtttaggttggtctcatggcgaccaagagatctttagcatcgatgaaatgattaaagatttcactttagaagctattagtaaatcagcaagtgcgtttaatactgacaaattactttggttaaaccatcactatattaataccttacctgctgaacaagtagccgtacacctagattggcatatcaaacaacaaaatattgatactagtaatggcccatcactggttgaattgattaaattactcggcgagcgttgcaaaacattaaaagagatggcggaaagttgtcactacttttatgttgactttgatagtttcgaagaaaccgcggcgaaaaaacacttacgtcctgtcgctcgtcaaccattagaagtagttcgtgataaattatcagcaattactgattggacagcggaaaatgtacataaagcaatccaagaagccgctgaagaattagaagttggtatgggtaaagtcggtatgcctctacgtgttgctgtcacaggtgcgggtcaatctcctgcactagatgttactgttcatgctattggtaaagctcgtagcatcgctcgtattaataaagcattagattttattactgacagagaaaatcaagcttaa

SEQ ID NO: 306003 - DNA, 1413 bp, Proteus mirabilis
ttgagaaaaaaaacagtaaactactatccattacgccgattattagtggagaacggaggttttatgtcaaatttgagggatatggaagagcttataattgatattgtggatgttgaattaaaggaatacatgcgtgaagctctaacatgttatatgactggagcacaccgtgcgtgtatagtattgtcatttattgctatatttgaagatttattaaaaaaattagatggaatggcatcgacaaataaaacagcgagagcaatttttactgaaattagtaaaaaaagggatgagcagaaagtttatgaaaatgatctgctcaataagctgaaggctgaaaaaataattactgagattgatgctaattttctaacagtcttgaaaacacttagaaataaagctgcgcatccatcaggtcataagcctacagcagaagaagctagatatgtttattctgaaacaattaatcgatttctctcgaagccagttctttcagctacgcaagtggcagaccaaattctttcaaagttaacaaatgcctatttattccctacgacaaatattaatgattactccacgattgtaaatgacgaggttaaaaatcttcatagcgatagctattcatatcttttattgaaattacttgaatcgctagaagatgctaatgaacagataaaaacgaatgctaagcgatatcttcttggtttatcattcaaaccgttaaacaatgacgttttagaacgaataaaaaaacatgtaataattgagtgctgtagtgatgataataagtctcagtttttaatggaatgcatagctaccaactataagttactgaatggtctagataaaattgtatatttaaggcttaataaaatatttggggttataattcaaactacaaaaatatcagatcagcagacgtatttgaaacaccctatacaaatttttagaagtatacttgagttagacaagaaaataattgatgaatactttagtgaaaatatcaatagtgttatcgatgagtacaaactcagtccactgttaatgaggttagtcaacaataaagattgggcgaaaagaaaggttatcaaatctatttttgaaaaggctggctcctcaacatttgacaaagctaattcattcgcacgaaatgcaagcgattatgatgaagatctttctaaatttatgagtgctatagaatgctttgagttaatagttagtatatgtgatgctggattggggggggcttttggagctaaaaatatgatgaatggtaaattcaataatatagcaaaaattaaagagaaagccctaaaagcactgcatgaagatgcatcttcctgtcaagagatcattgaaagaataaaaccaactctaggaagctctgatgattttgaaaaagattacctttga

SEQ ID NO: 306004 - DNA, 1389 bp, Proteus mirabilis
atggggagtaatagctggcgggaagtaaaactatctgatttaggtgaggttgcacgaggtcgttcaagacatcgacctagatatgctgaacacctatatgggggagaatatccttttatccagacaggagatataaaagcttctgaaggtcgtatttcttctcatgagcagacatactctgaggctggtttggctcaaagccgtctttggccagcaggtacaatgtgtataacaatcgcagcgaacatagcagagacgggagttctacagtatcccgcatgttttcctgatagtgttattggttttattgctgataaaaataaagcagatgtctactatattgagtatgtatttagaaagttaaggaaagatattcagcggcaagcaactggctctgttcaagataatattaatctccagacttttgaacgattgaagtttaaagtacctcatgttgaagaacagcatagaattgccaactttcttaaccattttgataaaaaaattaccctcaaccgccaaatcaaccaaactctagaacaaatggcgcaaacgctatttaaatcatggtttgtggattttgatcctgtggttgataacgcactagatgcgggtttttttgaacaggatttagctttctctgatgaattactgcgtcgggttgaagtgcgcaaagcagtgcgtgaaagtgataattttaaaccgttatcagaggatattcggcggttatttcctaatgcttttgaagaatgtactgagcctgcattagggcttggggggtgggtgccgaagggttggaataacggatgtatttcggatgtagctcattatagaaccaaacgcattaacacttcagagttgacacttactaattacatatcaacggaaaatatgctggttgatagaaaaggtattcagaaggcaacagcgcttccaacggtaaatagtgtgccagcatatacatctggcactattctaatttcaaatattcgtccttattttaaaaagatatggttagctaaaggtgatggtggctactctaatgatgttcttggatttgaagttaaagatcaaggaaccgaagaatatttatttaatttaatgtatcaagattcattttttgatttcatgatggcgacttcgaaaggttctaaaatgccaagaggcgataaaaaagctattctagggttggagcttgtagtgcctccattaaagttgagaaagctattttctaaaaatgtgaatggtttttatacgtcatcaagtattcggaataatgaaaatcatgcattaggccatctccgagacacactcctcccaaaacttatctccggcgagctgtctttgagtaatataaaaatagatatcccagaagaaactttaatctaa

SEQ ID NO: 306005 - DNA, 669 bp, Proteus mirabilis
atgaataatgaagaaaaaaatcgtcgtcctataaaagcaagacaaaccaactgggcaactcgctgtagtcgctggctgcaaagcaaaggcgctacccccaatgggatctctttatttagtatcctattcgctgctatctccggtttgtttctctactttgctctcgctcactcccaaggcctacttcaatcaatccttcttattttaggtgcattagctatccagggtagacttatctgtaacctactcgatggcatggtcgcagttgaaggcggattaaaaagtcctgctggtgccgtttataacgaactaccagaccgaatagctgatacattgattattattggtgtaggttatggtttatccatcacttttcctatcgctattaccttaggctgggtagccgctttctttgcggtaatgacagcttatatccgtgtattaggtggtagttgtgggttagaacagcgttttacgggaccaatggccaagcaacatagaatggcattattaaccggtattgccattatctctgcatttattcccgctgaatggggagcatggctctgtttagtctccctgtggatcattatcttcggctctgtacttactaccattttgagaactcgccaaattttacgcgatttaacacaaggagttgatgaatga

SEQ ID NO: 306006 - DNA, 441 bp, Proteus mirabilis
atgaaactacaacttgtccctgaaaaattgatgttcaagatatctactacagatcttaaagtaatttatactgaatcaggtggagttaaactgaagatcgatattcaatatattgatgactttaaaaatgatatatatcgtgaaatagaaattcactttctgatggtagcggaattaaggtgtgtttctatgaattttttcgatgctaattctgataattattctatagtaaatcaaaatataataactaatacaattaatttttgggaggagaatggatatcaccctgattcaggagtttatcaaattatgaattcaggtatattaaagcataaaaaagcactttatgatccattaaatagatttcatttaaaacattatttaattactggaaatgatagttatattgaaataatttcatctaaatatgaatataattaa

SEQ ID NO: 306007 - DNA, 1278 bp, Proteus mirabilis
atgactgacagccaaaatttcgaatcccacacccccatgatgcagcagtatcttaagcttaaggcagagcacccagaaatcttactgttttatcgtatgggtgacttttatgaactgttttttgatgatgctaaaaaagcctcacgcttattagatatttcattaacaaaacgaggtcagtcggcaggtcaacctattcctatggctggcgttcctcatcatgcggttgaaaattatctggctaaattagtgcaattgggggaatccgttgccatctgtgaacaaattggtgatccggccaccagcaaaggccctgttgagtgtaaagtgatccgtattgtcacaccgggcaccgttacggacgaagcgctacttgaagagcgccaagacaatctattagccgctatctggcaagataaaaatggcgcttttggttatgccactttagatattacttctggacgttttcgggtcactgaaatgccggatagcgaaagtatggctgctgaactgcaacgcactcacccagcagaactactctatcctgaaacctttgagtcaatggcattaattgagcgtcagcaaggtttacgccggcgtccaatttgggagtttgagtgtgagaccgccaaacagcaacttaatttacagtttggaacccgtgatttaactggatttggtgttgaaaatgcccgacttgcactttgtgccgcaggttgcttattacaatatgttaaagatacgcaacgcactgcgttgcctcatattcgtagcattaccatggagcgtccgcaagataccattatcttagatgcagccactcgccgtaatttagaattaacccaaaatcttgctggcggttgtgataacaccttggcatctgtacttgatctgtgcgtgaccccaatgggaagccgtatgctcaaacgttggatacacacccctttacgccagcgtgaacaattaattaaacgccaagatgcgattagtgccttacaacccctctattttgaattacagccttttttacgtcaggtgggtgatttagagcgggtacttgctcgtttagcattgcgatccgctcgtcctcgtgacttatcacgtatgcgccatgcctttcaacaatatcaagatatccaccaagtgcttgatcaggcggatatgccctatattaaagaattacagcagcgtatcagccagtttgatgagttgcgtgaattactggaaaatgccattgttgaaacaccacccgtattagtacgcgatgggggggggtga

SEQ ID NO: 306008 - DNA, 897 bp, Proteus mirabilis
atgacatcatccctacagccacagttaaaaaactcatcagaaataaaaaaaatattaaaagaaataaatacatgttttactttacatgatggaagaacagttaatacattactagtttacttaccatgtagagaagacaataaaagttcccataaagaattttttgaatgcattaaaaatggaattcttcaaaattttgttttttcatgcagggaaatagaaaaaaaattgggtttaaatgctaaaacagggatggatatacttttcgataaagcgctaagaaaattaagtaagcaaacagctcaaggtgagttaggggaacttatattgtttacattacttgatgtatatctatgcgctcctaagcttttgagtaaagttgctaataaaaccagtccaaaaatgcctgtgtttggcgctgatgcggttcatgggcgatttttaaataataagtttcaattgtttttgggggagtcaaaattatataaaaattttaaggcggcagctactgatgcatcaaactcaatagtgaatgcaaaagataactttgatatagagtttgatcttcttgatagtgatatgaattttcctgattataacagtgaattagagagtgagattattgactttctaaacccatataccaatgaaaaatttttagactatatttattcaccatgttttatagggtttactcaacctgatattattgtaaaggatgaaagtgattatatagaaaagtatactaatttatcatgtgattatataagtcattttttttccaaaattgaaaaaaaaggattggacataaacaaagtaacattattaatgttgccgttcggttgtgttgatactttagtaaaagaatttatagaatatattggaataaaaaaatga

SEQ ID NO: 306009 - DNA, 261 bp, Proteus mirabilis
atggagataaaacacgaaaaaaatttcttagagaaaagaatgttacttataattgggcctattgataagctaggaatattaccaggaattatgtctgcttttgctacggttacaacattaagttcagaaaatggctggcttataggagctacatatgggtatatggctttagttatttcagcattatttttctatcagttaattatgcgttataatcgaatgattacattgacggagttggttatttctaaaaagttgtaa

SEQ ID NO: 306010 - DNA, 735 bp, Proteus mirabilis
atgaagaaagacatcattaatactcaagcaaatacgtttaatgattacctagcggataggttccctaaattcgccaagcaaataatcaacgtgctgttggaggaaaaaaatgatgtttttctctttagtggcatcattagagattattttttatataaagataaatcatcaaattttaacgtaagagatattgatattgttgtatctgacattgataaatttcattcaatatttaaaaataaaatacaatataagaaaaactcatttggtggcttaaaattatactttaacgacattaacattgatgtttggcaagctaacttaacatggggattaaaaaatatcccacaaaaaaatagaaacactactaatataatagatattctacctcaaactgttttttttaattgttcatctattctctttgattttcaaaataaaaaattcattgaaaatgatgacagtagcttccaactttttctagatagtaaaacattagatatcgttttggaagaaaatccattaccagaactatgtattttaaatactatttattacacaaaaaaacataatttaaatattagttcaaaattagcagattatgtaaaagataaattttcaaaaatagaaaaagatagatttctatatatacaaatgaaacattttaataaaatagcacttaaaatcaatgaattagacaaggaaatagaagagttagctaacctaattaaataa

SEQ ID NO: 306011 - DNA, 948 bp, Proteus mirabilis
atgaataacaaagaacgctttacaaccccttatttagaatttgatagaaagcagtgggctacgttaaggaattcggtccccttaacattaacagaaacagaaattgccgaccttaaaggcattaatgaagaaatctcaattgatgatgtcattgaaatttatcttccattatcaaggttgttaaatttctatatcagttcaaatttacgtcgtcaggctgtcttagaacagtttctaggcacaaataacgccaaaattccttatatcattggtatagcgggtagcgtagcggtgggtaaaagtacgactgcccgtttacttcaagctttgctaactcgttggcctgaacatcggaaagtggatttgattaccactgatggatttttattacctaatgcggaattaaaaaaacgcggaataatgaagaaaaaagggtttcctgaatcctatgatatgcatagtcttgtctcttttgtctctgatattaaatcgggcaaaaagcaagtgactgcacctgtctattctcatttagtgtatgacattattccagacaaaaaacaggtcattgagcaacccgatattttgatccttgaaggactcaatgtattacagagtaatcaagactaccctcatgatccacataatgtttttgtatcagattatgtcgacttttccatttatgttgatgcagatgaagcattattgaaacactggtatatcagccgatttttaaaattccgtgaaggggcatttaccgatcccgaatcctatttcaataattattccaaactgagtcgcgaagaatctattgagatcgcgtcttccatttggcaagaaattaatggcttaaacctaaagcaaaatattttaccaacccgtgaaagagccagtttgattatgactaagggtgataaccattcggttaaaagcgttaggttacgtaaataa

SEQ ID NO: 306012 - DNA, 1479 bp, Proteus mirabilis
atgtcacaacccccacgtattactacgtcacaattcgaaaagcttaaaaaacaagcaaaagaaatcaagaaagaaaaaaatatatcccatgctaaagcgcttgagattgttgctaaaagtaattgctttggtaattggaaagctgtagttaaagcccgtgataatgatgctagcatcaaaacacctacacctaatgtatctcagacttttgttgatgactccgatgtcgttttagatgatagtgaccaacaattacttctgcaggaacgaactgaagatattgacgaagcaacaaaattgcgagtcaacaataataaaaaaattcttgcacaattagctatcgagttctctatttttgaaccaacaaaaactgggctaaaaaaaagtatattagatgcaacccaagtcgtaagaactcactttgagataacaaattttcatcactatgacttgcaaggccaaggggcaagagaatacggtataaagaaaaccgcctttttactcacatctgaaaaacagataccaaccactgttagcttatatcgccctaaaacgaaaaaaggtgatccaagaatgtggttctccggtcttccaaatttcacatacgccggagcgcaaatcgctatcattattcataatgactgcgcttatttaatagatttaagttcagtaaacctgaccttagaactagaatccacaacaagtcagctaagaaagtttgttgatgactacttaagcgagaataatgctattgctaatgagttactcaataaactaaaagaattagcaaaaacaccaataaaagcgacacatgttggtgataccgcagtaggtatgtctattgaagatgcattaggtattcaagcaaactcaagtaagttaccagattataaaggtattgaactaaagtcaggtcgtaatgccgagaaaaatagaacaacaattttcgctcaagttgctgaatgggaaataagcccctataagaaaagtgctgagattttggataaatttggttacttcagagaggatgattttaaactctattgtaccattagtacgcgaaaacctaacagccaaggattaatatttaaggttgaagaggatattttacaggagtggtgtgctgaacatgaagatgataagaatatattcaaagagcacgtagcaagttggagtgggaaactacttcgcaagcgattgaaagaaaagcattctgaaacattttggattgaagctaaaagtcaatttattgatggtattgaatactttcagctaatatctgttactcatacaaaagcccctctcttgaaccaattaatgcctttgcttgaaaacggaaccattactatggaccatttaattaaacgctcagcaaaaaatggtagagtatcggaaaaagggccattgtttaaaatcaactcaagagatctgggcttgatattccctgagcctgtaaaatatagtttattacaatgttag

SEQ ID NO: 306013 - DNA, 474 bp, Proteus mirabilis
atgattgaaaaacactattctccagacttcacaaccttaaaaaaagatatcgatacgcatgaaaaatcaatgtacgaatggtgggatgctttacaagagccgtatattgcagaatggactcttttattaacattggcttgttggggagttcctgatactgagttacattttaaagttactggttttattattggagctgcattttttttagcaaaatttagtgttctagccaaaaagcactcatattcgacaaaaacagagcataaatttttaaatcaacttcaacaatcaaaaatgtcggatgaagaaaggagttttttacatcagcaactacattctattaaaagaaaaagaagttttttaggtaatttgtttatcattaaaaagacttggaaaataattactgcatatgcctttttttccttctcttttattaaagtagtttttcctttctttaatgtaccgattttttag

SEQ ID NO: 306014 - DNA, 576 bp, Proteus mirabilis
atgaagaaacacctcttgcttaccgcccgcatcttcaaaacgcaattcattaaaaccttcccctttgtgggtttggctacggaaagtggtttgtgtcttattctctgggaacttaatcggtggtgcgttacgaccatcataggtacaaccggtaatcatcggtctgtcgatatccccattcaggtaactgaccaacacttgtgtgccgatgcgcggtaccgcagaaaaaccatagccatttccactccaacccatggcaacccgtacccagcaggaggcactgtgatcggcacttccccgacgatcccaatgaaaatgcactttcacggcgccatattcattgacgtagatttcttcccctggtggccccaccaccgtcgccacttcatcgccgtcggcagtcggtttataacgataaggggggcgccactcttgcgtgcccggaataaaggagacgctattcgacagttgtgtgccttcgcccccgctattgtccgccagtggctgtacaccatgatggctgacgctgatcacttgccagcgatcattcatcggctgatggggatgctgagataa

SEQ ID NO: 306015 - DNA, 402 bp, Proteus mirabilis
atgttgaataataacaattttacaataatgtcagttgaccaatttcccattattaccatgcaggtttttccagaaacgttagagcatgctaataactggattgctgaaatggacttagtgcttgctcaaaaacaaaactttgtattggtttacccacctatcaacaagaaaaatgaacaagaggatatgaaagccgttagacgctggctgaaaacagggaaaatgccattaagtcaatattgtgctggaatgatcatgaccgtcaatcaacaaacaaatgataaagagcaactgatgcagttatctcccgttgtttctgcggtgtacggtgtacctatctttgttgaagaaacccttgatggggcttatgctcaagctaataaacttctgggcaataaataa

SEQ ID NO: 306016 - DNA, 249 bp, Proteus mirabilis
atggttaaagtggcgattattttggtttctcctgtattaattaccatgttcttaagtgaagttgcattaggggtttattcattattttgtcctcaattaaatgcattttctctctctctttgtatcaaaggtattatcgcttttttagtattactgctcttttttacctcagcaatgacgaatgaattatatcatttttttaacagtagatacttttattctatttttatgagtatttatcatggctga

SEQ ID NO: 306017 - DNA, 798 bp, Proteus mirabilis
  misc_feature (779)..(788): n is a, c, g, or t
atgcttgctagccaagttttatgggatgatggtgtcactgctttgtttagctcatattcttattttggcaaatataacaatcaaaataagatagaacacaaaatcagttttaattcaggtgctaacttaggtgcttggcgagtacgtagtaaaagttattatcatcatacggataagcaacagcaatttaagctatactcattatatgcttatcatcaattaaatacgctgttggcaacgcttaatgtgggggaatttcgaccaaccagtagaatgttatcaacagataaattaattggatttcaacttatatctagtaatttgctctctggtaatgatctctatatgaatagtcctatcatagaagagattgcagaatctcatgctgaaattaaagtgaaacaacaaggaagaaccatttatgaaactattgttcctcctgggccttttattttaaacgatctacctgttataggtagcaatgaattggtattagaaataaaagaagcagatggacgtataagaaaaagcactcattactttactacaatgccaaaccaattaaaaaaaggtcgttatcaatataattttatttctggatattcttatgatagatataaccagtttaataatcaaaataataaccctatttttttactgggtgagttctcctatggtattaatcaaaaaataaccgcttatggtgcaattagaaagaagctgaatagcaatactttcttttcaggattatcattagatttaggacgctgggggggagnnnnnnnnnnaatctattaa

SEQ ID NO: 306018 - DNA, 1638 bp, Proteus mirabilis
atgcgtttaaaatcaattaatgcttttgtgttatccttgttagtaagtccattttatgtttgcgcagatttaaatatggacttcttacatggaggagttcaactgcaagctgctggtgtatttgatgaaaataccaattatcctgctgggcattatattgttgaggttattttcaatcgaaaattaattagtaaaaaagaattaattatctcaccagaagataatgaaaatttatgtttaaaaaaagattggattaatgagttatcgcttccaataaaattaaatttatttgaattatattatcatcctgagcgcgattgttatgatattagccgttatcctggggctcaggttatttttgataattcgaagcaaactttaacatttagtattcctcaaattgcattagatgaatctctgcgccggcaggaatgggattatgggataacaggtattaaattaaactattcgggctatatttctaaaaccagttcttcacaagcacaaatttatggtgattttgatttatatgctaatttaggtcgttgggtcgcttatgttcgtagtagttaccaaaggaactcgggtacagaaacatcggaggcaacagtttccacagcaattaaatcaatacaaggaagttttaccgtaggtaaaacaataacctctttatcaatattacctaactttgctttttatggaatgtcactgcgctcggaaagggatatgcgcccatgggaaaaacgaggttatgcaccggttatttctggtgttgcaaactctaatgctaaaattactatatctcaaaatggatatgtattaagttcacaagttgttcccgcaggggcttatcaattaaaaaatatagcaccagtaagtaatggaaatataacagtgacagtagaagaaagtgatgggacaaaaacagttcgctattatcctgttgccacactttcttccttattacgcacagatgaaataaattacaacattgctatcggagaaaaagaaacagtaggtaaaagagaaaatagtttattttttctaggtgcatttgactacggattaactaatgttacggttcatgctgcgggaattttgcataataattataaaagtgcagcattaggaatgagtaaagattttggacgatttggtgcaatgtcatttactgctaatactgctgtaagtgtatttcaaaaacagacaccaacagcacccgaagttaggcagtctggtatcagctattcgttacaatatgcaaattcattgactgataatactaatttacagctactcgcatatcgctatactggtaaagattatgttgattttaatgaatttaattcaaatgctttatatcatcgcagtaatcgtaaagagcgttatgaaacgatattgtcccaaagttttgatggtagctttgttagcttatctgcttggatgcaaacatatagaaatagtattagtaatgaagttggcgcaaatattacttacaatacaacaattaaatctgtcgatttctcattatcagcggattatcaaaaattaaacgatgggcaaattctgttagctacgataggaaaaataaagctagttttaattctggtatttctggaagtattaatgaaaaaataa

SEQ ID NO: 306019 - DNA, 564 bp, Proteus mirabilis; identical to SEQ ID NO: 297513

SEQ ID NO: 306020 - DNA, 354 bp, Proteus mirabilis
ttgaaacctttaggtttccatgactataatcatctacaaaaacatgcaaaagcagttctctctgatagtggaacgatcactgaagaatcttcaattatgaattttcctgccattaatattagagaagctcatgaaagacctgaaggttttgaagaagcatcagtgatgatggttggtttagaatgcgatcgggtgctacaagccttgaatatcctttcagctcaacctcgaggaaatgaacgtttattacgtcaagtatcagactatagtatgcctaatgtatcagataaagttgtaagaataattcattcatacactgactacgtaaaaagagttgtttggaaagaatactaa

SEQ ID NO: 306021 - DNA, 1140 bp, Proteus mirabilis
atgaaaaaaacaaaacatttatttaaaacaaagggttgtaatattccttttacttctgtgatgatggtaagttttgtcttaatgggctgtaacgatcaatcgactcagccaaccaagcctgctatccctgaagtgggagtctatactgtcaaagaggaaattcttccattaacggtcgatttgccagcaagaacggcatcttatcgtgtctcacaggtgcgcccacaagtcgatggtattttagaaaaacgtctatttactgaaggtagtgatgttaaaaaagatcaaccactgtatcaaatagataaaaaaccttacgaaactcaggtagctaaagcacaagcagcttacgataatgtgaaaaaattagctgcccgttataaatctttacgtgccactaatgccattagtcagcaagaatatgacgatgtagtttcacgccttgatcaagctaaagccgatttaaatcaagcaaagattaaccttggctatacccaagttttatcacctattagcggcaaaatcagtcgctcttttgttagtgaaggggcattagtgagtagtggacaaagccagccattagcgaccatcacacagcttgatcctatctatgtggatattactcaacctattactaatcaactgaaattaaagtcactgatccaacaaggtgtcgtcactgatagtgaagataaaatggatgtgacgctgtttttagaagatggctctcagtacccttatactggtacattaagtttttccgaagtccaagttgagccaagtacaggctcagtgacattacgcgccaaattccctaatccacagcaccaattattaccaggaatgtataccaaagctcgcattatgcaaggaactcaagagaaagcgattgttgtgccacaacaagcgattacctttgatgcccgtggtaaatccatcacatatatcgttgatcaacaacaagtattacaagcaagagatgttgaaatattaaaaccacaaggtaatggatggatcataaaacagggattacaagctggcgataggatcatgacagaaggtcatcatcgtgcaaaaccgggcgtaaaagtcaatgcggttcctgctaacaacatttcattaaagaccaccttagagtaa

SEQ ID NO: 306022 - DNA, 537 bp, Proteus mirabilis; identical to SEQ ID NO: 305873

SEQ ID NO: 306023 - DNA, 750 bp, Proteus mirabilis
gtggtcaaaattgacgctatcgccggtgtggctacccacattgttgtcgcgcctgacgaaacctatatcactcatgcttttggcgattctgaaagctggacgtttgcgcacaaaatgaaccatttttttgtgaagccgaaacaggccatgagtgataccaacctggtgatcgtcaccgataagcgcacctataacatcgtcctccatttcatcggtgaagaaacgaagaaaaatgcagacggtacggtatcaaaatcctttattgaaacgccgtgggctgtgcgccaggccgttcttcagctgacctatgaatatccgtttgagcagcaggaaaaagccaaaagcgcggctgataaaaaacgcattacgcagaagctgaagcagacggcttttgcgggggcgaagaattatcagtacgtaatgagcgaacagcctgaaatgcgcagcatccagccggttcacgtctgggataactaccgctttacccggtttgagtttccggccaatgcggagttaccgcaggtctacatgatctcggccagtggcaaagaaacgctgcctaactctcatgttgtgggtgagaaccgcaacatcatcgaggtggaaaccgtcgctaaagagtggcgtattcgtctgggcgataaagtcgttggcgttcgtaataataatttcgcgccgggcgccggtgcggtagcaaccggtacggcttccccggatgtgcgcagggttcaaattggggaggataactga

SEQ ID NO: 306024 - DNA, 510 bp, Proteus mirabilis
ttggcgcaacgtagtgcagaggcggcaaaagagatcaaagagcttattgatgcgtcgattaaccgcgtcaaacaaggtaatcaactggttgaacaagtcagtacttcaatggatgagatcctcacatcagttaaacatgttgaaagctcaatgactgagatcctatctgcatcagaagaacaaacgcgaggcatttctcaagtctctttagccgtcactgaaatggataaagcgacacaacaaaatgccgcaatggtggagcaatcttctgctgtagcaagtttactaaccgaaaaggcgggtgatcttgagcaaattgttgagcaatttaaaacagcggaaagtctattttcgaagaatagcacattagcaaaacccgttgagaaatcagcaaatattgggttatcgctcataaaagaaaatcaacaagactcaagaataaaagagccaaaaaaccataaacaatcgacattcaaagaagatgaagatgatgattggacaagtttttaa

SEQ ID NO: 306025 - DNA, 336 bp, Proteus mirabilis
ttggcgcaacgtagtgcagaggcggcaaaagagatcaaagcattgattaatacatcaagtaacaatattaagattggctcaaagcaagtgaatgagacggtggaaacaatggaaaatattgtggttcatgtaaaaaatgtcacgagtcttattggtgaaatcagccttgcatcatcagaacaaagtgcaggattaaaagagcttggtcgagctgtagagcagttagaatcaataacacatgaaaatgcagattatgtctctaaagcgtcatcaatttccggagaaatgaaagaacaaacgaattatttagtaaaagccattcatgtatttcactaa

SEQ ID NO: 306026 - DNA, 510 bp, Proteus mirabilis; identical to SEQ ID NO: 306024

SEQ ID NO: 306027 - DNA, 228 bp, Proteus mirabilis; identical to SEQ ID NO: 298429

SEQ ID NO: 306028 - DNA, 621 bp, Proteus mirabilis
gtggtcacacaggtgctgggcagcaaatcggtccgcacctgcaccaatccggcggattgtcagagcggcggtgaggcggagcaaccgggcagttcccagccaggaaccgggctggcaccggtgctggagaccaccacccgggaaaatttggaacagctgcataaactggtgaacagccggggcgcggtcggggcggcagagttggcgaaactgaaaaccggcagcctgacggtctcccggggggtgattgaagcgctgcgccgggatccggataaaacggcattaacacagcgtctggccggtgagctggcgatggcggacacgatggagttggcgctgacgatgcgccggatgctgatcaccggccagggggagccgaatgccggtaattttccgaaagcccaggagatcggtaaccagtcggttgaccagctggatcgcgaaatcgggatgctgcaaacggaaatggaagtgcgtaaatccattgccaataacgcgatgctgacggtgattgagcgtgatcagcaacggacacaggcgaaccctgccacccagaccccagataatacggatgtgcgtgtacagggactggagcaaaacagtgacaccggaggacgttaa

SEQ ID NO: 306029 - DNA, 567 bp, Proteus mirabilis
atgatcggaccaattaatactgcaacttcgacaaatggtgccagcaacagtattagtaaagaaagtcagcaagacatagaatataagcaaccacaaataaacgaaagtgaaaattatcaaaatcaattaatagaaatatctgatgatatgtctatggtggcaactcttttttctcagcgattaggaaaattattagacaaaaaagccaataaagggcaagaagctttatatattgcagaagatggtgctgatgagaaacttgataaggtgatgcttcaatttagaaaatcggggagaagtttacaggaattattgcaatatttacgtaaaatgttccctgatcctagtgatctcgttatggttttacgagaattacttaggaaaaaaaaattaggtgcacaattagatgcaggtattgaaaatgagatcaataggttacttgcaggtgaggagggtaagcaaattaaggcgggcattaatattgctctccaagctaaagcctttgctaaattactttgtttagatgcatcagtattaagagacctttaccgtagttacattttctga

SEQ ID NO: 306030 - DNA, 261 bp, Proteus mirabilis
atgtcaaaagtttatcctatttctcaaattattggacataaaattcgccaacagcgccaacacttacgtttatccgctaaagcagtggctgaaagagtcggcgttagccaacagcaattttcacgctatgagaatgggctatgtaaaattgatgttgatccaaccgcttttcttccttcaccgcttaatgaagatcctatcgcttcttcaagcgctgtcacccaatctaagctattttggagcgcacagagtcaaatttaa

SEQ ID NO: 306031 - DNA, 381 bp, Proteus mirabilis
gtggtcacacaggtgctgggcagcaaatcggtccgcacctgcaccaatccggcggattgtcagagcggcggtgaggcggagcaaccgggcagttcccagccaggaaccgggctggcaccggtgctggagaccaccacccgggaaaatttggaacagctgcataaactggtgaacagccggggcgcggtcggggcggcagagttggcgaaactgaaaaccggcagcctgacggtctcccggggggtgattgaagcgctgcgccgggatccggataaaacggcattaacacagcgtctggccggtgatcagcatccggcgcatcgtcagcgccaactccatcgtgtccgccatcgccagctcaccggccagacgctgtgttaa

SEQ ID NO: 306032 - DNA, 150 bp, Proteus mirabilis
atgatgatcaaaagcgagagttcaaaacaacagattttgattgatacactagtaaaaatacacccttacgatacaccagaagtcattattgtccctatagaaaatgggtttcatggctatctagaatggatacatcaaagcctaaattaa

SEQ ID NO: 306033 - DNA, 147 bp, Proteus mirabilis
atgaattactctattgagggcacagacctgctgtcaaagcgtatggttgccttaagtggtttactaataacgctaagcaatattggtctaagcccatttattgcggtgcctattggtatactattagtgtatatcttacgtaagtag

SEQ ID NO: 306034 - DNA, 288 bp, Proteus mirabilis
atggcagatgtacgtatcacttgcattactctatctaatactaatgctacacatgaacatattactcatgtaggtagtcctcaatttaatcctcaaggtagtaaatggactgtagctcaagtagttaacgctatagaaagtagacaacacacattccatgtaacagatagttatggaaatcgtgctgatgtcggtgtagttgatcccggcaataataaacctaaattcattcgcacctatgctgatggaaaatggaataacaacttgttatcactacctcaatgttaa

SEQ ID NO: 306035 - DNA, 375 bp, Proteus mirabilis
atgagaatgactaagcgaaaaaaagaaataatggaattgtttgatcctgataatattgaatgggtaataagtgaaattggtgcacctccttttgacgtttcagggattgcttatatgcttaaagggatggattcttttgacaagaaaagtattctcgaatctactcgcagaacattaaataacatggttaaagatggattattagaaaaggtatctagttatgagcgacgacaaaacaaacaccaaggctcaagtacctctcctggtgttcactgtgttgttactcgttatggtctaccaggaaagtgtcatcttgtgaaatatgaaaatgacggagagggctttattgaaggtgagtttgctagaattaattaa

SEQ ID NO: 306036 - DNA, 255 bp, Proteus mirabilis
atgaatgatatgacaacgttacgtaatgaatatttagatgatcgtcagattgatgatttagaaactatgtcccttgaggaatacaaatatcatgtgaaaatggatcattttttgtttgttgaagggcatggcattttagttgatgacttcacaggtcgtcgttttgcagcaagtaaggagcaattggatatactcattgcttatttacaggaagagcgagaaaaaatgccaaagcatgataaacgctatctttaa

SEQ ID NO: 306037 - DNA, 1674 bp, Proteus mirabilis
atgagtatagctggacataaaaaattaccagagtggtctgactctttattcgctacagtttatttgtgggtaaaaagaggaacaccacctcaaaaggcagatactgatgcatccattttacgttacccgcaagatcatcgtttaaatgcgctggccattcgtatgcgctcattggttatggagggggaaattactcctgattggtttattgaacaaggataccattcttcaaaggagcctgacaaagccgaaagtaaacgtaaatctttagttttagaatttatagacgaaagtgaattacggcaggttttatctgatgttgctagggctgattatttgtggcctcgtgactatgagaaaacagcagatgtgattgctattaaccggttaggtgatggaacacgtattactgctgaggatgttgatatgttggatgaagtcaacaaaacctatacgcatgtttatgcttttggcgatcaccatgttgttagtatgcgtcctaatccagttactggggaaacacattgctttcaaacattgaactcattcagaaataattttcttgatcaaggtagggttgttggtcgtcgattgggtgaagcatggttaaattggcctggtcattcaaagcaattaggaggtgtcggcttttatccaaatcctgaaaattgccctaaagaagtttataacctgtacacaggattaagtattgaacctgtagcgggtgatgttattccctaccttgagcatttagaaaaggtaatttgcgcgggcgacaatgaaacttatcaatatcttgttggttggctagctcatttatttcagaagcccgaagaaaaaccctctgttgccattgtgatgaaatccatagagggtacaggtaaagggtctatggttcgtccattgttagagatattaggcatgtatgctattcaagtgaatggttctggtcaaatagcaggacgttttaatagcaccatagcaaataagctatttgtatttgtggatgaagctgatttaactgatgggcgtacagcagaaaagttaaaggcaattattagcgaggacacggttaacttagagcgaaaaggtaaagatcccgaaatcatgccgaactatgcccgttttatttttgcaagcaaccgcgacagggtgattaatgcagggttacgggaaaggcgttaccttgtgttagaaccagatgtgatttatgcacaaaacaaaggttattttgaccgtttacatcaatggataaatgataacggcgcacaaaagttattggcgtggttattgtcgtatgacttaacacactttgatccaagacgtgcgccagttactgccgcattagttgaagagaagttagccagtatgccacctgtctatcaatttttttatagtgaactatggagtcaacaaccgtttaaatctcaaactcgaatttacactacggagttagtggactcttttatgctttggagtgaagccaatggcgaaaatattaaacctcctgccgcacgttctacggttggtcgtatcatgaggacattgggaatccaagtagcagggcgttcagatagaggtaatgggcgttattatgaccttcctgctattggcgaaataaaatcttcgtttgcagcaatattaggggaaaagactgaaaaacttttctcataa

SEQ ID NO: 306038 - DNA, 360 bp, Proteus mirabilis
atgatcagtaaattacaatttaaccaattagctgagcaagttcgccagtatgaatcacgcttagttgagttagaacaagtaattgctgttatgcagcgtaaacattctatacctgagggcatgagtccattaaccacattagcgtctgaaatgggtttatccaccagcaaagcggaattattagctaaaaattgtggtgtgctggtggttcgtcagggtagtcaattgattgttaatgagtcaaagtttaaagaagctgcggcaatcattattaaaggtgcaaaaagaaaggtaggtagcaaatattggtttcacccgttgatcggtaaattcattatggctggtggggtgaaaaaatga

SEQ ID NO: 306039 - DNA, 306 bp, Proteus mirabilis
atggctgatatctatgatgttgttatccgtcacgatttaaatcgaatgacgactcaagagttaaagaatgttattcgtgactcagaagatgcttgtgccggtttagcgttaggaatgagaacggtaggtcaattagcggctcattccttaaatagtgatgaatacacagacaagaatgcgagagaacatctcaatggtatgagtgatttattgatttatttaccaagaataattaacgcaatacagcaaaatctattgacggctcaatacgaaattcagcgtagagaggtgaaacatgatcagtaa

SEQ ID NO: 306040 - DNA, 219 bp, Proteus mirabilis
atggagtctaaagtattaaacaaaacggtttatgagttattaacccatgcaatctcaacgggtgatttagttaatttaattaaagaaattgcatgtaatggcgatcctgagttagttcgatttattcccatgctatctattatcgcttctgagcattgcgggcaattaattacagatcttaatttgatagaaattaattctaacaatgagggagcttag

SEQ ID NO: 306041 - DNA, 789 bp, Proteus mirabilis
atgagtggcatcacagaatttaactcagccattggctgggttaagaactatacaaaaatttttagggggtacttggtcaaattgcgagtaactaatcgttacgcacaaaagaaaaaagacagcgtgcaggctgtcttaattcaacttcattcagtggaacaagctactaactaccctaattatatcgggttggttaaatatttccaatcctccattggagggtgggatttgatgtctgtacgtaatacgtacgcagttcagccttttggctcgatgcctaatcgctctaactcttttcgcccaagagttttaagccagttagctaaactcatgtttgattcttttgcagcagcttcgaattgttctttcaactctggagttatgcgcattctaaattgtggtgactgtccgtcacctttggggcttttatctcgttttacagttgacaagtggtcacctattgaattaatctcaatttatataggtggtcaccttaacacggtaaagcccataaaatcaacgccccctaataatgctaccaacactattagagggctaatcaccaacgatagagtaattatcgaggtaactatgagtaagcatatcacacccgtaacagggcggaacagtttcaccccaaatactaaattcctatggcgttttttctcatgccaacaatctaaatatttttctgttgaagcgaataatgaacaggaagcccgttcactacttccagattccccttgccttttctctgctcgtattcgtcagggggtaaatcgtgcgtaa

SEQ ID NO: 306042 - DNA, 594 bp, Proteus mirabilis
atgaaaaataaaattaagaccgttaccggtcagggtttcgctcaccctgaaatcagtcaaaccgatatttcagttatccgctttgagggcgttcaggttcggattattaaaattaacaatgaaccgtggtttgttgctacagacctttgtggtgcattagagcaaagtaatacagcaaaagctgtaaagagtcttgatgaagacgaaaagatgactgtaactttaagttatagtcataatctctctcgcggaggagctagaaaattaatcattatttcagaatctggcttctacaaacttattactcgtagtcgtaaagccgctaccagcgggacattagcgcaccgtttcagtaactgggtatttcgtgatgttatcccgtcaatccgtaagactggggcctatggtgttccgtttggattattgaatgactttacccggcgtagcaatgagtatctgaaaatttcgtcacagcgcgggcgtgatcttcaatcctgcaaagcagagaaaatcagtttaaagaaagaggaaaatcgactctgggatgaatatcagcctcagttgccagctatggcagaggaggaaccgcaatga

SEQ ID NO: 306043 - DNA, 663 bp, Proteus mirabilis
atgagcaactacaaaactaagatagatcatgacatgaatgatttaataaatgacccaagtttattagcagatattgtatctttaaatcttatcgagaatttttcaagagaatcagtatctaaacaattaaatatccatctatctaagctttcatgggaggagagaattaatttagcatcagatattgaaagtgaaaaaatatttgtagggtcaagtatttttagggatagtgatgagatgaaagatttattttctttctatgaaagtggcttgtcagatttaattaagtcagctgctattcatgaggtaatgggttttgaaagattggctaagcaacttagaattagatatgccaaattatttactgaaattatgtatcaatctataagaagcgatactgtagaaaaagaaataatatccaatgtaaataaggcgaaggcttcaaaaccaaggaattcatactatgatgaagtaatggctgtaataaaattgacttgggaaaaatatccctgtgcaagcaaaacagggttaattaatgctttatgctttcattaccatgaaaaggttagcagaaataccttgtcaaactgggtaagtaaatcaggtatgcagccggataggcctaaaaagtatctatcttttgaattagttttccccaaatag

SEQ ID NO: 306044 - DNA, 1359 bp, Proteus mirabilis
gtggatacgttcaaattcacaaaagcaaaacttgaaagtctgccacctgcagagcgagggcagattgagtatggcgatacagttgttaacggtctgcgtatccgtgtgggagtcagcggggtaaaaagcttttgcatctccagaaaaagaaacggcaaattcatccgtgcaacgctggggcgcttccctgatttgacaattgataatgctagggcaaaggctctcgaactgctgggagatgttgcagctaccggacagaacccgaatgtggtaaagcgcacccatcagaaagcagctataacactagcggatgctttggatacctacattgaaaaccggggggagaggctaggatcgaaaacggcaaaacagtattgctctatcctgcagaatttttctggcgactggatgaaacagcagctctcatctatcagccgggaacgggttgaattgcggcataaagcaattactgacggaactgtgtggttcggagaggacaaatcaacgttgcgagcaggggtaggcacaggaagtaaagcacaggctgatctttgggcgcgggttctccgagctatctaccgtttttctcatgatcattaccgggatgataatggaaatattctgttgcctgacccacccacaatggttctcagtacaaagcgtaagtggcacggtatcgttagaaaaacagagcgaataagaaccaatgatcttgccagatggtttaatgccctgagtagtattcgtgaacaggccgaacaggaacgggatgatatcgccgctgctatatgtgatgccgtagaaatgtctatttttaccgggttacgtaaatcagaaatattagagttgacatgggacagggttaatcttggaggccgttatttctggattgatacgacaaagaacggtgatccgcttgagttgcctataactaataccctcttagctttattccgacgtagggcaaagatgaagtctggtgatggtattttggtttttccgggcgaaagaggggttatcaaagagtatcggcatattatcgatcgtatcagtgcggctacagtgccagaaccaaatcaggacttgttacagcctataccgtttaaatggcatgatggtcgccggacgttcggtacaatagcggagctggtgggggtaggaaactacattctcaaacgcttattgaaccacagaacaatgagaagcgctgatgttactcagggatatttatatttttctgctgatgagttgagagagcctgcagagaagatagagtataggattttaaaaaatgcaaatttaataaatgaaagccttagcttaaatgaccattttttattggaaattttaaataaatag

SEQ ID NO: 306045 - DNA, 351 bp, Proteus mirabilis
atgaagacaaaagtatttcaaatggcgagtggagaaagctactcaattcttttaggtgaggatggtatgccattgccttaccataacctctttgtcaccctgcattaccgaaatcaatcaaaagcaagtaacacctgttctcgtgtttttgatcaccttagctttcttgaggaaatttgtcggtttgaaagtattgacttgattgaacgatgtaaaacgggtgattttctgacaaagaaagagtttgagaacattaagaaacactcaaaacttacagtagcgtcattccgtgaaatggttacgagacataaatccttgttctgcgcaactaaatcaggacactttccttaa

SEQ ID NO: 306046 - DNA, 306 bp, Proteus mirabilis
atggaatataatctaattattgaggtgttaaatgaaaaaacgaacaaacagattttatacactactgagtttaagcaagaagcggtcgcattagtcatcgaacaaggttatagcgtctcaaaagcggcagctgctttagggatcaccgataaattactttataattggaaagcaaaattcgacgctgaacaatcaggtagcagcttgaatgctgatgagagagccgagctattaaggcttcgaaaagaaaataaagaacttaggatggagaaagagatcttaaaaaagccagcgccctcctgctaa

SEQ ID NO: 306047 - DNA, 1296 bp, Proteus mirabilis
atgtatgattcaagccatttgtttagttcgttcatcaagggtggtgagcaaacagagtacgacagagatatactgctttatgcctatgagcttgatgaggacattgctgaatgcaaggactttgagcgttttgagaaggctctaaaagaggtcaatagttcatgtagtctgcgaattgaaggtgggaaattatgccttgaatttgaagctggtagcgaacactggcaagacgatttcatgagctatttctacccgaccttagataacttcatgcgagtgtgcgttaaaaaaaagagcataccatctaagttctgtattcttgataggaaactatcagagtcggatacagaagactccttattaaagaaggttattcaggttactaagtgggtgaagttattgtctgatatggctgaccatattcaagataacaatatcttggtgttctttgttcatcacaaagaaggaaaaactaagccatatcagattaatccgttcgttgatcttcaagtaattgaagaattggaactagactgtgatgagtctagatatgaacgtttgcacggaagctggcatttagaagacgctcagaccaaagataggcaaagtgtcatgttggtttcatttgctgagattatgtcttcaatggaagatggagaaaacccatttaaggtgtttctatcaagtaccaaaaagttccatgataggtactgcgagaactatgaaatctatgtgaatagattcactgtagatagtcagcttcgagagattgatgaacagcatttaagctttgttggtaaactacaggatttggttacgtcatcacaaaccaaagcatttgcattgccaggtgttatggttgctattggtgcacttgcaaggacaaacaactacctaggaacagttgctattgttgttggtgttgtaatgacaaaaatcctgatagcaaagtctaatgaacttcttcatgagaacttaaaccactttaaagacacctttgacagagcattaggtcactatgtgaagtctagaactgaagctgaagaggtgaaatctcatgcaatggatgcacagaaaaagcttgatactcaattaaataaagccaaaggaagagttgattttatcggtactatgtccaactggatgcttggatttggattagtgttggcatttattatgctcatattagttttcaaaaccgaccatccagaagaggtcaaagctatttgggattggggaatagaaatgtttaaaatagtttgtcaatggactaaagctaagctagcaacattataa

SEQ ID NO: 306048 - DNA, 1092 bp, Proteus mirabilis
atggttgcatcgctaattgtacttaacgctattgccgcagaggtttgtaaacaagatggtcgttttggctatgagtttggagatgtctgggacgggggcaatgagcatgcgcttaattttgttcaagaggtagaagcaaaatttagacgtaaaactaagacttatggcttcttaagtgtggatactggtagaaattcgataccaacaatattgactaatttcaatgccaatattgatagtgcttttgaggacaccacccaaagcatgatggaaagactaaaatcatcattgaatgaagatggtcgcggtaacacacaagttggtcatatggtttttattcattactgtaatgaaggtgaagaagaagacttaggtcgtttgcttgttgttatggtagacaagaaagacgtgtttgattttggtgcgggtcttgtacctacaagatttaagtctattgatgttgatacactgcgacaagctgtgttgtatgatttgactctattcgattcagtctatcctgaccatattgaggagcaccaagataaagcttacctacgatttatctcaggccgctcaaaaggacaatttttccaagaagctcttggcacgaatgacatgatagataatactgtaagtgtatccagtgtttttgatgcgattgaacagtttggtaaagagttggggctaaggactgctcatattcgtaagcttcgagatgaagttgagttattgattaccaacaagaaaggtaagcaagttagcgtaaacagtgttgctagaaaagtaattgcgaatctaccagatggcaatgatgagataactgctgaagactttgtcatgtttatcaatgaaaatgattacaaaatcagtgaaatttttgatgtaacacgcggtcaattgcagaaagcgactaatatcgaaggtcaaaaagggcaggattatttttatcgcattaaaagaagtgctttgggggatattgatgatgaggaaaagagcattaggtacgatgccagaacacgaactatatatatagaagtacaagatgaagagcagcatcgagaattattggaagcattaccagataggagttaa

SEQ ID NO: 306049 - DNA, 522 bp, Proteus mirabilis
atggcaacggaattaaagcctcgtacagcggctggatacgatcaaaatgttacattggcgtgcgagaggacgttgctcacactgctaagcgcctttgggagtctgaaggaaactctaagacttgtcggtggcttggtaccccggtacctcacaccagctactccgcctaatgttcctatacatgcgggaacttctgacgtggacattgtgttaaaccttgaaatactggcagctggtaatgaatacgctagccttgcgcagcagctaaaagcgcggggcttcacccgatgggttgaagaggggcagtctgcatcctggcgctggcgccgcagagtcaatgacaacatcgaggtagtcgttgagcttctccgggatgccggtgatgaggaaccaggtcggaccatcagtgtcgatgggaaaaagtatctgcacttacagtcaagcatgctcgaattgttcacgattggtatcaggagaaggaaatatctgcccaactcctggatggtgatggcttatcagtag

SEQ ID NO: 306050 - DNA, 492 bp, Proteus mirabilis; identical to SEQ ID NO: 305263

SEQ ID NO: 306051 - DNA, 348 bp, Proteus mirabilis; identical to SEQ ID NO: 295830

SEQ ID NO: 306052 - DNA, 1743 bp, Proteus mirabilis
gtgccgagatactccgttatctacgttctctgtctgtcttctataacgtcttttgcttatggggcaaatttacgtttaaaagtagaaggtttagaagggcaactcgaaaagaatgtacgagtccagctatcaaacataacaacagaagaagttgcaccagacgggcgttttcgtgcgcgtgttgaaaaggcaattaaagagggcctacggcctttaggttattatcagccaacggtcactttctcttatcaagaaaatacccctccgacacgccctgtattaacagcaaaggttgagcttggtattcccgtactgttaaaaggggtcaatattgtactggaagggggagctaaaacagatgaacaatatgccaaagtgattaaagaaaacacaccccctcttgatagtgtgttaaatcatgccgaatatgaaaaattaaaaggttcgttaacagggcttgctattcgtcgtggttactttgatgcagatatggaaaaaagccagctcggtgtctctttagataatcatgcctcgtattgggattttgtctttaatagtggtgaacgttaccgttttggtaaagtgaattatactggctcacaaattcgtgaagactacctacaaaatattgtgccttttaaagaaggggaatattactcttctgaagatttggcagagtttaatcgacgcttagctgccacaggatggtttaattcggcggttgtcacacctaatatcgctaaagcacgtagtgaaggcaattatttgctaccaatggatgccgttgttacccctcgttcacgtaactatatggagctagggggcggttttgccacagatgtcggacctcgattaaatatgcagtgggataaaccttggataaattctaggggccatagtttaacatcgaatatgagtatttctaagcctgagcaatctattggtgctaattataaaattccattaaaagttaacccattagaacaatattatggcattcaaggcggctataaacgtacagatttaaatgatactcgttcggataccaccacactgaacgtttctcgtaactgggatatgtcaacgggatggcaatacagtattaatacccgctggagtctgagccactttacccaaggtgatgtgaccaatacaaccatgttgctttatcctggtgcgaatgcaagtcgcgtacgccaacggggtggcatgatgccttattggggggatagccaacgttattcagtcgattattccaataaaatatggggatctgatgttgaatttctcgccctacaagctcagcaagtgtggatacgcacaccttgggaaggccaccgttttgtggtcagagggacgtttggctggattgaaacgaatcaatttgagaaagtaccacccgaattacgtttctttgctggtggcgatagaagtattaggggttataaataccaaagtatttcaccggaagatagcaaaggtaaattaacaggggcatcaagaatgctaacgggatctgctgaataccaatataacgtaactggaaattggtggggagctgtatttgttgatagtggtgaagccgttaacgattttacgaaaagtgattttaaaacaggtgctggtgcgggggttcgttgggcatctccagtagggcctgtaaagtttgatttagccgttccagtcaatagtggtgaagagcgtaagttacagttttatattgggttaggagctgagttatga

SEQ ID NO: 306053 - DNA, 1374 bp, Proteus mirabilis
atgcttaatagtttactcattgtgcttttgctgtgtgccattagcgcctttttttcgctgtctgaaatatcactggcggcctcccgtcgtattaaactcaaacagttggttgacgaaggaaatatcaacgccgctcgtgtattaaaaatgcaagaaacccccggtatgttttttaccgtggtacaaattggtcttaacgccgttgccattttggcgggtattgtcggtgaatctgctttttctcccgcattaaaagatctcttttcccgctttttagaagcacctctcgcgcaacaattaggatcggtctgttcatttattatcgtcacatcgatgtttattctgcttgccgatttaactcctaaacgtatcggcatgatcaagccagaagtcattgcactgaaaattgttaatcctatgcgtttttgtctcgccttattccgccctttagtttggttgtttaatggcatggcagatcttatctttaaactatttaaaatcccgatggtaagaaatgaagatattacatctgatgatatctttgcgattgtcgaagccggtgcagtagcgggggtattacgtaaacaagagcacgaattaattgaaaatgtctttgaattagaatcacgtaccgtaccatcagccatgacaccacgtgaagatgttgtctactttgatcgcgaagagacagaagaagatattaagcataaaattgccactcagccccactctaaattcttagtttgtgaaggggatatagaccatattattggttatgtagattcaaaagagctactcaaccgtgtgatcaatgggcaaagtcttaacctcaaagaaggtgtgcatatccgtaaagcccttattattccggataccttaactttatctgacatgctagaaagctttaaaacctcaggggaagattttgccattattctcaatgaatatgcgatggtgatgggcgttatcaccttaaatgacgtaatgaccactttaatgggcgatctgattggcccaggtcaagaagagcaaatcgtcagtcgtgatgagcattcatggttggttgaaggtggaacacctattgatgatgttatgcgggcattagatattgatgatttcccggattctagcaattacgaaaccattgcagggtttatgatgttccgtttgcgtaagatccccaaacgtactgactatgtgaagtttgcaggttataaatttgaagtggtggatattgataactataaaattgatcaactgcttgtcactaaaattgatgatattccgccagtaaaaccggttttgcaagaagcaatacctgctcctcaaacaacgtcagaagtgccttttgagcacgaagagcataaagcctaa

SEQ ID NO: 306054 - DNA, 207 bp, Proteus mirabilis; identical to SEQ ID NO: 295825

SEQ ID NO: 306055 - DNA, 741 bp, Proteus mirabilis
atgttagaacaagtcagcgaattagcccgccaagcgggtcaggcgataatgcaaatttatcaacaatcagcgccaattgaagtacaggaaaagagtgaccattcaccggttactgcagcagatttagccgcccatcaaattattaagcaaggacttgccagtattgcgccagatattcctcaattatctgaagaagatcctcctgcgtgggaagaacgtcgccattggcaacgttattggctgattgatcccctcgatggtaccaaagagtttatcaataaaaatggtgagtttacggttaatattgcgttgattgaacagggtgtgccggtattaggcgttgtgtatgcaccagtacaaaatattctctactcagcagccaataaacaggcatggaaagaaacctgtggtcagcgtttaccaataaaagtcagccgtgctgaaccccccgtgattgttattagtcgttctcatcaagatgatgaattaaaagaatatttatcgcaattgggtgagcaccaaacggtggctgttggatcttcattaaaattttgtctagtggcagaaggaaaagctcagctttatcctcgttttggacctactcatacatgggatactgcagcaggacacgctattgcgatagccgcaggggcacatgttaccgattggaaaggggtgacacttgattattcaccgagagaatcactgataaatcctggttttagagtttctattttctaa

SEQ ID NO: 306056 - DNA, 621 bp, Proteus mirabilis
atgtcaaaaccatcatttgattctattgaatcgcaggcaagttacggtattggtctgcaagtcggtcaacaactgactgaatcaggtctccaaggattagagccagcagcactgcttgccggcttgactgacgcgttagaaggcaatactccttctgtacctgttgaaacgttacacaatgctttacgtactatgcatgagcgtgctgaagcagttcgtcaagagcgtcaagcagcactggcagaagcaggtaaagtattcttagcagaaaatgtaaaaaaagaaggcgtgcaggttactgaatctggtttacagtacaaagtactgaaagcaggagatggcgctattccagctcgtactgatcatgttcgtgtgcattatactggtcgtttaatcgatggtacggtatttgatagctcagtacagcgtggtcagccagcagaattccctgttaatggggtgattgcaggatggattgaagcattaactttgatgccagtaggttctaaatgggaattatatattccttaccaattagcttatggtgaacgtggtgcgggggcggctattcctccttttgcaacattagttttcgaagtagaactattagaaattttataa

SEQ ID NO: 306057 - DNA, 1449 bp, Proteus mirabilis
gtgaaaataactgacaatccctatttccgtgaacaaggatatattgacggtatttggtgtgatgcaaaaagcaaagacacggttgaagtgattgatcctgcaacaaatcagcccattggtactgtgccaaatatggcaacagaagaagccaaagcggctgttgatgcagccgccaaagcattaccgacatggcgtgcgttaaccgcacatcaaagaagcactttactgcaacgctggttccaactgatacaggataacaagcgtcaacttgcagaactgatgacgtttgaacaaggtaaacccgtggccgaagcggaaggcgaaatcacctacgcagcctcatttattgagtggtttgctgagcaaggtaaaagaaccaacggtgaaattatcccctccccttcatcagataagcggcttatggtgatcaaacaagggattggtgtttgtgcggctatcacaccttggaacttccctgctgccatgatcacccgtaaagcagccccagcattagccgcggggtgtactatggtgataaaacctgccaacgaaaccccctatacagcccttgcgttagctgaattagccgcgcaagcaggaatacctgccggtgttattaatattgtcaccggtgatgcagttaaaatcggtgaagtgttcacatcagacaaccgcgtgcgtaaattgagttttactggctctacaggggttggccgtttattaatgcgccaatgtgctgacagtgtgaaaaaagtctcactggagctagggggaaatgcgccatttattgtctttaatgacgccgatattgagaaagcggttgcaggtgctatgggggcgaaattccgtaacgccggacagacttgcgtgtgtgcaaatcgtttttatatccataaagatgtatatcaacaatttagtgaacgctttgttgctgaggttaaaaaactaaaagtcggtaatggctttaccgaaggcgtgactattgggcctcttattaatcataaggcggtagaaaaatcacaatcactccttgctgataccttacaacgcggtgcgacactgctatgtggtggtgaaagagataaagcaggtgaaaatttctttcagcctaccgtggtcggtaatgtgcctgctgatagtcatattcttgaagaagagatctttggccccgtggcacctttagtcatttttgacaatgaagaagaagtagtacatctagccaataataccatctatggcttagccgcttatttctacagtgaagatccacaacgtatttggcgtgtggctgaaaatctagaatatggcatggtcggtattaacacaggtctaatttccaatgaagtggctcctttcggtggtataaagcagtctggcttaggtcgtgaaggctctgagcatggtattgaggactatatggaaatgaaatacctctgccaaggcctgtaa

SEQ ID NO: 306058 - DNA, 714 bp, Proteus mirabilis
gtgacggacaaagagctttcaagagctaaaaaagatttacaaacagaagtatatgaaagagctttttatgcagaaggaacagcagattttttaaagaaaaaaataagaagatataataagattctgtcattaaaccaatacttatcaattgcacttcctattgctcttggaggttatgcgactgtagatagtagctctaatatttttgaatatttaaaatatatcattggtatattatctactcttgttcttttattatcaacttacctgattgctacaaaaatcgatgataaggcatctcatgtaaatcaatcatttgcgtttaattttttattgcataatctatacaaagatattgttacaattattaaaaagaatacaagtggcaatcttgccgaaatagactcaatatttaggtcattaacagcaagagatgaatcaaatgcaactaatgatgaaaagctagtagataataatgataaaaaacggattatgtttgatatatctaaaaaacataacaaaaagtgtattacttgcggtcaaattcctgaaaaatttaagaaatccgggtgtaataactgtggtaatattgatgtaaaaaataaaatatccaaaataagtaaactttggaaaaagctaagcgaagaagaaaagatagagtttataagtagtaaaagtgagtatgtgaaaaataatataaaggtgaaaaaatga

SEQ ID NO: 306059 - DNA, 180 bp, Proteus mirabilis
atgaatcaaaatcaaaatataatattaaaactttgggaacaattaactgaagcagaaaagaaagaacttctttatcatattggtccaaataaattaattacggaaagtgttaggaaatttaaaggcgaatccacaatgaattttgggcaagtaactacgtgccctacatgtggaagataa

SEQ ID NO: 306060 - DNA, 192 bp, Proteus mirabilis
atgaattacaaacaaaaagatatccaagaaagctggaaaaatttgagcaaagatgaaaaaaaagaattattggtagaactctataaagatagtgattttttagtttcaattgaagaggctagacttcatgaaaaaaaagggtcaaccatgaattttggttccgtaacaccgtgtccagtatgtggaaaataa

SEQ ID NO: 306061 - DNA, 3288 bp, Proteus mirabilis
atggctggcgcattaggtcgattaaatattgatttgacgctgaatacggcaaatttcacaaatgcgatcaaccgtagccagcgccaaacagaacaatttgggcaaagtattcgcgtcagtcttcaagctatcaccgtacagcaagagcgtatggtatcgcaaactgcaaaatcctcggcgctctttacccgttttgcgagcgtcgcagcaagtgcattatctgtacggcaagtgattaattatgccgatggttggacagaattacagaaccgcttaaaactggtgacggaaagttctgtcgagttaaataaagccacacaagccgtctatgatattgcccaaaaaacctatcaatcattggatgccacagcacaggtttatcagcgttttgcggataatgccgatcgtctaggattaagtcagcagaaagtcgctgaacttacggaaaccgtctctaaagcggtttctctttcaggagccagtgctgcctctgctgcaatggggttaactcagtttggccaagcattagcagtaggtcagttacgtgggcaagatttaaattctgttatcgagcaaatccctggtttagcacaggccatcgcagaaggcatggggatctccatgggggatttaaaaaagaaagcccaagacggtgaaatggcgattgataaaatcattcaggcattggagaaagtcaaaaattctgttgatcagaagtttgcttccagtgtgacaaccgttagtcaaggttttactaatttacaatcagcaatgacgaggtttgttggtgaagccaatcaaggtacaggtgcgactcagcttttaacgtcgggtttagcgggactttctaatcacttatcgacggtggctaaaatcgcagaaggacttgcggttacagctttagtcgccaagctctctcaatggacaaaagccacttacttaaaaaatcaagccacattgaatgaagccaaagccacattacagagtgcagaggcaaacagtgtggcagcaaccagtgccgtgaggaaggcatgggcggataaagaggcggcattatcggcattgaattctgcaaaaatgagttatcaagtggcgaaaggaaccgtggcagaaggttatgccttagagaaagtgattgcgacaaaatcgttagcgacggaagcctctttaagatacaaacaagcactgatagcagaaacggcgacacagcgggcattaacgacggcacgccgtcaagccacggtcgcaggaagagcgttaagtgggacattggcattagttggtggtcccgttggactggcgttaacggcaataacggctgttggaatgggcgtctatgaatatagcgaacatatcaaacaagctaaaagagaatcgatcgaatttgccaatgctctagatacatcaacagaagccttaaaagcaatgaataatcaagtattgctgacgaatataggcaaattatctgaaggtattgatgctcagattgaaaaattcgaaggatcgttagaaaaagctaaaaaattggcagcagactcgaagtccggttggagcttaaatgcctcgagttacttgcgttttacgggtgaccatgaaggttataaagagataatcgcgcaaaatcaaagagaagcaaaaatcggacttgatgcagcgatgggggaggtggcttcacagttgacgatattagagcgtcagcgagccagtatgcgacaaatgctggcattggttgaagaaaaacacggtaagcaaagtgatgaatatcagcgttatgcatcgaaagtaaaggaggctgagagtgtcattaaccaatttagggtgacattaaaaaacttgggttatgatttcgatgcgttaattaataagacagatgaagcggcaaatagtcaagccaatatgagcgaggtcatcgcaaaaaaaatagaggattctattgctgaatctcggcgtacaatcatgaaagctaaggcttctcctgctgagctggctaagttgaatgcggaagatgtgctgaaaagacggggaattaaacctgaagaaaaaggttatgaagacgctttgaccgaagaaattaaagcacaaaatgcgttattggctcaaagaaataagccaaagaaatccaccattgattatgccaagcagtacaccaaaatcttgacggaattggaggaaaaacaagcctcactgattgcagatggacaaagtattcagctgtatggcaccacctcttcctttaatgaatacacatccgcattagccgatatcaaacagaataaagataagtttgatgccatcttaaaaatcgatcccaaagcgattgagacgatcaaagaaaaagcgaaagccattgatgatctggcgcgtgccaactcggttgcgcaatttgcttatgatcgcggtaaagaaattgagcagatgcaatttgaaacttccttgataggaaaatcgcgcgcagagcaagaaaaactcaatgcctttcgtcagattgatgtgttgtatcagcaagccagtgtggatttaggcgagaaagagctggcgaacttacaacgcaatgtcgaactcactaaacagcagattgaggaagaactgaggaagcgagaggccatgaaaggtgatccgatggcgggattaaaacaaggcttatcggatttcagtgagtcgaccatggatgtgatggaaaacgtcagaaatgtcactaccaatgcgcttaataatatgtctgatgcattagccgattttgctttaacgggcaaaggaagctttaaagattttgccaatgcggtgatctccgatatcactcgaatggtgatgaaaatgctggttttcaaagccattgaagcaggcgggcaggcaatgggctttgatatgggatggatgagcaaagggcatgcttacggtggttatacggggcatggcgggaaatttgagcctaaagggattgtgcatggtggtgagtttgtttttaccaaagaagcgacggctaaattgggtgtcggtaatctctatcgcttaatgcatgcggcgcaaggttatgcttcggggggctttgtgggggcggtcgcagggcgaatacccgttacaccgcaatcgacgttagcccgtgcgagtggtgtgcaaatgaccgtcgtcaatcatattacggtgacaggaaatggtgacgctgtacttgcacaggcaatgaaggaagccgcacaacaagggacagaagctggtgcacagaaagctcacgcgatgatgttacaagactttcaaagtaatggcgcagcacgcagaacattaggagtctaa

SEQ ID NO: 306062 - DNA, 597 bp, Proteus mirabilis
atgtctattcttgaatggccaaaagaggtgatccccacacaggaaaactggcaattattgagtaacagcaaaacctttacctcaccatttaatggaagtagtcaaacggtacgctttccgggaagtcgttggcgttgtgagctgacattcaataatttaaatgaagagaaatcgcgccagttagaagcgctggtggcttcattggatgggatgtcggggcgagtcaaaatagccagttggataagaaaagggcgttatgggtatggttcgcctcgtattgcaataccgagccaattaggtcatcggctagaaacaaaggactggaagcgcaatatgcgcgtgttacagcaaggggatcgcttaactgtgggcaatgaactcaaaatggtggtggcggatgtggtcagtgacaataatgggcgcgcaaatattcctatttcaccgatgttaagaatgtctcctaccgttaatgaaatactcgaggttgagcgtccttttggggtttttcggctcgttgataatgaacagggtaaatttcagcatcgtcgcttggggtataccaatatcacgttatcttttgaggaggtgttgtactaa

SEQ ID NO: 306063 - DNA, 582 bp, Proteus mirabilis
atgcaatatcatccattttctgacgccatggtcaacgcgattaatgagggggcttatatcgtcttagccgccagactcgatttgaaatcaggcgtcacctgtgcgcataccggtgttgggcaactgattattgcgggggaaacctatttaggtgtaggaagtttaggcgaaatcagtcagctaaaagaaaataagacaaccagtcccccacaattacagcttaaattagccggttttgataaatcgctggtgggaatggtgatgaatgagcaaagtcgagggcgagaagtgcggttgatgatggttgccatcggtgaagaggggaaaccgcttcttgctgaaatcttatttgtcggacaaatcacatcgattaatgtggtgtctggcgaagaaaatgccgtatgtgttaatgtttctaatcgattcgagcgatggtcaatcggtttacccgatagattcaccgatgagtcgtggtcatctcgacggcaaggtgatcgtatctttcgttatgttgctcaaatggctgaacgggcgatttattggggcagcaagaaagatgcaccttcatttatttataaataa

SEQ ID NO: 306064 - DNA, 552 bp, Proteus mirabilis
atgagtagaaaacttttagttccccttattatgaccagtctatcgctatgcgcagcaaatgcacaagccgtaggtgaaaatacgctttcattaggttatgcacaaagtcatgctaaagtggatggcgataaactaaaagagaaacccaaaggatttaacgtcaaatatcgttatgaattcgataatcagtggggaatgattggctcctttgtttatacgcatcaagggtatgattatcactggaactctcgaaagattgggagtattgatttagattattactcgttggctgcgggacctgtttatcgttttaacgattatataagtgcttatggattagttggggtagctcatggacaaatggaagtggcattgaataatttttcctataatgggaaagaaaatcaacaaagtaaatccgcattcgcttatggtgcgggtattcaatttaacccatatcccaatatcgcgattgatgcttcttacgaatacactaaattagatgcttttaaagtgggcacatggatgcttggtcttggctatcgtttttag

SEQ ID NO: 306065 - DNA, 144 bp, Proteus mirabilis
atgattttatccaatattatctatatgagagaattaccgctattgcaagccaagagaagagatggctatgatatagaaatatttaattcaggtaaattagataaaaacatttgttctttaaattatcttatccctataatttag

SEQ ID NO: 306066 - DNA, 885 bp, Proteus mirabilis; identical to SEQ ID NO: 303441

SEQ ID NO: 306067 - DNA, 1260 bp, Proteus mirabilis
atgaatgaactaaataaaaaacacctgatgccttcaagtcatactaaagaggttctttctaataaggacttagcacttctaaatgacttgcatgcagcacttcagaatgaaaaacatcataaaagttttatgatgatcacaatattgctgatctttatggttattttcgttatttgggcatggaatagtaatcttgaagaggtaactcgtggtcaaggcagtattattcctagcagtcgcgagcagataatccaaacattggatgctggcatattaaaaagtatgcaagttaaagaaggggatatagttgaaaaaggtcaagtattattaacgctagatgatactcgaacatcggctatcttaagagaaagtgaagcaaaagttgctaatctagaagcaatacgagcacgacttaaagcggaggcttattctactgagcttagctttccagaaggtttatcaacagaattagtaactcgtgaaacaacagtatacaagatacgtaaagacgcattgaaatcaggaatagacaatttacaacaaagtaaagcattgttagaccgagaaatttctatcactaagccaatagttgcacaaggtgcaatgtctgctgtggaattattaagaatggagaggcaatcagccgatattcaattacaaatagatgaaaagaaaaataaatatttaactgaagctggggctgaattagttaaaacagaagcggaattagctcaagcaagggaaaatatggctgggcgagctgatcctgttgaacgtgctttaatacgtgcaccattaagaggtattgtgaaaaatatccgtattaatacagttggaggagtaatttcagcagggcaggatataatggaaattgttcctttagaagatcagttattagttgaagcttatattagtcctcgagatgtggcctatgtacgtgctggtatgcctgcattagtaaaattgactgcttatgattatgcgatttatggtgggttagaaggcgtcgtgactttggtaagcccagatacattgcatgatcaaaaaagacctagtgatttaaaacttaatcaagatgaagctttttatcgcgtattggtcacaactcaaagtagtcatcttacggataaaaatggaaaagagcttcctgttattccgggtatgatcgccagtgttgatattaaaacaggtgagaaaacggttttccaatatttgatcaaacctataacaagaatgaagcaggcattacaagagcggtaa

SEQ ID NO: 306068 - DNA, 2163 bp, Proteus mirabilis
atgaaattgatcatagaaggtctttctcttacaacccagttattaggcacacatttatctgtggctacactgactgcacatacaatccgtactacaaagatgggaattgatttttcatcactggttgaatatctgaaaagtgaaggatttgaaaatacattatcacaacgattattagatgatattccctctctagctatgccagtattattattattaaaaaatgaagagagtgctgttttaaccgaagtttcatttgatgaagctggacaacgtaaatataaaattcagcaagtagatggtttatctatatggttaacacaatctgaattaagtgaaaaatatttaggttattgctggttcattaagccacgtattacagaagatgttcgttcagaattgcctgaatatacgatgcctaaagcatggttttttaaagttatatggcgctttaaaaaatattactatcaaatcattctcgctacttttgttattaattttttggcacttgttagttcattatatgtcatgaatgtttatgacagagtaatacctaataagtcatatcaaacactctgggttttaagtatcggggtaattattgcaatattatttgaatttacagctaaaatgctccgaggccggttaactgatattgctggtaagaaagctgatttaattatcagttctgctttatttagaaaggtcacaaatcttaagttacaagaaaaacctatatcatctggctcctatgttaataatttacgagattttgaatctgtccgtgattttatgacgagcgcgagtttattaacattagttgatatgccttttttaattttatttgtatctgtaattgcgcttgttggaggctatttagcttttgtgccacttactataattccattggttattattgtcggacttttagctcagatccctttatccaaatatattaatgaatcgatgaaggaatcatctcaaaggcaaggattagctgtagaagcgattgaaggcatagaaacattaaaaacgaataatgccatgaattgggcgcaaaagcgttgggattattacacagcaaaaacagcatcttcatcaatgaaagttaaaaacatcagtaattttgttatttattttgcagtaatgatgcaacagttaaatacgatatttttagttattattggtacttatttgattcatagcgatgatcctgcaagtaaaattacaatgggggcgttaatcgcaacggttattttatctggtagagcgttatcaccattaggacagattgcgggtttagctgtgcgctttcaacaggcttgggtcgcattaaaaggtgttaatggcattgttgagcgaccatcagaacgtgaatcagctaggaaatatattacgttaaaacaaataaatggaaatataaaattccaaaatgtttcatttgcttataaccaagatagtagcagtgtagtgaaaaatttatcatttgaaataaagtcaggtgaaaaagttggaatacttgggcgtattggcagtggtaaatcaacgactttaaaattagcagctggattatatcctgcagagcaagggagtatcacactagatgatgtcgatattcgccaaatagatcctcattatttgcgtaatcaggttttgttattagaacaagagccaaggttatttttaggtagtttaagagaaaatcttgatttagcccgtatggatggcttctctagtgatcaagatttgattgtggcactgaagcggtttggtttggataaagttattaaaaagcatcctaggggattagatatgtccttgggagaaaatgggttaggtctttctggtggacaaaaacaaattgttgctttggctagaatgacgttgagaaatcccaaaattgttttacttgatgaaccaacaacggggcttgatcaatattcagaaattcaggcattaaatgccatttcagcatggtgtcgctcaaagacattattggttgttactcatcgacctcaggtactgagtattgtcaatcgaataattgttgttgataacggcaaagttgtgatggatggtcccagagatgcggttttacagcagttagctaaaaatgaaacagaaaaacaaataactgctcactcaaaaaaccaaaatagataa

SEQ ID NO: 306069 - DNA, 1692 bp, Proteus mirabilis
atgcaaaaattaaagtttttacgattttcaaaagaaaaagtttctctttttttagctgtctatattggtttatttcttaatctttccgtttacattggccgttatggcacacagaattctcacaactccctcattgaaagtttatatatactgggtgaagttgcagtaaacattgcctttactttcttcttattacgacttatttctttttgtggcacactattttttaaaatagtcgcttcttttattctgctcattagtgtttgtgctagttactatatctctttctttgatgtagttattggctatggcattattatttctacgctcaccacagatatcgatttatcaaaagagctgattagccctaatgtgattatttggattattgggttatctattttacccctagcgctaacttggttatgtaagaaaccagaaaaaaatataactcagcagcaaaagaaaaaaatctggatcaaaaatacggtcaaaatgctcgtaatttctcttgcggtatttgcctatctaaaaaccttagattcgaaacaaaaagcctatgaaatcaagaataacttagatttgccaagctacagcggtggtttaagttacgcctatttaccgaccaactggattattcctttatttcaatatgcgataacacagtacgacgaccactttaatagccagaatatctttgatcccgcggataactttacctatataccgtcaaaagccaatgaagatgtctatgtggtctttattattggcgagacagcaaggtgggatcatatggggctattcggttatgaaagacaaaccaatcccttattaagccaagaaaaaaatctgattgctctgaaaggtatctcttgcgatacagcaacaaaactttcgctaaaatgtatgtttgtgcgtgaaaatggtacagaaaataacgatcagcgaacgttaaaagagaacaatattttctcagtattacatcagctaggaatgacatcagaactcttttcaatgcaaagtgagctttggttttacaataagcttgatttagataactatgccatgaaagagatgatgaccgccaaaaatagtaattttggcaaagaattagatgatactttgcttattaacgaagtcgcagattccgttgctcactattctaaaggtaaccacttagtgattttacacactaaaggttcacactttatgtactcacaacgttacccgaacgcatttaaaaaataccaacctgaatgcttaaacgttgacgatgagtgcaccaaagagcagctcgtcaatgcttatgataactctattctttatactgattactttattgatggtgtacttaataccctgcgtgataaaaaagccattgtgttttatacctcagatcacggcgagtcaatttcagaaaaaggtggcttacacggcacaccaaaagaaattgcaccaccagaacaatttaaagtgcctttcttagtgtggatgtcagatagctatttagctgagcctgaaaataaacagttatttgataatctcaaacgaaatcaagataataaccggactttctatcatcataatatttttgactcgatattaggctgtctaggttactcatcacccgatggggggattaataatcaaaataatctctgttttggtgacatagctagcgaagcacagtaa

SEQ ID NO: 306070 - DNA, 312 bp, Proteus mirabilis
atggttcagggaatatctaactcaaataagatgacgctatctagtgaaaaaacggaaagtgatattccaactgagtcttatagcgtaaataggtatttgaataaatgtcagcttacacctgaaagtataaaaaaattagcagagaaattagatatacttaaaaaaatagcgagtttaaaagacaatattgccagtcataacgatgagcaagatcttcaggaagataaaatgccagaaaattatgaaggtttgctattaagtcatcggtatttattatcatctggtggttctaaaactaaaaaatatctttag

SEQ ID NO: 306071 - DNA, 984 bp, Proteus mirabilis
atgaaccatttgatgggtaaaagactttttttattaggtacaatcttctttttttctgctgacgtctttgcagcttgtattcagaatcctaatttaaaaaatattcaggctcggatccccaataaaacctattcaattcaatatgatgatatagggacaagagtattagatgagtttcagattaattatgccaatgggcctataacaactttttcaggtaacgatgggcggtgtgggaacgcatcaatcactgccaattatactaatggctggttgcctaatgcgaataaaatagcacagaccaatattgcgggtattgggatacaggttaaatttgctggaataggtgcattaaatacaacgtatttgaccccaaaggacccaagtggcaattcttatcgacttcttaccccttattggacagtcaaaattataaaaacaggcagagtaacgcaatcaggaagccttcaatggggcaagattgctcaagcagtacaaaataatacacaacctaaaaacacaacttggaacttaacttcactttatttgcctcttaatgcaataaagataaattcattaaaatgtactgcaaaatcatcaaattataatattaatatggggacttggtatgatactcaatttaaaaatattggtgatgtcagtaaaagtgtagatgttcctattacattaaactgtgcggctggcactaacattaaagcgacagtgacaagtagtgctggatatatagatgcaaatacagggaaattaaacctatcgggcactaatcgagccactggtgttgccattcagttattagataaaaacaataacccgataaaactaaatacaaaaaatagtctacaaaatggggtctcctccggtgattatatatttggttggaaagcaagatatataaaaacaggtaataaaataacgcctggtagtgctaactcaacagcaacagtaaatatcttatatgagtga

SEQ ID NO: 306072 - DNA, 195 bp, Proteus mirabilis
atgtcgaaaattgatggaacaattaatcgaataaaagatcaacaaataggtagctcaactaaaaaagtattattagttgaaggcagtgatgatgagttagcttttggcgcttttttaagaaaaaagtttcctagttgggaacatattgggttattgctagcacgggcaagaaacaaaatgtgttggatattttag

SEQ ID NO: 306073 - DNA, 975 bp, Proteus mirabilis
atgacccgacaatcacatcgccggcgtctggcgggggctttgttactcggttgttcactggtgccggtggcggaagccagtctgagtaccgccactctggtcgcttctgcggcctcaccgtcgtgtatcagctggcgtatcagcgggatttgctactggctgaagtgtggctggggcggctgccgtatccggacatctgtccgggtgtcacattttattccgcaggcggtggtctcggcctaccatgccccgggtgaaaacccgtggcgggaaatgtcactggtcagcggggcggccggcgggattgaaaatgccgtgaccggcgtgctgagcggggtatctgccgggggcggaaacagtgaacagaagtttgaggcaaaacgtaaaaccgccctgcactttttttatgcggatgctatcggtcatccggcaaccacccttatcggcggcagtattccggggtattcctgtgacagcgcagccacaccgctgtttccttattacctgagcacgctcgacagtgtgccgtggcggctcggtgtgccggaaatggcgtatccggaagcgataattcccgggaaacgggaaatcggggggcagagccggggcaacatgtggggaaatctctatccgcgcagcggttttgtcaaccagcaggacggggataaagcggcggctgtggtggcgcagcgcgtggcagatattatgacccgcaccgggcaggcgcatacctatgtgcccctggaaggcaaccgccgggatggctattggccgccggacgcggtgacggagaataccgggacaaaaaaccataaatggcagcgcctgtcgccggggctgaaaaacagctgtgcggtgtttccggatgagggcggagcacaggcacaggacggtaattatgcctgggcattgtggcagccgtacagctgctgcaagcgcatggggcaaaaatttctgtacagcacaacgttttaa

SEQ ID NO: 306074 - DNA, 705 bp, Proteus mirabilis
atgcttgaggttattaggaaagatttattcgatattagaagtaaattagacaatggctactatcaaatatttaaagatagactggtagatcctacattctatttagataatattcttgttcaacaagaaggaaaaattttatcgtcgacactctgtaacggtgcaaaatatataatagcagatagtgaactttataatagtattgaaaatggtgatattatatctgtttcaaatagtagaattagagttattttatctcgcaaggcaaatcataatacgttacttgttactgagcgttgtaataatttatgtcaattttgttctcagccccctaaaaatagagatgattcttggcttttagatgatgctctacttgcgattgctgcttttaatttcgatggtgttattggaattagtggtggagagcctttactttatggcaataaatttattgattttattagagaaataaaaagattggcaccgaggaccgttttacatgtattaacgaatgggcgaaggttttctgatatttattttacaaagaaattattatctgaagcaaaagatatgaatatttcatttgggatccctctttattcatctcataaagaaattcatgatgagttagttgggcataatggtgcatatgaagaaacaattatgggaatagtaaatgcaggtaatttaggcattaatatttga

SEQ ID NO: 306075 - DNA, 1002 bp, Proteus mirabilis
atgtatggtcttgaaatttttcctgctgaaggtggtaaaccttaccgtttaacgcgtgatacgcaaattctctgttatttaacctcttatcagatagggccagaagattggccccattatcgacaaccgaaaaaaacacggagcaaagtcattcatgaagccatggggtatgaggcgttcgccatcccaagagtggcttctgtgtatatggcggtgaatgattatgcgtattttcagggaataacgcatatccgaatggaaggacctgtattacgttatgagtatgtttatgacaatgttcaggttcaagacccacagatggccaaaagagccaatatggtggtcgatatttatggtatcccgttaccggatagtacaaaaccaacgtatggtgtggagtggtatggcgcctttcagggatttcgaagtgcgattacacgtaatacacaaatgacttattgtgtgtctcgacaaaaaatccaccttgaaggcgggcgctattggtctttgccaacaacattaccgcatttagataagtgtgttgtgttttatcatgccaccaaccctcaagcggaagtgagctatttagcgcataaaaagcaattatacagttcagcccaaacagacatttatgtgtgtgttttcgtttcaggaatggttttgaccccgaagagacgttgggggttatcactgtacagtgaagatggaacactggtctttaatacggactatttgccttttacccgaggaaaatcaatggaattgttattgcgggaggggagtgtagagactccatatagcttacctttagtctgtgcaacaagtcagtttgtgaatgcgtcttatcaggatgaccatattgattgggccaagcgcaatacaggaatacgttttcggggaaaacagatttttgtgagtgaacggatacgagatgctcatcggcaacatcatgtagagcaaagtatccccttttatgtcctcaatggctcactttatttttag

SEQ ID NO: 306076 - DNA, 267 bp, Proteus mirabilis
atgtataaagataataacgataatataaaatctatccctactgaaaaatttaatatcatcattgttcctcatcatggagatgaagctagctcagaaaaaataccaactcctttagatggtaattcgcaagcatatttttctgctggaactcatttaggatataatcatccgagaaaagaatctatacaaggtcacgaggaaaaaggatttaaagtaatacatgataagcaatgttcagttattaaaatagcagtaagcactaaatga

SEQ ID NO: 306077 - DNA, 384 bp, Proteus mirabilis
ttggatgatgcttacattgattctttactacttactcctgaaaaacgatttagtgtggatttttctggctgtactaatcaagaaagagcaagaaaagtcaaaatagttgttgcacaaaaaaacactactcatttaatgaatgctagttcgacagcaaatgataccaatgctcgagtagcattattgggttctacaggtgaacttgttccacttaatggtgagcgagaacaacgtacattttattcggaggttgccggtgatagtggtagattagtattttcattaaaatatgatagacctgaatcgattgatgatgctgttaccgcaggtgctttcaaggctaccttatctcttgatgcttacatcactgataatatccaataa

SEQ ID NO: 306078 - DNA, 384 bp, Proteus mirabilis
ttggatgatgcttacgttgattctttactacttactcctgaaaaacgatttagtgtggatttttctggctgtactaatcaagcaagagatagaaaagtcaaagtagtttttggacaaaaaaacactactcatttaatgaatactggttcgacagaaaatgataccaatgctcgagtagcattattgcgttctacaggtgaacttattccacttaatggtgagaattcagaacgtacattttcttcggaggttgccggtgaacgtggtagcttagaatttttattaaaatatgatagaccagcatcgattgatgatgctgttaccgcaggtgctttcagtgctgccttatctcttgatgcttacgtcactgatgatatccaataa

SEQ ID NO: 306079 - DNA, 195 bp, Proteus mirabilis
atgaatcgatgtagcttagagcttacagatgatgaaattactattagtcctctaaaccatttacgtatggatcattgggtaggtgagggaatatctgatagtgcaattattacattaaaagccaattgtagtgatgaggttttaggtgcttcaataaaaaaagcttttacacgttgtattagctgtaaagtttaa

SEQ ID NO: 306080 - DNA, 171 bp, Proteus mirabilis
atggatctaaaaaaaggctataaggttttacctaatgatattattgatgacgaattaggttattatgccaaactcgctctgattaaaagtgaacaaataaaaggaaattcagataagtttaatcaaatgtataatgataaaaaaacttatcaagactggataaaaaaataa

SEQ ID NO: 306081 - DNA, 309 bp, Proteus mirabilis; identical to SEQ ID NO: 296730

SEQ ID NO: 306082 - DNA, 261 bp, Proteus mirabilis
gtggaactgattgcgcgcatgctcgaccgttttgccgagcaattcgacactgtggtgccggtgctcagtcgcgtacgggtacgcgaaggcaggctaccgttcaagatctcgcagacagtgggtggcccgaatggccacgtggtgctggaggaaggaagccgcttattcgtgggtgatgaagtggatggcctgcgcctggttttgatcgataacagcaaagtggtttttgacggcgagcaacgctatgaggtgggctggtga

SEQ ID NO: 306083 - DNA, 243 bp, Proteus mirabilis
gtgcccgctgctgatcgtcgcgggcgtgctggtgcgcctggcgtgcctgccgatcctggcggtgctggtcatcgcgttgctggtggtgcacccggagtggacgctgttcgaagggcagttcggctggctgctgttgatcatctttaccagcgtgctgatcgcagggccggggcggctggtgctgagccagcgctttgcctgaacaaaaaaggcctggctcgcccggccttctgccttctgtag

SEQ ID NO: 306084 - DNA, 216 bp, Proteus mirabilis
gtgcaaaccagccaaaccgtggctcgcagcggttcgcaagaagacgaaaaccgtgattacgccaaaggcgcggtagctgaaaatggctacaaccgcctgcaagagaaaggtctggtcgaaggcggtgctgaacaagccaacaaacgcgcctacaccgaaggcgttgctgaaggcggtgccgaccgtctgcaagaactgcatcaagcacagagctaa

SEQ ID NO: 306085 - DNA, 903 bp, Proteus mirabilis
atgttaagtccatattataatacctctgttatatctgttcccaccatcaatgatgatattgatgattttcaaacactttttgcattatattctaaagtgatgtcctcagatgcatcacatattattttcaactttgaccattgtaagtttctgaaacctaatgcgtgcgcctttctcggcgggatgttacgattgcttaaacgaaaaatgattaatactgtgataatgtgggataccttacgccctgaaattatggcaactctcaggcaaaacacattttgtcagcaatttggctctttaggctcattctatcaaggacatgcaataccttatcgtgaagaccctaaacaagatatgaattcaattattgattacttaactctgaattggattggtagaggatgggtcagagttagtgagccattaagagatgaaattgctggaaaagtatgggagatttatgctaactgcttcgaacattcagcctctcccatcggtgtattttcatgtggtcaacattatcataagaaaaatgaattagtattatctgttgttgattttggagttggtattccattcaatgtacgacaatttctttctatgggcaatccaagggcaactaaaatcacagatgaaaaatgtttggaatgggcatgtgttggtggccatactacagcagctaatgaaggcgtagctaggggactaggtttagatcttcttaaagattttgtgagagtaaataaaggaaaattagaattatatactcactcagcttacgcaaaatttgatgaaaatggtgaacattatatgactttacctttttcatttaggggtactatactgaatatcacgctgctgtgcgatgaaaaattttatcgattaacatcagagtcaggaaattaa

SEQ ID NO: 306086 - DNA, 351 bp, Proteus mirabilis
atgaaaatcttagtcaaaaaatatataggaactcgctgcattctcaaagaagatggacaaaaattacatgataaaattgttcatcattttaaagttggggatgatgtcacattagatttcattaatgttaaaatgtttgcctctcctttttttaactatagtattggtcaattgtttaataattttaagcttgatgagatcagaaaaaggttacatattgagaacattgaacctgttggaagctcaattattgagcgagttattgaaaatgccaataggtttcagattgatgttgactacaaaaaaattgttgatgatattttagaacagcaagcaaaggagtcagactga

SEQ ID NO: 306087 - DNA, 615 bp, Proteus mirabilis
atggctttcagtggaacaatattatctaatgtatttgacatatcgacgtatacgccttctgataacgacaaatttctagttgatacaaatgtttggttctggataacatattctaaaggtgttccatcacatcgaccttatttacacaactacaataattttgtaaacacagctttaactaataattcgcaattatttcattcaggtttatccctagcggaactagctcacatcattgaaaaaacagaaaaagaaatccacgaggccacaattaatgtaaaaataaatacaaaagactttcggtataactactcagctgagcgacaaaatgctgtaaaagagatagaaaccgcatggtctcaggttgagcttttagcaaatcaggttgatttaactatttgcccaaatattactacctcctgcatgagtagtatgcattctaatactttagatggttatgatttaatgattcatagaagtatgactgatgcgggtatattaaatattattactgatgatggagattacacctcggtacctggtattaatgtttttacattaaataaaaatgtattatctgcagcaacaacccagaacaagttaattgtctcataa

SEQ ID NO: 306088 - DNA, 609 bp, Proteus mirabilis
atggctaaatattctgttgtaccattcgcttttgaatcattttcaataagaacactaacaataaaaaacatgccgtggtttgtagcggaagatgtttgtagtgctctaaatctaagtaatcctacaatgtcattgaaatctttagatgatgacaaacggtctaagttaaacttagggcgtcaaggaaaggtcaatattatcaatgagtctggaatgtatacattgatactacgttgccgtgatgccattaaaagtggttctattgctcacaggtttagaaagtgggttacaaacgaggtattaccgtctattcgtaaaacaggtggatatcaattatcaaaacgaaatatacctactgatattcccctctattgcccctgttgccataaacccttagaaattataaaaacccatcagcgccatagacatcacactgaaataatcgctatatgtaatagccatgcttgccagcaagatgctttaaaatatgatttaaatttctcatattacatagaattaaaaggcaaaatagaaagcgataacaaggatgttttagataaactatcatataaaaagcgattagctttaattgagttattatctgattag

SEQ ID NO: 306089 - DNA, 426 bp, Proteus mirabilis
atgagtttattggcagtcagtacatttagcttggctgaagaacaacagcgttatgcgagcatcacacataccagctcaaattttattaaccaaggttactgtggttattcatttaccctcgataatggcggtaaccatatggttctagaccatgcggagtttggtgcgcttgaactaacgctgcgaatgaaagatgggcaaggaaaagtattaggggatacgatactggaagtggaaccttttggcgattctagcgcaacgcgtgccacgtttgcaggattggaaattccgtgtgaagatgttgctgagtttgaagtggttaaagcggtggaagatcaaaatggtcgtaaggttgaattaccgctatcgatctttgaggcgaataatcctgagttggcaaagatgtcagtcgcagggggaaaataa

SEQ ID NO: 306090 - DNA, 441 bp, Proteus mirabilis
ttgcttactgaagagagtttttggcaggtcaagaagctacagcaaggttctgttgtcgaacgttgtgaggagaatccggttcgttctgcctatgaactgctttgggatgatgtgaagtctgacaatatttcgagtatcagtttacaaaatacattacggcggatactggagaactatttcaccatgtggggggggatgggtaaagacgaaatttgtaatttgtttgaaggtcgtgacaaattgatatgtcagtctcttttttcttggatcaatgatggttcccattcgattcatgacgatttgtacatcaatcatggagagcaaactaatgaagcgtatttgcgggtatttagagatattttcgacaaagcagggcagattggtcactataacatgatgaaaggcattagctttgaaccagtcgcggcacagaatagttaa

SEQ ID NO: 306091 - DNA, 1743 bp, Proteus mirabilis
atgatcagcgaaatccagattaacgcacccgtagctacttatcagaatattacaaaactcactgatcttcgtcgcatcaattatattttcggcgctaatggtacaggtaaaacaaccatcagtcgtgtaattagccgtgctgtagggcatgaacattgcctaataacatggcaaggtggaattgaacttcaatgtatggtgtataaccgggatttcgttgagcagaacttttcacaagaaaatcctcttcaaggtgtatttaccttgggtgaaaatcaagtagaagcagaatatcagatagctagcctgaaaccagaaatagaaaaaacaaataaccaaatattaagcctcaataatcaattaattggtgaagatggtcgttctggtaagaataaggagttagatactcttgaatctgtgctaaaggaaagatgttggaagcagaaacagctacatgatgaatattttcaggtggcatttatcggtgtgcgaaatagtgcagaacgtttcaaagataaagtacttgcagagcaagaatcaaattcagctgaattgtgttctctagaagaattgaaagaaaaaacaaaaactgtcttttcaagcaaacctgagcgtatagctcttattgcaaatgtttcagcagatacttttattacattacaaaaaaatgcattattacaaaaagcgattgtaggggagcaagatgttgatattgcagcactcatagatcatttgggaaatagtgattgggtaaagcaaggtcgacagtatcatgaacagcaaccagatacatgtccattctgtcagcaagctacagataaacaatttacaaaggatcttgcagcattttttagcgaagcctatgacaatgatataaaagccctaaaagcattacaggcaaattatcaccaagaaagtgaacaactattgcttaccattcaagggtgtttggagagcggtaatccttttcttaatatcgagttacttagcgtggaagttgaagtactaactgaaagattaaaaattaatcatgatatattagctcgtaagattgaacaacctagccacaagtttaaattagagcccattgagtcattaataacgaaattacaaggttttattatagaggctaatgaagcgaccaatacatataaccagacagttgctaatattgtgtctgaaaggcgtatactgacttcgaaaatctggcgttatgtactgaatgaattgaaggcagacatacagtattatgagcaaacaaagattcgcttgattagcacaatagagggaatgaatcgaagtctcactcaaaaacgatctcatcttcgtgatatgaatgaacagctcaaagaactcgaaaagtatactacgtcaattcgaccaactattgcagctattaacgatttattaatgacatttggctttaactctttttctcttggagaggcggatgatggtcgttattatcggattatccgggctaatggtgacgatgccagcagatctcttagtgagggtgaaaagacgtttattacctttttgtatttttatcatctaattaaaggtgctcaatcaccttctggaattacagtgaatcgagtagttgtgtttgatgaccctatatcgtcgttagacagtgatattctttatattgtaagtagcttgattaaaggtgttatggaggaaataagagacccgaatagtcagataaagcaagtatttgtgctaactcataatgtctag

SEQ ID NO: 306092 - DNA, 1323 bp, Proteus mirabilis
atgaaccagttaattgtcaaggatgcacctgcattaccagctcttccagctacagtcttacctgctattgaacaactagtttctacacttggggttccgagaaatgttcttgcaagtgcagaggaaattgaatatgcatggcgagatcttcctagagaattacgggaaattcctgaaaatttaagaggtgagctaattgcgcggatgtgtgttgctgtcagtacagggttattcgacggagcaatgaattacatttggaatgcggcaattttacatctccgcgacaaaataagaatttttggtttgcctgtggttgctcaaatactacagaaggattttgaagaaaaacacttgttagagcaacaagatagccgtttattagagctttgtttgaagcttaatattgtcgatgaggatggctttttctttttagatcaatgcagagatgtcaggaacaatttctctgctgcacatccaactttaggtaaagttaatgatcgggaattcacaacttttttgaatcgttgtgttcggtacgcgctagctgactcatcctcacctaagggagtagacattggagcattcatctcaacggtaaaaggcccacgatttaatgatcaacaatgtagcatttgggttgaaagactttcaagtacacatgatgctcagaggcaaatgctcgtatctatggctcatggaatttactgcgatcctaatacaccagagcaggctcgtcttaatgctcttgatatatgccaaggcttgcttccttcttttaatgcatcaatccgctcagagttaatcaacaatcacacagagtatgttgctaaaggctatcaagataaacacgttgcatctctacaattttttgaaaagctttgtttacttagtttgctcaacgaatctgagcaacatcatatttttactagggcgataaccaggttatgggatgttcataacggaatgaataatttctacaatgaacctgcatttgcggaaaggctgttagaacttactaaccaaggtgctgtaccagaaactgctcaggaacaatatgtccaaaccataggttgttgcagggttggtaatggttatggggtatctaatgcagccatcaaatattatgatcaaatgatacgtaatttttcaccaagagaaatatctgtgcttattcaatcagcgactcataatactaatccgttagggcgacgtgtacagactggtgcttcatacagggctaacttcaaaactctgcttggactaattgacccagctagcattcccaatgtagttagaggagcttatgctcaatttattcgttaa

SEQ ID NO: 306093 - DNA, 393 bp, Proteus mirabilis
atgttaaagccattcctaataaaatcagcacttacaatactcaagttatcgagttttaactcatgcacaattattggatataatataattagtagttcagagatttttctagacacaataaatattttatatccgttcctagcaaaaagcagaccaccaaatcttattgctcacttcaccaaccaaccaaccaaccaaccaaccaaccaaccaaccaaccatattagaatagcaaactacttttttagtccacatcacaaaaacagtaaaataaactttaggcccaacaataggcccaaattaaaagttgaattggattttattatcttaaaatcaatgcactataaacttaattcagactccgccagcccaccaatcttggtgggccattga

SEQ ID NO: 306094 - DNA, 252 bp, Proteus mirabilis
atgggaatgttttattttgaagcattagaggggcaatcaataggagaggattatcccattggatatgaaggcaaaaccaaaatgggtgattattttcgttttattgttcctaccgtttatgcaacaatagcagatattccagaagagttaaggaaatatattgtagtctctgatagtcttgattttactaaagatagattgcttgataataataaaattagcgattattttactcatatgtattcagaataa

SEQ ID NO: 306095 - DNA, 477 bp, Proteus mirabilis
atgaaaaaaaaagccaaatcttggttaaagaaagaccaatcaaagacattgggtgaatgggcttatgcaaatattcctcgaaaaatttttattgaagagtttttagattttaataacaatgtccctgatgactataaattctttgtttttcatggaaaagtaaaatttattcaattcgattcaggccgttttactaggcacaaaagaaatatgcttactgaaaattggcaagacttaggatttgattatagtcatccaagacagataccaactcccccaaaaccaacattcctaaaagaaatgattgatatttctgaaaaaataggtaaacacttcgattttgtaagagttgatttatattattataataaccaaattacatttggtgaattgacaatatatccaggtgcaggatttgaaaaatttccagatgaatattgggatatctattttggtaaatattgggatataaaatga

SEQ ID NO: 306096 - DNA, 480 bp, Proteus mirabilis
atggaattagaacctaaagggtatcaactaataatatcaatgccttcagcccataatattagccctattatagcaaaacgtttagcaaaaaaatttaatgccacatatttaactgatattttaagaaaaataacagtcgataatgcttttcaacttctcgataaagcagatattaatattgaagaggctaaaagtcttagtttcaaaattaaattacaagtaaaagaagttggacttaaaggagggttttcactaaaaagtatccctactgaatttaggaatatatttccaccatttgttttaaacacacaagcatcatccaatactgaaaaaatcagaatattacttgtcgatgatcttatggctacaggaacaacattaactacagctagggatatcattgcacaacagtatccaaatgccattatacatgctatctgcctattcagttcaataaaaaaacaaaacaaaaaaacttga

SEQ ID NO: 306097 - DNA, 1257 bp, Proteus mirabilis
atggaatttagtgactaccaagctgaaattataaaagacataaaatcctgtcttgaaggtttacaagttcaaccgatactttttatgggtgctggcatttcacagaggtacatagaatcaccttgctgggaaaatttactcaaatatttagcagaacagtgcccattaataaaaagaccatatggttatttttctcaaatgcataataatgatatgccattaatagctagtgatttttcagaattatatgctgaatgggcttgggatgaaggtaaagctcaattcccagaaaattattttgatgggcaaaataataaagatatttatataaaacatcaaatagcacaatacttaaatcaattatcaagaaacacaaattttgaagatcatagatatgaagaggaaataaaaaaacttcaaaagataaaacctcatgcaataataaccacaaattatgatgatatattagagaggatttttgaaaactaccaaccaatagttggtcaagatgtagtcactgtaaattatacttcttatggtgagataatgaaaatccatggaagtactaataaccccgaaagtataattataacaagcataaatgatgaaaatatcaattctattctttctgatattgatgaaataatagctccaaataatgcattaatacctaacatttatttagtttcttttaattcagaatgtgaaagaactggagctcatcaaaaagaaatacttataggtgttggcgataataaatcaataagaatcaaagtgatatatgcaaactcattcggttgggtatatgatgcgttatcatcaaacactccagaaattagtgttaatccaaaacttataagagcgcttttagcaagaacctatacctttgcttctcaatctctagttaaacaagaattggaatatgactttgagatgttaaaacaaatagctgaagaggataatacattacctaaattatatggtatagctgagcttaataatggtcaggcattgaatgctaattatccttttactatgtcagaagtagcaaaagctttggggcataactcatggcatgctgttcaaaatattatagatcaaatagaaatagaaaaagggtttgatattaagtcaaatgataataactatcacattactattatgacagggaaaaccggctttcataaatactctcacttagcagtggaactcatgagaaaagttatgagtgatgaggaatatgaattaaacttataa

SEQ ID NO: 306098 - DNA, 297 bp, Proteus mirabilis
atgctattaaaaaaaatatttttagtgtcttttttattccctactctctcttacgctaataccttaccaacatcaaatatagataattcactaactcccaaccatgataatcttgcccgtttttcactcggtgacaatagtcaagcatccggcaacggtgccactgctataggtatcaatagccaagccaccaatactcgttcggttgctattggttatggtgcattagccaatgaggaaaatacggtttcatttggtaatagtgaaaagcactacttagtaaaaataaaaggttaa

SEQ ID NO: 306099 - DNA, 348 bp, Proteus mirabilis
ttggcaggggggataaacttatatgcttatgcgccggatccattgacatgggtggatccttggggttgggctgaatttgatgttgatagttatgaaaatttgagagcagcagtaaaaggtggaaatactggtttagatgcccatcacgctggtcaaaaagcaataatagcagatcttgtttcaggatatgaccctaaaacagctccagctattctagtttctaaatcagggcatacagtatcaaaagagggagtaggtattgtttcacgcagtaaaataaattcctcgacaggtttgccgtttaaaaatgcccgagaattattggcaagggatattagggagttatga

SEQ ID NO: 306100 - DNA, 885 bp, Proteus mirabilis
atgtcttatatatcaagagaaaagatagattacttgtccattggtcatcgactgcgtgcttatcgtattgcctcctcattaaaagctgaagatgtagctgaaagtttagggatctcccgtgccgctgtctatcgattagaaaagggtgaaatcgttaaaattgagacattagataatcttgctcgattacttaacacctcattaagtagcttattaggtattaatacggagtattactctagcgctaatggcttttttgaacgaatgcgccaacttgaaacgcaatcttcccatatttatacccatttcgaacccttttcttatttattaacctctgattgttatgataaaacgcttgtcgagatgttaacagaagcctctcctgagaatgcgctaacaaagaagcaacaagaagttttatctattttaaaagagcgtaaaaagcatcaatcattacactcaccgcatatttataatctaattagccagcagcaaatcgaaaaatttctttatgttggtatgctaggctctgttaatgtaagtaaagccattcaacaagaaagaaaacaacgcgcaaaacaagaaatcagccatttaattgaaaagttagagcaaaaaaatagtcatcttaatattgcaattatttcagatacgatgccatctttaacctttcaattgttttatcaaaacaaagcacctctctctttagcggttagtccatttcgcttaggtgaatttcctaatgtaagtacgggtattgcgacagtatcttcatcaacggaagcaatatttcaatatcaatctctctttgatacgttatgggcaaaagcaataaaaaatgatgatgccattacacgcttaaaagagattatcagtcattattga

SEQ ID NO: 306101 - DNA, 1257 bp, Proteus mirabilis
atgactcaaccaaatacagcaacagacttttcaattaatgacatgaaaacattaattgaaacaatgcaaatttataaaaaagataaccatgacaaagggataactcgtattgcctatagcgaagaagatgaagcagcccatctctatcttgctagtataatgaaagaggcaggccttgaagtctatcgtgacggtattggcacactctacgctcgcttaccggggcaagatagaacgttacccgccgtaggaacaggctctcaccttgataccgttccccaagggggggcttatgatggtgccttaggagttattgctggtttttatgctttgatgcaatacaaaccacaacaactgaaacgtgatctagagttaattgtattccgagcagaagaatcgagccgatttgggttttcatgtatcggaagtaaagtgctaacagggaaaattgaccatactcgatgggagcaaaatagagatgatgaaggtaataatttctttgatgttttaaaatcccttggttatcaacatgaaaatttagatcaatgtttgcttaaatcagatcgttatagtgcatttgttgagttacatattgagcaaggtaaacgtctagaaaacgatcaaaaaacaattggaattgtcaatggtatcgctgcgccaacacgtttttcagtcaccgtaaatggccatgcagaccactctggtgcaacgccaatgtatcaacgtcaagatgcgttagtggcgagtgcgggtattattactgatatcaatcatgctgcctgtacagaagcggtatacggcaccgtaggtaccattggtaagcttaatgtcataccaaactcgatgaacgttattccaggacaagtaaaattctccgtggatattcgtggtattgatacggacagtattcaacgtgttgtacagcgtttaacaaacagtgttgagaaagcagaaaaagattttggtgtaaaaataatagtgcaacctatttcggctgaatcaccagtaaaactggatgactcaatttgccaagttattgaaaatatttgtcaaaaacacgatatcaattatatgactatgttaagtggtgccggtcatgactcaatgaatatggcatctttatacccgacagcgatgatttttaccccctctgttgcggggattagtcatcacccagacgaatttacggagtttagtgatattgcaatagctgcagatatcttagcagaaacattaggtgttctagctaatcaataa

SEQ ID NO: 306102 - DNA, 1386 bp, Proteus mirabilis
atgaacatcaaacaccttgcgatagcgacttgtatcggcattgccgtgccgacaattgctcacgccaatacaaatgaattatcgatagaacaacgattagctcgactagaagagagaacgttagccgctgaaaaaagagctgagttagcagagcaacgtgccgctaagttagaaaatgcgttaaaacaaaatcaggcgcttaataacaatctatcacaaactagcgaaactataactgcgccaccgtcatcgttgatagaaacaaataccggttatgggaaactcaagttatatggtgatgttgaatttaatacagatattgcaagtaaaaaaggccagctaacctccattaatatgcgctcaggtaaagaaaaagactatggcgattatgataaatgggggatcaatgggcgtatattaattggcttagacggagagcgtctgttagataataaaaattatgcgggcttcactgttcaacctctggcaaatattgatggtaaggtatctctcgacgatgccgctttttattttggtaaaaaagagcgttggcaatttaagttaggtcgttatgaagcttatgacatgttcccgcttaatcaagatacttttgttgaatattcaggcaacactgcaaatgatacttatagtgatggctttggttatatctacatgatgaaagaaggtcgagggagaagcaatagcggtggtagcatgatgtttaatagccaatataataattggtattttgaaactaatttattaattgaagatggaacgtctatttttgctaacaaggaatatcacggaaataaactatataataataaaaatgttatttattttcgcccagttatttcatggaataataataattttaaagttgctgtagccttagaaaaaaatattatcaataatgcttatggttatgatgataaaaaaacgggtgaatttagagatcaatctaaacgcaacggttatggattaactttaggctggagcaatctacaacaaaatcctgaaaatggtgtcacaataaattggaataccgcttatttagacgctaacgatgagaacgactttacaacaggtactaatattttatggcgtaaattacaattaggctatatctatgcccataataatattaagtcatatactattaatagtgatgatgataacaataatgatattatatttggcccaggaaaatataatatccacactctctattcctcatatgaattacctaatattttagatatggataattttaaaatctatttaggcgcatattattctgttattaatggtaaagatattgaaatagaaaatagcgataaagatcgttatggtgtaagagcacgttttaaatacttcttctag

SEQ ID NO: 306103 - DNA, 645 bp, Proteus mirabilis
atgactaaaggtcttatttttgatctggatggcgtaattgttgataccgccaattaccactatattgcgtggaaaaagctatctaatgaaataggaattgattttgacaaagattttaaccatttattaaaaggaataagtcgaattgagtcattagagcttattttatctcatggtaataaaagtgatgtttattctgcggatgaaaaaaaatcattaacagaaacaaaaaataaatattatcttgagttattaaataatattactccaaaagatattttaccgggtgttttagatctaatagaacaagcaaacaataatcacattccttgtgctattgcatcagcttcagaaaatgccccaaccatattagaaaaattaggcattaagcattattttaaggcaattgttgatcctaaaacactcaaaaaaggcaaacccgatcctgaaatatttttgcgtgcggctgagtttattcacattccaccacatttatgtatcggatttgaagactcgattgctggaatacaatcgattaaacaagcgggcatgtatgcaattggcgttactgctgacggccccttaccagaagcagatttagctgttcactcattaactgaaatagatattcattcacttttttaa

SEQ ID NO: 306104 - DNA, 744 bp, Proteus mirabilis
atggctggtaccaatatagaaggccatatggcatatcgtattaatagtaatttggtaatgaccattgatactcaaatgttgaattgggtaaatataagaggagctgtttgtgaacaggctacaccaacattaactgctcatgccagtgaatttactgtacaatttccaatcagtgtgacattttatataaatgatatggttattgattctcagctacctatacctgaaatggatctaggaggttatgttcgtgcatttacactatcaggaacgagtcctcctcaaaattcttgggcattgaatgatgtcactgttcctatgcgattagcagcatcacaattaaacgtaacttcttcttgtaaaacagtaacaagtacaggacaagtaagtactttaaatttaaagcatgggcaactcgatacattaaattatgacagcttagttacagaaagtgtaacttataattgtgttttttcaaaagcaacaaaagtgagattacgtctcgattatataactgataacgatcctcaaaaaagattaccgatggtgagtacccaaaacagcaataataaaatttatagtgaattgaccatgacagatgaaataaccgggcaaaaaggtaaagattttaaaattgatattaatgatttgagaactattaagataaccagccatcttcaaggaacaaatgcgatagctggagattataaaggttcagcttggctaatcgttacgtttgattga

SEQ ID NO: 306105 - DNA, 1638 bp, Proteus mirabilis
atgattacagttttagattatttattagtaagattaaaagagttagaaattaaaactatttttggtgttcccggcgattataatttaccttttattggtgttgttgataatgataaagatattcaatgggtaggagcatgtaatgaattaaatgcatcatatgcttgtgaaggatacgcacggatcaaaggtttttctgctctgtgtacaacctatggagtgggggagttaagtgcgataaatggtgttgctggcgcctttgcagagcaggttcctattattcatattgttggcgcgccttctcagtcaaagcaagagaaaggaaaaacattacatcattgtttagcgacgggtaggtttgatgcctttgaaaaaatgtatcgtcatatttcaaaaacgacggctgtattaacatatcacaatgcgacggaagaaattgatagagtattagaaacattgtggcgttatcgatatccggtttatttattaataccagaggatgtcggtgtgatgaaagttaataaaccaaagttaccattacaattaacattacctcaaagtaatcccgacgatttaaataaagttattactcttcttgaaaataaaattaagcaatcaaaatcaccatgtattattattggcgaacaagtatcacgttaccaattaagaaaacaagttgagaatttattagaaaaaactaatctgccattttttactgtatggggaagtaaagggattgttgatgaagggcgtcaacagtatggtggaatattatttggtgaattatctaatccacaaggtttagattatattataaattctgatttaattattagtcttggggtgagttgggatgaagttaatacagctggatttaccttcgacgttcccacacaaaattgctatcaattttatgatacttatagcttaattgaggaagagaagatttatggcgtttctttactcgatatgcctaacgccttattagcccttgactatatttatccccacaacatagcgttactaccgcaaaaaatagtaccgcctgattggcaaggactgataaaaatagattctattcctcttctgttagataaagtccttgatgataattcggttattcttgctgaagcaggcaatgcttttttatgtgcggttaatcatatattttctggtaacagtcaattagtggtcagtaatatttgggcatccattggttatactttacccgccgcattaggtgttactcttgcattagaaaaccaaggacgtgcctttgttgttattggtgatggtgcatttcagatgactgcacaagagctttctactttattacgcttaaaactcaatcccgttatttttattgttaataatcaaggttacgcatttgaaaagatcttttacgggcctaaagatacctttaatgatatccaaaactggaattactcacagttacctgagctatttaattgtgatgcttatagtgtgaaagtggatagtctagaagcgttagaaaccgtattacctttattaaaagtgcatcaagataaactgtgccttgttgaacttgatatggataaacatgactattcggagccaatcagtgaatttattgcgttgcttaatcagtataaatga

SEQ ID NO: 306106 - DNA, 2052 bp, Proteus mirabilis
atggaactgaagtcaaccccaatgggacaacgtttagctcagcatccttataacagggtaaaattgttaaatgcgggtattgaggtcagtggtgaaaagcatcaatatttaattccttttaatgaattgatcgacattttttgtaaaaaaggcattgtgtggggagagttagagtttttactgcccgacaataaagtggttcgtttgcatggaacggactgggaagaaacgcaacaattttaccgctatctctatcaaacttggcaaatatggagccaagagatgagtgagataacggcgcaagtacttgaaaagcaactctcttctatccaagatataattcaaagcgataaatggataaaacaaaaccagttagccggtattcaacaggctatccaagaaagtttttctgctattcctcttcctctggaacgacttgctcaatttgataactgtaaggtgcattatcaacgctgtttacagtggttacagcaaggtaaggcattaattgcgcaagaaaatgagcaatggatcacccgtatgttgacagagcatgcggagttttttactaccattgaaacatcgcctttaaatgaatcgcaatgtaaagccgttatcaacggtgaagataatatattggtattagcgggtgctggtagtggtaaaacgtcggtactagtggcaagagcagggtggttgttacgtcgtaaactagcaacctctgaacaaattctactattggcttttggacgtaaagccgctgaagagatgaaccaacgtttatctgagcgcttaaacgctgatattacggcgaaaacctttcatgcattggcattatttattatccaacagtcaactaaaaaacaacccaagatcagcgaattagaaatcaatagtgaaaagagaagaacactattgttaacgcagtggcgtgagcagtgtcagcagaaaaaagcacaagcgaaaggctggcgtgagtggttatctgaagagctagcatgggatatccctgatggggagttttggcatgataaaaaattagaaaatcaagttgccgtaagattagagcggtggatcagtttattaagaatgcaaggtggtagccaaaaaacaatgattgattctgtgcctgcagaatatacggatgcatttaaaaagtgtttaaaactattagcaccactgttaaaggcatggaaaaccgcattaaaagaagagaatgccattgatttttcagggctattacatcaagccattaatctgatagaaaaagggcgtttcgtcagtccttggaaacatattctggtggatgaattccaagatatttcaccactaagagcagcactattaaatgcgttaaaacaacaaaatacacaaacttcattatttgcagttggtgatgactggcaagctatttaccgctttagtggggctgaattattactaacaacagcgtttcatcaatcttttggtgatggtgctgagtgtgcattagataccacttatcgttttaattcgactataggtgacgttgccaatacatttattcaacaaaatcctaatcaattagctaagcctttaaatagcttaacaaaaggtaataaaaaagccgttgtattattgccggatgatcaattagaaagtttattaaataaaatgagtggttatgtcagtgacgataaaacgatccttttattagcgcgttatcattacttacaacctgatttattgaaaaaggcgaaaacgcgctggcccaaattaaaattacagtttatgacttttcatgcttcaaaaggtcaacaagctgattatgtgattatattaggtttacaatcgggtaaagacggatttccagctccggcaagagagtcgattatagaaaccgctttattaccccctgttgaagactatcctgatgctgaagagcgccgattaatgtatgtggcattaacaagagcaaaaaaacaagtatggttattatttaataaacaacaaccatcttgttttgtgtcagagttaaaatctcaaggtgtccctacgcaaaaaaaaccataa

SEQ ID NO: 306107 - DNA, 639 bp, Proteus mirabilis
atgaaaagccctaaaattgatcgattaaatgtgttggatacggcgctttctttgctggaaaaagaagggattgaaggcttaacaatgcgaaaactggcagatgcattacatataaaagccgcctctctctactggcattttgataataaacaaacgcttattgagggaatggcagatcgtatagtcagtgaagtcgctgttgattttcactatagccaagattggaaagcggatctaaaacgtctagcaacagagctaagagaagcttttttacaacatcgtgatggtgctagagtttttgccggaacctatgtgatttctgagaatgtgttacgtataaacaatacgcttattactttaattatgcagtctggtgcatctgctgagttagcgagcaatatgtcgatgaccttactctattttattttagggtgttgcattgaacagcaagctatcacgcttattgatagtgaaattttaatgcaaaaacgactcgcttttgaacaaattgtacgtgataaataccctcaaacttggcaagtaagagaaattctttttgctgatgattttgctatgcgttttaattttggcttagagcaattagtcacagggtttgaacaccaactgatgacaccatga

SEQ ID NO: 306108 - DNA, 924 bp, Proteus mirabilis
atgaaatatcattccttattaaaaaatttattttatgcaacactttccatcatggcgttaaattttagtggcgtcactatggcaaaaaacaccatgaatgatatttatgttattaatttatcctcaaataatacagtttgtggtgtaaaaattaatgaaatgctagtaatgcataataaaaaacaccctaaaggtcattattccaccggtcaaaatatctctagtgtgcttgaaaatgggaaaaataccttaggtgtaattatgtttaatgggtcggtttttactggcgaagaaaaacttacccctgatatgtggtgtgaagtcgaacttaagaaattatctgcaaatggcgataacaccttaatatcgggacttagattaaacggaaataatgatgggaaaatggtggtctctaataaatatcaaaataacagtgagcatatctattttggtagtcccagtcgaaaaagtgaatttgatgctttagaagcaaaaaaccaatttaatatacaaggcctcccccaatggcaatgggaaaaagcaactcccgctactgaagacgatattcctaaaattcgtgctttttataccgaactacgacaagcatttattgataaaaatctagataaattaaaaactatggggaaaatatcatgggaagaaatagcctatgccgataatggctctcctgatattttttggagttctttagagtttaaagagttactcaaggatggatataaaccctcagatatagattggaatcgatacgaattaaatacctataacaataaccgtttgtttcgctatgaaataggatttagcagattatcgccaataaaacttgttaatcctgaagagagaacatttcattataatccttacctttctattattgatgggaaagtgactattgtccgataa

SEQ ID NO: 306109 - DNA, 171 bp, Proteus mirabilis; identical to SEQ ID NO: 301943

SEQ ID NO: 306110 - DNA, 519 bp, Proteus mirabilis
atgccaactccttgctatatttccattgaaggaaaaactcagggcaacatcactgcaggcgcgtttactgcagattctgtcggcaacatttatgtacaaggtcatgaagaccaaatgttggtacaagcattttctcacgtggtgacggttccgaccgatccacaatcaggacaaccttccggccaacgtgcgcataaaccatttagttttaccgtggcattaaataaagcggttcccctgctgtataacgcattggcttccggcgaaatgttgccaaaagtcgagctaaaatggtatcgcacctcggtagaaggtaaacaagagcacttctttaccaccacactgactgacgcgactatcgtgaacatcgattgccaaatgcctcattgccaagatccggctaaagccgacttcacgcaacttatcgaagtctccctctcttaccgcaaagttgactgggagcatactgttgccgggacttcaggtgcagatgactggcgtgcaccactcgaagcataa

SEQ ID NO: 306111 - DNA, 927 bp, Proteus mirabilis
atgagcaatccatttacagtatcacaacaccctgaacagctagagacctcccctttaatagatgaaagccatcactatgatgaccctttaccgccaaaagatctgatttttttacaaagtataaatgaacacacatgtaaaattaaatcagcacaagtaaatagtagattatcaaatatattcccaatgtttttagtaatattgatgttaatgttttatacattgtttattttttatgagaatcatagtgctaaaagatttacttttgaagaaaacgttcaaaatatagagtcagaatatggaaactctcaaaacttaactactttttataaagagttagtggaggaatatagaccttattttggtagaaaacaaataggatggctagaatatttattctattattataatgatgacatatataaacgtgatgactttaaaataacaaccttgattggttggctaatttttttccctggctcgttatatatcttaagctcccttgctttctttgtgccaatgacctatttggtggctgatagaaaacgacagatcttatattcttatgtagatggcattgtgatggcaacccgttatgaagatgctcaattcggttatgccggtaaaatgttagcatttaaattattctatatacatcctgaaactggtgagctaggaatacatatatatcgtcccaatgtctctcattacacaggttttttattaagtagtgatactgaagatcaccgctttattacttttcttaatgcctatatgcaacaaggccgagatgctgtttcgcctgttgattaccaagctcgtaagccctttttatcttttggcaaaaacccacttcctgccgattttgagcaacaggtcgaacagattctggcaaagcttgatcaggagaaaaaataccatgcgtaa

SEQ ID NO: 306112 - DNA, 465 bp, Proteus mirabilis
atgtgtataagagacagttctgatagtggaaaaggaattgctattaaaactaatgttggttcattggctaattctttaaaaaaaaatcataaagttaacttaagaataggtaaagtaaaatatcttaatttttttgactcgaatttaaaacctgaggattgcttagtagatggttccacttctccattattgaaacgtaaagaatatgaacatgaaaatgaagttagactttatctggttcctcaacctgaaaattgggatacatatgagccaattcctttttttcttgatattgatgtatcgattttaatcgaagaaatatatatatctccttatgtaggagagccatttacttctagtgtttataaaatatgtgagttacttggagttccagaaaataaaataaaaaaatcgaaacttttagatgattataaagaagctatgatgagaattattggggcgtaa

SEQ ID NO: 306113 - DNA, 423 bp, Proteus mirabilis
atgttaaccattcactcgttaactaccggtattttaaccgaggtttcattacacctagagcaagggtgttgtttagggatcagtggctcatcaggtagcggcaaaacaacgttactcaatgctattgcgggttataccggctatacagggaatattgttttagctaaccaaaatatgaataaattacctgtttggcagcgcccctgtcgttatttaaatcagcgtctttatttattcccttttctcactgtaaagcaaaatttatggctggcacaatatgcggctaagcaaaagcgcagtaaagaaaaagagatagcgttacttgaacagatgggaattgctcatttagcaacacgttatccatctcaaatatcagggggagagcagcaacgagttgcattagcaagagcactcattagctaa

SEQ ID NO: 306114 - DNA, 849 bp, Proteus mirabilis
  misc_feature (828)..(837): n is a, c, g, or t
atgcctaatataacactacaaaaacaacccgttattgcctatttagatagtatcgaaaatgtagtaggcagtgaaataggtaatgatattatttatggtgaccaaaaaaataactatttaaatggtatgggaggagtagattcattatatggattagctggagatgatacgctggtattacgggaaggttatgcacaaggaggggcgggaaatgatcgttatactattctaagagcatcaaatacggataataatgttaaacaacttgaaactattatcgatgaagagacgcatacagaagctagtcttatccagttaaattatacttttgatgaaattgctgctatttctcgtcgtgaaacagatattgtttttacgcttaaagttggtaatgataaagatcctgatcaatttatcgagcacttaattgcattaagtcatgtataccaagataaaaatagtcaattattagcccatagatataccattgtgactatggatggttttatacttactattaatgaaaataataatcaaccaagagaggtatcatataactttagttatttagaaaagtataatcagcaagagaagctgcgacagctttctgttaatgacgataaacacacattgtctattcaatctgaaaataaaactaaacttattcaattattacctgagctacaatacagtggtttctcttctggagaacatttaaagcttaatctacagggtaatagcgaaaataatcattatgctggaattacggctcattcatcaattaaactgagtcgtggttatgacaattatcaaataagctcattgctnnnnnnnnnnattaacatctga

SEQ ID NO: 306115 - DNA, 912 bp, Proteus mirabilis
atgtattatggttttgatatgggcggcacaaaaatcgagctcgccgtttttgataaagatctgactcaagtatggcaaaaacgtgtaccaacgccaaagaatgattatcaagctctattaaatgtttttaaaacactcactttagaagctgataatgatttaggctgtaaaggaaaaataggtatcggtgttcctggcatcgtcaacgcaaaagaaggaactgtatttaccaccaacgtgcctgctgccaaatataaaccgatgatccacgatctggctaatattcttgaacgccccgtcaaagttgagaatgatgcgaactgttttgccttatcagaagcatgggatcctgaatttcgtcattatccttcagtactgggcttaatattaggtacgggtgttggcggtggttttgtcattgatggcaaagtactctctggtaaaaatggtattgccggtgaaataggtcacatgaatcttaatgtagatgctgataatgtgattggtgagaccatgccaaaaatattgtgcggttgtggtagaaaagcctgctttgagacttatttatctggtcgtggttttgaacgtatgtataaagcctttaatggctcaccacaaagagcagtagatatcgttgcacaatattatcaaggtgatgaacagacccaacagcatgttgaccgctatatgaaagtattagccatttaccttagcaatattctgactgtacttgacccacatttaattgtcattggtggcggtttatcgcaatttgacgcactgtataccctattacccgattatctctcacattgcgtatacggtaatacgcaaattccaacaatagaaaaagcacgttatggtgatgcgggtggagcaagaggggctgcctgcttaaatttattagactga

SEQ ID NO: 306116 - DNA, 327 bp, Proteus mirabilis
atgggattactattagagttattaaaggctggtacgaaaaaagaggatattgttggcataattgtaactcacccattatttaactatttgaaagttgatggcccaaatcttcaagaatatggtcccaatttttctaaagaaactaaaagtcaaacttttctatcagaggctatagctagctgtcctaagtgcaaaatttgtggagggctactacatattaaatctataacttttgatcatatacgaagaaaagaagatggaggaacaggggatcctaataatgctcaaatggctcacccatattgtaatagtacatttaaaaattag

SEQ ID NO: 306117 - DNA, 1566 bp, Proteus mirabilis
atgttagataataatttaaaagctcaactgaaagcttacctagaacgattaacccagccagttgagttagttgcaacattagacgacagcaaacattctgctgatatccaagccttattaaaagaaattgaaccgttatctgataaagtcacataccgtgaagataacagtgctaatgtgcgcaaaccatcttttcttattaccaacccagggaaaacaactggcgttcgttttgcaggctcgccattaggtcatgagtttacttctttagtattagcattattacaaaccggtggtcatccatctaaagaagccccagaattacttgaacaaattcgtcagttagacggtgagtttcatttcgaaacctattattcgctctcttgtcataactgccctgatgttgttcaggcattaaacttaatggcgattttaaatccgaacatcacccatacggcgattgacggaggcatgttccaaaatgaaattcaggaacgtaatatcatgggcgttcctgcggtattcttaaatggcaacgagtttggccaaggtcgaatgactttagctgaaattgttagcaaagtagatagcaatgcagaaaaacgcactgcagagttattaaataaaaaagatgcctttgatgttctgattgtcggaagcggccctgcgggggcatcagcggcagtatatgctgcacgtaaaggcttaaatacaggtcttatcggtgaacgttttggtgggcaagttcttgatactgttgatattgaaaactatatctctgtacctaaaacagaaggtgcaaaattagctggggctttaaaagctcatgttgatgattatcaagttgatgtcattgacagccaaactgtcagccgtttaattccgggagcagcggaaggtgatctacaccaaattgaaaccgcatctggtgcgattttaaaaacccgtagcttaattattgccacgggtgctcgctggagaaatatgaacgtaccgggtgaaaacgagtaccgtactcgcggtgtaacatactgcccgcattgtgatggtcctctatttaaaggtaaaagagtggctgttattggtggcggtaactccggtgttgaagctgccattgacttagcaggtttagtggagcacgtgaccgtactagaatttgcctcagaaatgagagcagatgctgttttacaaaagaaactgcgtagcttaagtaatgtcgatgttatcttaaatgctcaaacaacagaagtatatggagatggtactaagttaacaggactgaaatataaagatcgcactaacgattcaatgcatgatattgccttagcgggtattttcgtccaaattggtttactgccaaacacacaatggttagacggaattgttgagcgtaataaaattggtgagatcgtggttgatccacgtggtgaaaccaatattaaaggggtatttgctgcgggtgactgcacaactgttccttataaacaaattattatcgccgcgggtgaaggtgcaaaagcctcattaagtgcctttgattacttgattcgcaccagtgcaaaataa

SEQ ID NO: 306118 - DNA, 327 bp, Proteus mirabilis
atgatctatgctgatttacatgttcacacaaaccatagtgatggtatttgtgaaataaaagatgttcttgaaaatgcatttagaaacggcattaagactattgcgatcaccgatcacgatactaccaatcattacgacgaaatttaccgagaaggggagcgtcttggattaaatatcgtcaaaggtgttgaaatgagttgttatgactttgacgtttataaaaaagtccatgtagtgggactttggcttaacgaaaaaacgcccaacgttgacaagctgtgtgataacactctcaactgtcgtgatcagtttcaccgagtaaaatga

SEQ ID NO: 306119 - DNA, 1497 bp, Proteus mirabilis
atgtttttatttaaaaaagctgttatcgctttgtcaattaatatcgcattagtttcttcggctctggcctgcacaacgttattagcagggagtgaagcaactaatgacggctctttgattgtagctcgtagcgcagatagtgatgctttaaaagcacaacattttgttattcatccagctaaaagtaatcagactggcatttatagcactcaagcccatcatggcgctaataattttacttatccactacctaaacactcattacgttataccactgtacctaattggaaaactcaattgcatggtgcaacgggttttaatgagctaggcgttggagtgagtggtacagaatctatttttgcctcacctaaagcattggcgttcgatccttatgttgaagatacggggatcactgaagatgatattccagatattttactttcaagggcaaaaactgcccgtgaagcaattgaattactgggaaacatcatcgaaacacaaggtgcgggggaagggtttggggttgccgtcgttgataaaaatgaggtgtggtacctagaaacaggtactggtcatcaatggatggcgcaaaaactaccaaaagataaatattttgcgacgggtaatcaagggcgtttacaggcctaccatatagatagtaatgataatttaggttctaaaaacttagttgagtttgcaatagaaaaaggactttatgatcctgccactgatggcgaatttaatttttctaaagcctatacgcgtgatgatgaacgtgatctcacttataattacccgagggtttgggttatccagcaacaatttaacccttctctgaaacagaatgtggcagatggtcgtcaatttgcgcctatgctgacaccggagaaaaaagtatcagtagaagacgccaaagcgatgttacgcaaccattttgacggtacagaacatgatccttataccaatggattgaatggcaatgaaccatggcgaccaataagtgtgtttcgtacttatgaatctcatgtgatgcaagtaagacctgaattaccgcaagagattggtgaagtgacttatgttggtttgggaatggctgatctaaccgcttttgttccttattacagtggattaaaagcatatccgcaacactatgctattggaacagataaagcagataatgactctatctattggaaatatcgtaagttacaaacattagtaatgacagattatcctcaatttgctcctattgttaaaaaagcataccaagaatgggaagctaaaacagcattagaacaaaaagaaatggaggctaactatttgtcactgagtaaaaagaataaagcagcagcggataacatgctgaatgaatttaatttacgtgtaatggctgatgcagagcaactaactgaaaacttaactaatcaactctttactcttaaaactaaaaatatacaagatgagatcttttttgctaatcaatctaaaaaagattaa

SEQ ID NO: 306120 - DNA, 894 bp, Proteus mirabilis
ttgtcacatcagaataccgtatttcatcaattactcaaacccattttaagacaagattttgaacgtctggctaaactgcaccactctgggcaaaaattaagatcagccacccgctgggatcagtttgttgccatattgatgtcccaactttcttgtcggcaaagcttaagagacattcaatccaatctcgaatcccagcaggaaaagctctatcatcttggcgcgaagagaattgcgcgaagcaccttagcaagactcaacgaagaacagcccgccagcctgtatcagcaattgttcacacagctgcttcagcgctgtgaaaactctaaaactgcacataaatttagattcaaaaatccgctgtattcactagatgccagtcatattgatctttcactgtcattgtgcgcatgggcaaaagtgcatgaatccaaagccagtattaaactcagtgttggcttaaatcacagcaataccattcctgaatttgtagcgcttggggatggtattgaaaatgatatggtgcaaggcagagcatttaaatttcctgctggcagcattatcgtctttgataaaggatatgttgattatcaatggtttgctcagttgacacttcagaacgtcagctttgtaacccggctacgcccaaagacagtttatcaagttaaattaggtcgaagccgcaatgcgatacaaacgcaaatatggattgcattaattgcctatttgctggtgaacttcgctaaacacatggcacaagaaggatggagtgttcagcgtttactgagaattattcaggtcaatttatttgaaaggaaacttttaaggtcactctttgtgcctgataaaaaatggcgaaaacaagaagaacctcaattgaggttcttcttgtga

SEQ ID NO: 306121 - DNA, 351 bp, Proteus mirabilis
atgaaatatatagaatattcgtatcatgatgaaataccgcctagagagttagtccgccattataatgaatctaaaataacaatattaacttcatattatgaaggatatcctaatgtgcttgtagaatcgctagcatcaggaactcccataatttcttttgactgtaaaagtggaccatccgaaataataaaaaacaataaaaatggatttctcattccatgctatgattgtattgaattcagtcaaaaaataaaacaaatgctattacaccccttagaaataacagacatatcatgtaatgaagagtctttaaaaagattaactaacctcttagaaaataaaaatgattaa

SEQ ID NO: 306122 - DNA, 168 bp, Proteus mirabilis
atgcctgtgtttggttcaatggtacagaacggaaagttttcagctgcaatcgctgcctttgttaatgcattaaataatgtagatttacctacgtttggcagaccaacaataccgcaattaaaacccatgaaaccactcacaaatgtgttatttaaaaattgtcgctga

SEQ ID NO: 306123 - DNA, 285 bp, Proteus mirabilis
atgttaggtgttgtaacagctttttcagaatacatgaaatctggaaatctatggaaaatagatgttgcagctctaaatgataatggtttatggctatttattattataaaaataggaatggttggattattaagttttatgttgataatgaaaaataaattattaaatgataattttaattttttaatatttataatattattactaacgaagcttagctttatttatttcggatttatattttatatttcacttatattattcatgagaaaaaataatgaatag

SEQ ID NO: 306124 - DNA, 243 bp, Proteus mirabilis
atgcataatagccgaaagatcaattacagcctcttcgataaattaagtcagctgaatcagcgagagattgttgagaataaacggttgggtgctgttctgaatcatattcaacaacagcatgaagaactggaacagcaaaacaaacgtaatcgttctcaaaagatgccaagcagacgtgcacagaaaacagcaattcaagaacgaaatctaaatcctgtgcttgacttggaaatgtccatatag

SEQ ID NO: 306125 - DNA, 171 bp, Proteus mirabilis
atgatgggtattagtaatggatttactgatcaggtgatgattgctccgggtaagcattttcgtgttgtatcgcaaagaaaagaaaataataaatattatgttgtattagaagcaacggatatattaatcccaagtgagcctatttttgatctttatgatgtaagtttataa

SEQ ID NO: 306126 - DNA, 231 bp, Proteus mirabilis
atgagaaaagcttgtattgaattgaattcaaccatgaaatatgcagccttaaatgctggtccgcttggtggtggaaaatgtttagttatggtgactgtctctaataatttagatgaagtcgttcctgcagaaaagtgggcaaaagctttagatatctgtcttgctgaagctaaagaactaaaatatgaaatagctcggatttatggcgaaagtttagcaagaaaaaaataa

SEQ ID NO: 306127 - DNA, 705 bp, Proteus mirabilis
atgtataaaaaaattcaacaaaaaaatgaaactgaaatttgtcttatattggctatattagtgctttttattagtgaatcattcagtaatttaattgtaaatagttggttagatgtatatttttatccgaatttttatggttttttgattaatgccgtaattggtatagcactttctctctttgctttaaattttgtaaagaaaaatttaacacctattgatctactaggtagatttaataaacattctttttattcattgttggcaatgattgttttgctttcaataattttattggtgagatggctagattttgataatgtttatttaggtggtcagatttatgcaggaggaaaatcattatttattcaaatcgtacttttatatctaccagtgtatatagggatcccgttatatcaagagattgtattcagaggtctgttaataaatgtgtttatcaaagaggacaagaaaattgtttatattgttacatcaattatatttacagtctttatttttaggtatgaaatactagattcctatatacctataaactatcttttttacaatatacccatcgtatttttattctcaattatattaatttacgccagacttaagactggtggattattgacatccataatattaagcacaatgttttatctcgttttttatagggtgaatttcgaatctctaatatag

SEQ ID NO: 306128 - DNA, 1959 bp, Proteus mirabilis
atggatattttgacgtcaacaaatactttaaatgctgagttgaatttagataaatatattgcagcaacaaaccgagctcaacaagcagaagagtatcaattgggtaactgcgatagagttttacatttggggtatttttttgatggtacagggcggaatattgaacaagatgcttcagatagccgtttaagtaatattgcaaaactttatcgagcttttccttcatcagaacaagacacaagtaataagaagtttctagctcattatttttcaggattaggtacaacttttaacgataatccagtagacaaattacaagcagtaatggattcaagtagtgcctcgttgagtgatgatattgagagtttacccagcgatatattaactgatgcgggcgcagatcttattaaagggaaatcgtggtatgaagtattgtcagatattaaaggtaatcttattagtccaaaagaatgggcgttgttagcagttaaaagtgccagtaaggctacgggtatttcaggtgttgaagctgcgccatggcttagggataatccttttatttcagatatgatggtatcaggagtcgatatccgtctagcaacagctaaatcaaaatttattgaatcaattgaaaaagcacgaaaagagggggaaattccgcttaaattagtttcagtttcactttttggtttcgatttaggtggggcaatcgcaagaaaatttcttgatgaaatcataaataatctttgtgaaaaagatgacgatgataggttagtgtatcaaggagtttttgttgatataccttttatgggattatttgattgttcgcgtcataccgcagccagttccgatgatgggttggactttgttgtttcattagttcctcaaatatccgcagtaagtactttgatgggtgaaaaatcaatagggtactctctagccgttcctaaacgtgtaaaacgaacccttcattttattgctgcacatgagcgtcgtttatggcgacctgtttatcgaacggggcttaagaacgatgaaaatcataaagagaaattagtaccggggtgtagcgaagacgtcggtggtgggttaaaagccgatgaacaaaaaccaagtgcagaattatctttatgtacgttgattgaaatgtatgaaacagctgaaaagtcaggtgttccatttcctgaactcttaacattaaaacaaacgaacccgattgttgcaaaacaatttatcatgaaggatagtgtaaaaggcaattctaaaagcttagtaaaaacaagacaatcagtaaagtcctgggttagagaataccaaaaaggtataccggaaaactgggtaaatatagaggtgttaaatcatcatttaaatagttattttatttggctcggtgagaaatattatgaatatatattagagttagcaaaaattaaagcatctgaagattccgaaaatcgaaaaattatcttctcttttccttacaatactcaaactcaaatcgataaggtggggttatattcagaaaaaatagcaatattaaaaaaacactggggatggttagatgatatatgggataaagctgtaaaattaagaaatgactttaaaaatcatcctaataatcaacgaagccaattgcaacctaaaatttggaatcctgcatgggatagagcagtatggctatgcgactgtcgagccaatgcatttcaaaacctgccaatgccatcttatcctcactggtatattcgccctgttgatactacccttttttcttattttgtgcatgatatccacactgtaggtaaaggtgaaagtataacttatcgtttttttaccattcgcaaaatggaaataccaagcccatttgaagaaacaaccaaaataattaagcaacaagacaatatatatgatccgcattatagcattaatcaattttggactgatgtgggaagattttactga

SEQ ID NO: 306129 - DNA, 510 bp, Proteus mirabilis
atgaacagactcaatgtattaaaaaaatataaaagatacctatataccttaattattattgctttattcagttggataggctggtttgtctggttagttttatgggggccacctcaaggtggagtgtcattggttattcatactcaaattgacagacctatacgtggatttagtgttaacggtgtagcaggaggaaatgccttcgcctatgatcccagtaatatttatgctggggatggtggaaaaacgacctgctgtggttcaatcagtggcgatactgccgagattatttggacgctgagcacaacaagggcacaatatgatgctggcttacgaaaagaaaccagaaaaactacagttcctcttcccataagaaaacggggcgaaaataatttgcatgtattctttttaccgaatgatgaagtacttctttggtggggagagggacttatcacgccgtggaaacgtggtatgtcaaaagaagagttggcttgggcgttagcgcaataa

SEQ ID NO: 306130 - DNA, 531 bp, Proteus mirabilis
atgaatataacacagtgtattcatggcgcttatcaattagtggcaaaatataaaaaaaggttcttagcgttcttattgcttatttttttagtgtgggcaagctggtttgtctggttagttttatggggaccacctcaaggtggagtgtcattggttattcatactcaaattgacagacctatacttggattcagcgttaacggtgtagcaggaggaaatgccttcgcctatgatcccagtaatatttatgctggggatggtggaaaaacgacctgctgtggttcaatcagtggcgatactgctgaggttatttggacgctgagcacaacaagggcacaatatgatgctggcttacgaaaagaaaccagaaaaactacagttcctcttcccataagaaaacggggcgaaaataatttgcatgtattctttttaccgaatgatgaagtacttctttggtggggagagggacttatcacgccgtggaaatgtggcatgtcaaaagaagagttggcttgggcgttagcgcaataa

SEQ ID NO: 306131 - DNA, 810 bp, Proteus mirabilis
atggaaaagctgattgaaacggccaacaaatcacaggaaaagatttatctgttaattgaagggggcgcatttgaagacggcacctttgaaccttttcaacaaaaaaatgcccgttcgctgtattccctttatcagcatcctcagttacgtgaagctaaatgggtagggccatggttatatccggtgaaaaacaacacagaattagcggctgaaatgacgcagtttccgcacgtagtcaccgttattttttcctcattagacctcaaaccgctggcaatgcaattggcgtgggggtgcaccttagttacaccaacacaaaaaacagtggtcagtcgattttatcatcgtgatgttatgactgtgttggtgcattgccagcagtttgattggcactattacttgttctcaggtacatctcagtggtggcatctgacgttatcgggttggcaaccgacaggtgtcgccaccaaaacgtatcccaatacccacgacagaaccatttatttggatgaatcgacttggcagcaaattgatgatgaccgagaagtgacgagtattttagctcaatggcaacagatgccgatgagccagcattttccaccgtgtattcagcgacagaaagtcatacaggcattacaaaaagcgagtgaggcggggatgcgaaatggagaggataaaaaactctatgcattactttatcttgatggccagaaattaattttaacttctgattttgtgacctcaaagttagagctggttagccaaggtaagttcagtttacaacgcgttctttgtgattatgaaaagtaa

SEQ ID NO: 306132 - DNA, 2334 bp, Proteus mirabilis
atgatagacaccttaaccgcttttttttcccatcaagcttatcagcttgacattcaagatgcggagtttgatatcgagatcctaaaatttgaaggagttgaaaaacttaatgctccctcatcatggcagattgaatttacctcaacccaagacagcatttcccctgagcaggtattgctaaaacctgcgacattcaatttggataccaataagcgagtgtcgggtgttattacctgtttgcaatggttatctactagtgcagatcaatcccactatgctgtattgcttgagccacgtttagcattacttaatcatactaagcgtagcgctatttatcaaaatacttccgtaattgaagtcgttgaaaacatactgcaatgccacggttttgaaggggcggattatgagtttaaattagagcatcaataccccgaacgagagcttatcacccagtggcgtgaaaccgacttagcatttatccaacggttactctctgaagtcgggattggctaccgccttgaatactcggcaaagaccgacaatgacaaagtgctgtttttcgatagccaactcaactaccaatttggtgaacaattaccgtatcagcttccttcagggcaaaatgataacaagcaactttcggtatgggctgtgcaactggctcaccaagtggtgactggcaatgtcacagtgaaagactataactatcgcacggcactttcaccgatggaaacgagtacacttcatccgctaagtaacacaacactagggggggaataccattatgcaccgccttatttgcaggtgggtgatgacaacgcggaaaacatcgaagccgaaagtggtacattttatagtcgtttacgtcaagagcgtttgctcaatcccaccgctgaatttgagctacagaccaacgctttttacctaacgactggcagtgtgttagatattttgaatatccctatcaacgaacttaaagacggtatttttatcacccaaattacgtattgcgctgcccgtgatgcctctttacagatgactcttaaaggtatgccatatagtgaacagtatgcgtatcgtcctgcagaaatttcgcgcccaaaaatcgccggaactctgcctgcacgtattgaaagccgtaatgacaacgatatttacgcatggctagatgaacatggacgctaccgggttaagttggattttgaccgtcatcagagtggatccggctacgcctatctctggttacgcttagctaagtcgtatgcgggggagacctgcggattgcatgcgcctttaattgccaataccgaagttgcgatagcctttgacgatggcgatttggatagaccttatattgcgttcgcttttcatgattcagagcatcctgaccctgttaaccgtgataaccacactcgcaatgtgttgcgtacccctgcgaataataaattgcgtatggaagataagcgggaaaaaacgcacatcaaattggcaactgagtatggtaaggcccaactcaatcaaggtcatcttgttgatgcgcaagggaaaatacgtggggtaggtactgaactgcgtaccgatgaatggggcgcaattcgagcgggtaaagggctgtttatcagcgcagatgaacaatcaaaagcccaaggcgaggtgctggatatggaagcagcgctcaaagaaatcacccatctgttacaacagcgggaacaacttaatcttgcggttaaacaagccaaagccttacaagcggatattgaaagccaaaagcaactgttacagcaacgtttagatccattaaatcaaagcttgttattttctgcgccacaaggaatggcattcaccagtggcgaacatgtccaactggctgccagtgaaaatgtcggcctcaatgctgacggcgatatcagcatcggggttattggcaatatgacgatgtccacgggagataagttagggctgtttgcccgtgctggaaaactgggggtgattgcaggggaaagcccattgaccgttcaagcgcaaaacaatcgtttagatattttcagtgaacaaaaacagacaattacctctgccgcaaatatcaattttacgggcaaaaagcgtattatcctgaacgggggcggcagttatctcaagctggagaacggtaaaattgagtatggcacctcgggagattatgtgcgcaaagtgcccaaaatggccactgcaggggcgaacactctgccgatgagaatggcacagtttcctgcattatcagcgcctatctgtattccctgtctacttaatgcaataaaaggtcacgatagcattgttcaagatggaaaagcataa

SEQ ID NO: 306133 - DNA, 522 bp, Proteus mirabilis
gtgaaaaaaattagccaaaaaatagtcatgttctgtttatgtagtgttttggtagggtgtggacttgcacaaacggtaaaagacgggacagtgaatatgaaggatgccatcctctataagaaaatcaccacgcttcatttagattttgtcgctcgttctgggcttaatactgacgaggatcaaactcctcttgcaacgatggtatgggtttatcaattaaaagataaaaaggtgattgaaaactcgacatatcaaatgttattaacacgatcggatgaaattctcaagaaagatatgctcaatgccacctctgtaatggtgatgcctgatggacaagtttcccttgatgaaccattagaaaaagagactcaatttatcgcggtattaggcatgtttcgagatcctaatttatcagaagatacctggcgactggtgattaaccgtgaagacctagatgctgataagccacgcgtgattgaattgggtgatggttggctgagattgttaccgttaaaggattaa

SEQ ID NO: 306134 - DNA, 1083 bp, Proteus mirabilis
atggaaagagaatcacagtcaacacgtacccggctgataaagcatatagagccgacgatttggcgtgcaaatttctaccgtttttgccagttactagaaaaagcatcacctcaatcgccaccgttaggcaccaccgatgatattaaagatgatccgttacgctttcgtccttggccgggcatgggctttcctgcgggtgaactacgcacggtagagcaacactcgactaaacctgagcttcccttaacggttcgtaccaattttttggggctgtacggcatcgattcgccattaccgacgagttatctggatgatattgcacaaggtgttgatggaacggaagtcttaacggagtttctggatatttttaatcaccgtattatcacccaatattaccgtatttggcgtaaatacgcttatcccgcaacttttgaagccgggggtacagatgccacgtctcaatgcttattgggattgattggcttgggtatacccggctgtgcggagcgcatcgccacgccgatatcacgctttttagcactacttagcacaatgcgattacccacgcgtaatagtgaaggcgttaaagcgttaatttctttattagcgcccaatactcaggctgtgattaatgaatacgatatcgttaaagtccccgtggatgaacgtaccagcttagctcgtcatcagcgtgtttcattggcaacccgtcctacgctaggtaaaaccgctaaagataccaccagtcgaattcttatttccctcacgacttatcatccccaagaagcgcaaggttggttacccggagggcatctctatactgattttctggtgctattgcgcgtgtatttaggctaccgcagtgatgcatgcttaaagctgactgttccgataagcatattgccagagccacgtttgcagaaaacatcacgtattcaattagggcgaacaggtctattaggattaaaagatggaaaattgagtgataaccgccaatttctgacggtcaatttggggcgttatcacggtattaagcatgcagagcgacctgaagctgaacaagggggataccgttttgcataa

SEQ ID NO: 306135 - DNA, 1770 bp, Proteus mirabilis
atggatgatttaacgctacgttattatgaagccgagttacgttacctaaaagaagcgggtaaagaatttgccaatgcgcaccctgatagagctgccatgcttaacttagataaaccaggtgcgaatgacccgtatgtcgaacgtttatttgaaggtttcgcctttttaatggggcggttacgggaaaaactggatgatgatctccctgagctgacagaagggttggtaagtttactgtggccacattatttgcggactattccgtcattatctattgttgagtttgcgccacaatggcaacatttacgacaagcagaaatgctgccaaaagggtttggcgtcgtttctagaccgattagtgcacaaaggacacgttgccagtatcgtactactcaagacctattattacgtccactttcaatttccaatgcgcaattacagacggagcctaatggacgctctaccattcgcctacgtttttcctgtcctgaaaaagtggattggtcgaaaacctaccttgatagcctaccgatttttcttagtgccgatgcgcctatcagttctgcattacatcttgcgatgacgcgccaagtacatgggatataccttcgtcacgccgaaacaggcgaagagcgtattccctttgatggttggtttaaaccaatgggcttttctgatgacgataatttatggccaaaaggagatactgcctttagtggttatcagttgttgcttgagtactttagttttcgccacaaatttatgtttttggcattacaagggttagataacgctaagtttacggaaacaacaacttggtttgaaatagatattgtgctcagcgaaacctggccggcagacttacctttcgaaacagaaaatttccggttgcattgcgcccctgtcatcaatctttttccgttagaaggtgatccgttaacagttaatccactggagagtgaatacctgcttcgccccttacgcttacaagatggccacaccgaaatctacagtgtagatagtattcatggctcgattaaaaatggtaaaccgacttatgtgccgtttagtagctttcgtcatcgaggaggaatgatgcgccacgatgcccccgaacgctattttcatacgcggattaaacgaggaccttccggtctctacgatacctggcttattttaggaggcaaagaatttgaactggctcagctatccgagaaacctgagctattatccattcgcttaaccggtactaacgggcaactgccccgcaaagcgcttgaaagcaccgtgttagacagtgtgttaaaggcgggtaaagtacccgtcactgttcgtaatcttaccgcaccgactatcccgttatatccccctgcaaacgatcgttttcactggcgggtgatgagccatctaggctctaattttttaagcatgatggataacccagaagtgcttcgtggtaccttggctttgtacgattggaccgatgatgaaatgaatcgtcgccgattggaagccattgtaggggtgaaacacacactcatacgccgttttgaacaaggctatatgatgcgtggggtcgatattgaaattacattaaacggcaataactttgccggtgagggggatatccatttatttggtgagctgcttcagcgcttcttttcgttgtatgccgatattcacctgtttaatcaattaacccttatagtgcaacccacaggaaaacgtttgagatggaaagagaatcacagtcaacacgtacccggctga

SEQ ID NO: 306136 - DNA, 3384 bp, Proteus mirabilis
atgtctaaggtgaaagtaaaaacagtgatgggtgctaccgccgtcgtgttgatttttttggtgattatggtggcttttttgttttatgctttccctgaatcaatggcatcttccctcggattaggcccttatcaaggcgatcgtattttaaccgtaagctgtttagtggctatttttgttttgttgttgggatgggtaaccgaaaagctatttgatatttctggaaaatctgggctatacgttcaatggagtaaaaataagcaacagcgattatcacaaaatgcttctgtgcttgaatttggtgatgatcaaagtaagacggttattgatgccaaagtggtgcaagaacatcttagattacgctatggtcgtttttggagacgtaaggttaaattactgttggtacaagggcaagatgcggagattgaacgggggatcccgggattaaaacaggaaggttggcaagaaaatgatggcgttctgttattttatggtggtgcgccggagcaaaatttacagcaagaatatcttgcctccattcagtcagtgagcccagcacgcccactagatggctgcgttcttgtatttgacctacaatcacttcccactcagattgagcgcgataacgttctgcgccactatcagcgtctatattcatttttgggctggcgtgttcccgtttggctatggttaattgaaaagcagttgtggaaagatgaaagtcattcaatatcgccaattggcgctatttttcagacaggtacgacactagaacgcgccattgcggatttaaccaatttaacaacgcctttgcgtgaagtaggtatgtctacattattgcaatcccctcagcaaggttggttattacgtgtcagcgaacttttacaaaagcaacttcaatctcaattgggtgcgttgctccagcaactaatgaaagggtatgcggcattacaggtccaaggagtgatcctcagcacagaacaagtcttttctcaccgtcaatccaatacgttagggggttctcctgcttggcaaaactttttccatagcccatcagctctgaaagcgaagaaattaggctggaatacaaggcaagccatacaggttacagttctctccttcttgttgttttggtgtgtagggtctattacatcgttgacagtaaatcaaactcatattcgtcatgcgcaggaaaccgctagaattgcggcggataaacaaatttctctcggggagcgattgaaaaatcagtatgctctgcaagaatatatggctcgccttcaataccgtcaaacacatggtgcaccgtggtatacacgttttgggttaaatcaagatagtcaaaccttaacaaagctctggccgttatacatacaaaaccatcagacgttaatgaaagaggcgacgatagatgagttaaaaacacgattatcggcatatgtcgcattgcctcctgcgagcagtgcacgggaacaaaatacgcaacaagcgtataacgcattaaaactctatttgatgttggcttcaaccgaccatgttgataaagcttggctcacacaaaatctgttgacgatttggccggaacgtgcagatattccaaaaagtgaatggcagcatttagccccactattgtttcagttctgggcagacaacctacctaagcatgccgagttggctctcaaacccgatatgaccatggtgaacaccacccgtaaaattttgttaaaacaaattggtcaacaaaatgcggaagcgggcctgtatcaagacgttttaaaacaagttgccagcaattggccagatttaaccctgatggagctggtcggtgataccgatgcacaactgttatttagcaccgatgaaatcatccctggcgtatttacccgccaagcctgggaagagcaagtcaaagccactattgatgaggtggtgaataaacgtcgtaatgaaattgactgggtattaaccgataaaacgcaaaccgttgacaacgaagtttctccagaagccttaaaagcacggttaacagaacgctattttgtggattttggtaacagttggctcaatatgatcaacagtattcaatggcaccaagcgacctctttatcggaagtcattgcgcagttggatgtattagcagatgtacgccaatctccattagtcgcattaatgaacaccttagcatggcaaggccaaacaggacaaaaaacggatgctattgcggataacctcgtggattctgccgtaaaattattagataagaaaaagcaagttaagcagtttatcgaacaaaatcaaacgataaaaggccccttggataatgtgtttggtccgatactggaaatgatggagggtaaggatgggacgggaaaaaatggtaatctcagcttccagtcatggctagctcgagtgacccaagtccgtcttaaattacagcaagtgagcaatgcatccgatccgcaagcaatggcgaagatgttagcacaaacggtatttcaaggtaaaactatagacttaactgatacgttggattacagcaatttagtggccgccagtttggggcaagaatggaacagttttgggcaatctttgtttgtgcaaccgctagagcaagcatggcgacaaatcttgtctcctgcggcggataacctcaacacccgttggcaaacgaccattgtggcgcagtggaacaaagcctttgcggggcgttatccgttcaaagcaacaggtagtgatgcctcattgccgttactcgcccaattcttacgtagcgattcgggtcgtattgatcagtttatcaaaaccaatttagggggtattgtccataaagaaggcaaccgctgggttgttgacccgtctatgagtcaaggtttaaccatcaatcctcaattcctcaaagccattaatcaattggcagatatttcagacattgtctttgcacagggcgatgccaatattcactttgagctaatggcaaggcctgctaaaggggtcgctcaagttcaattaattttggatggacagaagttggattatttcaaccagatggaaagttggcaaagcttcatttggcctggagaaagttattatccgggggtgacgctcaattggcaaagtgtccgttcgggaatgcaaatttacgcgaactatcaaggcaattggggatttatgcgtttattagaacaagctgaagtcacacaactagacagtagccgttatcaactagaatggcgtacaaaagaaggtgaaatattacgctttattttacgtagcgaactcgataatgggcctcttgccttacttaaattacagcaatttcgtttaccagaaaaaatatttttagatacctctaagggagccaatggactcatggatacattttaa

SEQ ID NO: 306137 - DNA, 1221 bp, Proteus mirabilis
atgccggtttggctcaataccattccgcctcctgccgcgaaagtgcctcgtcccaatacacgccgctggttagtggcgttattaattatcttattaatggggtttgctctgaccttatggtgttgggcaaaagacagaaccggatttattttttggtttaccgctgtggggttacctatttgtgggtggggcttagcctttggtatacggcgaatggcgtataaaatgcagcaagtttctgcaaacacttggaatagagaacgcaacgcactgatttcatctgaaatcaaacgaggtcagcgattcgcctatttactggatacttatattgagactccagcaggtcaaggtgtgagtcgcaatctcgatgctatcaataaatcggttcccttggtggctttgcaaccatctcgttttggaactcagcctttacgttatgtgcctttagccatatttgatcaacctgatccgacattaatgctcacagattgcatcaatagcatagtagttaaaattaaaccgatattacaaaaaattcctgatgatattccttgttattgtgtgttggaaatcgataccgctttacaactactagcagaaccaatcctgttagataccttaaaaaaagagagttcactagcttttcgtctcatatcgggacagggactcgaggcaattgatgcatggttagattctcgttgggatgtcccttcattgtttttgggtgtgtctatcggctatcaatcaaagcccatggagaatgatggtgaggcgattggctgtgttctcttatgtaatcgacccatccgcgatatttcttgtacaacttgctttcatcgcccagaaaaaagtcaccctgatagtctgtcgtacggtttatcacaagccttgctttggggaaatgttaaccctgatacgataacgggggcttggattgcagggccggcggttgttgacgggggggaatggagtcaagcctgcgaatacaatccgttacaatttagcatgaccaaggctaataaaatgattgatccgattttaggcaatacaggaaaaacagctccttggatagtgacggccttagccgaagcaagtatgagtcaagagaatacacccgatgcgcagcttatcgcggttcaacctcaacgagaaaatgatgacatttggataacagtgatttcacgccacacagaaagtaaggaaagcgtaacgcatgtctaa

SEQ ID NO: 306138 - DNA, 264 bp, Proteus mirabilis
atgcaacaaattattcgtaaaggggataaaaccacccatgggggaactgtgctaacaggctctgacaccatgaaattcggcggtgttggtgtagcacgcaaaggcgatcaggtttcttgcccaaaagtagggcatggcccaaccactattattgaaggcaatcctaactacctcgataatgggatccctgtggcttttcaggggcataaatgcggttgtggctgcaccttaatcagttctttttctcccgccaaggtaggttga

SEQ ID NO: 306139 - DNA, 504 bp, Proteus mirabilis
atggaaaactgtttttcatatcaagtatataaagaagatataaaattttattatattaaagttagagaaagtcataatcctgaaagatgtgaaggtgatactaatgtatcgatagctttatttaattttaaattatcaaaaacaaataaccaattatataaggaagatgggctaggaataaatggctatcaaccaattaacgataaaagccaatatatccacggtacatattcatatgaatatacaggtgaaaaattaaatgatggtagggcagtacttatctgctgggtattcaattttattgataatagaactgtgaatttatccataacatcttggtatgatctttttaggtgtgatggaaattatgacgttcagcaaaataaaaatgaaattattttgatttacaataaaaataatgagtatgacaaatatctaccacaatttaccattaaaagagctaatggacagtattttgtaaaaaagtccattattctacaatga

SEQ ID NO: 306140 - DNA, 177 bp, Proteus mirabilis
atgacgaatcggggtgtttacgttggtatgaaagaaaatgaaatcattaatgcctatggtgactgccataaaaaaaataataatttatgtagttatagttacaaaaataataaattaacattcaatgtatcaaatggagtgattactagcattgatatggaagagctgccattatga

SEQ ID NO: 306141 - DNA, 1326 bp, Proteus mirabilis
atgagcggtgagcgttatgtctttttactagacgatgacggcatgcctgatttttgggtaacgcactttgtcactaataaactcaggaagaatttaacaacatcttcaattcaacagtatctaaagtccatcaaacacttaaaactttgggaaagtataaatggtagagatctgcttgaagaaatttacaatgggaccattccaacccttgatgatatcaatgctctgaaagagcattgtagctatcgagctagcgtcttcaaaaatcagactaaaacaaatgttaccgacatgggcaaatttcatctttctaaatcaaaagataagcccaccgtcacaaagtctcagtatatatctcgcatggctcacattactgaatatctccacttttgtggtaaagagcgagttaagaagaaaccgtctgcttcgcagttatctgatgcgcttgatttaatgaagacgcagctaaaaagcgacatgccaaaggatcgtttaaaaagcaaacaaatggctttagataaatctgggataccagatgatgtatttgaagattttgttgccgtggctaaacccaactctgaacacaatccctttagtaactctgtcattcggtttcgaaattacctcatcgttcaaatcttgtatgaaacgggatttagacgcagtgaactagcagctctaagaattggtgacatcggtactgacactgacaaccccaccttatcagttgtacgcagacataatagtaaagaagatcctcgtttagatgagcctacagcgaagacgcttggtagagccgtcccaatctcgaaagaactgagagatttactaaatacctacgttagaacacatcgttttcagacaaaggtggccaaaaaacatccatttatatttgtctctcacaaagccaaaagtggaagctatgaatcaggtcaaccgctggtaaaacaaacgataaacgatatttttaatcgtattcgcaaggttaattttgaacgtttttgggggatcacgccacacagctttaggcattatttcaaccatctgctatccaaatgtattgaccaagaaaaaaaagcgattgaagaagaagtgaagcgattggaagccgaagggaagccccaagcagccaaactatatgcagatgaaaataaaatcaccgaagcgcgtgagctagagattagagctgagaagaatggacattccgacctaaactctggcagaccttacttgaaacgaacagttatagaacaagccaataagatgcggagaaagatgcatgaaaatttaaaacataaggctgaagtaggtgtttatggctattaa

SEQ ID NO: 306142 - DNA, 1608 bp, Proteus mirabilis
atggctattaatacgaaaaaaaacagtgattatagagatataaagtcaaagatagacaagcgactaagtaaagctaactatgagtttgacgtttattctgataattggcagttggataccaatgcgcgtttgaatttgactcttttagaaccattaagtcttactcctaagttttctgagtgtttcagacttgctttagcggactacgctgctgagttttcatcttcttacacatccaatatttttcgagagtgtcgtgctctctttgcttttggtgtgacaaataaaatcagtgagaagcacatcgtcaattttaagagcagcttgactaaaaacacagaatacaagctagggagtatccgtgcttttttgcttgattggcatgacaaggaaatctacggtgttgataagaaagttgttggcttgctctcagcgctcaaaatttcaggaaatgaaaaagggaaagcggttgcacttggttgcccgtttagcggtgcttatacactggaggagcaatcagcattcattacgtggtacgtagatgcatttacagagcagctcatttcattatatgactatgcatttatcatggcattgcaatacacaggtgctcggcctatccaattaacccatatgtattatgaggatctactcacaagaacagaggctggcattgagcactttgatttacgaatacctaacgccaaaaaacgtaatgaaacgtttagagggtcttaccaaatcaaaaaagatgtgagtgaagacctaatattggtgctgactgcacaggcaaaacaatcaataaaaatggttgaagaacatttcaacgttagccttactagtcagcagaaaaagcatatccccatttttattaatgaccgagagatatcgaatctcactgactttagtgcattcgaagaaatacaacagaaaacgcctgatttattgtgcttacggacgagaggtgcaaatccatcagtaggggaaataacacgaagattagctcggctttgccccttaaaaacaacccgaattaaagtgggtggggattatggagatttgcatattaatccacgtcgatttcgttacactcatgcgacgaacatgtctatgcttggagctagtgagcatacgatagctgaggagttagggcatgaagatactcaacaggtcaccgtgtataccgagtttaatgaagaaatggcggatagaatcgacgaggcgctagctaccgctcttaccccattagctcaagctttttctggcacgttaatagacagtgaaaaagacgcaattcgagctaacgatcctcgaagtagaattaacaatgacgaaggcaaccctttaggaaactgtggaacattcggcttttgcgctaatggctctatacattgctacacatgtaacaaatttcaaccttggttaaatgctcctcatgaaaaaatgctgaaaagcgtcgttttgaaacgagatcagaagcgtgaaatgggagccagtgagtttgttttgcaaggacataaccgcagtatcaatgctattaaggcggtcattctaaagtgcaacgcaagaaagcaagagttagaaaatgaaggagccttaaatgtctaa

SEQ ID NO: 306143 - DNA, 2226 bp, Proteus mirabilis
atgtctaatgttttgctgtttactcctaagcataaaattgattttcaaaagaattatgatgattttatcgcttttgcaaaaaatgatctgagtctgtttgaagacattcagttcaaaacccctgaaggcattattcagaatggctgggaatgtgataagtggtcgtggaagacggaaaaaggaaaaaagctgacgattgtttttgggacaagtcagaatcattcaaaatatacacctttccagcctcctttttctgactttgcgaaagcatatgttcgctaccagcaatcgcttaacaagaaagattcaactacttgggcttcatcacttgtattcctctatcaagcattagaagagcacgctgctcacaatgataaatcttcagttgatataatgaacatcaacaataatgtgattgatcgcgtagagcagaagatacggagcagtgatttaggcgctggcggcaaacgcaatatcggcctttcgttcgaaaatgtattgaaattcatcaaagaaaaacgatttaaactagatctacaagattggtcgaacccgtttcctcgtcaatctgacgcgagcataaaactagacgaaaaaagtcgcaaggaaatggaagataaatgtccgtcagattatcagatgttgcaggtagcagacgcttttcataaagcgaagacaccacgccagaagtattttagtagtgtttgcgttatgttgatgtgccagcccagcagaaatatagaattgaatggtttgactgtcaattcattacagcgaagtgataaaggtcgttggtacttgatgtggcatcctgccaaagggggagatcccgttcgaaagtgggtgccagctttgctagaagacgttgttaaacaagcttttgaaagacttgttgagatttctgctccagccagatctgctgcaaaatttgcgtacgacaatcctgatctgttcatgttggctagtgactcagaaagctcccaagacaagcctttgacatataatcagttcgcgaaagcaatgggatttaaaacaggtaaatcaggaagaggagtcaacattacttggactacatatggaagcaacgtcaaatggttaaatcgtttaattagtgacttgaataatgtgaacaactggaaaaaggatttgtgtcaaggatataccattctcccaaacaatgaggtcgtcaataagcgcacaggtaagtcagcaggaatcgtcattcgatttcctagttacagggatcttcgttctattattgatgaacaatataagacgcgggatttcccaaattatggcgatatgaaagtatgggattgcatcacattagtcagggattatgaatttcacaaggaattcgctgctaagcccttctcatgggttcatcttgggcacggttctctgagtgatgctatcggctctgacagaggcttagaatcaatttttgatgagctgggtatcacagatgaagatgggacacctctcaagctaaatagtcaccaatttcgtcactggttaaacacgaaattaaagttagcaggtgaagctgattggcttatcgccaaatggtcagggcgagctgatatcaagcaaaacaaagcttacgacggacgaactgaaaagcaaaagtcacgtctaactcagcgtattgggcatgttacgattggatttggtgtcatgactgttgctcaagctaaccagttgttagaaccttacactgccgaagcgccgccaccgccaatggttttacatgaccttggacttcccatctcactgaaagctcttggggttgatagggatggtgttgctcagttcacggggttaggcttctgtgttcataactatgccgaaagtccatgtgttaaaaatggtgactgtgaggtctgtaatgaacatgtttgccttaaaggtatgcctcactctcttgatgagttaaaaactcttgaagcgctatatgaagagcaattgagacatgcgaaagccgccgtagaagatcaggttttcggagcggatcgatgggttacagctctgggctttcgattgtctaagataaaaacactcatttttcttcttgaagatccaaaaaaagcggatggcgcacacgttagaatacctgatgagctatcaccatctcctgtgaagcgctcactgaacataaatgaacaaagcgctatccaagggtttgatcttatggctttggcactatctgatatgagggaggcataa

SEQ ID NO: 306144 - DNA, 495 bp, Proteus mirabilis
atggcttttgttccagataacaaagaaacgatactggctatcatcgatgggtggactggcaaacttagttatgagcttttagctgagaaattacagttagaacttggcctaaaaaagccgccatcacgtttcacattcaccaagtatgatgaaattaagcatgcttttgatttgaagaaagagcagctaaggcaaaagaaatcagcagctatccaagatgccaagtcgttgttcgaaaatactgacaaattaagtgatcttatctctaatctagggaatgatgacgtagcgattgcagaattaatcaagcaagtagaaaaacttgaaaaagagaatgaaaggcttagttcagaaaataaaaggcttaattctcaaaacgatatgttgcttgagagatttgcgagatggcaatacaaccttcagaagatggacggcgtcgatctcaataagttagtttctacacttgatgatggtctgcctgccaagtccatataa

SEQ ID NO: 306145 - DNA, 1161 bp, Proteus mirabilis
atggaagattggctgaaagatattattgcttccgatacgttagggttattaaaaacaaaacctaaatcatcggcaccaaccgccgatgatcacttaattgctaagtttaagcagattaacgagttttttgataagaatgggagagagccgcaagcgaatcgcagcaatcctatagagctgatgcgcagcaaaagcctggagtctatccgtagcaacgaacagcattgtcgtgcgctagagcagtacgatattcatggacttctaccacggtttgaagaaccgaaaccagactctattgaagcgatacttgctgatgacatgttagggatattggaattacctgatgacagcatcttcaatctcaaacacgttaagaagaccctagaaatgcctcgtcatgttgccaagcgtaagaagtgtgccaactttgacgactatgagcctctgtttaaacagtgccatactgatcttaaaacaggcgaaaaagaagcggttcaattcactggggagcagcaaattcaaaagggtatgttcttcattcttcatggcatcacttgttatgtctctgacatggaagagaggcagaagaagaatggtaaggtaaatgctcgattacacctggtttttgaaaacggcacggaatctgacatgttgctgcgctcgctagcgactgagctatacaaggatgagacgggacgtcgaatattagataaaagtgataaagctttagatgagttgctaaacatcactagtgacgatcaaaagtctggttatatctatatcctaaaatctttaagttgtgagcctgaaatcagcagtgtacgtaatctatacaaaattggttattcaaccacacctgtaaaacaacgtattgctaatgccgagaatgagccaacctacctaatggcaccagttcaactagtgtcagagtttgagtgctacaacatgaaagctaataagttcgaaggtttgttgcacactttctttgggcattcttgtttggatgtgaaagtggcagatcacaaagggattgcccatacacctagagaatggtttattgctcctttagagtgcattaaacaggcaatacagatgctgatcacgggtgacattgttaactatcgttatgatgctataactcaaaatattgttgagcgttaa

SEQ ID NO: 306146 - DNA, 1944 bp, Proteus mirabilis
atgcctgacttagtccatgttacttatgctcagacaggtgagagtaccaacaccgatgatatggggatgcgagccatgcaggctcgcgcttttgagcaacgtgcaagccaatacctattaattaaggctccgcctgcttctggtaaatctcgtgccttaatgttcattggtttagataagcttcacaaccaaggcatcgataaggcgattgttgccgttcctgaacgttctatcggtggctcttttggctacaccgagctaacgaaatacggcttctttgcagactggaacatcaacccgcattacaacctatgtacgtctgccagcaatcaaagcaaagttaaaatctttaaagagtttttagatagtgatgagcgcattttaatctgtactcacgctacattacgctttgcataccaagaattagaagactcagcttttgacaataccttattggcaatcgatgagttccatcatgtttctgctgatggtgaaaacgtgttgggtgatgtgttgcgtgcacttatcgaaaacagcaccgcacatatcgttgcgatgacgggttcttacttccgtggggatagtgtatctatcctgaccccagaagatgagatgaagtttgataaggtttcttttaactattacgagcaactgaacggctaccaatatctcaagtctttgggtatcggctaccacttctacaaggggcattatctcactgcaatagaagaggtgttggataccgataagaaaacgattattcatatccctaatgtaaactctgctgaatcaggaaaagacgacaagtatgaacaagttgcagctatcttagacattattggtgagcaccaattcactgatcccgagactggtgtcattcatatcaaacgtaaagaagatagcaaaatcatcaaagttgcagacctcgtatgggatgaaaaagacagagaaaaaacccaagcgtttttacgtgacattgagcatgaagatgacatcgatatcattattgcgctaggcatggcgaaagaaggatttgactggagtttttgtgagcatgctttgacaattgggtaccgcaactctttgactgaaatcgtacagattattggtcgttgtactcgtgatagccacaataagactcacgctcagtttaccaacttgattgcggagcctgatgcttcaagtgatcaagtaaactatgccgtgaacaacatgctcaaggcaatcacttgttctcttctcatggagcaagtgttggcaccaaactttaagtttaaagcaaaagatccagccgataaggagccaacaccgcctggagtgatcagtattggtggtttaaaagaaccaagtaccaagcgtactaagcagatattagaaacagaccttgatgatctaaaagcctctattttgcaagatgacaacatcgtgaaagcctcagcagcaggtcacgctcctgaagttatcaacaaggtgttgatccctaaacttatcgagaagaagtatccagatctttctaaagatgagatcgaggagattcgtcaacgagtggttgtggactcagcgatctcaacttctgaggttaaagaagaagggggcaagaaatttgttcgtatggcggataagttcatcaatattgatgagctacacattgaccttatcgatcaggtcaacccgttccagaaagcatttgagattctgtcaaaagcagttaacaccgacacgcttaagttgattcaagactctatcgaatcaactcgcatgcaaatgtccaaagaagaagccatagcactgtggccgaaagttcaagagtttgtgaaagaacacaatcgacatccagaccttaactctcgcaatggtcgtgagcgtgagttggctcagtgcattatctatctgcgccgcctcgttcaagaacaagcggcacaagcacagaaagaggtaatgtag

SEQ ID NO: 306147 - DNA, 2697 bp, Proteus mirabilis
atgaatagcgtacaaatagaagaaaatgttaagagcttggtaaaacaagtatcaagccaagaaatttcgaaagatgattttgtctacgagctattgttagcttacgggcatcgtaaatcagtagtcagccgtgttaagtcgggtgagcgtaacctagctaagactgctggtgaggtgatcttaaagcgtcatctgtacttcaagccatgcacctcaaacttgttcgctgaaattgatgctctcaagaatagcaaaacggttgctaccaataagattcgttttgttgctgttactgatttctctcagctcattgctattgataccaagactcaagacacgcttgatatcgagcttggtcaactagcaaagcacttcgatttcttcctgccgtgggcgggaatggagaaaatggtttaccgtggtgagaatcctgcggatgttaaagctgctgagaaaatggcagatttctttgaccacataaaagccactaactacccagtgaatgcaaccaaagagcaattgcatgaaatggtggtattcctcagccgcttgcttttctgcttctttgccgaagacaccaaaatcttctctgagaaccaatttacgaatcttttgaaccaacatactcaggaagatggttctgatttggttggtgtgtttgagcgccttttcgaagtgttaaatacaccagcgcatcagcgtaacgatttacctaagtatcttaataacttcccctacgtgaatggtggtttgtttaagaaacagatcaaagtgcctacgtttgatgccaaagctcgtcgaatgctactggattcaggttctttagattggtctgatatcaacccagatatcttcggttctatgattcaaggtgttgccgacccagaaacccgtagcaaaatggggatgcactacacatcagtatcaaacatcatgaaagtgattgagccgttgttcttgaatgatctctatgaagagtttgataagtgtaatgacaacatcaacaaactaaagaaacttcaggtgcgtctaagtcgcattaagttctttgacccagcgtgtggttcaggcaacttcttaatcattacctataaagaaattcgagagttagaaattgagatcctaaagcgcattcgtgagcttgagggcgagtcggactcaggagtgatggggttatttgacgagtctcattcggcaatccgccttgatcagttttatggtattgagcttgatgacttcgctcatgagatggcaatcctttctctttggctagtcgaacaccaaatgaatatggtgtttgagaccgagtttggttacacggctccaacgctgccattgaagcaaagtggacgtattgttgcgggtaatgctgctaaggttgattgggaagtcgtatgtccaatatcaaatgatgacgaaacttatattctcggaaacccgccttatcttggagctaggcagcaaagtaaagaacaaaaagcagaaattaaaaaagtatttagcgggatcaaaggggcacaaaatcttgattacattgctatttggtttttgaaagcagctctttactcaaaggaaaagctaaatgttaaatctgcatttgtatctactaattcaattgtacaaggtgtacaagtagcgatattatggccgcttgtttttaagttgaaactagaaattttcttctgtcaaacgtcatttaaatggtcaaacaatgcaaaacgacaggctggtgttacctgtgtaataataggtttggcaaaaccatctagtaaccctaaatatatatttgataatgttaataaaataacagcaaaaaatatcaatgcgtacctcactgatggcgataatgtttttgttgagccaagaagaaagagtttatcaaaactaccaccaattaattatggtagtttcgctttagatgatggtaattacacattaagccgagatgaagccaatactatattggaaagtaattctgattcgagtagatatattaaagaattcgttggctctaaagagttgattcaaggtaattctaggtattgtatctggattgaagatgatggatataaatctaacttggagattagtagaagagtagcccttgttaaaaaatggcgttccgaaagtaatcgttctgctacagtaaaactggcagaaactccagagaaatttgctgagatacgccagccgaaaacagcttatcttgcgtttcctaccatttcatctgagcggagaccttacataccaattaagttttatgagtcaaggacaatcgcatccaatcaagtatatgtgatttctgatgctgagctttggttattcgctatcctcagttcttcaatgcatatgacttggataaaatcgattggtggaaagcttgaaactcgatatcggtattcagcggcactttgctataacacattccctattgggtctatctcagaaaagttaaaagttcaactagaagaatgtgcgctagaaattctttcgatccaagaaagctatccagataaaacattagcatatttatatgatcccgatactatgcctgaagagctgaaaaatgctcacaaacacctggatagtgtagtcgagagtttgtactcaaaatctattcttaatagtgatgaggaaagattaaaagttcttcttaatctgtattgtgaaatgattgaggtggaaaaaaatgcctga

SEQ ID NO: 306148 - DNA, 540 bp, Proteus mirabilis
atgaaggtaaaaatcagaaaagagttatttctcgccatttattacaatgaacatttctctgctaatgacttaaagtcgtttccattagacggtgatgagaaagagtacttatcggatgaatacgtcgaaaaaaaattgaaggaaatgtcgcttatcggcgcagtcctgtcgtgcggtttcgataagcatggagatgagttgttttccaaaggttttatgtttaaccataccgactgggaggttgttgattacgacaattacagtgaggattccaattacctttatctcaagaaagaaagtctcttgacgattttacaagataaacagtcagagctgtcagagtccaattctcttcatcaaagggcatggaagcatttcaatcggttgtgtgcgcaatactccgagcttcggccatgcatagagcaatacatctcagaacatgacaatcgcagattggatatcaaagccgaaatgctggcagtagaaaatgcaattaacctctacaagaacacagcccaactagaagaaagtgagagctaa

SEQ ID NO: 306149 - DNA, 1308 bp, Proteus mirabilis
ttgcataatcctatactttacgcacatgccacaaataacaacatgcttgtggggcagtttgtccaacagtcgaagaccaacttatcattttcatactctgatgagtggttagcatatgattcagcctttccgctttcgttaagcctgccgctcgtaaagggagagtgttcatcatttaatgcactgaattttattcataacctgcttcctgacttgaaagaagagcgattaagtcttgctcactcggtgggtgtgcaatctaacgatgtattcactttactctcaaaagttggtcacgattgcacgggcggtatttcatttactgagagtagggagccgccaaagatagggtggaaatatcgagagatctcggcaagtgaattaaatgaactcgttactcagcgtaagtcatttcttccatgttttggtgactacaggccatgtatatctggtacacaaagaaaaaccacgctgatgaaaacaaatggtaggtggtatgtcccacagggaaccgcgttcagtagtcacatagttaagtatccgatggatgtgattacccaaagtaactcagtgttagatatgagtagcagcattaagaatgaattcatctgtactcaaatagcgaaggaacttggttttaaagtccccgacattgagatcataaccgcagaatcaggagctaaagcccttgcagtaaaacggttcgaccgatgttttggtgatggagttgtgactcgtagacaccaagaagatttctgccagattttgggtgtacctgaacatcaaaaatatgaatcggagaacaacctaagtgtctccaaaattgttgatgttttaagtctctctgcgcaaagcaaggcgaacaatcatgacttttttaaattcatgattttacagtgtcttcttggtgccactgacggtcatctcaagaatttttccgtgcatattgatcatggcggatactataaacttgcaccgttctacgatttgctatcagcttaccctgctgtcagtgctacagggttaaataagcgcaagctaaaactagcaatgggactgcaagcatcacgaggatacaaataccatatcagcaagatttgcttacggcatatagagcagacagcgagtcagttcggtatcagtaatgctgaatgccatgaaatcgtctatgcctttctcgctcaatttagtagcgcactgagttctatagacaaaagattccctggacaggagtttgcgttggtaaaggatgcaatatttcaacatgccactgaagtcgttgaaaagttaaacagaacaattaagtaa

SEQ ID NO: 306150 - DNA, 204 bp, Proteus mirabilis
atggctgaaaccacgaccaatggaagtaacacgactctcgacttgaagcagtctttcgcgctgttaagtgtcgataaaagcggtatcgtaacgatgaaatttggagatgaagtaacgttttttatgaatgacaaatgttcagcaatcacggccgatttattaaaagtgattgcgtcaataaaaaatgggagtatccagcattga

SEQ ID NO: 306151 - DNA, 600 bp, Proteus mirabilis
atgaaagcaaaaatcggcattctatcagaagagcttactcgtaagcgtatggttcgtattgcagaaggaaaagtgacgtctgaagaaccttaccctcaatttttgtttgagtcactggctacgctttcacaactgctgtctaacgaaaatgttggactgttgaatttgattgctcgcgagaagccaaacagtcttgatgaacttgctgaaatgagtgggcgcagtattaaggatcttattactttgcttgagatgtttaagagcaatggagttcagtttaaatcattgtccgaaaacattgatacaacaacatctacagggaagctagtgtttaacgtgattggagctatagctgagtttgagcgagatattatcgtggaaagaaccaaggctggacttaaagctgcaagagcgcgaggcagaaaaggtggcaggaagcaaaaactcacagataagcaaattaagctcgcgaaatcgatgctacaagatccctcagtacaaaaatctgatgtggctaagcacttcaatatttctaggccaacgctcaacagatatctagatgcggcaccagatttggaacaagagagtctgtttaaataa

SEQ ID NO: 306152 - DNA, 453 bp, Proteus mirabilis
ttgagcaaagagaaaggacaaagaaatagaaatctcttcattgcgtgggttgatgaaatgaaggccaagaaccctccgaattggctggattactggcatggtgatactttaagtcccaaaaagatagcagatgagcttggttttgattcgtctgcattcaaagcatctagaaacaaaaaactcttcgaactattcgatgagcttaagaaagagcttgcaacagagggggtgtatcaaaaacggaaagagaatctgccactggaagaacagagcgctgaagtcaggggagtgttccaggacaatatggacgagggtataacagatagcatcaaggttcgtgacttaaagcagttcaatgctcggttacaagctgagaatacaaaacttaccgccgaagtcgctaggctatctgaatttaaagaagttctcattgaaatggggctttggaaatga

SEQ ID NO: 306153 - DNA, 2172 bp, Proteus mirabilis
atgagtaacggtactttcttggttcggattacccagatatatcaatatcatcctgataatgttcagttaggtgctgtgtttgttaaccaaaacgctggagcacaccgaatcgtattgctaactactcaaaaccagctaaatatgaagccgcaagtagggcagcaatgggagatattaaaagagaataactatagtgtgcgacaacagccagttagtgtgggtggttatgtggacgtgtggcgtttcatgcaacccaaacttaagtgtgtgatgcctgacaatggtattggtttcgttaactttttaagctctgagaaagagtttgtcggtattggcagggtgaaagcacaattactctgggctgaattccgtagtgacattttcaccatgctcgaatgcgaaaaagatgaaccatataaacatgataaatcaataagtaactttcaagcgatcaaggatgttttgaggagtgatgggacggtaaatgcgctttatcaaggttttagaaaatatgccaatctcaagtatgcgagccagttagtcgagtgggaggtagaagaacctattcaacgtcaactttttagattgtcaggtaaggatgcaattggatttttgaaaacgaatccgtaccgcttgttctctttgggtatgagatttagcaaggttgacgagatcgcacaaaagcacttcaaagttgaaccaagtgatgaaataaggcttgcagctataattgaacaatctttgcgtctatggagtgacaaagggcatacggttgcactttggcgtgatatagaacatacgattcgcacctacttaaataacgacaagttacttattgaaagggctaaacagttaactggcgacatcatcggttttgtaaaacacgatgacaaatactacgcctcaggcaactatatttttgaaaaaacaatagccaaacgattcagcaaactcagcaagatgggaagcctttggcgaagtgaactagaggttgcgttcactacttctatccctgaaggttggaaacttgaggaagctcaagcaagagctgtaaggacagcattagtcagccatatttttgctctcactggaggtgctggcacaggtaaaacgacaaccacgaagcttatcgttgatgcctatcaaaaattaggttttagtatttatccagtagcgctttcaggaaaagcagctagacgccttcagcagtctattggcattaattgtatgacgatagcgcgattattacgtaaagacagtattccagataacagtgttttactgattgacgaagcgtcgatgctagacgcttacactatgtggcgtttggttactttgttctccgacaagtcaaggatcgtactcgtgggagatcctaatcagttacctccgatcaatgcagggttaattttgcatgatgttattaagagtggggtaatcaatcatgtcgaactagatgtggttaagcgacaaggcgctattagttctattcctgcgtattcgaatgacatacgcaatggcaataagccatcttctttaacgacgtctgatattacgttccatgaatcaagtgatgacctgcttcaggacgctgtgtcggtgtatttgaaatacgacagggcgatgattgtagcatcgacgaatgccaccgtaagaaatgctaacctcaagttacaagcagaggtgaaccctaatggtcggttacttgatctaacaaatatgccgatcactaaaggaaactatgagttcagagaaggcgacccaatagttataaccctgacaaactataaatacgatgttcaaaatggcactttgggcgtgataacaaacgctgaagcaaccgaagagtatgcctgtgtcattgagctagaggatattggcgaggatggaagcaaaagatctttaaaggtcgattggcagctattcgaatacatagagctggcttacgcactaacgctacataagttgcaaggctcgcaagctgagaatgtaatcgtgctgctggagcgaagcttgttgcttgatcgaagttggctttatacagccataacacgagccgaaagtaaggtacatatcattggtaaggagtatgactttcagtatgggataaacaagcgcagtgctttggatacacgcaaaacagctttgtcagaaatgttgaaaaatgcttaa

SEQ ID NO: 306154 - DNA, 615 bp, Proteus mirabilis
gtgacgatacatcaaaatattgtctggcatcctcatcaaatagggttaaaagagcgtgaagcacaacaggtacacaaaggatgtgtactttggtttactgggttatctggctcaggtaaatcaacactggctgatgcgctagagcaaaccttatatcagtactcgacactccatgcgcctatccgcacctatttattagatggtgataatctacgccatggtttatgccatgatcttgggtttagtgaacaagataggcatgaaaatattcgccgtgtaggggaagtggctaaattaatggttgatgccggattaattgtcttaacagcatttatttctccttatcagcaagatagacaacaagtaagagaaaggtttgctcaagggcgatttattgagatctttgttgatacacctttagccctttgtgaagcacgtgatcctaaaggcctctatcaaaaagcacgacgaggcgagatcaaacagttttccggcattgattcaccttatgaaccacccattgcgccagaaattcatttagacggctcactcgcgattaatgagcttacacaacaaattctcgcttatttacagcaacaacaaatttaccgctaa

SEQ ID NO: 306155 - DNA, 1458 bp, Proteus mirabilis
atgggacttgcagccatcaaaaccaaccaactgatcgccggtgaaatagcacaatcaggtggtgtagaaaattatttaaaaacacaacagaacaaagggttattacgttttttaacctgtggcaatgttgatgacggaaaaagcaccttaattggtcgcttacttcatgatacgcggcagatctacgaagatcagctctccaccttacaaaacgaaagtaaaaagattggtactcaaggtgaaaaattagatctcgctttgctggtggacggtttagcggctgaacgagagcaagggatcactattgatgtagcttatcgctatttttcaacagccaaacgaaaatttattattgccgatacgccgggacatgcacaatatacccgcaatatggcgacaggagcatcaacgagtacgctttctattctgctgatcgatgctcgaaaaggggtacaagagcaaactcgccgccatagttttattagcacactccttgggatccgtcacttagtggtcgcgattaataaaatggatctacttgattatcaacaagagatctttgagtcgatccaacaagattacctgcactttgcacaacaattaccgcgcgatcttactatcgaatttgtgcctatctctgcactggagggagataatgtagtatctccttcattaaatatgccttggtatacaggaaaaacactgttggcattacttgaagatgcgccggttaaatttaaattaggggctaaatctcaaagattgcgttttcctgtacagtatgtgaatcgccctgatttagattttagaggctacagtggcacagtttcatcaggctctctttatcaaggacaacaaatcaaagtattaccctcaggacagcgttcaaccattaaacgtattgtgacttttgatggcgatctgactcaggcgcaagtgggtcaagcgattacactggtgctagcggatgaaatcgatattagtcgtggcgacattattgttgatgctaacgataccactgctaatgttagcaatcatgcgttggtggatatcgtatggatgtcagaacaaccgttagtacagggacaaacccttgatatcaaagtagcgggcaaaaaaagtcgtgccaaaatagagaatattcactatcaagttgatgtggataagctcactcaacaagtgaccgaaagtttagcgctaaatgccattgggcatgttgaagtattatttgaagagccattggtgctggataactatcaacttaatgcacaaacaggggggcttatttttattgatagattaagcaatgtcacggtgggtgctggtcttattcgagaaattcgcgacaacgagcaacccacaacttcccaatacgatgcatttgaaattgaactcaatcagttgatccgccgccattttccgcattggggcgcaagagacttactgggaggaaaatag

SEQ ID NO: 306156 - DNA, 399 bp, Proteus mirabilis
atgagtgaaaataatttaagcccaaatgaaaaaccgttgttatctaatgaagataaaattcatttagaacatttactagaaaaaataaggcctttattagcattaaagcgcctagataatattgttgatttattatccttagcctcagataccgtcgatattatggataacgcaacggtagaaaaattggcggttgcttttgaagaaacattaattccggtttgggaattaactacggcctttaatatggctaaaaaagaatctctttatcaggataaaaaatataccttaggtgcgactttttcattattaaaaaatcctgacaccttaaaaggattaactattgtactaaggacattacaaattattggggaaaataatcagaaaatagaagtttaa

SEQ ID NO: 306157 - DNA, 147 bp, Proteus mirabilis
atgaatgttatctggagtgctgctacagctaaacaaatctatttcccaatgctaattggttctggaattcaacatatgtatccggatattagctgggctgtaattccaatagtggcaatcctattcagcataaacatcgaaaaataa

SEQ ID NO: 306158 - DNA, 855 bp, Proteus mirabilis
atgcaaagaggggttgttgtttcttccgagctaataactcgcaataaaaatgatagcgggtttactatacagcgcaccattaatccagtagagatgaattacttagctctctactgggataaaatagttattccgtcaaataatataatttacactggtgttgctaatgaagaggtttttatggatagcggtgttttagagcgacctcgatactcagttaatggctcttttaataccgacgattaccctgatctccaagtgagacttcagtcaaagacagttgatacccttagagagaagaaccctagttcagattggcgtatacaccaatttggaggtgattttttatcaagagatagctttttttctgagtcagccagagtagagttggcaaatttacttcctgttccttcggttgatgtacatattcatgaaatactagagtttaaagaaagaagaaaagcggagttggaagctcttcattcgtatagtgatgatttataccttgagatattaaattcaggtgatccagatctaaccaaagccaaagcaatatctaaattaaaacaggcaatatcagacattgataagcttaataatgagggttggcggtcaccgataaaatttaatcttcagataagtaatgaggtcgacattgctaagattaagtctctttacttaacggtggctggtgcagcaacaacaggtcaccctcttgagtcattaatagttggggggctgtgtacgtttttagagggatttgtaagtctaaaggtaggcttgcagagtgtcaggtcaggtggtgataatgagcttatttatttatccagtgcaagaaaagaaaagataatttga

SEQ ID NO: 306159 - DNA, 201 bp, Proteus mirabilis
atgttcactgacttaatcgcggctattgaagaagccagatatttaaaatcaaagtttaagtttgattattcagttgtgcagaaaagtagtggcttgatgaaagtagaaactaatcatcgagcagaattatacccgcagataggtgtcatgtttagcactaaaaacgacgcaaagcacacagtattaccggaggtgagatga

SEQ ID NO: 306160 - DNA, 276 bp, Proteus mirabilis
atgaagataaaacgtaaagttcacaataagctatttccaactcgtaaattgtcattctatcagcattcaaaagtagatgaatggaactcgctagagtgctacatggacaagtggttattagttattttgttcatacctattgttgtcattggaacgctagtagctggatttcctacggcattcaaagaggcgacggtttatttcaataatccatattcagtcgatagtctgacgcttgcggaaattgaagccattaagttggaacaggagagctaa

SEQ ID NO: 306161 - DNA, 342 bp, Proteus mirabilis
atggcgtttagcaatattgagatagcaaatattagacggtgtatggaatttttcatggaaaagcgtcgcccagcagaacacctaagggatgaattagatttacagtatcgcatcgaggacgactcagtaattatctttgaaattaggcaactaatatggagtgatggcagagtagaagaacctatagcaaaaatcacacataatggatattcgaattcatggtctctgctttggatggataaaaatagtaactggcacaactacgatgaaatgatgctaggtagtttctctgacgccattaggctcgttgaagatgatgcccgtggctgcttctttggatga

SEQ ID NO: 306162 - DNA, 699 bp, Proteus mirabilis
atgagtgatctacttagattaaaattaaaaatcaatggaaccaaacctagtgatatccctatgggtgaactggctggttatttagtagatctttcagctctgtatgggatgtctaaaaatgtaaggttcgaatccgtgaaagaaggaagcgttgaaataaacgcttacactacagattcccagtcattagatgttattcgtgcaaatattttagaaaacttagaaggtagcaaactagctaaaaggctaaataaagataactattcagcagaaatttattatgaaaatgagttaattaattccattaatccaaatttagaagataaaccaatacttttaacaaagaaaaacgcaagaatccaaggtgagctatttcatatagctgcaaaaaaccaaaattcagcgtcagttcggttgaaaggatcagctggtgaaacccttttgtgtagcgctacaaaagctgatgctgtacgtctaggtcgatacatttttaaaaaaataagagtgacaggaacggcacagtatgaaaagcgagacggagtttggaagctaaaaagcatgaaaatagaaaacttttcagaaattcaagacgtcagcttatcgcaaggtctaaaggttttgtccgaagaccctgcgaacaaatgggatgaaatagacaatcaagatgaagtgatactgaaatacaggagtttcagttga

SEQ ID NO: 306163 - DNA, 585 bp, Proteus mirabilis
ttgaaaagaataatagtagatacaaatattcttatctgtttaatgaaaaagaattcttcaacagataatctacttggtgcgaatgggttcgcagctgttgatgatgtcgagctaagatctcaagctttactagaccacatagaaagcagcggcggtacattggttttacctgctcctgtattagccgaatatctccttggtatcgaaggagaaaaaaataagcaaaaacatactcaattaatattgagcatgagttgttttgagatactaccatttgatgagttagctgccatagaatgctctttgctaccatcgccaaatgagtttaagcagtttataaaaagcgaaataaactctaatgctactgccaataaaattagatacgatagacaaataatatcaatagctaaagccaataatattgatgagatttggagcggagacaaagaggtttctagtaaaagtgcagagtttggcatagaaataaagtcactacttgatatacagccaatggctttatctgaacaaataacactaaacctcctagacgaaaccccaccttcaagtaaagatcacttaaactaa

SEQ ID NO: 306164 - DNA, 315 bp, Proteus mirabilis
atgtgtaactttcacggctacaacaacgccagattacgcagaatggaacgcagaaaggcattgcaggaagagtacgcattaactgaaaggttaaaagctgcaatacatggcgaaccagaagtagaaacaaagcgccctaccttatcactaacacgcaaaccaattagccgagttgaaaaagcaatttcaattcgcagtactaaagtttatgactcagtagataatacctgcttaccgaactctagtatttacttagctaaatatcgtaagtcaggaacattattagagtctggagaagtaacggctagagcatag

SEQ ID NO: 306165 - DNA, 621 bp, Proteus mirabilis
atgacacgtttaacaaatagcttaaaagaagttatcacgcaaaacgcattagagaaatctggcgttgttcagcaacaaaaagagctagacctagaatataacaagttagctttagaggttcgcattgaagcgcttggtggtgaaagtaaagccaaagaaatggatggcttatatagcaaggctgctgagattgcagaaaaacttcgccaatcagtaaatgaagacattggtgttcattacgctctaggacaccgcctttacgcatcgtttggtggaatgcggctttggttgaagtacggcaaaaaagaaaatggagataatacttgcctgctaaccccgtgtgattctaagtgcctgtttgcagcggatcatccattaagcattaaattctcagagcttgaagataaaaaacgcaatattaccaataaagttaaagacgtaaaagcaaacgtgacagcggctttaaactcagtaactacagtaaaacgcctattaaccatctggcctgaagctaaagagctattaccgaaagatgttgaaaaggcatcgattcaactgcccgcacttaaggttgaaaagctaaatgaaattatcggattaccaactgaaaaagcggcttaa

SEQ ID NO: 306166 - DNA, 456 bp, Proteus mirabilis
atgaaagacagaatcaagtttaacgatgtaatgctagaggctgtcatggatggcagaaaaacgcagacacgtagaccgattgagccgcaacccaaagtaaccgaggatgaattacgcaagttaggtgcatggcaagatggctacacactatcagagcaagtatgtgcagcatggcgacatggatttgttgatgttgattgtccgtatggtgaaactggcgacatcattaacattacagacaaggactgtaatatcaaagggagaattgaaattactgatgtttgggttcagcaaataaatgatattagtgaaagcgatgctaaagcggagggattcgatgggtatgaaaacgcttactcatctgagtttactttgatgtggaatacaatatacggcgaagatagctggattaataacgaatgggtgtgggtgattgagtttcgcaaagtagactaa

SEQ ID NO: 306167 - DNA, 558 bp, Proteus mirabilis
atgagcgattttattacattaataaaagataacaaagatgcggtaggggttatcgttgctgttagtggtggaataggtttctttctcaattattttttagctcgcaagaagataaaagaagataaaaaagctcttcgccagcaaatgataactaataatattgctccgatgaggcaggcttggattaatgatttgagaaaaacatcatcagaaataattggacacctacagttcatcatacaaataaaatcattaataaaatctggcgatagcaatgctaatcttttttatatagagcatagatctaaatactatgaactattatgtcagataaattacctagagttgcttttacctgccaataaagatggaagccaacctatagaatcatcaaatgtaaagacaaaactagaaaatattttaaattatctaaataaaaaaaacacagacaacaacttaaaaaaaataaaaaatgaaatagagcaactttctattgaaataaaaattattttaaaaaaagaatgggaagtaaccaaatctcttaatgaaatgaaataa

SEQ ID NO: 306168 - DNA, 3822 bp, Proteus mirabilis
atgatgaagtggttgaaaaggataacactaacgctacttatcatcattttactggttttaggtgctcttgcatggattttagggacgcaatcagggctacattttgccattaatagtgcagctcgttgggtgccaggtttaaccattaacagtgttaatggcggttggcaagatttacgtttaacgggtgttgagtatcaaatgccgggtgtagatgtcaatgtgggggagttatcactaggcttaaatttaagctgcttgaaggataaacaactgtgtgttgaggccttaggcacacgtgatgttatcgtcaatgtagataccagtgcactccctccagcacaagaaacacccccttctgagcctttaactgagcttaatgcccctttacctatctatttaaactctctctcattagccaatacgcgtgtacaaattgatgatatggccctatcactcaatgagtttactacggcagcacaatgggaagggcgtcaaattaccttaaaaccgacggtcattaatgatttgttggtggcgttaccgaaaacacccgaagacggtagtgttgccgccatggcgcaagatgtaaaagaagttgcagcaacgacgcctcaagcggagcctaaaacaccgcaagagcaagagcaggcactagctgacactattaagacaattttcgccaagcctttattagcgcagttacccgaaattattattcctgttgatatcaatgtggaggggatagaaggtaaacagttacaagttagtggtgatacgcctgtgactattaatcaactctcttttcaagccaatacgcaaggtcaacaggttaatctcactaggctcagtattgatgcgccagaaggcaaagtcagtttaaacggtcaaattacactggataaacagtggccggttaatctagatatgcaagcgatgcttcgtgagatggcaggactggaagagtttaaagatcagcaagcgacactgtccttacaaggtgcgatacttgatgaattaaaactcgcactctctttaacaggaactgttaccgcaagccttgatgcacaagctgagctcgctaaagcacatcttccactaaaattaaccttagagagccaaaaagtgcgttggcctttaacgggagatgtgcagtatcaacttaatgatactcgactacgtcttaatgggcagacggataattatgatctttcattacgttctaatattgaaggacaagagatccctccagccaaattgaccctagacgctaaagggaatgaagagaaaataacactcactcgtttgcgtttagctgcattacaaggtcatgcggatattaccggtgtggcagattggagtaaggcgattagctggaatgcattattgactatctctggtattaatacagctaaacaatatcccgatatgccagcgaaattagatggacgtattgctacaacgggtagcctgtatggaggaagttggcaactgcgagtgcctgaaattaccttagatggtaatttaaaaaataatcttattaaggcgcgaggaaacgcctatggtaatgattcggggcaatggaatattcctcaattaaccttaattctaggtaaaaataatctcgatattgcggggcacttaggtgatcagtgggcgcttgatgcgaacatcaatgctccggggttaaatggtttagtgccggggttagcgggcgttattaaagggaaagtgaatgttcgcggtgatattaataagccgaaaattattgctgatatcaatgcacaagggatcaaatggcaagatcagctcagtgttgggtcagttgtggttaaaggtgatattcagtcagatgacgtgatcagtggcaaactggcaattacggcacgtcagttaaaacaggctgatttgattattcgtcaattaacgctagatgcggccgggacagaaaaacagcataagcttaccttgaaaatggatggggaacccgtatcgggtggcctgacattagccggctcgtttgataaagaaaaacagcagtggcaaggcacacttaacaataccgcatttgatacgcctgtaggcgaatggcgtttaaataaagcgatggcgctaaatttattagcggaaaaacagcaagtgacgattggttcacattgctgggtaaatcctaatgcacaactgtgtgtacctaaagagatcactgtaggtgagagtggtagtgcggcaatcacgttaacacgttttgatttagccatgataaaaccattcttacctcctgaaactgcgctacgcggtgtctttacgggagatgcaacggcaacttggaatgcgaaaggcggattacctaaagcgtcagttaaccttaaaggtcagggcgttggtgtaaaacaaaatgtcgatggtacggtattacctattgattttgatgcagttacgttaaatgcgggcatcaataatggtaaagcgaccttgcaatggttaattagtattaccggtaatggtgactttaaaggccatgtcaatgttgctgatctagaaaaaacacgtcaattatcaggtacggttgatattgataatctgacattagatctgattaagcctttcttgggtaaaggtgaaatagcgcaaggtagtgtaggggcacagctacgtttaggagggaatgcacaatcaccattgctatttgggcagtttggtattaaccagttaaaagtagttggtcactggatcccatttgacatcaccaaagggaatgtcgatattcgctttaatggtgcgacttctgatttaggcggtagaatcgaaacaccggaaggttatttaaatctgacggggaatgcggactggcgcaaactagatgagtggcgtgccgtggtggctgcgaatggcaacaaactgcgtgtgtcattaccaccaatggttcgtattgatgttaacccagacttagtttttgaagctaatccacatttgcttaaattagatggtcgtattgatatcccttgggctcgtatcgtggtgcaggaattacccgagtctgcggtgtcggcctcttctgatgaagtgatgttggataaagaattacaacctatagcaccaaagcagacttctatacctattcaaagtaatttggcgattaatattggcgatgatgtcacattagatgcctttggattgaaagccagattaacaggggcattaaaagttgctcaaagtaagcaagggttgggattaaatggtcaagtggatattcctcgcggggaattcaaagcttatggacaagatttacaagtacgtaaagggcaaatcttgttctcagggccggttgatcagccatacttgaatattgaagcgatacgtaaccctgataatacggcagataatgtcattgctggggttaaagtcaccgggcttgcggataagccgaaagtggaaatattctctgagccggccaaaacacaacaagaagcattatcctacttgttaagaggggaaggattagcaagtggtgattctgattcagcacaaatgacagccatgctaataggattaggtgttggacaaagtggacaactcgtaggacgtattggcgaaacctttggtatttcagatttagcgttagatacacaaggtgtaggggatagttcacaagttgtcgtcagtggtaagataactgatgatttacaagtgaagtatgggatgggtatatttgattcgctagcgacgttaacattacgttatcgcttgatgcccaggttgtatttacaagcagtgtctggtatgaatcaggcaatagatctgctttatcaatttgagttttaa

SEQ ID NO: 306169 - DNA, 561 bp, Proteus mirabilis; identical to SEQ ID NO: 295824

SEQ ID NO: 306170 - DNA, 1449 bp, Proteus mirabilis
gtgaaaataactgacaatccctatttccgtgaacaaggatatattgacggtatttggtgtgatgcaaaaagcaaagacacggttgaagtgattgatcctgcaacaaatcagcccattggtactgtgccgaatatggcaacagaagaagccaaagcggctgttgatgcagccgccaaagcattaccgacatggcgtgcgttaaccgcacatcaaagaagcactttactgcaacgctggttccaactgatacaggataacaagcgtcaacttgcagaactgatgacgtttgaacaaggtaaacccgtggccgaagctgaaggcgaaatcacctacgcagcctcatttattgagtggtttgctgagcaaggtaaaagaaccaacggtgaaattatcccctccccttcatcagataagcgtctaatggtgatcaaacaagggattggtgtttgtgcggctatcacaccttggaacttccctgctgccatgatcacccgtaaagcagccccagcattagccgctgggtgtactatggtgataaaacctgccaacgaaaccccctatacagcccttgcgttagctgaattagccgcgcaagcaggaatacctgccggtgttattaatattgtcactggtgatgcagttaaaatcggtgaagtgttcacatcagacaaccgcgtgcgtaaattgagttttactggctctacaggggttggccgtttattaatgcgccaatgtgctgacagtgtgaaaaaagtctcactggagctagggggaaatgcgccatttattgtctttaatgacgccgatattgagaaagcggttgcaggtgctatgggggcgaaattccgtaacgccggacagacttgcgtgtgtgcaaatcgtttttatatccataaagatgtatatcaacaatttagtgaacgctttgttgctgaggttaaaaaactaaaagtcggtaatggctttaccgaaggcgtgactattgggcctcttattaatcataaggcggtagaaaaatcacaatcactccttgctgataccttacaacgcggtgcgacactgctatgtggtggtgaaagagataaagcaggtgaaaatttctttcagcctaccgtggtcggtaatgtgcctgctgatagtcatattcttgaagaagagatctttggccccgtggcacctttagtcatttttgacaatgaagaagaagtagtacatctagccaataataccatctatggcttagccgcttatttctacagtgaagatccacaacgtatttggcgtgtggctgaaaatctagaatatggcatggtcggtattaacacaggtctaatttccaatgaagtggctcctttcggtggtataaagcagtctggcttaggtcgtgaaggctctgagcatggtattgaggactatatggaaatgaaatacctctgccaaggcctgtaa

SEQ ID NO: 306171 - DNA, 558 bp, Proteus mirabilis
atgtctcaagttcatttttctattaaaaaattaataagtaaaagagctaagttttacgctagagaaaaaggtatttctttaacttcagctcgcctcaaattggcagaaaaatattcctttcaagatctacatgagcttacaaaggtaattaaagaaaattcctatgatttacggctatataaattggcatttcaatttcagtatcctgaagaattactaatacaagatgatgtttttaatgatatttatttttatttggaagattactggagtggggaaattgcatcaatgaatgcatatgattttgagctttacttcgaagatgtacaaatagaaaaatatgatgagaatagaggaattttatctttaaatactgatttaagttttagtggtacgcctgattctgaacgaatgtattccggacatgagatttttgcaaaagtaaacattatgttaaatagagttggggacttttgggaatttaataatgaagaatcagaaattgtaagtgcgtataacaatacagaacttccaggtttctatgatgatgattactag

SEQ ID NO: 306172 - DNA, 468 bp, Proteus mirabilis
ttgttcaaaactcttttatttattggtttgcaatggggtattgatatgtattattacagcgcaaaagagaatgctttttatccagaagaacttaaacaagattatataaacgcaaatacttttccagatgatgccgttgttgttgatgataaaacttggtctatatttgagatcaataaaccacctgcaggaatggtgcgagtagctggaaaagatggtcttcctaaatggaataaacatccacttttatccccagctgagctagttaaacaggcggaatatgaacgcatattacgtttgaatgaagtcagtaaatatacacagaattggcaaactcaattaatgttaggaataatatcagaaaatgatagaggcaaattattaaagtggatgagatatgcacaatcgctacaagaaatggaaataacaacaataacagatttatgttggccacaaaaaccagaataa

SEQ ID NO: 306173 - DNA, 396 bp, Proteus mirabilis
atgagtaaggtaaaaatactaactacactatttcgggaattacaagatgctgttctagaacttagtgaggaagaattagaaaaaatcatatctggagaataccaatttaccttaaagatagtaaaaaagaagggagttgctaattctaaaagtagtaaggttgatgactttaaatacaaaaatttgctaaattcacttaacttatgtgaatctagaacacaaggatatgaattattgtgtcaagaattaaatacaaaatctgaacttgaaaaatttgctcgccatattgaggttgcagttacaaaaagtgataacatcgagaaaataaaagataatataattgaatcaacagtcggtgcaaaacttcgctctgacgcaattcagaacaaaaattaa

SEQ ID NO: 306174 - DNA, 933 bp, Proteus mirabilis
atgcaaattatttccgtcataaactataaaggtggagttggtaaaacaactgtcacatctaatttggctgctgaattagcatttagaggcaaaaatgttttaattttagatatggatgctcaagcaagccttacattttcatttttaacacctgactactgggattcgagtctgaaagataataaaacaattaaaaattggtttgattgtataagtcaaagtgaacaaacaatgcctctttcgactctcagagtcaggcccagattagtcaatgatagatttaaagattctggtggatgtctagatctaatatcttcccatcttggactaataaatgtagatcttgagcttgcaacgcttctaggtggagctagtccaagtcagacacaaaaaaaatatttaaaagttcatggtaaactcagagaagagcttcaaatcttagcaaaagaaatgagttatgacatagtattaatagactgtcccccgaattttaatattgtcacaaaaaatgcattaatcgcatcagataaaattttgatacccgctaaacctgactatttatcaacactaggcatcgactacttaaaaagaagtgttggctcactgattactgattataacttttatgctgataaagatgaggattatgaaaaagtctcaccacaaattcttggtgtggtttttactatgattcaaattaattctaaacaacccattggagcccaaaggcagtatattgcacaaacgaaacgtttaggtgttcctgtttttgaatctgtttttagagaaaataaaactatttttgcagacgctcctagagatggagttccagtggcattaaactactatcgagatccaacatactcatcaattgttaaagaaatagaaaaatttgttgatgaattccttcaaaaacttggggagaaaaaatga

SEQ ID NO: 306175 - DNA, 540 bp, Proteus mirabilis
atgtccaagaaaataaaacaacgcttcgcccactgggtacttgctgggggacttagtgtcacgctactgcttacgggctgtgtcggggcttttagtctggcacccaaacctcaaccccttgccgccggtattcaaggatttaaccacacccaatacagtattaccggttttacgattaacgaaggctacggcagtatcgggggcaccgtctgttgtgtactgcttcccgaacaatggcgacctgatttagtcgcccatatcgaatggaaaaaagtggataaaagtaaacttccccctccgcctaaacttactcacgcagaagccttcaagaaatgggaacaattggttcacgacaacacctcgcgccatgaagcttgggtaccgatcccgcaatatgatgaaccttgtagcgttaaagtccattttctgccttgtaatgaagtgaaaatcaccacctcttgttatagctattatgaccccgagtatcccatcactgagcccatgaaaatgaaggagccggcagtatgtccgataaaataa

SEQ ID NO: 306176 - DNA, 519 bp, Proteus mirabilis; identical to SEQ ID NO: 304689

SEQ ID NO: 306177 - DNA, 183 bp, Proteus mirabilis
atgtccgcaaaattaacccgcaaaaaacttgcatttatcggggtaattattgcccttattgccgtctattttctctttattcaaaaacccaaagtggaatatcttcccggtaatttacatggttttaatcatgtgaagggaacttcggttaattggtttaaagttaatggtaattatggctga

SEQ ID NO: 306178 - DNA, 219 bp, Proteus mirabilis
atgtcagaaggaaaaaacagagttaattataattttcatactgatgtgaaaacagaaatggatctattgaaagagctttctcttatgaaattcatcatagcattaattgtggataaacttacccccgatgatagagctttaattattgagtcaattaaagaaattggggatgacacccttgatgattacgttaaaaattttgagaaaagcgaccaatag

SEQ ID NO: 306179 - DNA, 177 bp, Proteus mirabilis
atgagtaataaatcaggtaattttaaaggtgaaattaacattagcgaaatgaaaggtgataaaatgaacgagttagaaaaaagaattgaagcattggaaaatcaaactactgttattagaggtaagaactttcacattaattctaatggtgactcttgttttacggtggtgaaatag

SEQ ID NO: 306180 - DNA, 438 bp, Proteus mirabilis
atgaagagtaaaccaattaaagtgatttcaaccattgtcataacttgtaacctgattggtgtgggagtcttttttttggcaaaatacattcttttagagaatgttacgttttcagggaatgttagtagtttaggttcatcgttagtgacgtattcaacagcaatgatggctttattaatcgctatggttatagtcgtgttcagtctagatgataacaagttgaaaaatttcaaaaaagctggatatatgaatgccacatatatgatttatatggtgactttttttgaacttggattaacaatggcgttttctttactctgtatgtctaacatacagagtattaagatagcatcatggtcattaacttttgcattaataacattcctattgatttgcacccttgggtttcagttgttaaggttaaagcgctcaaactaa

SEQ ID NO: 306181 - DNA, 804 bp, Proteus mirabilis
atgaaaacaaattattttacttacagatatcttcctgttgatggttacgtgccatcagaaagcctaaaagatacaatagactcaatgttatcaaatgaaaacaacacactcaccataggtggagaataccatataattcagcatgttgatggcgatgtctattctttaataaaaacaaatagtagagatatttttagaaagctggatgtaaggagcaattcttgtgttgatttatcatcaatactaagcgcaaatgagaaaattgcctttgcatcattcttcatactaaaagaaggattgattggctttagcaacactcaaagctcaccaagaataagtagattggctgagatatacgatcactttatgtttacacaaaatagtaatcataatattaattttcaaccagttacaaaagatgtaaccgctcaagatgcaatgcagtttgcgcatgttggcaggattactatgaaggttgacagaagtcagggtattatgggggctatttctgagtggtttaatggagatgttagatatgatgacgttgcatcatttgaaattaaaattatacctgcaaggggtgcggatataaaaaatacatttgctgatgttatgaacgatttgcctcaggaggtaagatctattgctatatcagcaaaagaaaatattggtgatagcgcatcagatctgaatattatttcagcaaacactgtttatgatattgttacagatagtagggctgtcgctacacagatggaaaataactatctgaataacaccctattaagacatttaggatattag

SEQ ID NO: 306182 - DNA, 543 bp, Proteus mirabilis
atgagtggcgggtactcattcacaatagctccgcaagggtttattaagaaagcctccccaataattaatatcaattctgatggttcattcatcactaacgacgaatcagaaggtgctacggttactcgagtagctcaaggtgaatatttcatcgaaggtgttttaggctttaactcagatgcaggttggggcggtgtcgatggtggtattgaaattccacttgatgttaataaacagccgttgatatgggtagactctgaagttatggaggacggttctatcctcgtgagaacgtatcatcgaactcaccctaacgcacctaaattcgcccgtaatgatattgatggttacaaagacggcgacccaatagatatccctgatggtcgttttatttccgttcgtgtacagatgcctgagcaatccatctataacgtgagaatgcgtgagatggaggaagcgcagaaagcggaagaagaatgcagacaaaaagaagaggagatgaagtctcaatttgggctgggtgaaaatgatgcattgctataa

SEQ ID NO: 306183 - DNA, 204 bp, Proteus mirabilis
atggaaaagcaaacaccaattgatattgcagtaagtgcagtaggtggaaagcaaaaagacctcgcgaaaaaggttggcttaacacctcagcgaatttcagccatcaaaaagaacggtggttctctaccaagaacaaaaatgcgtgaatttatgatggctactggattatctaaagaagttttatacccagacatttttcactga

SEQ ID NO: 306184 - DNA, 711 bp, Proteus mirabilis
atggaacttagagatcgaattaattacttgctaaaggctgaaaatctaaagcaaaaggacttagctgagaaactaaatgccagtgcgcaaacagttaataactggctaaaaagaaactcaattagcagggaagcagcgcaacagattagtgatatttttggttattcacttgactggttactgattggcaaaggtgagccgaaaataaaaaatattggacaatcagaaatacctgatgaaaacaaatttattcctcttcgagtttgggatagtctaacacctcttgaggcagatgaagttgaggttccttttttgaaggatatagaatttgcttgtggtgatggatcgtttacagacactgattacaacggatttaaactaaggttttctaaagcaacaatgcggaggatcggagccaacagtgacggagaaggtgtgatttgcttcccagccagaggggatagcatggagcctgttatatttaatggtactactgttgctgtaaacactagagataagaaaattgttgatggtaaaatttatgcgataaatcaaggtgggctaaaaagagtgaaaatgcttcatcaaaccacgcctaaaacattaacaattcgtagcttcaataaaattgactacccagacgaagaagtgccaatagaggcaatagagatcatcggtagagttttctggtggtctgtattagacgtctaa

SEQ ID NO: 306185 - DNA, 1350 bp, Proteus mirabilis
atgaaaatttaccgcccattatggaatgagggcgcattgctctccccacaacagtttcaacaacaagcacagtgggaagcatttacaaaccaaggtgtttcaggtttatcttctccttttacttggggcgtggaaaaaattgaactggatgagtcacttttatcttcaggccgtttgcaagttcatcaattacgggcatggttgccagatggaacacttgtagatacacaagttagtgatatcagtcctgagccacgagaattaaattcagcagcgttatcgcaaacagacaaccttgtgttggtgctggcgttgccacttattcaacaaggaattgtcaatgtgcaaaaaaaaggggctttttcagaacgcgcattacggtatcaggaagagtgggtgaatgtgccggatgtgtttggtcaggatgatgaatctatggcggttgcccgttttaatattacaatccgttttcaacatgaaaataatgacgcgtggcaaacgtgccccattgcacgtctaacgcgtgatgggcaaggtgggtggacaatagatagaaagtttatacccccgatgacacaattttcagctagcagagatttacaagaacgattggctttattgaatcgacaaatacgctctcgatgcctacgattgatggccatgcgtcgcgaaagcaatgaacgtttagctgattttgccgtcgctgatgtttccttattttggttgttaaacgctttaaactcccatgcgaatgttctcatgggttatgaacgttatccacaacgccaccctgaaatcatttgggccgaattgactcgtctagcgggaagcttgttaaccttttcgctagagcatgaccttgctactattcctacctatgtccatgatgacttggaaaatacttttccacctttatttgacttgctcagcaccttactagaaaccagtttaccgtctcgtgtcattgcgcttgaaatgacgcaccctgatccgcaaacctggcgagtttcattgcatgatctcagactcagagaagaagccgatttttacctgtctgttcgttcagataaaaccgcgtgggaaattgctgaaaaattcccgacactgtgcaaaattggtgcgcccgacaccgttaacacactttacagtaaggcattaaatggtattccacttactcctgttgagcgggtaccagcggcgcttcctgtacggatggaaaaccagtattttgcgctgaatatggatgcacctgaaatgcgtgaaatgttagaagagggcgtttgtatgctgtatgtcccctctctatttggttatttagagttagaactatttgcggtattacgctcatga

SEQ ID NO: 306186 - DNA, 654 bp, Proteus mirabilis
atgagcaaatatattgatatcgacaaactgatggcaaaaacttggttaatagtgacccagctaaaatacggtcagtacgatcatgattcagagtccctttacgatgcttgttgccaacaaattgacgcagtgaaaaaggcattagcgcaaacaaaactcgctcccgagaatattgaacacattatctatgcgcaatgtgcattgttggataaaaccgtaatggcactcttggcgcaggggaatgaagaggacgatgcattctatgcttggcgagttgcgcccttgcaagcgcgctatttttcctcattagatgcaggggaggcattatgggatcgtatccagtcagtgttagcgcaggctgatccgaatgatgcggtattaacctgctttcactgcgtcttgatgctcggttttaacgctaatgaggtaaccactgaagcgttgagtcccgagcgacaattattgatggataaactctccacattgatttcgccaccgatgtctgttttacccttagtgatccagcatccgcacaaatccagcttgcaattaatacgctcctttggtttttggagtgcattattgcttgttggtattgtcgtcatcacttggggtggtcaaatatggcttaaccgactgttgtcagcggtgtaa

SEQ ID NO: 306187 - DNA, 2358 bp, Proteus mirabilis
atgcctcattcagttatcaatgcattaacacaaactgctaagaacgcggtttctcatgctcgttttcatttaacggttcaagattgtcctgattttttggatgtactcagttttgagtctgaagaggcgctcagtcaaccttggcgatatgaagtgacagtaacatgcaccaatgggcatatcaatcctgaacagatattattgaggtcgggggcatttacttatcaagtcccattattgtctggtttccctaataaatcgatacgaacggtgtatggggttgtttgtgagttcaaacacctaaaaacgtctgccgatgaaacacggtatagcttgatattagtgcctcgtattaccttacttcaatacaccaaacgcagtgaagtatatttaaaccaatcagttactgaggtggttgaaaaggtattgcgtcgtcatggattggaaggcgcggactttgagtttcagctttcccgtgaatacccagttagagaactgattactcagtggcgagaaacggatttagcctttattcaacggcttcttgccgaagttggcatttattggcgcatggaaatggacacaaaattagaaatggataaagtcattttccatgatgcacaggaaaactatcaatttgggatctcactgccttatcgccatgagtcaggaatgagcgatagtgggcaagacagtgtctggggattgcaaatttcgcatcaggtggtcagtgaaggtgttgtaacccgtgattataattaccgtcaggcattaacgccacaggacagtgctgaggtgatttcaggttttgaagaagtcactacgggggaagtataccactacgcggaacctttcttgaatgtcggtgatattgataccccagaaagcggggcattttatgcccatttacggcatgaacgcattcttaatgcccaatcatgggtatcggggtattcaaccagtccaatactagcacctggacaagttttagaaatgacaggtgtctttccacatttggttaaagacggcgttttaattactcatgtgcaccatcgtggtgccagagataccagtctacaagtccagttttcaggacaacgctatcgtgaagctttttgttttagaccgcctttacttcctcgacctattattgctgggacgttacccgcacgagtagaaagcagtgaaaaaggcgatacctatgcatggcttgatgagtttggtcgttatcgtgtgaaattagactttgatagagagcagtctgaagcaggttttgcttatttatggctacgtttagctaagccttatgcaggtgatacttatggatggcatatgcctttattagagggtaccgaagtgtcggtgcaatttgatggaggtgatccagaccgaccctatatcgcttatgctcaacatgattccgaacaccccgaccttgtgacgcgagataaccatacgcgcaatgtgttgcgaacaccggccaataataaactacgcatggaagataagcgtcaagaagaacatattaaactggcgaccgagtatggtaaaacccaactaaatctaggccacttagtcaatgctcagcgagaacagcgaggggcaggatttgaattgcgtacggatgaacatggagctatccgtgcaggaaaagggatgtttatcagcgctgatgagcagccaaaagcgcaaggtaatatgttggatatggaaaaagcagtaaaacagatccaacacgctaaccagcagatgcaaacgctgtctcaaacagcggaaaaagccaatgcattaactgctgatattcaatcacaaattgaattcttagattctcgtttacaacaattacagtcggcggtactgcttgctagtgcgccacaaggaattgcattgacttcgggtgaacatcttcaattaagtagccaaggtaataccatggtaaatgcagggcaacatcttgatatcggcgctatgcaaaacttatcagttgccgttgaaaaagaattagggctatttgcacataaagaagaagtgaaaatcattgcgaaccaaggtgcggtcgaaatcagtgcccaacacaatacgatggatttatttgcccagcagcaaatcacgattactagcagtgaagatgaaattgtgatatcgacaccgaaaacactgaccctaaatggtggcggttcttacctgaaattaagtgagcaaggtattgagcatggctcgtcgggagattacatcatgaaaacagcaaattacgttgtaccaggctcaggcgctgatatggcatgtgaaacaaaagagtttgatgtaaccgagattgaacttcaaaaacaggttattagtcgtgcattgcatgattaa

SEQ ID NO: 306188 - DNA, 459 bp, Proteus mirabilis
atgaaagttttgacattattaatctgtttatttttttcttctcttttgttggctttaggtaaaggaaacgcaacacctgaaactacggtattaaatttttatgctgagtatcttttggaaaataatgatgatatccaagcagagttgaaaaaaaatgaaaaagcgatgttaatgtatgtatctcccaatttaatcaatgagctcaaaaaggagtatttgaacgcggattattttgttgatgctcaatctttttgtccggattgggtaagcaatatcaaagttaataacgttaaggttaataataaaaaagcgactttaagacttgagttaggggctcttccaaacatttccaaatactccatagcgttaaaatactacaatgaggaatggaagataatttcagtaaaacccgataacaataatagcccttattgcaatgaattgaggagcatcaaatga

SEQ ID NO: 306189 - DNA, 2973 bp, Proteus mirabilis
atgatcaatatggatattacaataaaaaaaataaatcaaaatgctattgaaattcaaaaaagctttgctttcggtaaaggcgaatgtgctaagtatgtcaagcttgcacttatccatggaggggcttcaatagaaaactcagcaatacgctcagctaaagactacggcccttggttaattgaaaatggatttacgcctgtttctggtgctcaagcacaaaaagaggggataaattactctattttaggtcaacaaaaaggcgatgttgttattattgaacggcttaaaactccaaaaaatgctagaagcattcatggacacatggccatgtttgatggaaattattgggtttctgattatatacaacaaagaggtttttacccgaaccaggagtatcgagatgaaggtactccctttgtcttataccgctatgcaggtaatcaatctgcaaaaaaagaagaacaacgaaacagtgctcaactgataaaaatagtctatcccatccctaaaaatgcccgaggtcaagaattctcaaacttagatgacattatggcgcatctcaatggtgaatctacgggaagttatttattggggcgcaatggaatgtggcatagcggtatccatattaccaatgcgacgaccccttggtgtgccttaagttctaaaaagtttgaagagcgcagtgtgtttgcgggagcctatgcaggagaacaatcaatacgttgtatggctgatggcgaaattattgcttatcgaatcaataaaacgtatcaaacgatcccatggaaaagcttcattcttcaattatccgcttcatttgtactggttcgtcatacacttcagttaggggatacggaacgtagtcgattgcaattctatacattgtatatgcatttagcgccttatagtgcgtatcaaaaagaagaaacaacgcccgtttggaaactacaaaataccctgaatgcctatccgactatctggcgagagcaaccaaaaaccccgcgttcaacgacattagcaaaaggtacattggtcgaatggtcgcctgaaaaaagtgaaactaaactaactatcacgaaaaacaatcaattacgagagtatggactcgttaccgttaaatcgaataaaggcaataaccagcaagtttggattttagtggataacaacaaccttattcgtcatgatgaaaatgacattacaccatcgtggtggaagggattccgtccagcccccgcgcaggatgtgatggagtttgataaagtcgtcagtttgaacacaccgatagcgattaaagcgggggacagtctcggccatatgggattttatcaagcccccaaagagcaaggcgttgagtcacgctatcaagtgcatattgaatgtttcagtcatgatgacaatcttccgcagtttttaaaaaatcctgacgctgtgggtattaatgacccgtactatttaaaatgcttaccgggattaatgttatgggaaaaaaatgaggtcggtgaatttgttaaaacagaacggaagacaacatgggaaagtctgcataaattaagcgaattaaaattagaaacagacaagcaacagcaaaaatactattttttacctgaacatttagggtattttcccaaacagattgatattagtgatacggataaagataaaatcggttcactaacaaagcgtgttgaagaaattcaagccgatgaaacaaaacaagcggaataccaaaatattacccagcatgcactttttctgtcgcgttatgatttagaaaaaataggctttagggccttaaccagtgaaacgaccacgtttgattatttaaatgggtacattcaacccaaagccacttatatcagtgccatatttgatattattttggcggaagctaacgtgtcaccgcgtcctgaaaaaggaattattgctcataattatcaacgtttaatcaataagattaaaggcagtgcaacggaacactacaatcctgaagaataccgtcgcgcttttcataacccgatgttctcccacctcgtgaataaagccatcgttaagcaccccagtgattggtattaccagagtcacgataatgtttggcaatcttttttaaagatactgagtgaagaagcgcccttatggcgttcttacagcgaagaatttctggataatatggtttggatgcaagatgtgactaatgaaaaattaggtcctgaagtgtggcatatgcatccgctggtgtttctggattcatttaaggataaaagtagaattaaaataatttataaacattataattacaaattagatgatgcgcttgataaacaaatggctttaaccggtggaaataaacctaaatatggtaatacaactttagcatctcgggagttagtgcgtaagtacatggatcctgaaattcatatggatggtgctgatatttatcaatttgttgacctttcaaaaccaacgggtatttctgagagcgaagcaaatgctatgttacaaggaaaaggtgtccttgaggggaaaggaagtatatttatcgaagcgggtaaaaaatacaatgttagtgaagtttatttaattgctcattcattagttgaaacggataatggaaaatcttcatttgcaaatggtagtaaaagttacaacggtgtaactgtttataatatgtatggaattagtgttttcgatgatgcaactcagaaaggaactaaatatgcttatgataaaggatggacttctgtagataaagctattgacggtggtgcaaaatggatttcagtgaactttattaataaaggtggtcgagcacaaaatacgctttataagatgaggtggaatcctgatgctcctgcaacaatgcaatatgctacagcagtaaattggtcattgatccaagtatctaagatgaaaaaagtgtttgatttatttcctgatgctaattggacatttgagatccctgtatatttaaaataa

SEQ ID NO: 306190 - DNA, 339 bp, Proteus mirabilis
atgctgcaatttataacgttttcagaaatgaatggtacatatgcgtacagagttgagttaaaaaagaattgttataataattttgaatggaggctttcttatgctcagcatggccaatatacaccaattggtaataaacctggctcagcttcatctttaaacgttgcatttgatgatgcagttaaggctcttttttcttatgttcaaagtaataatcagtcttcagctattcctaataaaattcagtatatggtatccaaaggaatgatgaatgaaaacgacataacatccgttctgttcgccaacaacttcaatcctaaggttattagctgttactaa

SEQ ID NO: 306191 - DNA, 1170 bp, Proteus mirabilis
atgaagttatcggcagtcgttaattttatggagacatcgtcttttagcagaaagacgatgtctttcttattgatcttgaatagtctttttattatttactcgatattactttctcgtggtgtttatcttgattgggaaatacacggttttgctgattggctaaaatcgttaggtatattgaaattacttgatattcctaaagtgatgttagcgagtgcacttattttgctctctttctttatgtatatgggggcgaggattgcgtggtgcgtttcattaatattattagtgacgatcgtttttttagatgtcgcggtttatcaccaagctggtactcaagcctatacttcattagcattagccattgtattggttatcagccggcgtgcttttcctcatcatagtttaaccagtgccggttttgttgcttttatctgtacgatttcgctactgtgtttctctatgttaggcagcctctatattggtgatgaatttaaaccacatatcacaacgttaatggatgctttctacttttccattgtctgtatgacaacacttggttttggcgatatcgttcctatctcaagtaatgcgagaatgtttaccctaacagtggttattttggggatcactgtttttacgacttctattgtttatgtgatgggatttttggctcgtggtactcgcgatattgtgaagaaaaggatcgctaaaatgcatgatcattttattattattggctcttcaatgctggcagcacaattagagaaagggcttagagagcaaggtaaaccggttattgcgatttgttcggataaaaagcaagccatgtatgataaagaagccaatattattgaaggtgatccaaccaatgtaaaaacattacaaacggcaaatattcgccaagcgagttgggtggcgacgttatctgaaagtgatgcggaaaatacctttattttattaactattcaagagtgcccagatcttcaagcgaaattaatcactatcattaataaagatgagaatagagaaaaaataagtcgattacgtccagatatgctgttgtctttagcttcgttaggcaaagaaattatgatgaaagtcctttgtggtgaatctattaattcgtctgatgttactgatttattaatcaataaatatttaaaataa

SEQ ID NO: 306192 - DNA, 738 bp, Proteus mirabilis
atggatgttaatttttatgtaacatgcattggtgacgctttaaagtctcagatggcaagagatagcgtattgctgttagaaaaactaggctgtcgagttcattttctcgaaaaacagggctgttgtggtcaacctgctattaatagtggatatattaaagatgccattccagcgatgaaaaacttgattaaaacctttgaagttaatgactatcctattatttctcctgctggatcatgttcttttgctattaaaagttatgctaaatatctggtaaatgaacctgactgggctattcgtgcagaaaaaatagctaatcgcatgtttgatctcacctcctttatcgttaatcaattaaatattgttgatgtaggtgcaagtcttaaaggaaaagctgtttatcacccgtcttgtagcttatttcgtaaaatgggagtgaaagaagagccactcacattattacgccatgtaaaagggctagaattattaccttttgacaatatggaaacctgttgtggttttggggggacgttttcggtaaaaatggctgaaatttcaggtgaaatggtcaaagaaaaagttcaccacattatggatgttcatcctgactatttaattggtgcggatgtcagttgcttattaaatataggtggtcgtttagagagagaaggtcgtccagttaaagtgatgcatattgcgcaagtattgatgagcaatgaggaggaattatgtcattaa

SEQ ID NO: 306193 - DNA, 1632 bp, Proteus mirabilis
atggttaactttttattctatatggaaaaaggtgataatgataaaagcatgtctcaagtaataaacttttctcttttatttattttatctatagtacctgcactattagcgggttcaaccctgcatattgaacaaaagttctctatggtgattatcggttggctcctgatgttgctctgcgcaggtatctatcggtttactataggaaaagtgattacttttattgttgcagctttatggtctttaaacctctccatctcactgtttttttatcgtgaacatgatattcccttttcatcatcaatagcagaaactttcattaatactaatggaagtgaaactgttggtatgctctcttataataaatattatgtactcttttatattgttatatttaccagttttttctatttaatacatattagcgcccgttatttaaataacaaaactaataaaagatgtttaattgctatttttatattaataattcttatttctctatacaaaaacttagcaataagatcagagagtaaaacccaattacttgctgagtattatctacttaatacccctttttacaatgcagcagctttagtgcggactttccacgaaaatagacaaatcaaaaagatcacatcagaaaaagttaattttaactatgataaagtggatcaaaaaacagaaatttatattcttttgattggtgaatcagtacgacgtgatcatttaggaatttatgggtatccgtacgatactacccctaatttagagaaagaaaaaaataatattttattatttaagcaagcttattctcctgcgcctgtgaccatattatcagtacccatatccctttctaatatcaacctaacagagttatatgataagaaacactacgctgataatatcatttctcttgccaatcatgctggcttcaaaacatattggttaagtaaccaaggtaaaggaaatccaaaaacgagtgtgatttctgttattgccaatatggcccaacataaaaaatggaatgaatttattggctatgatgaagaattattgccatttttagataatgcgcttaatgataactcatcaaataaaaagctcattgtcctacatacttatggtagtcatgagccagcatgtaatcgttttcctagcacttaccttaaaaccttttcccaacaagaagatgataactgctacgatagctctatcgcttatactgacaaacttatcagccaaattattgaaaaaatacaagataaacccgcatctatactctatttttcagatcacgcattacaacgattagataaaaatagagaagtacgttatcaccatggcgtgaacagtcctcgccaagaagcttataatataccgctctttatttggtatagcgcatctgcaacgcgaccaaatatcaatgaagaaaatttgaataaacctttttctaccgcagataattattggctattaagccaatggctaggtattgaacataactcagcgaaaaaatgttactcacctttaagcgaatgctatcaaacaaaaacgtcaatgatggtcatcgatggtaataagaagttattaaactacgcactattagaatcagaagagcaagcgccccaataa

SEQ ID NO: 306194 - DNA, 918 bp, Proteus mirabilis
atggtcatacgtcctaatcaacactggttttttcggttatttgattggcacggttcagtgctatcaaaaataatctttcgcttatgtcttaatattgcaatgtctattatcgctattttggtttatcaatggtatgaattattaggtattcatttaactgttgccccatttagtttattaggtattgctatcgcaatatttcttggttttagaaataatgcaagttatagccgacttgtggaagcaaggacattatggggaaatatgttaattacccatcgcaacatattaagaaatataaaagccttattaccggaagataaacaatttaatcgtgacttttctaatctacttattgcttttagttggagtctaaaacatgagctaagaaaaacaaacccaatggtcgatctctatcgcctcttaccccgacctttatttgatgagataatgaatagcccttaccccactaatcggattttattgcatattggcctaaaaattggtgaattgcgagataacaaagtaataagtgatgttatctttcaatcaattaataaagatattaataacttatctgatgtattgggtggctgtgaacgtatttcaaatactcctgtaccttttgcctatacgctcatattgcaacgtacggtatatctattctgtgctctgctaccttttgcattggttgccgatctccactatatgacgccatttgtttccgtatttatctcttatacttttttatcttgggactcattagctgaagagttagaagatccattcggtgtttctgccaatgacttaccattaaatgcaatatgtaacaccatagaaaggaatttattagagatgcaagatatcactccactccccatcagagttaaacctgaccaatattataatttattgtaa

SEQ ID NO: 306195 - DNA, 624 bp, Proteus mirabilis
atggccaatttaaataaaataattataaagcatttaaaaccaatattaaaagtggaaattttcactaatattattatggctattggtatagttgtatctttgtacctacatacgatagaacaatcatcaatagaaaaaagaattattaaaagtaccgaacaagaaagaaataacataagaacaatgtttgcctatgagatctcacataatcaatcaagtctaaaatttttagagggaacaaaaaatgtaggttttaataaagaaaagtgccaagaaaaaaactgtactcctagcgctgttgaactcaatatatttgctgacataagattgagggttctaaactcgctaagagatgatgtatatactatttatctacctcagatataccttcttgaacaaaaagaagtctcgttaataatgaattattattacagccagaaagaactactacaaaactcaaaagctattcaaattgaattatctcaaaatagagagaataagaaatggcttgaagaaaaaacagatcttcttaatcatgattttgagaaagaatactcattaggcgaacaaatactattaatgtataaagcttatattcctaatgaattagtgaataaacgttaa

SEQ ID NO: 306196 - DNA, 3432 bp, Proteus mirabilis
gtgtataagagacagattataaatttaacagcaattgataatgttaattctgaaaatatagatgtaacggcaaagcatttttccatcataactaagaatggagatattaattattcatttagccctatagcctcttatactctgaatagcattaaggcaccatttattgatgtgtctgaaaaaatagacttttattcaggtaaaaacatttacatttcaaatgtaataattaatgaatcaaatgaaaaaagtttatcagcattagagaatattaaaataaaacgcgatgagtctttatttttcaacctaatgccaaattttagagatgaacaatatatttcagcgtttttatttaatatggggctttggaaaagtaagaataatataagcttgatggctggtaaagatattgttagtcagggaataaaatattatagtaacaaagaaataacttttaatgcaggacaagatatttttcttgcctccaaattaataaaagaagccgctccttttttcagtgatattcattacccccaactacaatctaaattattttcagataataaccttattttaaatgccgcgcgtgatattgatttaagttcaacagtattaaattcaaaagataaagttattgtattagcgggtagaaatataaaactgggtgcaaatgcttattccgccatcaaagatccccacgaagatgcgcaagacattcaatatgccaccacatccattatgggaaataaaggtatttctattgcatcatcaggctcactcacaacagaaggaagttcacttaaatcagagggggatattgctatttccagtggtggcaatatccaattgggatcagtaagaacacattttcgtaaagagtcggactcagagttagaagaacttcgtaaacaagtcagtactgaaattaatagcggtaatcatctaacactattatctgagggcagtattttatttcaggcctctcaattagctgataataaaaagatggatattgctgctaaaggtggatttctttatgcacaggcaatggaagaatccagttactatgaagaagaaaagaaaaaatgtaattggtggacactgtgtgcgactaaaaagaaatataccaaaacatttaataacacaacgaataaagttaccgagtttattgctaatgacgatattaatttaattgctaaagatgatatcactttagaagcaagcaaattagagacagcaaagaatgccaaattaaccagtaaaacaggaggcattaattttaaagcggtgaaagatactgcttttaaacaagttattactcgttcaaaagatatatatatcactcaacgtaatcagggatacaccaagggaacatggctattacctgaactctatattggcggaaagctgactatcgatgcgccaaaaggcatatctgcagatattaaagccaaaaaagagcaatctttagagcaggcattaactgccttaagtaacacaccagaatatgcttggcttaatgcgctccaaggtcaagaaaatattaattggaatttagtgaaagacacttattccagttgggatgataaaacccagcagttaaatccagttgttggtgcggttattgccatcgcggtaggggttgcaacttatggtacggcaacagctgcctcaataggaggaatggcaagtaatgccactattgctgcaggagcctctgcgggggttgcgtcaacggcatcagttgcggcacaagccggttttgcttctttagtttcgcaagctgcggtctctttagccgaaaatcaaggcaatatttctaaaacatttggcgccttaagtcgcagtgatacggtgaaatccattgtcaccagtatgaccgttgcaggcgccttgcaaggtcttgaccaatttatgggttgggatcaagcaatacaggggggaacattaccgacaacaggcaagttgcttgcgacggataatgccacatggactcaagttgctcaacgcgttgcctcacagtcagtagtgagttctacactgggcacagccattcaaggtggcagttttattgataattttaaaactgcgctattaagccatatcggcagtcaatttcacgctgaaggtgccaatctcattggtgataacggtgcgatattagggcatgcaggaaaggttttaagccattctgttgttgcaggagtgagtgctgaaattgcaggaggcagtgtaacaggtgcagtagccggcgccttggcagcagaaatagcggcaatatcgctacaaagtaaattatttgagcctagttatttaaatgaaactgacagacaagttgcattaattcaagaggcactacatggcaatgaaggaaaaacacagctcactaaattaattggtgcactgacaggcgctattgtgactcgtaagcctgagggcgtattttctgcggctaattctgcggagttagtttatcgacataattacagcgaacatatgctttcaaagctagcactagaaaataataaggacataattgcagcgtcaaaaggtgatgttgcagcagcagaaagagttgtaaatcgacaaaatgcagggatgattgcgattgctcttggtttaggaggaagtgcgagcattattggtggtcacactgttattgcagcaacaccagaacttattgctattacgcaagctgcatttagtacatgtaaagctaattgggtttattgtgctaatcagctaggtattaatatcgctgggatatcagctccagaagctgcaatcgctggtgtcaccgttggtactggttataaagtattagctagttcagaagaaagtgctaaagctttctctagcatgttagctaatagttcaaagtctttaatgacttcaggaaaattaaatataactgctataaaaccgatagtagaacaagaaaaattattaataactaccaacaaaaaagctattgaaataatcaataacggggagtttataatatattcaggagtaactacgaatggatataaagtatctaatggagccaaaaccgtagtttttaaaaatgaattagaacatcctattgttcaatctaggattaatattaaagtgggagatgttgaatcaggttggttgcatgtacaaaaacgtcatttttcaggagcgcaaaatgctagccaatttacgcttagtgaacaggaaattaaagatatattattaagtcctgctgtcattaagattcctattaataaaacgagagaatcatataataaaaacaccaatagtattgatattttgtatgaaagagtgattcagcttgataaaaatataggaattgataaatttagtaaacagccaactaacataattactatgctcacagataaaaatggaaatttaataactactacccctggggaaataaagtga

SEQ ID NO: 306197 - DNA, 999 bp, Proteus mirabilis
atgtttagtgatggcgttttatctcatcgctataatcctgatgctcatattaaacttgttttcgatacggaaagtgttagtgctatttttaactcaggaatgacacttcaatttattgataaagataatcgagtttttcatttgcctaagccagacagcggtcagcgtttactgagccccactatcactttggatgttaggttgagtcatcaaagtgatgttctgatgatcccaccctccctacgtttaaataaagaggcattatcattgtatcctcagtattttcatagagaagaaccatcatcacgttcaacgcaattacagcgtattatatccactcaaacactagagccttatccattaaaggtaacagaattactgagagatgatattgctgttaatgataatcaacctgttaattctattttgtctctcaataaactattttcaaacagatcacaagatatattctctcaagctatagatttattaccaatgatagaattaatggatggtgatgatattgttgttaatcataatcaaagtagctcagtgattgatgggggtaaaggtgatgatcatattgttgtcaatgaagggcaccatattttaattgctggagaaggtaatgataatcttaatggcggaagtggacatgatctgtttatttcaacctcaggaaatgattatctaggtggaggaagtggtaataatgtttatgtggtacaaaaacgtcatggtgaagtgacggtgtatgatgaaggtgaaatgagccatatttttgtatcaggattatctgagcatgaaaaattaatatcttcccaagtaggtgaagattggcagtaccgaactaccgataatcagtttattttaacggttaaaacaacaagggtagggaaagctgaaaataatacggtgaaggttgtggaaaagcagcaaatattgtcaccacgagcgcttgcgacaattattcaacaaatggctcaatttaatcagtaa

SEQ ID NO: 306198 - DNA, 2562 bp, Proteus mirabilis
atgaatagtagacgccgtcgggttgtaataaccggaatgggggttttatcatctttagctaaagatgtgcctcaatttaaacaggttctttttaatagacaatgtaatattaagccaagccaacgctatttaaaatggtttaaaaatgccaatgcatctgagattgagatggcattagattattcagatataccgcagcatatagctcgatcactagataatgcggcattatgggcatatcgagtctgcaatgaggcattacaacaagcaaacttaatagataatcagtctattttagataataccgcgatgatcgtgggcgtctcttcggcaggaacggaagcctttctgccattatttgaacaacatattgatgatttttcgataaaaaaagccattttatccggtgggttttcatcatgctgttcgagtgtatcaagtctacttggcttacgtggtggccttgaattagtggcgacggcctgtaccgcaagccctaacgcgataggtatggggtatgattatatccaaaatggcaaaaatcctgttgtgctagcggccggaacagaacccatttatcttcctacctttgcgggtttttatgcccttaatgtgatgaaaacaacaccaacttccccattttcaggtactcctggtatgtctattggtgaaggtgctggggcgttagtattagaagattatcaacatgcggttgaacgtggtgcgacaatatatggtgaaattgtctcttacgcgacatcttgtgatgcttatcatgaaactagccctgatcctcgaggaaatggtgcggtgcaagttatgtataaagcactggataatgcgggtattactcctaatgatattgattatataaatgtgcatggtacaggtactgaagcaaatgatcgcattgaaaccatgtcgatgaaaaaagtgtttcctaatatttatcatatcccattaagttcaacaaaatcttatgttggtcataatattggtgctgcaggtattgttgaaatcatcgcgtgttttatttgtttagcagaagacaaacttccccccacattaaatttcactcagccaaggcatagctgtgatttaaattatgtaccgaatttctttcaagataaaaaagtaaaattttttatgaagaataattatgcttttggaggaaataactgctctattatcgcaagcccttatattacagataaaacaccgacggaatataaagctaaaaaagtggttattaccggggtgggggcgattacgtctattggcaataatgtaatggagataataacagcgatttcggcaggagataaaacaggtacattaaaacctatcgtatttgcgagtgatgtgcagaaagatatcgacaacttgatgtctgttgtcataaaagataatgattttgagcaatcgttaggacatccttattttgatctcgacattgatcatcgcttaaaaaataacgcctgttatcatgctatcactgacgttaatccgaaaaaaacattacgttattatgatccaagaaaagctattcctagcgggacttatgccttattcgctttaaatgaagcacttgctaatgctggacgcaaaattaaacgtgatggtgataacttaggttttattgttggaatgtcaaaagggccacaaagtaccgttaatcgttatttacaaagtttaattcctgatccgcaaaaagtaagaacatcagaatttcctggtactttaatgaatgcagtaccgacattttgtgccatcacagagggaataaaaggttataccacgacattggcaacaggggttaatgctgcattaggagcgttaacttatggttatgaaattatcaggcaagatctacaacctcaggtaattgtcggaggggcagatgagcacttcagttctatttcactctattttcaagcgatgagtaagaaagttaatctgaccaagaatgcgacagattatcaggtttattctaatgcaagtgccggctatatccccggagaaggggcagggatgttatttcttgaagataaagagtatgccaagcaacgaggcgctaaaatttatgctgaaattattggctacggtaaagcgaatgataatacttttttagtagacgaaaatattactgatagagtggccgccttatgtaaggctatccaacaagcattatctgaggcgcaactcagttgccaagatattgatattatctgtggtaccagtgatggtaataaagagaatgatgaagttgaaatccgtgcgattcggcaactattttatcaagcggcaaatcatgtaccagtagttaattacaatgccttttttggtttagttgaatcatgcgctgggatattggcgatctctttagtgattcatatgatgcaaagcaacacgataatacctattccttatacaaaaagttttatagctgatgatattcattttgttacccaaccgattaataagcagatagaaactgctttagttcttggttcatcagaaggatgtaaccactatgcaattatcatcaggaaaccgttatga

SEQ ID NO: 306199 - DNA, 696 bp, Proteus mirabilis
atgaaaaagaattttctctattttaccttactagcggctatatcaacatcagcactggctgtaacaccttcagctcaattacagatcaatggggatataaaaccaccaacttgtacaatcaatagttctaacaatacagaagttgtctttgactatggccgcatatcgccaagcttgataccacaatcttcaaactatcaatatgtggatatgaaaccagaaacaagcatcagtattgaatgtgatgctaaaacttatttgacttttatacctactgatacatatggtgatgtagatcttgattataatactagttttgatagtgcttggtttcgcttagttgataaagccaacccagataaagctgttggggcttcattttttaattggaaagatgcaactgttgacggaaaaacggcttttataagccgagcaacacctaaaacagctgaagtgggggtgtctgtcttagttaaaaataatattcatgggtggacatcagagcaacaagaggatgtatccgccgcatctcttaaattagtctcaggtgaaatctttaccacaaaatttataccaggaatatcatctcatacatttattctttctcgtgataagctagctaaaaaagcgatagatattagtaatggactcgattttattggtgaggccgtattaacattctctttcggtgtttaa

SEQ ID NO: 306200 - DNA, 729 bp, Proteus mirabilis
ttgagtttaacggaagagggggagcattactttcatcgtatgcaagttatcttgcaagatatgaaattagctgaagatgaattaattaatacacaaaaaacaccacagggtctattacgtattgatgccgcaacgccggttgttttgcatctactggtgccttttattaaacaatttcagcaaaaatatcctcaaataaccctctctttagtttcatctgaaacatttatcaatcttattgaacgtaaagtagatatcgcgattagagtcggtaatttaacggattccagtttacgggcaaaaccactattgaatagttatcggaaaatcgttgcgaccccggactatctcgcccgttatggacagcctaaaatcgcagaagatctgcttgaccatacttgtctaacttttactgaaccagtatcactaaacacatggcctattgagcgagataatggacaattattagaagctcctatgggaatatcgtcgaatagtggagaaacgataagacaattgtgtctcgaaggtaatggtattgcttgcctttccgattttatggtggttaatgatatcgaaaatggtcgatttatcgaattattccccgataaactgcaacctatagctatgccttttaatgccgtttattatagtgaaaaagtggttagccaacgcatccgtgtatttattgattctctgagtgagtatattgctaaaaaagtaggttaa

SEQ ID NO: 306201 - DNA, 306 bp, Proteus mirabilis
gtgacagagtttggtcgcaaagaagtaggtgatcgccaactatttggtatcttaggacgtggaaaaacccaagttgcttatgccaaagtgaacttaaatgttgtgaatgtgaatacctctgaagtggtgttctctacacaaggtgcgggggaatacgagctttctaatcgtgagattgttggttttggtggcacagcaagttatgactcaacacttaatggtaaagtgcttgatttagccattcgtgaagcggtgaataatttagttgcagggattgaaagtcatgcttggcagcctgagcagtaa

SEQ ID NO: 306202 - DNA, 1614 bp, Proteus mirabilis; identical to SEQ ID NO: 301501

SEQ ID NO: 306203 - DNA, 171 bp, Proteus mirabilis
atgattaattatgatgtttctgcatattctgaaatgtttggagagatccctgattttgaatctctaaatattgcggggcagtgtattgggcaatgtacgggctgtatgtgtagctgtcgttgttcttgttctggcggtattttttctgacgttgaatgggagattttttaa

SEQ ID NO: 306204 - DNA, 159 bp, Proteus mirabilis
atggtcgccacagaaaatcaatttaatgagttgtttggtgcaatattggacgatgtcacaatgatggcacgatgtgcatgtgttgcatgtaattcatgtacctgtgcctgcagttgcagagggggattagacgataacgagataggatgggctgaataa

SEQ ID NO: 306205 - DNA, 1395 bp, Proteus mirabilis
ttgatttctatttctcgctttaccaaatgttttgaactagatgatgcagttgctttatatcattccttaagaatgaagcctgtttacctcacaaaaagccagtatcaggaattactggcttttctaaatgataaacatccgattacacttaatgaattccccactaatttatccgcagtggtacagcaactagctaaatataaaataataacgcaaaacgaatttgaagataatgatgttttggcgtttgttcgctcacgtatacctacaccatcggtgaatgtttgttattttatcttaagtgaacaatgcaatttagcatgtaaatattgttttttaggaaataataatccagaaagaagagaaaaattctcatcgagtaggatgacaaaagaaacagcggaacaaaccttaaatttctttgttcgacaaataaagttatcaggtaaagatattactgataataaaccgaccatcatattttacggtggtgagccattattaaatttctcggtattagaatatgtagcgctgagagtaaaagagctgtcgttacaagagcctattcttcgacacgttgatttgtctgtgattactaatggtcttttattaaatgaatacagacttaaacgccttaaagagctaggtgtttctatcgctatctctattgatggctgttcagaagaagcgaatgctcagcgaatagatattgctggtagaccaacttaccacaaagttgttgatatattggatctagcaaaaaaattagatgtagcaatttctctgtcggtaacattaacagaagagacgataaaagataaagaaaaaatcttaaaactaatatcagattataatattaaagggtttggttttaatattttaatgtcagatgagtcatttattgtcagcgataaatataataatgaagcatcagactttattattgatatttttcatgatctacgaggtttaggtgtttatgaagatcgtatgatgagaaagctgaagtcgttttcaaaatcacaagtctatttctctgattgtgcggcaacagcaggctctcagatcgtagtaacccccgatgggcaagtagggatttgtcatggttgtattgcagaaagacagtattttaatgcgtcgataaaagatgactcttttaatgccaataaagatcctctttttatcgagtggtcacaattaacaccagtaaatagagaagaatgtttatcttgtgaagcattaggtatatgtggtggaggatgcccaataaatgcctctcattgcaaaaaagggaatacaattcactcattagatgaacgattttgtacacatgccaagaaaacacttaaatttcttattgaggatttgtatagaataattaaaaagagcgcgtaa

SEQ ID NO: 306206 - DNA, 1650 bp, Proteus mirabilis
atgacaaacacagttattaagtacgttttagaccgattatatgatttaggtatcaaagatatttttggtgttgctggtgattatgccttccctattgaagacactgtttgcaacagccaacaacagcgttggattggtaactgtaatgaattaaatgcggcatatgctgcagatggctatgcccgaattaaaggtatggcagcattatccactacctttggcgtaggtgaattaagtgcgattaacgctattgctggtgcctatgctgaaaatttaccgattttccatttagttggcatgccagcaagtggcgtacaaaaaagtaaacgccttgtgcatcatactttaggtaatggtgattttgatgttttttatcagattgctcagcgccttgcttgcgctcatactattttaacacccgaaaattgtgtggaagaaatggagcgcgtaatagaagcagcattaaaagagcgtcgtcctgtttatattggtataccttcagattatgctaatagccaagtagtagcgccgttatctgttaccgcaccacaaaagccaacaagtgataaagcaacattagaaaaagcagtatcagcaatcattgagaaactcacccacagcaataatgtctgtgtattaccaggctttttatctgcacgtttagggttaacagataaaatccagcattttattgataaaacaggtttaccttatgccactatgtttatggataaaagcatattaagtgaatctaacgctcaatatgttggtatgtatgacggacaattaatgacaccagaggtcagagaatttgttgaaagtagtgaatatatattagggatcggtacattaatgactgactttaatacaggcagcttcactgctaatattaaatcagaacaattaatcagtattatgccagattatgttgaaattgattctgtgatctactcctgcgtttatatgacagatattctttctgaattaacccaacgactaccaaataaaacttatcataaaataacagcgaaaggattaggtgaagcggttgcatctgataatgataaaattacagcacaatatctctatcctcgtttagaacaattctttaagcctaatgatattattattgcagaaacaggaacctcatccatgggattaggcttcgctttattacctgaaggtgcacaatttcataaccaaacactatggggctctattggttgggcaacaccggctgcattaggcgctgcattagcggcaccagaaaaacgtattattttaattaccggcgaaggctctcatcagttaacaatacaagaaattagtcaatttgttcgtttcggtttaaaacctattattctagtattaaataacgatggttatttaatagagagattattatgtgattaccccgaagcttattataatgatttagctcagtggaactatcatcagttaccgcaagcctttggtgcaacagattggtatagtgaaaaagtaactacagcaagtggactagataatgcgttaaataaagccgcactaacaaatagcgcatcttatattgagatagtcacagagcgatatgaggcctctgaattagcgcaaaaattaaaagaatcaaaaagttcattatattcattctaa

SEQ ID NO: 306207 - DNA, 423 bp, Proteus mirabilis; identical to SEQ ID NO: 301232

SEQ ID NO: 306208 - DNA, 249 bp, Proteus mirabilis
atgggattaataattcaagagcaatgtgttattgttgatcataattgccccgactggctaataactcagtctgaagggaatccaactattgattatacagatggcttaaaagtttatgctatttttaaaagacaattccattcaggtaaaagaagacgtaatagaaaacaacgtcaactgggggataattgtcctttaatttatgctttgaaaaaaaggatgatttatatacaaatatttctagcataa

SEQ ID NO: 306209 - DNA, 1206 bp, Proteus mirabilis
gtgaataaaagagcactttcgacaaagtatcgaaattcgatgtatccatcaatgataaaaaaaatagggggatacggtttatcgttattcttgataccaataatattctttcattccgctaatgcgttagagttatccgttcctattggctcaacaggttatttaggggaggtcactccgccagttggttcaacaacgaaaaattatgggatggtaagttcagtgcttcaggcgaatagatcttatataagttttcggtgggagcctagtcaatttgtgataagtgacctgcctttttaccccgaaatcggtcgagtgggtgtggctatctacaataaaagcaatcccaaaggggcctttattgttttagcacccagtggatatggtttgttgcgttataaacgggctaacgatacatatgagaatgcttcattttcatttagtcgttccaaaaccaccgctatgacaaatatgtataataattttccctctaattctgatgaattaagttggggtcttttgcccagacaaggcaatagtaattttttctcagcacgatacgtagatggtagtgataaagttcattcgttaacattaacaatatccagttattccgcgtatgccatcgggccattagaggccggtgaatatgccatgcgtgatgattcaaaattttatgccgtcattcgcactagttcaggttcttttgcaagatctaaaacattattaagttcagcggataatgtgaatattaaagcactcaaagcctgtgacgttatcccccaaacgtctaccaatattcagtttccgactcaaatcgcgaaaaattatgcaacacccactaaattagcagataatttagccagtatcagtgtcaattgtccttatgctaataaaaatatctatctcaccctgagcccttttaataatttagtctcaggcagtgaaacagggatggagctatccaccaatggctctgaaaatatcaccacactgccttatgtggtggcttctttaaaatctgcacaatcaagtatttgtcaagccaatgcacaagaggccttgcgactcgtcggtagtaataaactagcgcaacaaaatatgaagagttttacacaaaacataatttttaacctttgtgctaatggcaatatcaaagccaataaatatacaggggcaattaatgtagcaattttaattgaatag

SEQ ID NO: 306210 - DNA, 135 bp, Proteus mirabilis
atgcaagcaaaactaacccgctctaatcagccactagatatatttatctctatttttatggcgcagatgtttggtattcattatcaagcgtcagaatatcccattctatttaataaaaatacttttactaactaa

SEQ ID NO: 306211 - DNA, 348 bp, Proteus mirabilis; identical to SEQ ID NO: 302034

SEQ ID NO: 306212 - DNA, 570 bp, Proteus mirabilis
atgacggattacacatcagcaacaacgaccaataaagagtcagcagatatgcatttacgtaatgttgatcttaatttattaacggtgtttgatgctgttatgcaaatgcaaaatgtcacacgagcagcacaggtgttaggtatgtctcaaccggcagtcagtaatgcagtttctcgtcttaagatcatgtttaatgacgagttatttgttcggtatggccgaggtattcaaccaacattaagagccaaacaattatttggccctgttcgacaagcattacaattagtccataatgaattgcctggggcgggatttgaaccggaacaaagtgatcgtgtgtttagcttatctatttgcagtccattagatatcaagttagcgccaaaaattgtagagagaataaaaaataaaacccctaatattaatgtaaatattaagtcttatttgaatagtaatattgtgataaaccagagtttcattcacaccctttattcaatgatgaagtggttttggctgtctctaaccaacacccacgaattaaagaaagcgttactgaagagatgttattaa

SEQ ID NO: 306213 - DNA, 333 bp, Proteus mirabilis
atgttattaaatgagcatcattctattgtttctttagaagatgtggggtcttttagtgctgcttattataagaatacagagttagaagatttaattacttatgaaggtactgatttaaatagtgtattaaatctagtctcaaaaacttattcggtcgctattgcgcctagatggttagttgaaagctattcagaacaattgaacattaaggcgatatcattaccttgggagaaggtagaacgtccatgctatttaatttggcatgagtcaacggcacgagataaaggccatttatggatgaaaaatttacttagtgaggtttgtcaaaactaa

SEQ ID NO: 306214 - DNA, 438 bp, Proteus mirabilis
atgtacaaaaaaattctagttcctatcgatattctagaagacgagctttctcaggaactgatcactcacattgaacaaattgctcaagttggcaaacccgagatccacttcctcaccgttattccaaatgcagaacttttcttcggtattgagtttgccgctattcctgaaaaatttaaagactcttcagagcgcactcgcctcgcttttattgctctgcaagatatgatcaaagatgcgaaaattcccgatgagcaaattgtttgcaatgtcggtgttggtaatgcaaaagatgaaattttagagtatgcacgtcaaatcgatgcagatttaattgctattgcttcacatcgtcctaatgtttcttcctacttattaggctcaacagcatcatctattgttcgccatgcaaaaatgtcggtattagtgatccgttag

SEQ ID NO: 306215 - DNA, 189 bp, Proteus mirabilis
atgcaaacagttattgatctcccaacactatcactcaaaataacgatcccccaattatggatggaatatagagatccttattggactcctcctgcattatgggaagaaggaattaatggtgctttccttgattacagcgctaatgtttcaatcaccgaagaaaaagagggggataaacgtacttattaa

SEQ ID NO: 306216 - DNA, 732 bp, Proteus mirabilis
gtgcttattttacctgatgaagaaaagaataaatcgcaacaaacatcaaatatgaatcgagaaagattagctaaagcaggggctatgtatctttctcagataatcagcaatgatgatattttaggtgtagcttggggaagaacaatccataaactagggcactatctccccactaaaacactagaaaatgtcaccgtgttacaaatgattggggctgtagccccacaacctgattttactactgcggaatctgccgctttgatcgccaataagttttcaggttgcagtattaatttgcatgtgccggctgtagtgtcaaatgcgcgtttggcaatggaactacaagcagaacccataatacggcgtaatttctctgctttaaatcaatgtaataaagctttgtttgtagtgggtaatactcaagatgacaatcctttgattacaacaggcgtactcgccacaaatgagatggcacaatatcgcgatttaggtgctgttggtgtcatttgtggtcgattctatgatgcacaaggtaatcctctgctttctgatatcgaccttagaattatgggaattagtcttgcacagttaagacagatcccacagcgtatttttattgctggaggcgttgaaaatgttgctgcaaccataggcgcaataaaagggggatatgctacagatattgtcatcgatgaagtgacggcattagcattattggaattgagtatttaa

SEQ ID NO: 306217 - DNA, 771 bp, Proteus mirabilis
atgaaaattagtaataaaaaagacctccctaagtggtttaatttatctgattatgattgttataacataatgccagatgatgaaattatatatcaattatcttgtaggtataatgcattgattacagaggaatataaagaaaatgatgttttctttgctaaaaaaattaataaaggtgtatatatttataatgataatgtaactccattatggaaaaaaaatgattttgataggaaactatatcttagcaaaggtaaatctatttctccaatgactataagagatgccaaatttatgtttggagacataaaagaaaaaataggaataagtatatcagataaagtagatgaagattttaatgatatgtatataagcatatctgcaattaataaattatcagttatttttgatggagttttttgtaaaattgatttaatgaaatcagacgaggttattttatatgaaatgagtcatttgctaaaaacatggaggaatgaattagatatacctgatgacgatgataccataaaaaatggctggtatgttgttaaagataagatattatcttatcgtatatttccattgattgacttaattttatgggaaaaggcaatgtcaaataaaattacaaatggcgtattggctgtatctttatttcctaatggagaatacgactctataaatatagcacaaactattagaccatttgctatgtctcttcttaactataaaactttagaaaaatttgagcacgaaatatctaataaataa

SEQ ID NO: 306218 - DNA, 183 bp, Proteus mirabilis
atggctactggatataaaaacaataaatcaacaaccaaaggaattagatttccacatgaattacttgaagaaattgactcaagtgtaaaacgtgaaaattctaatttttcatcatgggttattgatgcctgtgagaaaaaacttaaatcggagaaacgcaaagccaaacaatcaacagaatga

SEQ ID NO: 306219 - DNA, 561 bp, Proteus mirabilis
atggcttttatcggagatataattagtttagcaaaagagttgttcattcttgttacatctaaaaataaggtatcagatcagtttattgatattaacgaatatgattcagatgaagataaacgtttaaagatggctcacaatgaaagaatgactaggcaaagaataactggactcactaatgagacggcacaaaaagaagcattaaaaatgtgtgagcactataccgcaattcctaattacagattttttgcaccatttgataaatgtgtaattgttgatggagactcacatcaattcaaactcgatgaagaaaaaagaaaattctatgataaagaaagtcaatacgcttatattgtcggtagttttttcttattccttgcagttgtaacgttttggtatgagggtataactaaatataccttagtcatgttaccagtgttcattcttatcgctgttatgtgttatatagcatgttatcgcttatttgttccgagtgaaaaaaaactaaaggaagctcaaaaatacatatctgattattacaactctatagatacagattga

SEQ ID NO: 306220 - DNA, 258 bp, Proteus mirabilis
atgacaattacattaaaagagataaaagagcatcaagaacgtttcgatattggtgatatcagccgaatgaacacagaagaatacaaacaactcctcttgagagaggcttttttctggctggatcatcatgaggcacttcgtcatcagctttcaggtgaaatcattgcttactaccctgatcaagttgatgcgctgatagagcagttaaaaatatacaaacaaagaatgcaggaagcaggaaaaggcgattttgattaa

SEQ ID NO: 306221 - DNA, 252 bp, Proteus mirabilis
atgaataaattatttaaactattaataacagcttttttattaataacaatgttttcgcttattgttatgccaatgagtgctaaacaacaatatatatttggtataattaatattctgctgttatttattattggctctaaaaagtcaaaaaaacgattattaacaatgatttttttatcattgttaatgtcagatgtgtataagagacaggtctacacgttatctgtattggcgagcaacccacacacttaa

SEQ ID NO: 306222 - DNA, 714 bp, Proteus mirabilis
atgaagcggaatattgatgatttcgacggaatgaaagattttattattagcattattaccgtacttgcttgggtactaattggaacaattgtcattattggctatttcaccatagaaacaaaaggtgaaagcataatactaagctatatatcaacaatattcactgcaatttcatcactaggaatcgcagccactataggcgtttatttttggcaaaaaaaagcagaggataataagcaacatgacattaataaaaaattactcccatatataataaaaaaaagcgaatcaattataaatataatatcatctatatataggcatattggtgagatagaaacaaatgcttcagtatatataaataatgataaattagcattatattgtctatcagaaaataatggtaacattgatgaggttattaatctaaaatgcaatgaacatgatgattttataaataataataaaataatgatagattataatatatatttatttatcatagaatatgagtcatgctatagtcgcgcattaaaagaaatttatgaatttgtaaacatctggaataactatgatgattatgttcttgagtatggagatgtagctaacagtaaagaagatctaataaatgaacttaaatctgctcttgcctcatatgaaattcatataactaaacaaagaaatttattacgacaaaaaaaacacctgcactag

SEQ ID NO: 306223 - DNA, 648 bp, Proteus mirabilis
atggatgttgattgggggttgatggtcgcagtgttatctatgttttttacaatgtttattggtgtaataacgattaggtatactaaaaaatcattaggatatacgaagaaatcaaccgaaattgcagatgaatcattaagagccgcaaaaaaatcagttgatacaactattagaatttataggcaacagagaataaatgaatataaaaataataaaaaggcagttattgcatataaaaaattaatatcagaagaattaaaagaaaattatatttatttgtctaatgtttgtaaattcattgatttttatttattgaactatagttttgataaaaattatgtaggtaacagtccattatactcagtagtcaataatggcgatgaagttaacatgatatttaggaaaaacactactttttatattgatgaatttttgcatgatattacaaaaattgatctacaattttctataaaattaattgacttaaaaagaaagattaatttttcaaatgaattacttatgttaatgaaagttgagttagataataattcacataagcgtttttctattgattataaaagtgaattaacgctattacttaatcaagtaaaaagtatttattatgaatgtactggtgagaacttatag

SEQ ID NO: 306224 - DNA, 213 bp, Proteus mirabilis
atgtttacaaattcaccacctttttcagaagataatatgctcaatacctcaatagcacttccagaagctggggcaacagctattgggtatccatctttatcaaacgttaaaacttttccagctctctcatctgcatttggcaatgctggtataaccttatcttttacccttaatgttttactatcaatatccttaatactgttatcaacgtag

SEQ ID NO: 306225 - DNA, 1518 bp, Proteus mirabilis
atgatgacaaacagctatctcgagtattttctcaccctgctggcctgggtagtcaataacggattgtggtcggtactgaccagcaccgggctgtttgcgctgccgctggcctttaaagttatagggatctggttgaaggtgcgggaagagggggaggatgaaggtaacaaaggctcgctggcgattgtgcgcatcgagaacgcactttacggggcttttgtggtgatcctgttttgctgtgtgccgttgatggaggtgagtgtcagtacgctgcaatttgataccagccgggccaaaacctgcggcagctggacaccggtgaagccggaggagtccggttacagcggtgtggtgtcatcactggataatcagacagccaaaatcccgctgtggtggatgctggtgcataagctgtcaaaaggggtgacacaggcggcggtggccagcattccgtgccggccggatttgcggcaggtgcgttttgaggtacagcacagtaacatcaaaaatccggcgctggccgccgcacttcaggattttaccgatgactgttactcacgtgcactgtatgactggaaagcgaaagatcagggaaaaacacaggacgggcaaattttgcaggatatcacctggataggctctgccacctttatgaaaggagaatatcatcagatacagtcacgaacaccacgtgcgggctttccctgggatgccggccgggatgacgggtatgcgaatgtcaacggtaacggttacccgacctgctatcagtggtggaatgatgcaagtgcagggttactgaagctcgtcaaagagcaggcggatgaagggatgtggttacgtgcccgagctgcgatgaagctgattaataaagactcgaaagagtttgaggaggccatcgtccgccggctggtgagtccggctaacctggatgtctccggtggtcaggtataccggggctacgggggtaatgcggatatgactgtgatgaatgatctggcccggatgggcggtgtagtcggtacttcagtggcttcactgggggcattccctgcctttgatacgatgcgccagtccttaccgatggtgcaggggctgatgttaatggcggtgtatattatgatcccgatggtgctgatgttttcggcgtatgaatttaagacggcgataacggtgacgtttgtgatatttgcgctgaattttctgacgttctggtgggagctggctcgctggatagacagctggatgatggaggcgctgtataattccgatacacacagccagtggaatatgaacgggcttcagaacacctctgacgacatcatcatgaatctggtgatgggaacaatgtttttggtgttgcctgctttgtggatgggcgcattggggtgggctggtgttaatttaggaggtgcattatctatggcaatgcagaatggttctaaagtagctcaaaatacaggaggcaaagctggtcaagtggctgaacaagccgtatcgaaaaaaatagcaaaataa

SEQ ID NO: 306226 - DNA, 414 bp, Proteus mirabilis; identical to SEQ ID NO: 14580

SEQ ID NO: 306227 - DNA, 1776 bp, Proteus mirabilis; identical to SEQ ID NO: 280871

SEQ ID NO: 306228 - DNA, 1899 bp, Proteus mirabilis; identical to SEQ ID NO: 280870

SEQ ID NO: 306229 - DNA, 567 bp, Proteus mirabilis
ttgattgattattttagaaatgctcgtttagcactacaggtgagttctaaggagataaatcaagcaacagataagcaaatgttcagtcattggttcagcaatagtcagtggcaattacctagcgaggaagactacaaaaagttacaaacactgtttacacacattgctgataaacaagaaaagttatcgccgttatcccgccagtttaccgagttagagcgagaacaattcaccttacaaaaagactatcaagaattaataaaagaatatggtttattaagacgaccattctttgtaactgcagatgtgccttacaccgatgtgtgggattatccacctgttcagtattatcccggtaaacatccttgtgagaaaccatcagccatgatggaacacattattcgctcaagtagtagagagggtgacttagtagccgatttctttatggggtcgggtgcaacactgaaagctgcactaaaacttaatcgagaggttttaggtgtggagcttgagagagagcggtttgagcaaaccgaacaagaaataaaagcgctaacttgtaagtaa

SEQ ID NO: 306230 - DNA, 495 bp, Proteus mirabilis
atgaatattttcaaccctactattttccccgcagttacagctctaattggttctcttattggtgcaggaattactgcctgtagtggcttatacatggaaagaagaagacataggagaaatgttgaaatatatacagcaggatttattgctgaagtcgaatcattagttgagataattaatataaggggatatatcacagatctagaaagtacactacaaacacttcccaaagatcaatcgatatcattcaacatcctgattcctgataactatgctcgcttttatgatgcgaatattgcatacgtaggtttattaaaaccaactactgctaaaaatttagttatttttcaccaaatactacaagccatagtgcaagattttaagccagaatccttttgtagcgccaatggtcacagctatgacacactgaaagaattacttaacctagctaataaagcaatacaattagctgatgaaattaagctaaataagtag

SEQ ID NO: 306231 - DNA, 3474 bp, Proteus mirabilis
atgataaaagcaggtaataatttagttttagattttaaagatagtatagcgttagaacgtaaatttccatttttagaaaaagaaattaaaaagtatagaagaatatctgattttgaaagtactatattagctaaaaatatactattaaatgctaataatttaaatatctcattaaatttaaaatcaagtaactctttatctgttattgctaataaaaatataaatataagtaattcaaatttattatctggtgatattataaatttaacagcaattgataatgttaattctgaaaatatagatgtaacggcaaagcatttttccatcataactaagaatggagatattaattattcatttagccctatagcctcttatactctgaatagcattaaggcaccatttattgatgtgtctgaaaaaatagacttttattcaggtaaaaacatttacatttcaaatgtaataattaatgaatcaaatgaaaaaagtttatcagcattagagaatattaaaataaaacgcgatgagtctttatttttcaatctaatgccaacttttagagatgaacaatatattccagcgtttttatttaatatggggctttggaaaagtaagaataatataagcttgatggctggtaaagatattgttagtcagggaataaaatattatagtaacaaagaaataacttttaatgcaggacaagatatttttcttgcctccaaattaataaaagaagccactccttttttcagtgatatttattacccccaactacaatctaaattattttcagataataaccttattttaaatgccgcgcgtgatattgatttaagttcaacagtattaaattcaaaagataaagttattgtattagcgggtagaaatataaaactgggtgcaaatgcttattccgccatcaaagatccccacgaagatgcgcaagacattcaatatgccaccacatccattatgggaaataaaggtatttctattgcatcatcaggctcactcacaacagaaggaagttcacttaaatcagagggggatattgctatttccagtggtggcaatatccaattgggatcagtaagaacacattttcgtaaagagtcggactcagagttagaagaacttcgtaaacaagtcagtactgaaattaatagcggtaatcatctaacactattatctgagggcagtattttatttcaggcctctcaattggctgctaataaaaagatggatattgctgctaaaggtggatttctttatgcacaggcaatggaagaatccagttactatgaagaagaaaagaaaaaatgtaattggtggacactgtgtgcgactaaaaagaaatataccaaaacatttaataacacaacgaataaagttaccgagtttattgctaatgacgatattaatttaattgctaaagatgatatcactttagaagcaagcaaattagagacagcaaagaatgccaaattaaccagtaaaacaggaggcattaattttaaagcggtgaaagatactgcttttaaacaagttattactcgttcaaaagatatatatatcactcaacgtaatcagggatacaccaagggaacatggctattacctgaactctatattggcggaaagctgactatcgatgcgccaaaaggcatatctgcagatattaaagccaaaaaagagcaatctttagagcaggcattaactgccttaagtaacacaccagaatatgcttggcttaatacgctccaacgtcaagaaaatattaattggaatttagtgaaagacacttattccagttgggatgataaaacccagcagttaaatccagttgttggtgcggttattgccatcgcggtaggggttgcaacttatggtacggcaacagctgcctcaataggaggaatggcaagtaatgccactattgctgcaggagcctctgcggaggttgcatcaacggcatcagttgcggcacaagccggttttgcttctttagtttcgcaagctgcggtctctttagctgaaaatcaaggcaatatttctaaaacatttggcgccttaagtcgcagtgatacggtgaaatccattgtcaccagtatgaccgttgcaggcgccttgcaaggtcttgaccaatttatgggttgggatcaagcaatacaggggggaacattaccgacaacaggtaagttgcttgcgacggataatgccacatggactcaagttgctcaacgcgttgcctcacagtcagtagtgagttctacactgggcacagccattcaaggtggcagttttattgataattttaaaactgcgctattaagccatatcggcagtcaatttcacgctgaaggtgccaatctcattggtgataacggtgcgatattagggcatgcaggaaaggttttaagccatgcaacattatctggtttatctgcccaaatttgtgggggaaatgttaatggtgcagttgcagttataggtagcctagctgctgaaattgcggctatttcgctgggcgataacactattaaggctgaggaatggcagaaaagatcagaatcacaagctcaatttgttagattatttggtggtatagcaggtgggatttttactggtgagcctggtggtgtatatagtggtgcaagaggggctgaaaatagtttcctttacaattatctctctcatcatcagcaaaaattgatggaaaaagaattatctgctgaaactaatttttttaaaaagacagcaatttatcttaaatggttatcagtagatataggacaagatacagcatttagtgggggccttgttgctggtataccttcagggttatatgaaacgatagacggacttgcttctcttgctacaaatccactcgaaacataccaagctattaaagcagttattcaaagtgataatgctttcgatacattaactcaagcggttaaacaatcgtatatcgagcgtattgaaaaactggaagcagaatatcaaaaagcaggtgtatctggttcatttaatgcgggtgttgaaagcgggaaacttatttttgatctcgtaggtctatttgctggtggtgctggaattgcgaaaggaagttctcagcttatagctaagacatcagctaagattgctacaagaaataaattgatttcttctataaaaagtggacaagtaggattaggtgatcctgatgtagttgatttaataaaagctgatatgcttaaaaacttttatagctataaagctccatcgggtattattgctggttatgtagacaaaaagggtgtttattatgtaacagaaggtaaccatagaatggttgcagcagtggaaatatataatgaaacaggagaaataaaatatattaatcaattgttagacaatggaaactggactaaaatagacaatcccattgttgactcaaaaccattacctgtaagaaaaataaagtga

SEQ ID NO: 306232 - DNA, 288 bp, Proteus mirabilis; identical to SEQ ID NO: 289914

SEQ ID NO: 306233 - DNA, 882 bp, Proteus mirabilis
atgtttttaggtcaatattgggcaaagtttgcccctactacgctttttgttctactttggagtagtggtgctattttttctcgttggggtttagataatggcagttcatttgccattttgacttggcgttttgttattgcattactgtttcttaccctactttgtctccaacgtcgccaatttcttccccctaaaggaagccgtttaaaaacagcatgggttggattgctcattatcggtggttactctatttgttacttgttagcgctcgctaacagtattacaccagggatgctcgccactattatgggtattcagccgatcctcactttatggatcattgaacgacactttactgcgagtcggttattaggactatttattgctttgataggattagtattagtggttgcgcagagtttatttaatacttcactctcattaacaggaatgatttatgcactcattgcactcctctgtatgagctttggcgcaatttcccaaaagaaattacaattagcgcctatggaggcattgccgatacaatatgtggttagtttaacgctatgcttattatttattccatttcaacctatgcaacaatcttgggatattggttttattgttcccgtactttggctagcaattattatttctgtcgtggcacaattactactctaccgactgttaactgcaggtaatctggttaatgtgactagcttattctatttagtaccgggtgtaactgcgttaatggattatatcttcttaggcaataaaatgtcttggcttagtttagcggggatgggcgccattattattggtcttatttttgtatttaaaaagtctaactcgatgattgttgaagaaaaaataaaataa

SEQ ID NO: 306234 - DNA, 261 bp, Proteus mirabilis
atgaccaatcatgcagtatttactgtagcgactgatatccaagtctacttctgcgatcctcagtctccgtggcaacgtggttcaaacgaaaatacgaacagattgctcagacaatattttccaaaaggtactgatttatccgttcatagccagcaaagattaaatagcatcgctagacaactcaacgagaggacaagaaaaacgctaagttatgaatcaccagcagaacgatttaaccagtgtgttgcatccaccggttga

SEQ ID NO: 306235 - DNA, 729 bp, Proteus mirabilis
atgagctataataaccatattaatttaacagatgaatcattggatatgcctatttatagaattatgccaatacaccgttttcttcaattacttgaagaaaaaaaattaactttagtaagaccaaaaaaatgggatgacccttttgagaatgctttattaaattgtgtaattgaaacatctgatggtcaaacaggaacatttgccgcaagagattatgtttatgggcagtgctggacatttcacagtgaaaccgatgcaatgtggcggatatattcccatgataaaaatggtgtaagagtttcaaccacaccaagaaaattattagccgcacttcaaaaaacagagccgacttaccataatgtaaagtgttttataggtaaggtttcttatctttcggaagatactcttccaggaaaactcacgtcaattgatttattgaatactaatggttcaggcattgctgaatcgcttttatacaagcgtgtagaatttgaacacgaaaacgaagttcgtttaatatatattggtgatgataatagtaccgatagtgatattttccagtttgaaattaatccagcagaactcttagatacggtgctatttgacccaagaatggaaaaaaacttaaggcaggcatacgcattggcaattgaggataaaggttgtaaaaccgaagtaaaaatatctactctatacgatgctcctgaaaggctaaaatttaagttgtag

SEQ ID NO: 306236 - DNA, 216 bp, Proteus mirabilis
atgtcatgcaaacttgcatttgaaccatcatcttataatgaaaataaagttgttaacttagctaaaaatagattaaacgaaatcgttagtggtcgatatcatgttattataaaaggtgaggatgaagccgttaaggttgctgagtcacttggtatttggcgtgattgcgctaaatttcatgcgaacaatatgaggaaattagatcctaaattctaa

SEQ ID NO: 306237 - DNA, 447 bp, Proteus mirabilis
atgttagacttagaatatgctgtaactgagccttttttaaattaccatttatttcatgaaagattaaatacgaaggttaaggttttaacctcatcacttaatcatgtgattgaatatttattgatgccaggcaatgaaaataaaatgaatgagctcattaagaaaactgataaatcttggcaattcccgccgaatttttcacttccaaaccctccagtcgatgaatcaagtttaaaaaataaaacatcatcaaaaagaccagataaggtagatgataataatgaattggattatcaattaaagaaaaaaaaattagcgcaagagatgctgtattggtatgtaagtgaaatggctatatttggcagtttttctgctttggatgattgtattgtcgatattgactcttggttttcaagttgggcaatgtttaataacacatcaagataa

SEQ ID NO: 306238 - DNA, 216 bp, Proteus mirabilis
atgaacgaaattaaagttatcggtatcgctctgacaaaatctgtctttcaggtttgcgtctggatgagtgatgggaatattgcatttaaccgcaaggtttctcgggctaaattgctggatactattcgtcaattcccttctaggtcgatgattgcaatggaggcttgtgctacttcccactactgggggcgtacttttcagtcaatcggtttttaa

SEQ ID NO: 306239 - DNA, 648 bp, Proteus mirabilis
atggtggaacagcgctctgcgctggcaaatcaggcccggtcactggcggcagaacaaggcgttgagctccctgtcgggattcatattttacagcaacgactgcctgatattattgaagatgcagaacagttaatttcccccgtgctgcgccagttgctgttatcgttgttagaaaatatacattcacttaatgaacgtattctttctgtagagcacagtcttgcggcgctttgtcagcaacaacccaaatacaaagtactgatgacaataccaggtattagtccacttattgccgctgcatttctgagtgaagttaacgcagcacaatttactaacggacgacaattgtctgcttggtgtggtctggttccccgccaacacagctctggaggaaaaaatagtctttctgcgatgaccaaaaatggcaatcgtgatctccggacattgatcattcatggtgcgcggtctgttatgcactgggctcataaacgcgatgacgtactgggaatgtggctgaaacggcttattgaacgaagaggaaaaatgaaagccacggttgcgctggctaataagatgacacgcattgtctggcggttactgacaggatccacaagttttaatatcgacagggcttttgcaatgaactga

SEQ ID NO: 306240 - DNA, 1866 bp, Proteus mirabilis
atgaatatagaaattgaagttagtgagctacaatctaggcaaagagtattgcatgaaaaaattgataatttggcaaaaaaactacctgaggaaagtgcaacgcgtaagcagttagctaatcatagagagctttttgacgacgccattcattatctttcaaattcaaagcaaagattggcatttatcggtaacattggtaccggaaagacaactgccatatgtcatctcttaggcttattagatgggaatgagccaatccttagtactggtagcggtcggaccacgctttgcgaagttgaaatatccactggtgctcaattaaggattgaagtaactccgcactctgaagccgaggtgaagagctatcttaccgattttgcgcaatacttacatgtatcagatatagcaacatcggatacttcagattcatttagactaagcgctgaagttgaaagagctctccgtaacatgctcgaccttcgaatatcacggacgaaaaatccagaaggaaaacgaattgctatagacagcgcgaagaatttcgcagctgattatcaatctgttgaacttttggctgctgggctgttggggcgcattaacttatcgtctcgtcaacaaacgttattcactaacgatgatggggcagagcaaaatctatggttgcattcaacattcaaagccataaataattgtactcacccaaacgttggcttaccaaagcatattcgaatatcagtacctttaaaactttttgatccactagattatgcactatcgataattgatacaaagggggtcgatcagacggttaaccgagtcgatctcgatagctgtctaactgataatcgcaccgtcaatgtaatatgttgccgatttaacgaggcacctgataaaactatgtcaggattactaaaacttgccaaggatgcggggctaagccaacgaatcgcaaatgaaacaattttgttaattctagatagggaaagtgaagctgaaaatattatcgatatagatgagccaattggtgacaaatttgaggggcgcgaaattcgtgcagaacagatcacgaatgatctaaagcacacgctacaattggacaacttagatgtacaatttttcgatgtaaagtctgatgatccgaaccaccttagcaaaatattggtagaaaaagtttctaaattacgtcgtcaatatactcagaatgtaattgatatagagaaagctattagtgatatcgaaactgaattagtctctcaatctgcgaaggctgcgaagcatcaggtagctaacacgctggaaccatggataaaaaaggctcaaagctgttctcctattttaaaagaatattttttacccttaattaatgatatcaagaacacgggaacatacgctgcgagtgttcgagctagtgtaaatcgccgaggtgagtggcacaatctagattactatcagcttttagctactggagctcgagagcaaactgttgatcaaattggtactctaaaagatgaattaattgtacttattgataatatgctttcccaaaacgagcttcaacctgcctatgcattacttaaacaattaaaacaaacaacggaaaaacggcttggtgatatatatcaaaaagcgtttgctaaaggacgtgctatttatgaagaaaagctttcatcagatgatcaactctggaatgctttatttatagaatggggaagggggcctggttataaagatagagtatccaaaaattctgaggcttggtttcacgctagaaaatatccagaatttgaaatcagagtgactcaacaagtggttaaggaatggcaactttatgtgaatgaagtgagtgatatgttgggttacgcataa

SEQ ID NO: 306241 - DNA, 897 bp, Proteus mirabilis
atggacgtacgtcaacacaaggctagtttttttagcgtagtaattacttttttatgtctcacgctatcattaaatgctaatgcaacagactcagtacttgaagcggttaccaatgctgaaactgaattaggcgctagaattggtctagctgcgcatgatttggaaacgggaaaacgttgggaacataaatctaatgaacgttttcctctaagtagtacctttaaaacacttgcctgtgcaaacgttcttcaaagagttgatctaggtaaagaaagaattgatagagttgtgagattctctgaaagcaatctcgttacatactcacctgtaacagaaaaacatgtgggtaaaaaagggatgtcgctcgcagagctgtgtcaggccacattatcaaccagtgataattcagctgccaattttattctacaagcgattgggggacctaaggctctaacgaaatttttgcgttccattggcgacgatactacgcgccttgatcgctgggaaacagaacttaacgaagcggtgcctggagataagcgagacacgacaacaccaattgcaatggtaacgacacttgaaaagttactaattgacgaaacactatctatcaaatctcgtcaacaactagaatcttggcttaaaggtaatgaggttggcgatgcattgtttcgtaaaggcgttccaagtgactggatagtagcagatagaacaggcgctggtggttatgggtcgcgtgctattactgcggtgatgtggcctccaaatcgcaagcctatcgtagccgctctatacattacagagacagacgcctcgtttgaagaaagaaatgctgtcattgcaaaaattggtgagcaaatagcgaagacagtattaatggagaatagccgtaactga

SEQ ID NO: 306242 - DNA, 498 bp, Proteus mirabilis
atgttttttatacggaaggcagaccagaacgatgtatctaatattgctcatatacactttgaaagttggaatgctacgtattcgaaccttttacccgaaacgtatagagacaaagaaaataacttgtctcagaaaatgaacatgtgggagaaggtattacctagctctggtgtaaatacatggatagcatatgatgctgagaatactgctgtaggatttatttcttactttaagaaagatcaagagtgtgaaataaccactttgtatctcttaccgcaataccaaaatttaggaataggtactaagttgatggactcagccctaattgatgcttctcaatgcaatagctgctctattctatctttgtgggtgttaaaaactaacctatccgcgattagtttctatgaaaaatttggttttaagtctgacggtcaatgtgatgaagagctatacgaggacgccaaaataacagatattagaatggtaaaatcactctaa

SEQ ID NO: 306243 - DNA, 240 bp, Proteus mirabilis
atgagtattctttcaaaattactagaaatagaaagtaagtataaaattaagctacacgaaggtgagagctttaaacaagctgtgtacaacggaaagatgacagattcggaagattgtattattgataaaattgaattaattttaaaacattatcctgatagccaagatatttccttatctacgtaccagtcagatgagacctcagctgatgcattttgctacgctgtagtattaccctaa

SEQ ID NO: 306244 - DNA, 264 bp, Proteus mirabilis
atgaaaacaataaataagatcagaaaagaagcattaaaatttcgagaactacttaataactgtgataaatcaaatacggaacttgtaatagattgttttcctattatgaattgtaagctttcttcaatacttttagcataccattttctaaaagaatggccaaacctagaactaaaaggtgtctccgcagcaacaggcaagaatgaagaaataagccattattggctagagatcgacgatattgtaatcgatataactggataa

SEQ ID NO: 306245 - DNA, 903 bp, Proteus mirabilis
atgcccataagtgaaaaagtaagacgaattgtttggatcagagatggtggatgttgcgtaatttgtagagaaagactacttatagaagataaaaacggattttcatctcaatttattggtcaagtggctcacattgttgcggaacagaatgaaggaccaagaggaaattcatcgttgtctattgagcaacgaaaccatgaatcaaatttattactactttgctgtaatcatcactcagagattgattctgcagtagaaaaattctctgttgaaaccctattagaactccagagtgagcattcaatttggctcaagggtagatttaaaaccgaaagtccatggaaaactaaattacataatttttactacctaaatgttccaagattattaaccttagcgacccatgcaggcctgaaaatcgatctatctgagtacaataagatcattgctctacatgagttagggtggaatttaaattacttaatgatggcatttgaaaatctctttaaaaaaatagaaattaaggctatcacacctgaaaaactaattgaacttggacatagaggtaggggagcaattgttgcatttgatcagcaattccgtacaaaaaacatagaaatgcctagatctctagatgcctatatacatgcggttcgtggaaatatttcaacagatccacaaatttatacatcattctcaggagtaaaaacaacgcttataattgatcctcgctggattaccacaagcactgcttttgttcaatttcgcccttctggcggacggggtaatttcaccggattcggtattgttaatcacatcgatgaggttcgtataagcattacacctttagtaattggtttgccttccaacccatttttagaagcattttatggcacctcataa

SEQ ID NO: 306246 - DNA, 579 bp, Proteus mirabilis
atgagactacagtttgacattgatattaaagatgaagcagagttagctaatataattggttgtaatatacatgaacttaacgaaaaaataaataaatttggaaaatcaagtatattggaatatctagcaatgattcaaggtgttaaagtatttaagcgcggtagtgatatattagaatatagattatttcttttagttgataatgttttcgaaggaaaactgccagatgagcaagttattagcaaattatttcaaactacggcgactgaaagtagggggtatttaagatctattatttcaaagtatcaataccaattaaaatctgcaattgatcaaactattaaggctattcttttaaatgctgaagctcaatcagctgtgggaccttatcatattacattaaacagtgctaatatcattgaagaattaaataaaaaattagcgactattgatggaacattggcatcagttactaagaagcgtggaagtgtctctacttatgaagtaactaaatcttcatacgaaaatttatgtgaatcattacaaatacaaccggtgttatatcaagaagatgagtga

SEQ ID NO: 306247 - DNA, 2661 bp, Proteus mirabilis
atgatcgaaagtactgctactacagcaattaatcatgaagattttacaagcgtatttaacgctctgattgagcatctttttttacgaaatagaggtgggggagagagaccaaaattatcagatgaaaagataaaaagagctacttggctcgcatcattagggtcatcaggtaatgaaaacgataaaagtatcgcgagtgcatttgggacactactttatttatatgatcaaaataatgagttgtatattaaagcttgctatgtattacaatcgagagccggtaatattgtttcagcccagcatttaataggactttttgaacctgaaaatgttttaaggcattttagcgtctcgctggactttgaacttgcaagtcaaaaatatctacttgaaaaaaagacaccaggtgaggatgttatttattttactcattttcagttagggttgtgggataaattagagcgaggtgataatgttgcagtttctgctccaacttctgcgggtaaatcattcgtaataaaaaaatatattcatgatagtatagtaagttctgaagctggttattttgtatatgtcgttccttcaaaagctctgattaatcaagttggcaatgaaatgtcaaaagagctaaaagatatagcaactgttatgacaacttataaaccattagaagatgataatataaaagttgtttatgtattaacacctgaaagatgtatgagattgttatatgaaaaaggtgaaaaagcccctgagatagtgttttttgatgaaatacaaaatttagaggatagtagtagaggtaatgttttcgaaaatgtcatctatagaatgacgaatttatggaaatcaacccagtttattatggctggtccatatattaataatttgcatacatcacttaacaaaattgtcgatattgatttagttgagcaaacaacttctgccactcccgttttacagttaaaagttattctaacagtacataaaaacaagaaaagcgtcagctataaattagtaagtccagtaggagactcagttcttggcgaatatgatattggaaaggcactttatagcaaactttcctcctcaaaaggtgctgcattaagatatataacttctattttagatgctgacgaacaaaatatcatatatgccccaaagaaaaatttagcggagggttgggctttggctatagctaaaactgagaatggggaggtggaattagatggggatgattctaatttagtatatgatgaaagaatagataacttatgcgcatttttagaaagtgaaatacatcctctttattctcttgttagaactctaaaaaaaggagtggcttttcaccatggcggcctattggatatagccagacttgaagttgaggatctttttacagatggagcgataaaaaatttagtatgtacttcaactttattgcaaggagtaaacttacctgcagatagaatgatagtaatttcacctaaaattggtgattatgaactatctcattttgattttctaaatctcatcggacgagctggtagaattaacacatccttatatggagaaattttttgcattcaacttgttgatgaggaatgggcagaaaataaaattgaggcgagtgaaacaaaggagattcaatctgctgttttaagaaaattaaatgaacatggtgagtcggttgtaagttatattgatatgtatgcaaaagacatcgtagacgctcaaggggaatttaaagctattaatctcgcatcatatctgcgcagccaatttttagttgataagcaacattatgagaaaataattaacaattctaatctaactacgattcaaattagggttatgaaaaatagattagaggagttagaagattgtttaatagttccaagggaaattatatataaaaatccatttatcgaccccctattgattgaccaattatattttatggttaatgaggacggtgttgataagtggattattaataaatatccaggagaaaaatctggttcatctgattttaattctgattttaaagatatgaattattacaatcagtataaaagtattattgttcgtatgaacgatatctttgaaattgaaaaagagattaattataaagatgatgggatgacaaggaaatcaaagtatttcgtttcaatcagtaagttagttaacgactcacataaatggatgcaaggaaggaattatagattttttattgatagcatggtcagtaaacaattaaagaataaaggtttagaagttaactataagaaaattgatggaattacaaattttgtaactgctcatattaatacaaatcttactttcattttggttaaatatctttcgctctggtcagatattgtaagtacatttatgaccgaagatgagtgtacacaaaactctttctttctaaatctttcatcattgttggaaatgggtagttatgacactcaagttctagaagtgatggcttatggaataaatagaagcactgcgattgaattgttgagaaaaaaacggattagcaatgatcaaacaactggtcaatatttattgaattataatttagataaattatcaccattacatagaaaatatttacaaagggctggctttggttctgcaaggcagaccgtataa

SEQ ID NO: 306248 - DNA, 1014 bp, Proteus mirabilis
atggaatttgttgattttgatgcaaaatgtcttcatcctgaattgatattgactgactcatctatggacaatatagaaaaactcaaatcgatagactggaaagaattagtcattaatagtcacgcttggattgaatcaaagctagtaaatcacccttgtgatactcaagccaagattgtttctagaatttttacaattcctttcagtggagtaattcaagagcatcatcacttggtggaatcaatggctgattctattgaacactatgtatttgataaggaagctcttaaaaaaatgaaaactgaggggatcactcccttcagaaaagcggcacagtttttcggggacacaaacccagtcaaggatgggaaatacggcgaattacttctgtatatcctctctgaggcggtacttagtacgccaatggtgtcacataaaataactactttaagtaacttgaatgatcaagttaagggtggtgatggtgttttttttggtgtttatagagataatttatcaatattaattggtgagtctaagatttataaaaatttcagcggagctttggatagtgcatttgattcgcttgatcgatttactaaaagttacaccagcggtgcactcggtcatgaactttttatggcaagaactaacatttcaaataatttcgattttgaaacaatggagttaatctatagagcctttactccaggggatgatatatattctgaatgtgttaaaacccacccgatattactcatttttgaagatgatgaaataaagaaaattgaagataaggctatcaataaatctgaggcagaagagcttttcaatatatggcttgaacaaaagaaaaatcatattaaagcagacattgatgcaaagctaataaaataccccaacgtaaaaccgtgcttccttgatttctttttaataccaatgaccgatgtgggtgagttcaaaaaatcactttatagagcaatacacggaatagattacaaagataataagtaa

SEQ ID NO: 306249 - DNA, 234 bp, Proteus mirabilis
atggattactggcatggtttccacgacatgatgaatacgatattgcatgagaagggatacaattcaacatgggttgaaacccagctcgcgaatatagataagaactcgaaccgtggtacgtataaccatgctcaatatatggatgggcgcagagaaatgatgcagtggtatgcggattacatggatgagttggaggggaatttggataatgtggttagtgtgaattttaattaa

SEQ ID NO: 306250 - DNA, 972 bp, Proteus mirabilis
atggaaaaatatcaaaaccttctcgttgtcattgatcctaaccaagatgaccaaccagcactacgtcgtgctgtttatatcgttcagcgtaatggtgggcggataaaagcttttctacctgtttatgatctctcatatgacatgaccacccttttatctcccgatgaacgtaatgcgatgcgcaaaggcgtgattaatcaaaaaaccgcttggataaaacagcaagctcgctattatcttgaagccggcattcaaatcgacataaaagtgatttggcataaccgaccgtatgaagccattattgaagaagtgatcaccgataagcatgacttactgattaaaatggctcatcaacatgataagttaggctccttaatttttactcccctagattggcaattgttaagaaaatgccctgctcctgtatggatggtaaaagataaagagtggccagaatacggcactattgttgtcgccgctaatctgtccaatgaagagtcatatcatgatgcattaaatttaaagttaattgaattaactaacgatttatctcaccgtatacaaaaagatcccgacgttcatttactcagtgcctaccctgttgcacccattaatattgcaattgagttacctgactttgatcctaatctttataacaatgccttgcgtggacaacaccttatagcaatgaaagagcttcgccagaaattctctattcctgaggaaaaaacacatgtcaaagaaggattgcctgagcaagttatccctcaagtatgcgaagagctaaacgcgggtattgtcgtattaggtattttagggagaaccggactttctgccgctttcttaggcaatacagcagaacagctgatcgaccatataaaatgtgatttactcgctatcaaacctgatggctttacctgtcctatcactgtcgattctcagataacgaataacgcttttaatactgtatag

SEQ ID NO: 306251 - DNA, 408 bp, Proteus mirabilis
atgatatacccactctttatattcaaaacagaagacggctttgatggctatttcccagatgttgaaggttgcttttttgctggtgacagcatagaagatacaatcagaaatgctgaatctgcatttgctcaacatatggaagttttaaccaacaacgggggacacgtgccagccccaaaggatccttctacctatctaaatgatgatagattgaaagaggatgatggcattcttggtcttgttgagatagacccagcaaaatatgaatctaaagcaattaagttcaatttaacaatgccaaataatctattaacagctatcgacaaatatattgctcaaagtgggcattataaaaatcgctctgcttttttggctgacttagctagaaaagagatagccaatcattaa

SEQ ID NO: 306252 - DNA, 189 bp, Proteus mirabilis
atgagtagtgcagaattaatcaaaagactaatcgctgatggatgggttaaagctagacaagatggcagtcacgttactttaactaaagagggaagcgataaaattatcaccgtccctcaccctagaaaagattcttcaaagggcatcatccggcaggctcagaaaatatcaggccttaagttgttataa

SEQ ID NO: 306253 - DNA, 228 bp, Proteus mirabilis
atgtcttaccaacctatagatttagtaatattggctagaaaaattgaagctttacaagccgcaatgagtttaactttagctagtttatcaacagtgagccctgtaataaaaaatgatgtagttgaaaatctagagaatttttcatcaaatcatcaagacccaactgttaagcaagcatactcagagctagcaaatagaataaaaaatctcgacgtaacgataagatga

SEQ ID NO: 306254 - DNA, 393 bp, Proteus mirabilis
atgagcgttgaagtaacagaaacgggtttaaatcttattccggctggctataagcagacggaagttggggtgatcccagaggattgggatattcggaatattggggattttgctcctttacaaagaggattcgatctcccatcagcaaacagagttaatggcaagtatcctgttgtatattccaacggaattgtaaatactcattgtcattttaaagttaaaggccctggagttgtaaccggtagatccggtactttgggaaaagtgcattatgttgaagctgactattggcctcataatacatcgttgtgggtaactaaatttaatgaaacaaatccaaagtttatttattttactacggtattaactctaaatatggaccgtttactttag

SEQ ID NO: 306255 - DNA, 417 bp, Proteus mirabilis
atgaaaaatgaaactaatattcgccgtggcagacattgtgtattcctgatgcacgtccatttggtctttgtcacaaaataccggcgaaaaatatttgatcaggatgccattgaaaaattgcgaggctactttgccagtgtttgtgctgactttgatgttgaactggttgaaatggatggggaacgggatcacgttcatttactgattaattacccgccaaaactggcgatatctaatctggttaacagccttaaaggggtatcgagtcgattacttcgacgtgatcgtcctgatattgcccaacgtgattactacaaaggggttctttggtcgccgagttatttcgcggggagttgtggtggcgcaccaatatccattatccgccagtacattgagcaacaggaaacaccgagttag

SEQ ID NO: 306256 - DNA, 447 bp, Proteus mirabilis
atgcaattattgattgatgaattaggcaaaaatatgcaagaaaaaccattctcccttacatcacatcatactgacaaacaacatcgtttattaaaatggagcttactcagcttatattttatctctgtccccttattggctgatcccgtcaatcaagcactctctatcgatgcccgcgagcaacaacgccagcaagaacgagagcgcatgttacaacagcagaacaaccccgttgtggatacgcgtattcaacagcctgattatccgcaaaatgaacaaccctgctttaccatttccactatccgtcttgacggtgagtccgctgccgattttcaatgggcattaaaagccgttaacgacgccaaaggccagtgcttgggtagccaagggattttgttagtcctcaataaaaaactaatagaggtcagcgattgttatggacattaa

SEQ ID NO: 306257 - DNA, 438 bp, Proteus mirabilis
atgaaaaagcctgcaaacctacgtgataccttaattaaaaaggtggcctatttaggggataaccccgataggctctacacctttattgacggcggggcgattgtggcaagcggtgcccgtagtcaatcttatgagtatcaatacaatctcaatattattattgatgattatcccggtgaccaagatgtgttaatggcggtgatcattggttggattgaacaacatcagcctaatattttccttaatcccgataaacgccaaaatcattttacctttgatgcctttattgatagcaaccagaccgccagtattagcattgatttaaagttgactgagcgtgtcctcgttaatgtgcaagcggataaattggttgttggtgccattgaagagccggctgatccgtttgaaagttgggagagtgtggctcatgaacgctga

SEQ ID NO: 306258 - DNA, 540 bp, Proteus mirabilis
atgagccaggaccagaccagctacgccgaacgggtggccgatctggggcttgaacggggcatcgagggcagcagggccacacaccagcgagttaaaacccactatggggcgatccagcaggcaggccgagacgtgccacacctgacgcctgacgagctgaaaccccagaaggtcaagggggtgtcactggccgagaaggtgttcggagccgtggagacggtcgaaggggtggcgcaaaggttgaacgccaaaataatggggtctgtgcagccgatggccgagaaagccgctgtaagcgcccagaacgagcgaagagccaaggagctaagggaaaccctagcccagcagcaaaaacgcttacaggcccttcaggagccgtttaaggggctatccaaggatcaggtagcgggactgatccggcaggcggtgaaattgcggcaggagaacgagcaggagaagcaggagcgcgcccagcagatcaaagagcgattcaaggccaagcgggaacgggagcgcagcgaccgcagcagggtccgttaa

SEQ ID NO: 306259 - DNA, 516 bp, Proteus mirabilis; identical to SEQ ID NO: 289069

SEQ ID NO: 306260 - DNA, 318 bp, Proteus mirabilis
atgccacttaatcaacgtggtatgacgaatgtcggtacatttcgcgcttacgtggaagcttatctaaaaaatcatccgaagatccataaacagatgaccattatggtaagacagcttgccccaacctctgaagggctacctatcgaaatttatgcctttaccaatacaaccgtgtgggtagagtatgaagctattcagtccgatatttttgatcatatattcgctattcttcctcagtttggtttacgaatacaccaatcaccaacaggtagcgatgtcagagcattaaaattccctaccaatatcgacacaccatag

SEQ ID NO: 306261 - DNA, 855 bp, Proteus mirabilis
atgcagcagcaactgcttacatggatacgtcagtttaatgaagagtacgctcaaatcacttctctgttacttgttttattgatcatttttgttgttgctcttgttctccactttattttgcacaaacttgtgctccctaagctttcaaaagctatcagtaaatacgatcaaaagtggcaactctcttttgaaattaataagttattcagtcgatttgcctttcttatccaaggtgtagtcattaatatccaagccttattatggatgggacccggtaaaacacaggagatattaaccaccacagctcaagcatggtgtttacttttcggtttattgatgattttctcaattatggatctctgtttgcagatcatgagaaattccccttcttttggccgattaccccttagaggtattttccaaagtttaaaattagtcgccagcgtgctgattggtatcatgattgtttcattactgatcggtaaatcaccgcttattttattaagtggtttaggtgccatgactgcggtgttgatgttggtatttaaagatccaattatgggacttgttgccggtattcaactctccgccaataatatgattagcttgggtgattggttagaaatgcctaaatatggtgctgatggtgccgtagtggatattagcctcaccacagtaaaagtacgtaattgggataataccgttacgaccattcctacttattctttaatttctgattcgtttaaaaactggcaagcgatgacacaatcaggtgggcgtcgaattaagcgcagtttatctcttgatatcaatagtatttactttttagatcaagagaacttgaaccttatataa

SEQ ID NO: 306262 - DNA, 207 bp, Proteus mirabilis
atgcggatttacacccagcaaggggataccgtagatgatatttgttggcgttactttggtcagtcatccggcatgattgaacaagtattagaagccaatccggggctggttgaattaggggcaatattacccaccggcaccgcgattgagttaccggatacgcctcaacaacacagcaccacgccgattttacaactttgggattaa

SEQ ID NO: 306263 - DNA, 810 bp, Proteus mirabilis
atgtcgaagaaatcaaaaccggttcgtctttgtgttgaaggggcgacaacggacgggcgtcgagttgatcgcgaatggttaacccaaatcgcgaaaaactttgatcccacggtttatggtgcgcgagtcaatatcgatcactataactattcatgggcgccacgctttggtgatgtggagtcggtgtataccgaggaaattaaagaaggggcattggcgggtaagttggcactgtatggtgtgatcaatccgacgcctgatttaattgaactcaataaaaaacgtcaaaaagtctatacctctgttgaaattgacccgagtttttcagataccggcgaagcgtatttagtcgggctggcggtcaccgataaccccgcgagtttaggcactgaaatgttgcaatttagtgctaatgcacaaagtagcccgctttcagagcgcaaacaaagcaaagataacgtttttactgctgcagaagaaaatcactttgaatttattgatgaaaacccgcagagcgagaagccggggctttttagcattattaaagagatgttttctaaaaaacaacacagtgatgatgcgcgatttaccgatgtgcatcaggcggtggagctgtgcgcccaagaagtacaaaccctttctgcagaaattaccgcattaaaaaacgccgaccaaagcgaagcggtaaaagcgctcacgcaacaactcacggaattaaaaacccaatttgaaaatacagacgcctcgttctcacatcgtccgccggccacgggtggcgaaaataatagcgaagtgctgacggattgctaa

SEQ ID NO: 306264 - DNA, 264 bp, Proteus mirabilis
gtgcaagaaaacggtattagccaagaaatctatgacgaattagagcgtttgattgccgatgcacgccctgttagtcggcatctcttggggttatctatcaaccttgattcgcaaggtgagttttatctttctgccgcgacgtttaacggtgatgagttaacggtttacccctattttgcagaagaaattaccgtgtctggtgcgccattaacggcggtcggagtacacattattgataaagttgaggtcgcacatgagcgctaa

SEQ ID NO: 306265 - DNA, 1197 bp, Proteus mirabilis
atgaataaatcaattattatcatactgcttgtcacagtattagatgccattggtattggccttatcatgccagtactaccaacactattaaacgagtttgtgagcgaaaacagactcgccaatcattacggtatattattagcactctatgcgacgatgcaggtgatcttcgcacctattttaggaaaattatcagataaatatggcagaaaacctattttattattttcgctattgggtgcggcattagattacctattaatggcttgctctacctcattatggatgctctacattggacgcattattgcgggtataacaggagccactggtgcagtatgcgcatcagcaatgactgatgttactcatcctcatgaaagaacacgttatttcggttttttgggtggtgcatttggtgtgggtttaattattggccccatgttagggggattactgggtgagatcagcgcccatacgccatttatctttgcggctatttctcattcgttattatttatattttcattactttgtttccaagaaactcaaaccacaaaaatatcgactgaaatatccgcattaaatcaggatacagcgcctcactctgccactggttttattaaaaagagtctctgtttttggcttattgcctattttattattcaactaatagggcaaattccggccactatttgggtgctattcacacaagtgcgtttcgcttggcacactactgaagtaggtttatctcttgcatttcttggtgtattacatattttttttcaagcggttctcgcaggaaaactggcgcaaaaatggggagaacgcaacacgattatcattagcatgtctattgatgcatttggttgcttattattagcctggataagccatgtttgggttatgctccccgctttaatctgtttagctgcggggggaatgggacaacctgctttacaaggatatttatcaaaatctgttgatcatcatgttcaaggacaattacaaggaacgttagtaagtctaacgaatataactgggattgtcggcccgttactcttctcttttatttatagttacagcgttgaatattgggatggcttattgtggtttattggtgcaatgctttacagtgggttacttgtagccagttattttaaacagaaatcaccaatattaaaaaaatttccctcataa

SEQ ID NO: 306266 - DNA, 738 bp, Proteus mirabilis
atgagtaactctgtatatgttgcgtggcaatgccctgaatctagagggtggcatgttgtaggaagactacaagaacatcaatcagggtatgcttttaattatactaagggagtctatgaagctaaaaacttcaacccctttagtggaatgctagagctagataagatttatatttcagaagagctttttcctttatttaagaatagattgctatccagcagaaggccagaatatccatttttcattaagtggttaggattgaataatgacaatgcctcaccaatggaggttttggcaagaagtggcgggattagggcgacagaccaactgcaagtgtttaaaaaaatcgatccaaatgaaaatgggaaggtagaggtttatttttttgttcatggactcaaacattttagtgagtcagcagaaaaccgagttaattccttaaggaaaggtgatgaattaaggctattgccagatccacaaaatgaacatgataactacgcaatcgcggtgtcagctatgaatccaatggagctaattggttactgccctagatttctgaataaagatatctcactgatgctaaacgatccgttagggacaattaaagtaactgtagaacaattgagtgaggatgctcctacaaactacaaattactatgcaagctaactggagaggcaagcgatagcacattaaacgcaattaaaagcaacgtagcatatatgccaattgttgagtaa

SEQ ID NO: 306267 - DNA, 645 bp, Proteus mirabilis
atgcgaataatcggattatattcaccgataaaaagtagtgatttagtaaaaacgcgtgagcgtcagtatcgtttagttcgtaaatctaagcaggatattgaggcaattgagcataagcgtaagtcagaaacggggcgggttttgactttaaaaagcgcgatcagcgcgcctcggagtcctgtcaataactgtggatcgggcagttcacccgatattaaaaattcacacgaaaggggcttaaaatcgcccgtatgggggatttctgagcctgatgtttttgacctacgttcacaatatagcgattgggagaaatcatttggcgaggttttagagcataaaaagagtcagcgaataatttcaacggtgtcattaagtgaaaatcaggaacgcttgatacctgaatttaaagcctttgccgaaaaaatgggattggatttaccaccagactcaatgtggtcaatggtgatgaatggtctgcgcctgagttatggcgatgaagtgatttggtttgagaacgggaaggttcaaatttcatcggcgaatagtgaaaacgttaattttgaagaagtaaagcaaaagaatatctcaaatacacgcgatagggtaatggctaaggttaataaattgagaggaataaatgattaa

SEQ ID NO: 306268 - DNA, 702 bp, Proteus mirabilis
atggggcgcttccatgaagatactaaaatgcacgaaatggcatgcattaaatccgatgggttatatcgtcattaccacttttctaacccaaaaaattcagcatattggtttgatattgtgaccacaccttattatttatatatgactggcgatatgggtacttgggtatttagtcgcattaaagatatgcttcatttctttaataaagatagccttgacttaggctatttggctgaaaaattacaggttggatcatgtcgtagtgaagttgcggcaatttataaagaagttgatgttaaaagaacactagaatatttaaacaatgaactccagcaatggaagaatgatattttagatgaggaagaagatcgcgaaaaattagctgatttaaaagaggcttataaagatttttccagaagaattggtgagttgaaatcattaatcaatgattactgcattagcggttcaatttcagaacaagtctattcttttgctattgagaattcagggtttaccgatccatcagtgggtatgattgaagcaccttgggattgggagtcactatatcctgtaacaaggccaacatctagatttgtatgggtgtgtgaagctattcagtatgcaagtaagcagatcttggtaaaagagttagcaagcaacgctatggataaattcctagctattgggtattgccatgagtaa

SEQ ID NO: 306269 - DNA, 363 bp, Proteus mirabilis
gtggccacatcagagaaatggcgtgacaaacaaacaggtgataatcgcgaaaaaacagaatggcatcgtgtcgttttgtttggaaagcttgcagatatcgccagtggctatttgtgtaaaggctcccaagtttatatcgagggccaactacaaacgcgcgaatgggatgataacggtgttaaacgctatacaacagaaattgttgtaaaggttggtggttcaatgcaaatgctaggtggtgctagtaaatcagcaggttcacagtcggcacagcaaaatcatccaccaatggattttgaagatgacatccctttcgcaccgattgggcttatgtatccacgccatttaattaatgtgatttaa

SEQ ID NO: 306270 - DNA, 1287 bp, Proteus mirabilis
gtgaagtttaaaataaatttattcttttttttgttttttcaatctacatatatttttgctagtgagggtaatcccaatgatggaggagaaaatttaacatggataatttctcttttggctttgtttgtttctttttcgattatgtctataaattttttaaattatagggagactaattttaataatagatttaatcaattattaacacagcataataagttacatgagcaattagaaagttatattaatgatcataaaaatgaatatttatcagttttaaaaaaagtaagatataatgatagcgtgagttttttatataaaaataatatatttagcccatatatgagattcttatatcatatgttaaaatttgtggatagagaaagtctttttatgacaaatgataaaaagaaaaaatatacatccataataagatcattgataacaaatgatattatgacttttatagcaataaattctttaaatgaagaatttatctattataggagtttattagataaattcgatttttttgaacacttatcattaaatgatttaaaattagttgataattatgaacctgattatctttctattattgagaaatttaaattagaaaatttagtaaaggatgttattgataattactttcatggtaaaattaaaaaacaagaaatcatggtcagaggagttagtttttttccttattggactatgataattgatttaaacaaaacaaataatacatattatgaaaaagagttagggtttatcaagtttgataaaagtattaaatctttaatcaatactttaattgtaattaactttaattatttatcaaataagaagcctgattacacatataaatatatagtttttgattataaaataaatgatataatagaatcatcattcttatgcattaatatagcagaaataattgagttttatattaaagcagaaggtaattttgatgtgtttatctctcttactaaaaaatatataaaaaaatatttaaaatatgaagctaaaatattagaggtgaatttttcaaatgatatatatgatgcggaaaattatttaagaatagataggtatatgagaggatattgtttaaaaactgaaaatttatttaatgtattatattattatgctattagtgatagcttgtcaaataatagaatgaaagatgatatttctattgtaaaaaatagattaaaccgaatcatatctaatacttatttatataaggattctttatataaaagagattttaatatagattaa

SEQ ID NO: 306271 - DNA, 285 bp, Proteus mirabilis
gtgtcattaagtgaaaatcaggaacgtttgataccggaattcaaagcttttgccgaaaaaatgggattggatttaccaccagacacaatgtggtcaatggtgatgaacggtatgcgtcttaattatggcgatgaagtgatttggtttgagaacgggaaggttcaaatttcatcggtgaatagtgaaaaagttaattttgaagaagtgaaacagagaaatattgataaaaggagagatagggttatggataaattaagtgaaattgtaaaaaaatataagttataa

SEQ ID NO: 306272 - DNA, 255 bp, Proteus mirabilis
ttgaagcgacgggttaaaaaagtgcttccaaagcgtgaaaaaagacccttaaaaattgaaaatgtcccgaatattcaatgggcattagatttcatgcacgacagtttatattgtggtaaacgtttcagaacactcaatattattgatgaagggacgcgtgaatgtttggcaattgaggttgatacatcacttcctgcagagcgtgttataagggtgctagaacgattaagaatggaaagaggattaccaaaatag

SEQ ID NO: 306273 - DNA, 714 bp, Proteus mirabilis
atgtgtataagagacagccatgacaccaattttgatatccagacaaaagaatcaatagaagctcctaaaacaccaaaaagtattcacacagaagataaaacagaaaaagttattactgatgatgttaaaacttttgttatgaaaaatggtaaatctcttttatggcaaggtataactaatcaagcctcgtttagaatcagagatgaaactgataaaatctatggcgtatttacacgattatatatatatgatgacggtgaattctatttagaactcacagaccccagtactggtgaagcaacttatattcctgaaaaagaaatcattacagtaataactatcggctcatcaagatacgactttaaagatctttgcaaaaagaaatttaaattagatttacatgaactttttgaatatgcaaaagacgttagatataaagctaaagaaattaaagtagtagctgaattccctgcaataaaaacaacatttacctatttatctaattcaggaaaagttagaagaacagtagatgtaacccaatataaaaagaatgggtacggtgacgagtacatagcagggtattgtcatgtaagaaatgaacatagaactttttctgttcgaaatattcaaacgatgatggctacagatggacataaaaaatactacttccatgattggctaaaaaatattgtaggaatagatgtcaataactaa

SEQ ID NO: 306274 - DNA, 540 bp, Proteus mirabilis
ttgagtaacagcaaaacctttacctcgccatttaatggaagtagtcaaacggtacgctttccggggagtcgttggcgttgtgagctgacattcaataatttaaatgaagagaaatctcgccagttagaagcgctggtggcttcattggatgggatgtcgggacgagtcaaaataaccagttggataagaaaagggcgttatgggtatggttcgcctcgcattgcaataccgagccaattgggtaatcagttagagacaaaggactggaagcgcaatatgcgcgtgttacagcaaggggatcgcttaactgtgggcaatgaactcaaaatggtggtggcagatgtggtcagtgacaataatgggcgtgcaaatattcctatttcaccgatgttaagaacgtcgcctactgttaatgaagtgctcgaggttgagcgtccttttggagtttttcggcttgttgataatgaacagggtaaatttcagcatcgtcgcttggggtatacccatatcacgttatcttttgaggaggtgttgtactga

SEQ ID NO: 306275 - DNA, 549 bp, Proteus mirabilis
  misc_feature (127)..(136): n is a, c, g, or t
atgtcgcgtggatatccactgtatgttaacaatattcctatccaatcgagtgaaattctctatcaggcctgccgttaccccgattatccggaaatacaaaaggagataattactctaagcaatcccnnnnnnnnnnatccctttgaggcgaagcaagtggctagatactatgagccgaaaacacgtgacggttggaaaaaaaatcgagtgtccataatgaaatggtgcgtccggataaagctttgccagaattgggaaagcttttttccactccttaattctacaggtaatattaatattgttgaacattctgaaaaagatcttttctggggagctcgccgtgaatcagatggtagtttttacgggatgaatgtacttggtagaatactcatggaaactagggaaatagctagagcgcgtgggcaagacggtttcaaatttatccctgctctgcaattagataaatttctactactgggcgaaccgatcaaaggtacttctacactaaaactggggccatccactgggcaaaccatggaattgttttag

SEQ ID NO: 306276 - DNA, 255 bp, Proteus mirabilis; identical to SEQ ID NO: 306272

SEQ ID NO: 306277 - DNA, 246 bp, Proteus mirabilis
  misc_feature (152)..(161): n is a, c, g, or t
atgatgtatcacattatacctgtgacaaattatatgcaaaattgcacccttatctggtgtgatgataccaaagaagcggccattgttgatcccggtggtgatgtcgaaacattaattgcagaaattgaacaacgtcaattaaagttgactannnnnnnnnngcaggaacagctcaaattgttgagcattttcatgtgcctgtttatgggccacataaagatgataacttccttattgaagatttag

SEQ ID NO: 306278 - DNA, 270 bp, Proteus mirabilis
atgcgcatggaaaaattaaccaatgtaacttatggaacagcaggcctaacggccttttttgccagtctttcgttatatgaatgggtatttgttatcgggatggcgttcagcatgcttcttggtttagccacttattttatgacacgccgagagcaacgaaaacgcactcaattatttgaagagcttgttcgacatgttgacccacaaaacccaactgaaaccctaaaaaggcttgctgaattaatggtgaaagcgccaaaggatatttaa

SEQ ID NO: 306279 - DNA, 471 bp, Proteus mirabilis; identical to SEQ ID NO: 297226

SEQ ID NO: 306280 - DNA, 582 bp, Proteus mirabilis
atgcaatatcatccattttctgacgccatggtcaacgtgattaatgagggggcttatatcgtcttagccgccagactcgatttgaaatcaggcgtcacctgtgcgcatactggtgttgggcaactgattattgcgggggaaacttatttgggcgtgggcagtttaggcgaaatcagtcagctaaaagaaaataagacaaccagtcctccacaattacagcttaaattagccggttttgataaatcgctggtgggaatggtgatgaatgagcaaagtcgaggacgcgaagtccggttgatgatggtcgccatcagtgaagagggaaaaccgttgcttgctgaagtcttatttgtcggacaaatcacatcgattaatgtagtgtctggcgaagaaaatgccgtatgtgttaatgtttctaatcgattcgaacgatggtcaatcggtttacccgatagatttaccgatgagtcgtggtcatctcgaagacaaggtgatcgcatctttcgctatgtcgctcaaatggctgaacgggcgatttattggggcagcaagaaagatgcacctgcatttatttataagtaa

SEQ ID NO: 306281 - DNA, 315 bp, Proteus mirabilis
  misc_feature (265)..(274): n is a, c, g, or t
ttgcttgcggatgcacgtgttcaattaaaccaaaaagcctttgatttaatgttgcttgatctaggtcttcctgatggtgatggtcaagatgaacttatcgcactaagaaaaagtggtgaaaaaatacccattattattttgacggctcgtactcaaatagataacttagtacaaacattagattcaggtgccgacgatttcttaccaaaaccttttgctatgcctgaattaatttctcgtgtaaaagccgtaagtcgccgtatgnnnnnnnnnncgtatggccggtttctcttcacagatttggtctattggtga

SEQ ID NO: 306282 - DNA, 312 bp, Proteus mirabilis
atggccggtttctcttcacagatttggtctattggtgatttacagcttaatccctcgaatcatcaagtcactttaaatggtgaactattgttattatcaggtaaagagtaccagctattatatgagctgatgcgcaatacagataatgtagtacgtaaatctgatttagaacaacgcttatttggcttagatgacaaaattgaaagtaactcacttgaagttcatatgcacaacttacgccgtaaaataggcaaagagcgtattattacggttcgcggtatcggttatctcttaaaaaaagaagtgaactaa

SEQ ID NO: 306283 - DNA, 363 bp, Proteus mirabilis
atgggcatgggtttagaaatatatgatgagaaagggcgactcattattggagaagacactattataccgcgccacttggggcaatttgaccttcctttgtcccaatatggatctcttactattcctgagatttccttaggaggtgaggttgtttgccatttctggctacggtatcgctctcgatggagtggtgaatttcatgtagataagcctaatgagagaacagagtactccatatctgggaacacgttaaattaccgcgttgattacaatatctatcgctgggagaacaatggctctggtggcgggcagacacaagcgaatgactcattctcaagtcatgttgtcgtatgggtggtgtga

SEQ ID NO: 306284 - DNA, 615 bp, Proteus mirabilis
atggttggtgtagaaatttacacaaataataggctgatacaattaaccgataaactcgaaacaatatgtgttttgagaaaagcaactcctgatgaactaacgtcatcatcaggccctcatgatagttatccgagaatctatgcgttaaatagccaatggatggttgctccgatttccaaggtaagcatacctcaacacggagttggtcttgaagtttatgatgagcaagggaaaatgaaattttcatctcttgctaagttggtctgctttgagaaatattatgatgtcaatacggggagcgctggcaaaggctcattaagaatcgcaggcaaaagtggtcatcggtatggcatgattaagactcgctctatggggtattttcataatacaaacatacgaagctacatagaccctgacacgtgggatgaagtttggacattcaaaagatatagcgagcgttatgtcttgattgatgatgtgggagggttaacatttgagtatcgatacgagttcttaggagaagaggatggctggataagtatgcctccgagtcgagaaggttctggattaatggaacaagggcttatgatagacgtttcaatgttagaagattaa

SEQ ID NO: 306285 - DNA, 894 bp, Proteus mirabilis
gtgggaaatacttattcactttcaggtagtaaggcaagaggtggagtaaaatgcaatgcttttttttgggggcccccaaatattggacgtcctcctgcatggcatcgtgtttttgtttatcagccttctgccaatataactattgatggattacaagcttatcgtgttaattctaatgttgtgtttacattacaaggtcaggctgtaggtaaatggtggcaaaatggtgatccttggatatcagcctgttatcctgctggtgatggaagtgaactggcaccagtgagtatgtttcaacaacaattccctattagtgttactatatatatcaatgagaaaattattgataatcatgttacaattcctaacgctaatttagctggttatgtaagagcttttaatggaggaccaggtagtgctccacccccttttaattcttgggatttttctaaaacaacggctcctattcatttagaaaattctgatatcatgataccttctaaatgcacagtaaaaatagatggtattaactcgagtaaattggagttaaatcatggcataatgaatgccaaagagtattttagtgaagtaaaatcaacagtaaattatgagtgtaaattctcatcattaacaaaagtaaagtttaaattagattatattaaagacgatgatcctttaaaacgtgtacctctgtctaatattggtgatctacagagtaaaatttatagtgagttagttttaatcgataataataccggtaaagaagcaggaacagaattaagaacaagtattaaagattttcaaagcattacaataaggagcacattaaaaggctctaatgcagtagcgggaaattatcaaggtactgcttggctaatcgctacgtttgattga

SEQ ID NO: 306286 - DNA, 870 bp, Proteus mirabilis
gtgattgagtcgttagatgcagaacaattattacgcgaacgcaaaacggcattgattgccgcaatgcccgtccatttgcgtgatgcggttgctaatacgttatcgttagagtcggaaccgctgaccaagttgttagaagaaaacgtctatcgtgagttgttattgcgccagcgtatcaatgagtctgcccgcgcggtgatggtggcgtatgcaaaaggggcggatttagatcagttagcggcgaattataatttatcgcgtttagtgttacgccctgccaataacaacactattccgcctacaccggcgattttagagtctgacgatgatttgcgtttacgcattcccgccgcgtttgaggggctaagtgttgcggggccggtgggcagttatgaatttcatgcccgtagtgccgatggtcgggtgtccgatgtgtccgcgattagcccaacgccggcaaatgtcactatctcggtgttatcccgtgagggtgacggcaccgcatcggaagagttactgcacattgttgagcacgcgttaaacgatgaagatgtgcgaccagttgctgatcgcatcaaagtgcaatctgccaaaattattccctatcaaattgatgcgacgttatttttatttcctgggcctgagtcggagccgatacgcaaagaagcaaatcaacgtttgacgcaatacatcacagagcaacaccgcttagggcgtgatattcgcttgtcagcgatttatgccgcgttgcatgtggaaggcgtgcaacgtgtggaattaaaacagcccaccaaagatgtggtgcttgataaaacgcaagcctcctattgcacccaaagcactttaatcattggtggctcggatgaatag

SEQ ID NO: 306287 - DNA, 852 bp, Proteus mirabilis
ttggatgtatttagctttggcgaggaagagcaatgcttaattggcagtatcgatttgctctatcgtaactcttggaatgaagtgagaacgctgcattttaatggtacgcaatcgatgttggaatcgttaaaaactattttaggtaaaatgcaccaagatgcggccccacctgcatcggttgaagttttttgttatagccagcatctacgtggtttaattcgcacccgtgttcaacagttagtctcagaatgtattgaattgcgtttatcaaccaatagattagagccagggcgttttaaagcattacgtattgcagggcaaacatggggattgttctttgaacgtcttaatgtttctgtgcaaaagttggagaatgccattgaattttatggggctatttcatacaacaaattgcatggattacccgttaaattaggtaaagatgcccgttatctgcccgcggtgattgatggttttgcttgtgaagggattattcagttcttctttgaaacaacagaggataataatgtctttaatatctatatcttagatgaagctaatcgagtggagatttattctcactgcgaaggcagtaaagaagagctagtaaaagatgtcagccgtttttactcttcatctcatgatcgctttacttatggctcaagctttatcaacttcaatttgccacagttttatcaaatcgtgaaagtggatggagcaacgcaagtactgccttttgctgggggatcgtttggtaagctaagtgatctaggtaaaacagcgccaaaagaagagatgagtactaagcctattcaaggatttaatgactatcaggctgtacatcatcactga

SEQ ID NO: 306288 - DNA, 249 bp, Proteus mirabilis
gtgattaaagcctatgacgtgattagtcacggacgtttagagttcgatgcacagtgcgttgatatcattcaatcttttacttccattcgccgtaccaccaccggaagtggtaaccgacctacttatgaagcctcacgcagtgaagaaagcggacatgctgaccttgcatgggcaacgatgcatgcccttttcaacgaaccattaaccggcaccaccgagaacagtaataatattgtggagatttattga

SEQ ID NO: 306289 - DNA, 543 bp, Proteus mirabilis
atggttccttaccaacccgtattaaccttttggtttgaagaatgtaccccaaaacagtggtttcaaaaagatagcgcttttgataaagaaattaaggatagatttggtgagctatgtattagcgcaagtcgcgcagagcttgcctcttggcgcgagagcattgaagggcggttaggggaaattattattctagaccagttttcacgtaatatttggcgtgatacaccaaaggctttcgcccaagataatatggcgttaattcttgctcaagaagccattcgattacccgaatatctcaccctgacaccagtaaaacgcaaatttctgatcatgccatttatgcactcagaatcacaaaaaatccatcaagatgccattgcgttgttttctcaattaaatgatgacgacacgtatcaatatgaattacgccataaagagattatcgataaatatggtcgttatcctcatcgtaatgaaattttagggcgtacttccacagcagaagagttagcgtttttacaacaacccggctcctcattctaa

SEQ ID NO: 306290 - DNA, 240 bp, Proteus mirabilis
atgtttaagcgtttggccactgctcgttatttgcgtatgtcggccaatgataaaggtgtcacgctttcttttgctccgcaagtcgcgggcattgctgccgtgcatcattacggtttaaaagagcgtgtgcgaggtaagttattagaaattcaataccctgaacgaaagttgttaggcttttcaccggcagatattaaacatattgaaaatcaattactgacatttctcacaaatcactaa

SEQ ID NO: 306291 - DNA, 390 bp, Proteus mirabilis
atgttaaaattaaataaaattcatcatgtggcgattatttgttctgattataccgtcagcaaacatttttattgtcaaatactggggcttaccctattaaatgaaaaataccgtgaagaaatacaatcttggaaagctgagcttgcgttaggtacagtctaccaaattgaattatttagcttcccagatgcgccagcacgtttaagttacccagaagcacgtggtctacgccatgtggcatttgcagtggacgatcttgatgcttcagttgcttatttacaacaaaacaatattcaatgtgagccaatacgtattgatcctagtagccaaaaacgttttaccttttttcaagatcccgatggcttacctttagagctttattcaatatag

SEQ ID NO: 306292 - DNA, 303 bp, Proteus mirabilis; identical to SEQ ID NO: 302046

SEQ ID NO: 306293 - DNA, 339 bp, Proteus mirabilis
atgaactatctcggcatgaatgcacaaaccggtgaacgtattaccgatattgagcacgttcgccagtctattaaagatatttttaacacccccattggtagccgattgatgcgccgtgaatatggcagtttgcttgccgatttaattgatggcccggttaacgccaagatgcgattgcaattaatgtctgcgtgttacaccgcagtttatcgttgggagccacgtattgtgatgactgccattgatattcatagccaacacgagcaggtgattgtcgatatcaccggctattacacccacaaccaacaaccgattaatttctctctaccggtgacataa

SEQ ID NO: 306294 - DNA, 261 bp, Proteus mirabilis
gtgattgaagcccgcgagtcggtcaaagtcacgtcacctgacattacgtgtgtcgcgacaagcaaaatcaccttagatacccctaccgttatttgtacgaacaacttaactacgggatcactgacggtgcaaaaaggcggcaccatgaccggtgatattacccatgttggtgggaaaatgtcctctaatggcgtggtggtttcagcccatacccacggtggtgtgcgtaccggtgatgataatacggggcaaccgcaatga

SEQ ID NO: 306295 - DNA, 345 bp, Proteus mirabilis
atgaatatcgcagaacttatccgaaaaatacaaaacttgatccgcactggcgttgtgattgatgtcagtgcggaaaaaggctgtcgagttaaaacgggcgacaatgaaaccgactggcgcccgtggcttactgcacgtgctggtaactcgcgctcatggtgggcgcccaatgttggcgaacaagtgttattgctatcaatcggtggcgatttaactacctcgtttgtgttgccggcgatatttagtgatgatttttcagagccgtcaacctcattaaccgcgcatcgtcatgagtataaagacggggcagtaattgaatatgagccggcaacacaaacgaggtag

SEQ ID NO: 306296 - DNA, 237 bp, Proteus mirabilis
atgtttaagcgtttagccaccgcccgctatttgcgtatgtcggccaatgataaaggtgtcacgctttcttttgctccgcaagtggcgggcattgctgccgtgcatcattacggtttaaaagagcgtgtgcggggtaagtcattagaaattcaataccctgaacgaaagctattaggcttttcaccgacagatattaaacatatcgaaaatcagttactggaatttctttctcgttaa

SEQ ID NO: 306297 - DNA, 495 bp, Proteus mirabilis
atgatccctgattttaaatcagcatcaatactcatttgttttccaggcataccatccaaagaaaaacgagccgcgacctccgctactcgttcagatcctttagtaatcacgagaaattgcactatggtcacaatggaaaagacaacaaaacctacaacaagattttcaccaatgacaaactcaccaaatgaggtaatgatctctcctgcatcggcatctaataatataagacggctagtgcttattgataaagcaagccggaaaagagttgggacaagagagtcaattatatggttcattcgatggtgccatgaaatttataaaaggggatgcgatagccggcattgtcattatcttcgtgaacttaattggtggcatatcggtaggtatggctcaaatggggttatctattacagaggcattacatacatatacacttttaacgataggggatggattagttgcacaaattcctgctttacttatctctattag

SEQ ID NO: 306298 - DNA, 393 bp, Proteus mirabilis
atggagtcgggggaacccttcttttctaagccctatattaatgatactaaaaaaaccaatttatatacatttagtgtttaccaaattgataggccgggttatcaagagcagggcacacctattcagaatggagaaattctttttactccccttaaaaaaattctattacccggggagcaggaattttttaaaattttctatcgaggagaggcggatgagaaagaacgttattataaaattattattagtgaaacgccacttgatataagaaatgatgaagggcaaaaaaaacaaccactgttctaccccacagtaagtttagaaacctattttgttgttagacctaaagatccagaaaggaatattaaaaaatacaggcaatacttattttag

SEQ ID NO: 306299 - DNA, 297 bp, Proteus mirabilis
ttggatttctttatcagtcgtgctaagcctaattctgtacgcttttaccaagtgcgtggaagtgaacaagcacgacaacaagcgttagaagctgttttaaatcgagtaggggaaaacttcagtattcagcaagataaaggtgtttattgtacagagctggtggctgatgcatggttaaaagcaggggtttctatctcaacgggcacacgtacattacatatgccgtttatttctgaaagagcacttatttttcctgataatattatccattccgaaaatgttattttgattgaataa

SEQ ID NO: 306300 - DNA, 249 bp, Proteus mirabilis
atgaatgaaaataaagcatatagccaatttacctcggcagacaaagatctcgcgtcaaaaataacccataaatgtacttacaattcagatgctgtatttgaacaatgtttaccaaaaatactgacttgggaagcaaaaatttatcaatcatataatgcacatcgtaaaatttctgatagtgaagcgataaaatatacagaagaagaattacgcgataagcataattactggatcaacaaaaaacgctaa

SEQ ID NO: 306301 - DNA, 237 bp, Proteus mirabilis; identical to SEQ ID NO: 306296

SEQ ID NO: 306302 - DNA, 201 bp, Proteus mirabilis
atgttagccgcacaccgcgtaccccctcaaatgatggggatcattccacagaataccggtggctttggtgatgtagaaaaagcagcaaaggttttctttcgtaatgagctagcaccactacaaagcaagatattacaaattaatgattggctaggtgaagaagtgattaagtttgataagtacacactagatgataagtaa

SEQ ID NO: 306303 - DNA, 282 bp, Proteus mirabilis
gtgcatattactggcactcgttttgctatcgtttattggaaaaaacaatttggattaatcgaagtcactgtgattgacggtcgggttcgtcgtgaagtgattgcgtggtatgactctgcagtaaatgtgacggctggcgttgttggggcacatgtgagtcgtgttattagtgctgaaattaaatctatctctgaattgatagaggtaatgactcacgttgctaaactgtgcgaaacggccattgaaattattgatccgaagcatttaggcggtgtgcggtaa

SEQ ID NO: 306304 - DNA, 159 bp, Proteus mirabilis
atggttgatgtgcttaatgcggaagagcttttatatagagcgcagcaagatttaatcaaagccaaatatgattatattcaagcttgggcattattacatcaatataccaatactctagatattgaaaaaataaaaattattgaaaactattttcagtag

SEQ ID NO: 306305 - DNA, 1608 bp, Proteus mirabilis
atgaatagcaaaatattttttttactcgtagcaccttgtcttttaaatttatcgctgtctacaaccagtcaagccgctacggtaactaatagttacgtttttattgagaataatgtagataatgaatattttattaccccaagaacaaccgatccgcgtttttcgggtgccaataaatatacgcgttattcaaaatcttcacagctcagtttaggttatatggggtataccaatacatccattcaggccaatcaatatgtcgatatttggctagaaaattctcaaatagataagccatttgtgggtaatcgatgtatgaggcgttattgtacagatgatagtggctattggcctgcgcaatatataggtaaagatggggcttataaaatagttcagacgaatactaacggtgaatcggcttatgctcgggggatatttagtgattcggcatacctgtattttcgccaattgcctgtaggcactatagagacatatagttatagagcctgtatgacaaaaacagactatgatcccagtaaaggcgaatcttgccaaagtatcggcggaagaatgcttgcatcacatgagtttaatatcactaagtctgggcatataaaactgacctcaacaggtgctttacaagaaatatttattgatagtaacggtaatcccacgattggcttaggctctcagttttgccgagtgggtattgtatcaaaccaaaatggtattatttgtcaggtgattgatcatgaaactactggggatatatttaccaatattaggcttaatttaaaaattaataatacactgatcccttttacgccagcggcaaatacaataaaaattggccccgatgatggcagtaataactggtataattataatacaacataccccgctaattattattttaaagttaataataaaaatgtttctatctttttatctaatacctttttaaaaagactcgtctctagtaatgtcgactttaaaaatagccaagacttttttaccttttcatttaccaatacagcagtgcctcaatctgggtattatgagttcaccccctcaaatacacttattctgaaaccgagagattatggcataagcattattcctgctgattttaaccctcatcaatctaaaacgggaaaagtgggtaatgaagagccacccattgagtttaattatattgttaccaccagtggccctagacaagcagactctattactgcatctgtagaaggaccacaaacaacattaaaagggcaatcctattgtttattctcctccagtgataaccgacttaatgtgccttttccggcttatctctcatttaaaaatagtgatggcacggatgcaaaatatagagcgagttgtgatagtcatgaaatttcattaaaaaatgcgttatggacagaaacaccatgggatagacctgatgaagacttaggttctttttatagaacgaacctagatttatcttttccaatgaatgatgctaactcatttttcactttagatggtattgattggctaggaacagtctcagccagtggaacggtaacggttaaggctatatggactgggcctgatattaactaa

SEQ ID NO: 306306 - DNA, 153 bp, Proteus mirabilis; identical to SEQ ID NO: 294455

SEQ ID NO: 306307 - DNA, 912 bp, Proteus mirabilis; identical to SEQ ID NO: 40352

SEQ ID NO: 306308 - DNA, 1095 bp, Proteus mirabilis
atgacctcaataccccgttgctttgccgtgctagtagcgacaactttgttatcaggtaacttgtcagcgcaagaatttaactttactgatgtaaccggacaggaaattaagttagaagcccctcctagacgtatcattactctgcccaatccagctgcagctaccttcatcgcaatagatggttctaccgagctgttagtgggtatgaatgagggctctaaacgagcctttgagagcggtatgatgagcgttatgtttcctgaagctgttgatatctccagtgacattttgtcggaaaacggtggttggatgcccaacgtagaggccatcgcagaacttaaaccggatttagtcatccagtggggtgagcgcggcgatgatatcgtagctccacttcgcaatgcaggtttgcccgttgctctaatggtaggcggtggcaatgcgggtacagaagagctggcccgagccaatatgaaaatggtggctgatatcacgggtaatactgaaaaactgtcaaagcttattgattggcgtgaccgtgtacaaagtgaaattactactggtttaaaacaagtaggctttcatgcaacaccaagcattttgcatttgcgctctgccaaatccaagttgactgctactggtgagaaaagttatcaacaaaccttcatcgagctggttggcgctaaaaatgtagctcaaggagctggcgtacaaagcactgttagcgtggaacagattcttgaatggaacccagatattatcttactttccgcagcagagacggatgctggattagaagcgatatacgacgacccattactttctcgcttaaatgccgccgtacaaaaacgcgtttataagacacctcaaggtggatatatctgggatagtgcttcccatgaaagcccctacacatggatgtggctggccaatcttactcatcccgatattttctcttttgacctacgtcacgaattaaaagaaggcttcaaattactttataactttgacctatcggatgagcagatagatcgaattctgcgtattgatatgaacggcgacagtcacggttatcaagtgtttcgtaaacaatga

SEQ ID NO: 306309 - DNA, 1059 bp, Proteus mirabilis; identical to SEQ ID NO: 40350

SEQ ID NO: 306310 - DNA, 825 bp, Proteus mirabilis; identical to SEQ ID NO: 40349

SEQ ID NO: 306311 - DNA, 516 bp, Proteus mirabilis; identical to SEQ ID NO: 232711

SEQ ID NO: 306312 - DNA, 426 bp, Proteus mirabilis
atgaatcaagaacgtcaaacttggctcgggctacttgcccgagctaaccgagattatctggaaaatatctgggctacttacaatccgggtgtgcctatacaaaaactcgctggccctgaaacggggttggtgcagctcaatacacaagcttgtaaggcctcagtgtcatttcagtttggtgaggcttcttgtactcgctgcgtaatcgctattgggaaaattcaaggttacgcagtacatttgggctccgatctacgcaaagcggagttagcggcctatctagacgcctttctacaaacggccccctcccaccaacgtgagctggtgctgcaccctatacgccaacagttagagctaaaaaaggctgagagggagcagctgacggctgctacttctgtacgtttctacaccacacaaaaaacttag

SEQ ID NO: 306313 - DNA, 558 bp, Proteus mirabilis; identical to SEQ ID NO: 40346

SEQ ID NO: 306314 - DNA, 1014 bp, Proteus mirabilis; identical to SEQ ID NO: 40345

SEQ ID NO: 306315 - DNA, 813 bp, Proteus mirabilis; identical to SEQ ID NO: 232708

SEQ ID NO: 306316 - DNA, 765 bp, Proteus mirabilis
atgtttagcttgccagatcccgtgctgacagcacaggctatctcacttgaaatagctgggcaccgtattttgtcggattgtcacctcaagctttatccttccgaggttctcgctttagtcggcccctcaggtgctggaaaatcaagtcttctgaatatacttgctggacgacagctatctaacaactgtcaggctctttcccttttaggccaggatttactacgtaccagtctttatcaaactaaccttttacgtcggcgggcgtgtggctatgtggctcaggatgccagcacaaccctaaacctgagacaaagtgccgccactaatatcgtacgtcgtctttttgatttaggtgacaaccgtgcggttgatgcactcaaacaagcacaaaaatggggccagcgacttggtttatgtccagaacgattacatgagccagtgaagaacttttcgggagggatgcgccaacgcgtacaaatcgctgcggccatgatccatcagccgagcattttatttttagatgaacccactgctggtctcgactcagtcgctcaagcagattttttagatgtgctctctaatttgagaaaccaaacacagactgccatggtgtttgtgactcatgacttacgtctagctcgactcattgctgatcgggccatcgtgatggatcaaggccgcatcgtcagcgaatccattatggatcgtttgcttactgagcctgagcatctcatcgcccaagctcttgttaaggcaatgatttaa

SEQ ID NO: 306317 - DNA, 615 bp, Proteus mirabilis; identical to SEQ ID NO: 40342

SEQ ID NO: 306318 - DNA, 939 bp, Proteus mirabilis
atgagtcatcaacttaccttcgccgacagtgaattcagcagtaagcgccgtcagaccagaaaagagattttcttgtcccgcatggagcagattctgccatggcaaaacatggtggaagtcatcgagccgttttaccccaaggctggtaatggccggcgaccttatccgctggaaaccatgctacgcattcactgcatgcagcattggtacaacctgagcgatggcgcgatggaagatgctctgtacgaaatcgcctccatgcgtctgtttgcccggttatccctggatagcgccttgcctgaccgcaccaccatcatgaatttccgccacctgctggagcagcatcaactggcccgccaattgttcaagaccatcaatcgctggctggccgaagcaggcgtcatgatgactcaaggcaccttggtcgatgccaccatcattgaggcacccagctcgaccaagaacaaagagcagcaacgcgatccggagatgcatcagaccaagaaaggcaatcagtggcactttggcatgaaggcccacattggtgtcgatgccaagagtggcctgacccacagcctggtcaccaccgcggccaacgagcatgacctcaatcagctgggtaatctgctgcatggagaggagcaatttgtctcagccgatgccggctaccaaggggcgccacagcgcgaggagctggccgaggtggatgtggactggctgatcgccgagcgccccggcaaggtaagaaccttgaaacagcatccacgcaagaacaaaacggccatcaacatcgaatacatgaaagccagcatccgggccaaggtggagcacccatttcgcaggttgctgaaaaacgataaccaactggcgatgttattcacgctggccaacctgtttcgggcggaccaaatgatacgtcagtgggagagatctcactaa

SEQ ID NO: 306319 - DNA, 441 bp, Proteus mirabilis
atgatggaaaaaatcaaccgtaatcctaatattaagataaaacaagcggatagagtggtactggctaatgcagtgcgccatgtggatacaaaaatcctgtctgaaaattttcagcgtttaggtaagtcattcggggtattgggtaaagtcttgagtgttgaaaagcttcgcgaaaaagcagctattggttttgagactggtaactggaaaccattgatgctggaagtggaagctatgataatcagtggatatgctacggggatagcgataagtatagcaataagttttatctcatcaattgcatcatttttagctataggagcattacctacaaccttagcaattatagcaactataatgttaattagttatttagcatccttaattgatgataaagttgttgataaaattaacaacttacttattccagaagctcattaa

SEQ ID NO: 306320 - DNA, 1050 bp, Proteus mirabilis
atggcggatgtaccatcctatacgtcagattttttcaaaacggcacaccgattaattgatcaggtgctcgataccgcgacaaaaggaaaattggcggagtattcagggattgcggttgatttggttcaggcgggggttgttatctggatgattatttatgcttttcagaccattgcgggaaaacaaaaaacccccgtggctgattttctctggcaaatggggaaaatggcgatcatccttgtatttgtcaaaaatactggcggctggatggatgcggcaaacaatgaaattaatgcgttaaaaaccacgttagcgggggggcttgacccgtgggtgtggttagatcagttatgggttaaaacaagtcaggtaggagctttgttaatgcagctagacacatctgattatgtaaaagttgagggggcattgggttcatgggcaacttatattggttcaattattgccttactgacggcttccattatcttcttttcagcagagattacgctaaagctgttaaccatcacagcaccgctgtttgtgatgtgtctgatatttggctttttacgccagatgtttaataactggctgcaactgattttcagttcactgttaacgtttatgtttgccacgcttgcgctgcgagccggaaccagttacctcaatcatgttttatctgttctggttcaggaagctgataaatcaaatctgatcgctatggggtttatggcaatggcagccggaatatttaccgcgtttgtggcatggaaagcggcgcagtttgccagtcagatagccagtgtcggcgttgaggggtcaatgcagggagctgctgcattgggactaggagcggcgggattcgctgcaaaaagagcgttatccggtatgactcgtcgtgtgggtaataccgctaatcgggttggcactcagaaccgtgagaaattgtggaacaatgccactaattcaacgcaaaacgcatctaatcctaatccgtctcagaatattggtaagagtgttgcggaagcagcaagaaaaagatacgggagttaa

SEQ ID NO: 306321 - DNA, 228 bp, Proteus mirabilis
atgaaacaagttcaagcaatgacgacgttagtattaattgacggtgttacgtatcaaatagctctacctaagcaatatgtctctcttcaggcaaaacaggcgttaatgtttgctcaggagttcggtggaataattcttccttgcgcgtttgctgatataaagccaatggaagcagatggactgccgtttaatataggtgatagtggagcggagaatgaaaaaatatga

SEQ ID NO: 306322 - DNA, 219 bp, Proteus mirabilis
atgagtgaattaaaagagagaataatagaagttcttcaatgtaatcagcttaccatagacgaactatatcacttatgcaaccctgattattcaaggagtcaggttagttgtgtgattggtcacttggaagcaggtggaattattaagaaaaatacttgtgaatattgggagttaattaatgaaacaagttcaagcaatgacgacgttagtattaattga

SEQ ID NO: 306323 - DNA, 204 bp, Proteus mirabilis
atggataaatcaataccagatttagcagctgagtttcattgtctgctagcgaaaatggaagaagttcacggctctgaaataacatcattaataaacaccactgaagaaaacgtcaaagccgcgattagaacaaaccgaatgttacttcatagttattcgtatgaattaaataaattgaaaaagcaggttgatggcaatggataa

SEQ ID NO: 306324 - DNA, 339 bp, Proteus mirabilis
atgaaaacgctacatggtcgctgtattcgtcgttggaaactgagatttaaagatgtttgcgattcgaaggtttcaccctatttcagaaagcgcgacttgaagggattttgtcgcgaatctggcgtcactactgccgatggaatgattgaagatatggcttttaataatgctaaatttgattttgatggagagcgccacggatggtcgcctgaattttcaaagttctttgacgagaatcgagagaagtacattaccgaagcacgtttatttctcaatgaagaagctaccaacgatgaaatagacgatttaatcgaagaagagatttctaactggaattaa

SEQ ID NO: 306325 - DNA, 129 bp, Proteus mirabilis
atgcaggaaagggacacgatacaatcacagtcggaacatttgcagttaccgcttacaccggagacgggcacgattttgtcagagggggaagtgcttatcttaagattattgatgagaacggtgatttag

SEQ ID NO: 306326 - DNA, 378 bp, Proteus mirabilis
atgacggatcacgatctacaattattgacagtgctcattgttgatgatcaccctatcaatcgtttattgttgaccgatcaactgaaaaaaattggttttaataccgcaacggcagaagatggctgtgatgctttagcctttatgcaagaaaatcatgtcgatattattttaaccgatgtcaatatgccaaatatgaatggctatcaattagcgacaacagtgcgtgaattgagtagcactattcctattattggcgttacagcaaatgcgattgccgaagaaaaacaacgttgtattgatgcgggaatgaatgattgtgtttccaagccagtctctcttactgtattaaaagacgtattactcacctatgtggcataa

SEQ ID NO: 306327 - DNA, 459 bp, Proteus mirabilis
  misc_feature (147)..(156): n is a, c, g, or t
atgtctttatttagtattttcgatatttcaggttctgcactttcagcacaatcacaacgtttaaacgtcagtgcaagtaatatggccaacgtagatagcctttttcatctgcaaatggatttcctggctggtattccatacgaaagnnnnnnnnnngtggggcctgatggtgaaccttaccgtgcaaaacaagtggttttccaagtgaatgcgccagcgggtcaagatattggtggtgttcatgttacgcaagtagtggatgatccgacaccctttcgtatggaataccagccaggaaatccatttgcagatgaaaaaggctatgtgcgtaagcctaatgtcgatgtagtcggtgaaatgatcaacaccatttcggcgtcaagaagttatcaggctaacgttgaagtgatgaatacagcgaaatcgctgatgcaaaaaacgttaatgataggtcaatag

SEQ ID NO: 306328 - DNA, 474 bp, Proteus mirabilis
atgatgacaaacagctatctcgagtattttctcaccctgctggcctgggtagtcaataacggattgtggtcggtactgaccagcaccgggctgtttgcgctgccgctggcctttaaagttatagggatctggctgaaggtgcgggaagagggggaggatgaaggtaacaaaggctcgctggcgattgtgcgcatcgagaacgccctctacggggcttttgtggtgatcctcttttgctgtgtgccgttgatggaggtgagtgtcagcacgctgcaatttgataccagccggaccaaaacctgcggcagctggacaccggtgaagccggaggagtccggttacagcggtgtggtgtcatcactggataatcagacagccaaaatcccgctgtggtggatgctggtgcataagctgtcaaaaggggtgacacaggcggcggtggccagcattccgtgccggccggatttgcggtag

SEQ ID NO: 306329 - DNA, 2445 bp, Proteus mirabilis
atgaaaaacatcaaagagatgacgttactttccacccccctatctcgccgacgctttgtcaaagtgggagccgctggtggattagttgcaacggcaggtggattatctctcccctttagccaagccatggcttcggagcaaacagcgccgacatctaccaataaagaaaaagtcgtctggagtgcatgtactgtcaattgcggtagtcgttgtccattgcgtatgcatgtcattgatggcgaaattaagtacgttgaaacagacaataccggcaatgacgtttacgacgagttccatcaagtacgagcttgcttacgtggtcgctctatgcgtcggcgtgtttataatccagatcgcttacgttatcccatgaaacgcgtaggtaaacgtggtgaaggtaaatttgaacgtatctcttgggatgaagcctttgatactatttccgacaccatgaaacgcctgataaaagattatggcaatgaatctatttatctaaattacggtacaggcaccctcggtggcaccatgacaaaatcttggccaccaggagcaacccttattgcccgtttaatgaattgctgtggtggttatctcaaccattatggcgattatagtactgcgcagatcgctgcaggcttaaattacacctacgggggatgggctgacggcaatagtccttcagacatcgaaaatactaaattggttgttatgtttggtaataatcccggcgaaacacgtatgagtggcggtggtgtaacttattatgttgagcaagctcgtgaaaaatcagatgctcgcatgataattattgatcctcgctatactgatacgggtgcaggtcgtgaggatgagtggatccccattcgtccaggtactgatgcagccttagttaatgcgttagcttatgtcatgatcaaagaagatttagtcgataaacccttcttagataaatactgcgtaggttacgacgaaactacgatgccagaaggggcacctaaaaacgcccactataaagcctatattttaggtgatggcgcagatggtcaacccaaaaccccagaatgggcagcacaaattaccggcattcccgcggcacgtattgtcaaattagcccgtgaaatcgccggtgctaagccggcttatattactcaaggttggggcctacaacgccgttcaaatggcgaattagcctctcgcgctattgcaatgctcgctatcttaacaggtaatgtgggaataaatgggggcaataccggtgcccgtgaaggctcttacagcattccttttgtccgtatgccaaccttaactaaccctgtcacgaccagtatttctatgtttatgtggacagatgccattttacgtggccctgaaatgaccgctacacgtgatggcgtgcgaggtaaagataaactggatgtacctattaaaatggtatggaactatgcggggaactgcttagttaaccaacattcagaaataaaccgtactcatgaaatcctacaagatgataaaaaatgcgaaatgattgtggttatcgataatcatatgaccgcatcggcaaaatatgcagatatcttactgccagattgcacggcatcagagcaaatggatttctgtatggatgcttctgcggggaatatggcttacgtgattttcgctgaccaagcgattaagccacgttttgaaagtcgcaatatctatgagatgaccagcgaaattgctaaacgtatgggggtgggtgagaaatttaccgaaaatcgtacccaagaagagtggttacgccatctttatgagcaatctcgtcaaaatttaccagaactgcctacctttgaagaatttcgggcacaaggtatctttaaaaaacgtgatccacaaggccatcatgtggcttaccgtgaattccgcgctgatccactcaacaatccactgacaacgccatcaggaaaaattgaaatttattcttcgcaattagctgaaattaaagcgacatgggaattagcggcagacgatgtgattgatccactgccaatctactccgcaggttttgaaagctatggcgaccctgctatggataaatacccattacaaatgacgggttttcactataaagctcgtacccactcaacttatggcaacgtagatgtattaaaagcggcttgtccacaagaaatttggataaaccctgttgatgctacaaaacgtggtatcaaacacggcgatttagttcgtatttataacgatcgcggtgaagtacgtatcaacgctaaagtgacaccacgtattttgccgggcgttgtgggattaagtgaaggggcttggtataacccagacagtaaccgtattgatcatgcaggttgcattaacgtgttaacgacccaacgcccttcaccacttgctaagggtaatccttctcacagtaatcttgttgaagtcgtcaaggcgtaa

SEQ ID NO: 306330 - DNA, 414 bp, Proteus mirabilis
atggaacaacaagttattacagatatttctctctctgcccgtattattggggctgctttctattacccatcaactgaaaaaagtgacattgttgagttactctcaagcggcaaatggttaactgaatggccttatggctctgaagaagaaaaacaacgcattgcctcattattggcgcaaactacctatcaagatgaaacattagcacaagcctatcaacgtttatttattgggccttatgcgctacctgcaccaccttggggatcagtgtatcttgatcatgagaatgtcttatttggtgattcaaccttagatttacgtgaatggatgctggagaatggtattgatattgccttgactcaaatttggtttaatggtgatgatggtggcatgggttgcagaaacacgccctga

SEQ ID NO: 306331 - DNA, 1995 bp, Proteus mirabilis; identical to SEQ ID NO: 304072

SEQ ID NO: 306332 - DNA, 1425 bp, Proteus mirabilis; identical to SEQ ID NO: 304073

SEQ ID NO: 306333 - DNA, 1413 bp, Proteus mirabilis
atggaagagcaaacagaagttactcagcccgttagagtgaaaaatgccactctacaacgcgggctaaccaatcgtcatatccaattaatcgctattggtggtgctatcggtactggtttatttatggggtctgggaaaaccatttcgctagctggaccatcgattatttttgtttacatgataatcggctttgtcctgttctttgttatgcgagcaatgggagagctattattatcaaatttagaatataaatcatttagcgattttgccggggatttattagggccttgggctggcttttttgttggatggagttattggttttgctgggttatcaccggtatcgctgatattgttgccattacctcctatattagttattgggcgcccaattttcctgaatggggaacgtcttttatttgtgtgctgacactccttattttgaatttagccacagtaaaattatttggggaaatggaattttggttttcgatgatcaaaattaccgctattgtctctttaattattgttggtatcgtattgattagcataaattttcaatctccagccggccacacggcaactattgaaaatatctggaatgatggcggtatgttccctaaagggatcagcggattttttgctggttttcaaattgctatctttgcctttgtggggattgagctggtaggtacagcagcggctgaaacacgtgatcctgagaaatcattacctaaggcgattaacgctattcctattcgtattattactttttatgttttggctttggcgattattatgtcagtaacgccgtggcgttcgattttggcagacaaaagcccgtttgtagaactctttgtcatgattggtattccagccgcagccagtttagttaactttgtggtattaacggcagccgcctcttcagcaaatagtggtatcttctcaaccagtcgtatgctatttggtttatcgaaagagggggaggcaccaaaacagtttagccagctatcaaaacgttcagtacctgccaatggtttactctttacgagtctctgtttatcttgcggtattgtgctaatttattttattccagatgtgatgcgggtatttacgttagtaacaacggtctctgcgttattatttatgtttatttggagtatgatcttatgctgctatttagcatatcgtaagaaacgtcctcaattacatcaacaatctatttataaaatgccattagggatagtgatgtcatggctatgcttagcattttttgtgtttatggtcgtgttattggcatttgaacatgatacccgtcaagcactgatggtaacgcccatttggtttattgctttaggaatagggtatcattttgtgaaaaagcgtaaacaaaaagcacaattaaaaaattaa

SEQ ID NO: 306334 - DNA, 327 bp, Proteus mirabilis
atgctttctctggaattagtaaaacaacattgcaatattgatcctgattttacggatgatgataaattgctgactctttataccaactctgcagtgaagtttgtcgagaactacactcgcaggacgctttatggaaaggaagaatcggaaggatacaaagaagatgccgatcatctattgctgacagatgatgtttctgctgccatgttgctacttatagggcagtggtatgaaaatcgcgaaggtgtgatttcagggcgctctttttcaactcaaccatttgcggtggaagcgttattgcagccttatcgaatttacggtgtgtag

SEQ ID NO: 306335 - DNA, 924 bp, Proteus mirabilis
gtggatgttaatcttgagactgccaaaaatcaaataaataaactcgctaatgcagttaggaatggaagctcaaaagatttggattatttagtaaatatcatgtttcatgatgatataaaaataagcttatatgcaactaatcagctctacttgatttatccaaaattaaacaactcgataagagaagatattaaagaattagtcaaattactctatgaaataaaaataaaagaggatcaagagtattttaaagaacgacctttattaagtgcaatggcttgtgaggaagcgattgctagacaaaagggaaaaggggagaatgtttttatctcagcggttgataattatttaaatataaaatgtaatgatagcgtattggccaatagtaatgaaagcgtaagtaataataatcgatatatatcttcatctgaattagaatcttgggcgtcatttcaaccctatcagtgtgatattggttcctatgaatcaatacttaaaaaaatagaaaatagcaaaggatccgcggagttaaaaaattatgtggttttagtcaataataaccattgggttgcgttattgacttataaagatagctgttttttatgtgattcattgccctcaagcaaaaaagaaaaagatgaacgtcataacttattaattgaactagaagaaaaaggatttaatactgtcaatatagaatataatctacaaaaaaatgtacctaatggatgtggtcttttggcgcttaattatattgatagtttacataatgaatggaataaatttaatcatgaaaaagaagatgatttaacatccacgatagaaacagtattacaaaaaacaggaaaagactttctaaacctaagttgtggtgagcaaaccacagctaaatcaaattttatttttaaagagagtgttttttga

SEQ ID NO: 306336 - DNA, 303 bp, Proteus mirabilis
atgagcgaacaagaaagcaaagaatttattgagagatttacagttaggatgcccacaggaatgagggaggagatagcgaagattgctgataaaaatgggcgatccatgaactctgaaataataaaaatattacaagaagctattgataaagaacttcacccagaaaaatgcattccagatgaaactttagctataaagctaaataaaatgactgacacgcttaacaggctagaactcatgttcacaagcgaaaaggaagcgaaagaggctgggcttgtaatagctagggacaagaaaaaataa

SEQ ID NO: 306337 - DNA, 171 bp, Proteus mirabilis
atgaaagaagcaaagccgagcgtattccctttaaggatacctgaaaacattaaactagcgattaagtcaaaagcagataaagaagggctatcaataaatgccgctattattcagcgattagtaaaatcactacaaggagatgagaaaaatgatagtaacacagcagtataa

SEQ ID NO: 306338 - DNA, 843 bp, Proteus mirabilis
atgagcacattaactgttcaaaatttaccacctgttcaacataacgggtttcgcgtaattactaccgagctcttagctaacgtttatgaaactgaaattaataatattcagcaaaattttaaacgtaataaaaaacgctttatcgaaggcaagcattacttcaagattgtcggtgatgctcttaataatttgcgactgacaatgagtcagttacaaatatcaaccaaggttagaagccttatactttggactgagcgaggcgcagctcgtcatgcgaaaatgttagacacagacaaagcatgggatgtgttcgaagcgctagaggatttttactttactaaaaaagaagatgctaagcaaaaaaccaactttcgccaatcaacagccaaagaactgatccctttacgccaaacagcagagcgcttaattgctcatggggttggtaatatttatcccgatatatggaaacatattcacaaagagttcggcgttgaacacatcaatgaactgttaccagagcagataccgctggcaatctcttatcttgatgctttggaaggtgaatacattcctaaacaggaagaaaatatactttttgagccaaatcaaaactcaatcactgtaaccatacccaaagaaggcagatggttggtttcttataagggtggcaagcaacaagtagttagcgttgatggtcataacgttgtcagtgttgaatacattcaaaaattacaacgtgactctaatgcgcttattgagttactgcaaaacttccgtttacgcacccaagttatgcaaggtgagaaaagcggagatattttaaatactccgttaattgcataa

SEQ ID NO: 306339 - DNA, 498 bp, Proteus mirabilis
atgagttcagagcaagaacaagataagcatcacacgataatgtcggaagaggaattaacaggggcggtcgctaaaatagaaagcgcagttgaagagaatccagctgttctcgagagactgttggaccgccctaaaataatgtcagttatccaaaaacgtgaaatattccacggacctctcccacacccagatcaccttaggcaatacgaagaaattgttcctggcatggctgagagaatactttctttcacagaggctgagcaacgcttcaggcatgaaacacaaaaaactgcactgaatggcgctatcaaaaaagacaaaagggggcaatggatggcttactccttgtcattgcttatttttttgcttggtgggtaccttatgtggaaaggtgagtatggtgcaggtgcggggctaataactatgaatgttattggacttgctggcgtttttgtttttggaagaaaagcaaaacaacctacccctgatgatgaataa

SEQ ID NO: 306340 - DNA, 204 bp, Proteus mirabilis
atgacagcaacaatgcgcagatatctcatagctatgggtagcgtaatggacttagctcctgctacaaattacagaagaatggcagctcaagggcgagaccaagaccgcctaaaaaaagatatcgaagccgtagggaaagatatgagcaaggctatttctcaacttgtgagtgaaagtgatgagttcagagcaagaacaagataa

SEQ ID NO: 306341 - DNA, 225 bp, Proteus mirabilis
atggcaattgactacattagttctgctcgcgctcattttggtatgaatcgagaggaagccgaacagttaaccatgactgaatttcagatgatgctcaaagctaaataccctgatgagaagggtttcaccaaagaagaatatgacaacatcatgaagcaagatgataagcgtaataatgagctgatcagtggtaagcgcagattggtgagtaggaagagaggataa

SEQ ID NO: 306342 - DNA, 234 bp, Proteus mirabilis
atgaaaaatcttgctgaactaactcaagaagaaaaagacaagattaatgtcgatttggccgcaagtggtgtcgcatataaagaacgcctcaatatgccagttgttgcgtccgaagttgaacgacaacaaccagcacatttgcgcgagtattttaatgaacgattagcgttttatcgtgagagaagtaagaagttgccggatggaaaatcggtgcagtatttgaagacagaataa

SEQ ID NO: 306343 - DNA, 2349 bp, Proteus mirabilis; identical to SEQ ID NO: 298205

SEQ ID NO: 306344 - DNA, 204 bp, Proteus mirabilis
atgacaactgaaccaataatcatagctccagatggtttcactaatgaagatatcgcaaagtggatgagggccaagttgcagtgcatagattatctccctgttttacacggtaagcgagaaagactaatgagcgatgtaaaaaagctagatgccgaaatagcagagtacatcagtaaaagcgctattcagatacaaagtaaatga

SEQ ID NO: 306345 - DNA, 123 bp, Proteus mirabilis; identical to SEQ ID NO: 303939

SEQ ID NO: 306346 - DNA, 396 bp, Proteus mirabilis
atgccaacaggtaatagacaaggagcagcaagagagatgaaacttaaaaatattttagatgccatgcggtgcggagctaactggttatttggaatgtatcagcgtccataccttaaagagtgggatgattatctaaattacctgatcgacgaatgcagtattgctgatgagcgtgattgcgtaatcacatttaatgatggcggtgaaaaagtagaggtttggaaagaaaataaatactacgcatatggcaatcaacacaatgtttctagtggtgaggcgtatgagttcaggccgtcattcagaacgatgattaaattatcaaaccttgttgataatcgagagcaaaatcgagtgaatgctttcgccaatgagttaagacagaaggtaaaaaagtga

SEQ ID NO: 306347 - DNA, 183 bp, Proteus mirabilis
atgactgaaactcaaaaaatagcatggattggcagtagggtgttctctgcgagtgtttggtatgacacatcggcactaccaaagaggaggagactgtatgcaaaagcaagggagcttatcgcaggagatagagctgaaatgatatgccaacaggtaatagacaaggagcagcaagagagatga

SEQ ID NO: 306348 - DNA, 1122 bp, Proteus mirabilis
atgggatcctggcaaaagctgattgccaatttagccgaaatttttgttccattattacctatcttaatttgcggcggtttattattaggattaagaaatgttattggcgaaatgcctatatcagataataaacccctcacttatttttatccttggttaacgccaatatatgattttctctggttaccttgtgaagccatcttccattttctacctgtgagtatttgctggtcgagtgtaaaaaagatgggtggtacacctgcactaggtatcgtactaggtataactttagtttctccacaactaatgaatgcttacaatttaggttcacaaattcctgaggtttggaattttggtttatttactattgagaaagtaggttatcaagcccaagtgatcccttcgattttagcgggactatttctgggatggtttgagactaaattacgtcgttttatccctgattacctaaaattagttattgtgccgattgtaactcttattgtcgccgtttttgttgcccatgttattttaggccctatcggtagaagcataggtgatggtctcgcccaactgatcaaatttttaatgttaggtgattttgcccctattggttcaactatttttgcctttttctattcccccatggtgatcaccggcttacatcacacaacgttagcgatagatttacaaatgactcaaagttatggcggtacacctatttggccgattatcgctctgtctaatattgctcaagcatctgccgttgtaggcattattatcgttagtcgcaaattaaatgaacaagaaattactattccggcagctatctctgcttatttaggtgtgacagagccagccatgtatggcgtcaacttaaaatatggctttcctatgctgtgcgccatgattggcgctgcgctagcgggtttgatttgtggattaaataatgtgctatctaatggtattggtgtcggcggattacccggtattttatctatccagcctacttattggttagtttatttattagcaatgattgtggctattgtcgtccctattggattaaccattctggtctatcgctataaagaaaaagcaggcaccttgcaagtcgattaa

SEQ ID NO: 306349 - DNA, 327 bp, Proteus mirabilis; identical to SEQ ID NO: 27138

SEQ ID NO: 306350 - DNA, 240 bp, Proteus mirabilis; identical to SEQ ID NO: 272469

SEQ ID NO: 306351 - DNA, 369 bp, Proteus mirabilis; identical to SEQ ID NO: 27139

SEQ ID NO: 306352 - DNA, 417 bp, Proteus mirabilis; identical to SEQ ID NO: 277206

SEQ ID NO: 306353 - DNA, 645 bp, Proteus mirabilis; identical to SEQ ID NO: 277207

SEQ ID NO: 306354 - DNA, 735 bp, Proteus mirabilis
atgaccccatcaacgctacctaataaattatggcgttcgctggctgaagttaaacgttatgtagaaaaaatgccagatggcgttcctgaacgtgatttaaagaaaaaggtctctgcattcggtgcgttaaacagtaaagagcgctcccagttagttaaatttctagaatcaagggaaagcatcttgattctcagggcaattaagcatggtaataaaaaacctataaatatcctacgccataaaaaatatggttatccaaaatcaattgaggggtatcaataccccatagataaaaaatctaaaacttgcagcagatgcaaaaaagaaaagccacttacagattttcatcttaatagtacaaatagcgattctcatcaatcctattgcaaggaatgcgatacggctaatagcaaaaccagagactggacttctggtaaaaattacggaaagaaattaacgccaaaagagaaaaccaaaggtgatgatatgacgatgccatcaagccctgagcaattaagaaaacaagcggaagaattattaaaagccgcagagcaagcagaaaaaaatcaagcaacagaaaaatggaaagctgaatttaaacgtgaatttgaacagcaaaaactggaagttatgcaggcggtaggaatggcgaatcgtaagtttgatgaaatgatggacgcaatggctacgttaagtaaagttgccgataagttcaaatcactcaaagtcgaataa

SEQ ID NO: 306355 - DNA, 246 bp, Proteus mirabilis
atgggaaaaatgacattcgtagttgagtatgaggatggcaaggagccgtctgtaaacgcaggaacagaaatattcggcggtaagttgttatcggttggatttgatgattataaagacaaaaaactaactagagatgaaattaacgcaataaattacgcgttaaattttagcgagttcagagaagcttgtgaggagttcgaagttgactatgacgaactcgtcgataagttagattcctctctttag

SEQ ID NO: 306356 - DNA, 243 bp, Proteus mirabilis
gtgaccgaatatcaaattgaacgcatgaaaaatgaaatagccgagagaatggaagctcttgaatttctcagggatagcattggttgctttcctgaatacatggataaagtggcaactggacggttatttagaggctggcgatttgttaaggctctagatagcaatgagattctttttgctaattgccttcaacctgcaattactaaacgtgagttcgatttggtagtcggtggcaattactag

SEQ ID NO: 306357 - DNA, 216 bp, Proteus mirabilis
atggataaaaatgaactatgccctgtatgtggtgagggatatttgcatcatgagatggaagaaatagaagttagcatcaactcagttaaatatgtaattaacactaaatattcaatttgcgacagttgcgaatctgagatagcaactgaggatgacgctaggttcaataaagctcaagtcacagcattagaaagaaagtacaggactcaaacctag

SEQ ID NO: 306358 - DNA, 357 bp, Proteus mirabilis; identical to SEQ ID NO: 103758

SEQ ID NO: 306359 - DNA, 345 bp, Proteus mirabilis; identical to SEQ ID NO: 287507

SEQ ID NO: 306360 - DNA, 327 bp, Proteus mirabilis
atgctcgttggccgcggtggtgaccaggctgtgggtcaggccactcttggcatcgacaccaatgtgggccttcatgccaaagtgccactgattgcctttcttggtctgatgcatctccggatcgcgttgctgctctttgttcttggtagagctgggtgcctcaatgatggtggcatccaccaaagtgccttgggtcatcatgacgcctgcttcggccagccagcgattgatggtcttgaacaattgacgggccagttgatgctgctcgagcaggtggcggaaattcatgatggtggtgcgatccggcagggcgctatccagggataa

SEQ ID NO: 306361 - DNA, 276 bp, Proteus mirabilis; identical to SEQ ID NO: 101078

SEQ ID NO: 306362 - DNA, 231 bp, Proteus mirabilis
atgtcacttgaaaaagcgcatacgtcagtaaaaaaaatgacctttggtgaaaacagagatctggaacgagtagtaacagcaccagtatcatctggaaaaatcaaacgtgttaacgttaattttgatgaagaaaagcacactcggtttaaggctgcatgcgccaggaaaggtacatcaatcactgacgtggtgaaccagcttgtagataactggctcaaagagaacgaataa

SEQ ID NO: 306363 - DNA, 621 bp, Proteus mirabilis
atgaaggtgatctcatttctgaatccgaaagggggttcaggtaaaacaactgccgtaatcaacatagccactgcgttgagcaggagcggatacaacattgctgtggtagatacagatccacaaatgagcctgacgaactggagcaaagcgggcaaggcagcatttgacgtatttacagcagcatctgaaaaagacgtctatggaatccgaaaagatctggcggactatgactttgctattgtggacggggcaggttcactctcagtaatcacctccgcagccgtcatggtaagcgatctggtaattatccctgtcacccccagccctctggatttctccgcagcaggaagcgtcgttactgttctggaagcacaggcttacagccgcaaagttgaagcccgctttctgatcacccgtaagatagaaatggcaaccatgttgaatgtgcttaaagaaagtatcaaagacaccggtgttaaagcatttcgtacagctattacacaacgtcaggtttacgtgaaatcaattcttgatggcgacagcgtgtttgaatccagtgatggtgctgcaaaaggtgaaatagaaatccttacaaaagagatagttagaatgtttgagtaa

SEQ ID NO: 306364 - DNA, 648 bp, Proteus mirabilis
gtgactcataccgtaccgcaaagctttgtccgggcttatttacgcgcctcaacatctgaacaagacgcttctcgcgcactcgctgcgatcgatagctttgctgatgagcgtggccttaacatctgcaattactacatcgagaatgaatctggttcgcggctcgaccgaccggaattattcagactgctgaacgactgccgacagaacgatattctcctcattgaagatgttgatcggctttcacgcttaactggtgaagactggaacagcctgaagaagttgattcgccagaaggatattcgagtgatggccatcaacgtaccgacaacctggattgcttcagcgagccatgattttgatagtcgcatgtttgctgcaatcaacgatatgttgcttgatatgctggctgctgtggctcgtcgtgattatgaacaacgccgggaacgtcaaaggcaggggattaataaagctcaaaaggagggaaaatataaggggcgtcaggtcaatcaggctcgatacgatgcaattaatcggttgctcgatagcggtagttcttggagccaggttcagaaaattatggcctgtagtcgagggacaattagtagtgctgtaaaatcgagggaagataaacgtgctttgagtaagtag

SEQ ID NO: 306365 - DNA, 732 bp, Proteus mirabilis; identical to SEQ ID NO: 208918

SEQ ID NO: 306366 - DNA, 846 bp, Proteus mirabilis; identical to SEQ ID NO: 297450

SEQ ID NO: 306367 - DNA, 2280 bp, Proteus mirabilis
atgagtattagtcgtcgttcttttattaaggggatgggtataggatgtgttgggtgtacggtgggaagtttaccaccaggggccctcgcacttaatccagtaacatctcttaagggtcagtctaaattaacaccaagtttgtgtgagatgtgttcttaccgttgtcctatagaagctcaggttgttaataacaaaactgtctttatccaaggtaaccgaaattcaccacatcaaaaaactcgagtctgtgcgagaggaggcagtggtgttagccttatttatgatccgaaacgcattgtaaagcccatgaaacgcaaaggccctagaggtgccggagaatgggaagttattagctgggaacaagcttatacagaaattgccgaaaagatggcaagcatcaaacaacattatggtgctgaaagtatctttttctcatcaaaatcaggttctctttcctctcatttatttcatttagcggcggcatttgggtcaccaaacacctttacgcatgcatcaacttgtcctgcgggcaaagccattgctgcatcggtaatgatgggtggtgatttaaaaatggatctcgcaaattctaaatatattctttcttttggtcataatctttatgaaggaattgaagttgcagaaacctatgaattaatgacggcacaagagcgtggtgcaaaattagtcagttttgatcctcgattgtccgttgtttccagtaaagcaaatgagtggtttgctatccgaccaggaggcgacttacctgttctaatggccatgtgtcatattatggtaaaagaaaatctttatgataaagattttatagaaaaatttactgtcggtttccctcaattggtggaagtattacaagataccacgcctgaatgggcacaagctcactctgatgttcccgcaaaagatattattcgcataacacgtgaaattgcagctaaagctcctcacgcattagtcatgccaggccatcgcgcaacctttaataaagatgaaattaatatgcgcagaatgatcttcaccttcaacgccctactgggaaatattgaacgtgaaggtggcatgtatcaaaagaaagctgctgcaaaatataataaattagcgggcatcgacgttgcccctgaattagctaaaccaaccgttaaaggcatgcctaaaattacggcaaaacgcgtcgatgctacagcacctcaatttaaatatatcaataaaggcggtggtattgttcaatctatcattgactccacactccatggtgtaccttaccaaaccaaagcttggattatgtcacgccataatccatttcaaacagtaagttgccgacctgatctagaaaaaacagcccaaaaactcgacttaattgtcagttgtgatgtgtatttaagtgaaagtgcatcttatgcagattatctgttaccagaaagcacttatttagaaagagatgaagagatttctgatgtctctggtttaaatcctgcttatgcattaagacaacaagttgtcgaacctattggtgataccaaaccaagttggttaatttggatggaattaggaaaaaaactggggttagcaagttattatccttgggaaaacatgggagttcgtcaactttatcaagttaaaggggatgaaaatctctataaagagatccaccaaaaaggctatttatcttatggtattccgctacttttacgtgaaccatcctatgtaaaagcctttgttgcacaatacccagatgctatcaaacatgttgatagtaacaatatgatggaaaaatctctttcttttaaatcaccaagtggtcttattgagatctattcggaagagttagaaagtctattagagaattatggtattcctcgtttccataacttcccattaaaacaaaaagatgaactctattttatccaaggaaaagtcgcagtacataccaatggtgcgactcaatatgtacctttattagcagagctaatgtggaaaaatcctgtctggttacatcctgataccgcaaaaagtcatggaattaagcatggtgatgagatcattttagaaaatagcgtaggcaaagaaaaagcccatgccttaattaccacaggtattcgtcctgacacagtgtttgtctatatgggttcaggctctaagaccggcgaaaaaacgccagcaaccacaaatgggatccactgcagtagtttattacctcatgaaattagccctgtttcaggcactgatgtacatacttcaggcgtcaaaattagtctggcttaa

SEQ ID NO: 306368 - DNA, 1101 bp, Proteus mirabilis
atgagtaaattaagagtcgctattatttttggtggaaaatcaaccgagcaccaagtttcattacaatcagcaaaaaatattatcaatgaattagatcgaacgaaattcgacctttgtttaattgggattaatgaacaagggcaatggcatgaatatgctgaagacaattatttaattaatagcgataacccctcaactatctcattaagccaacctttgcgtccagtggctattattcctggcagtacccgtcagcaatttatctctttaactgatgggcaacctcttgcacaaatagatgtggtatttcctattgtgcatggtgcttatggtgaagatggcaccctacaaggactattacatatgattgatatgccatatgtaggccctaatatcatgagttctgcagcatgtatggataaagatatcactaagcgcttactggatgatgcaggattagcggttgcaccatttattacactgatggctcaccaattaaatgatatttcctataatgaagttgttgaacaattagggctccctttatttattaaaccagcaaatttaggttcttctgttggtatcagcaaagtcaataatgaagccgagtttaatgctgcattatccatggcatttgaatatgaccttaaagtgattatcgaaagtgctattgttggccgtgaaatagagtgtgccgttttaggtaatgaagagcctgaagttagcccttgtggtgaaattgtgttaaatgatgctttttatgcttataacacaaaatacattgatgacgatggtgcaaaagtagtagtacctgctgatttagataatgcgattagcttacatattcgccaaacggcattgaaagcttaccaagttttaaactgtttaggtatgtcgcgcgttgatgtgtttttaactgaagataatcaagtcattatcaacgaaattaatacattaccaggtttcactaatatcagtatgtatcctaaactgtggcaaagtacgggattagattatcaatcactcatcacgaaattaattgaattagcgctagaacatcataaaaaaacagccgtattaaaaactaagtgtgagctttaa

SEQ ID NO: 306369 - DNA, 1119 bp, Proteus mirabilis
atgacgactatttttgatgttgtacaagctatgtcagggcagaaaaacgtcattgttattcctgttccctatttagatttttttaagggggatcagcaagctcacgccttgtctgcaattttaaatcaacttgtcttctggtctggtgtttcatcaagtgctgatgatggttggttctataaaagccatgaagaactagcagaagaaattcatggtctttctggtgaagagcaggctcgacggctcgttgataaattacgtaaaaaatattttcccggtgtgattgaaactaagacaaaaaaggtcaatggcacgcccgttactcactacaagatagatggtaataagcttatctctatgattttcccgtctatttctgaaacgtcgaaagtgaggaatggaaacgtcgaaagtgaggaatcggaacgtcgaaactgcggaatggaaaccgcagaaatgcagaatcatggaaacgtcgaaagtgaggaatcctatctttatacagatcttaactcagataaaaacttacagatcagtaaagacctttcgtcgcagaattctggcgaatccagcgacaagccaaaaaatgattttttaactcgttatccagaagcagtaatttacagcactaacttccaaaagtggggggatgaaggtgatttaaaaacggcaaaatggatgtttggtcgtgttaaaaaactgaatccatccgcattagagcctacttggtgtgactgggcgaacgatattcgtttgatgcgccaaatcgatggacgtactcatgagcaaatttgtgccttattcgattgggctaacaaagattcattctggtaccaaaacattttaagtcctcgtaagttacgtaaacactttgatgaactattcgttcgtagtcaaaaaccaaaggatgagccaaaggttcaagttgataccgttgagcgtgacagtgctttctctcgcttgattggttctcgttctaaacctaaaaaccgtattgaagaaattgcgcttgaactagcgggtaaaacaggtattcgtcgtatgagtgagttttctggtcgccaagcatggaacagtatttggaagcaagcgacagaaatgtcacaggaggctcagtaa

SEQ ID NO: 306370 - DNA, 279 bp, Proteus mirabilis
ttgtttaagtgggtgcatgaccatatcggggcttttgaaaactgtgaaaaagtgccggtgacagaggctcatctgcgggctttacagcaggatttgcaggcactgacaccggaaaactgtcagacacgttttccgaccacagagggctttttctttggttcaacagcttatgatgaggcgtactgggctgatgtggaagacgtcagacgctggctgtcagagataacggagacgtttgattttgaagcagagtcactgtgttttgtggcctggtggtaa

SEQ ID NO: 306371 - DNA, 975 bp, Proteus mirabilis; identical to SEQ ID NO: 277240

SEQ ID NO: 306372 - DNA, 300 bp, Proteus mirabilis
atgtcaacatacgataatgagaaattaaagttaatacgtgagtctgaaaggcttaatgtcaaacaagcggctgatttagtcggaattaactatgttacatatcatggatatgaaagtggaaaagctaaaatgtctattgaatctgcaatgaagtttttcaaacatccccgttttagaaaatatcgagattggtttatgtttgatgaagtcaatcctgatgctgggcaaatcgcaccggcactcgcacacagtgggcaagacaacacgcaatcatcccactcagacaagaaaattggataa

SEQ ID NO: 306373 - DNA, 159 bp, Proteus mirabilis
atggttgatgtgcttaatgcggaagagcttttatatagagcgcagcaagatttaatcaaagccaaatatgattatattcaagcttgggcattattacatcaatataccaatacactagacattgaaagaataaaaattattgaaaactattttcagtag

SEQ ID NO: 306374 - DNA, 297 bp, Proteus mirabilis
ttgcgcagaacaaaaagctggtatgcgcattgggagaatttaaatacattttttgcttatcccgatgatatccgcaaagcgatttacacgaccaatgcaatagaatcactcaatagtgttattcgtcatgccattaagaagcgaaaagtattcccaaccgatgattccgtcagaaaagtgatttatctcgccatcgaatcggcttctaaaaaatggaatatgccaattcaaaactggaaacaggcgatgagtcgttttattattgagtttggtgaccgcctagacggtcacatttaa

SEQ ID NO: 306375 - DNA, 804 bp, Proteus mirabilis; identical to SEQ ID NO: 304112

SEQ ID NO: 306376 - DNA, 288 bp, Proteus mirabilis
atgaaaaaacgaacaaacagattttatactactgagtttaagcaagaagcggtcgcattagtcatcgaacaaggttatagcgtctcaaaagcggtagctgctttagtgatcaccaataaattactttataactggaaagcaaaattcgacgctgaacaatcaggtagcagcttgaatgttgatgagagagccgagctattaaggcttcgaaaagaaaataaagaacttaggatggagaaagagatcttaaaaaaagccagcgccctcctgctaaaggaaaccaagtag

SEQ ID NO: 306377 - DNA, 363 bp, Proteus mirabilis; identical to SEQ ID NO: 27106

SEQ ID NO: 306378 - DNA, 1230 bp, Proteus mirabilis; identical to SEQ ID NO: 302488

SEQ ID NO: 306379 - DNA, 1362 bp, Proteus mirabilis
  misc_feature (1347)..(1356): n is a, c, g, or t
atggcgcaacaagcaattaaaagagcaataacatattcggtcgtaataggtacacttctctcagggcataatgttattgcctcagaaagtgaaacgccactgctattaacatcagaaacacctgcattagtacccgcattcacagaagacgtggcaacacaagatacattaaattcaccatcagtgagtaagcaggaagttagcactaaactacaatcttggttaccaagcgaatataaaccactttactttaagcaactcgtggatgtttatcaaagcaatgatttagcactgatttggcaagatgaacaaattacaaaacaactagagcagcaactggcagaggttgccttaactggaattcaaccacaatttggacgttggttaacgctattagaaacagcacaattaacgccagaagcacgagatattattttatctgacgcttttttaggttatatcagctttgttgaacagattaatcaatcaggaacaacactgttatatcgcgctgcgatacaagcattaccggcaccaactgtgcaagctgtcgagcatttccaactcaatctacaacaaaataccttagggcgctttgtcgtctcctttgcaccctcacacccttactatccattaatgaaagaggaagtgcgcaaacagcttcatcaagaggttatttggcccgtcatggaagggaaaaattcattaaagccaaaccaatcggcagaagaagttattgcattaagacaaatattgcgtaacttaaatttactgcctcaattggctgaaaatgagcaagaagtagcaacaacgatttatgatgagcctttaattgctgctgtaaaatcgtttcaagcggcccatggattagaaactgacggtattattggtagacagacgcgtaattggttaaatatgacaccaatacagcgtgctggaattatggcattaaatatacagcggttacgcttaaccccacctattggtgacactggaatttgggtcaatattcctgattactccctctatttttatgctaataatcaactgattttagattcaaaagtgattgttggtcgaccagatagaaaaacccccattatgagtagtgcgcttaataatgttgtggttaatccgccttggaatgtacctacgagtatgacgcgtaaagatattgttccaaaaggaaaggctgatcctagttattttagccgtaaaggttatacgatttattcagggtgggggaatgacgcctatccaattaatccttacgatatagattgggaaaacatctctgcggctaattttccatatcgcatttggcaagcccctgggccaactaactcnnnnnnnnnnaactaa

SEQ ID NO: 306380 - DNA, 348 bp, Proteus mirabilis
atgccaaactctgaagcaatttatctgcatgacacaccaaaccacaatttatttactaaaaatatgcgagcaattagttcaggttgtattcgtgtgaataaagcggcgcaattagcgacgatattattaggtgatgcaggatggaaacaagatagaattgatgcagccttaaaacgaggttcaacacaatatgcaccaattccagaacgtatccctgtctatttatattatcaaacagcttgggtagcagaagaaaatgcccctcaatatcgagcagatatttataattatgaccaaagcattaataatgcaacctcttttttagagaatattaagaaatatttgtaa

SEQ ID NO: 306381 - DNA, 741 bp, Proteus mirabilis; identical to SEQ ID NO: 190889

SEQ ID NO: 306382 - DNA, 441 bp, Proteus mirabilis; identical to SEQ ID NO: 277214

SEQ ID NO: 306383 - DNA, 873 bp, Proteus mirabilis; identical to SEQ ID NO: 277180

SEQ ID NO: 306384 - DNA, 342 bp, Proteus mirabilis; identical to SEQ ID NO: 27125

SEQ ID NO: 306385 - DNA, 261 bp, Proteus mirabilis; identical to SEQ ID NO: 27108

SEQ ID NO: 306386 - DNA, 513 bp, Proteus mirabilis; identical to SEQ ID NO: 277237

SEQ ID NO: 306387 - DNA, 582 bp, Proteus mirabilis
atggcgctgacgatggtgagtcttatcaactccatcaacaacattgccgagcgggatcagtacctggcgcgggacattaattttgtggtggatgaggcacatatcgtgacggtcaatccgctgttgtccccctatgtgaccaaagtggtgaaaatgtggcgaaaactgggggcctggctgtggctggcgacccagaacctggatgactacccggactgtgccgagaaaatgctcaatatggcggagtggtgggtgtgtctgacgatgccacagaaggaagtggaggcgattgcccgttttaagacgctcagtgaggagcagaaacaggtgctgttatcggccagtaaactctccggctgttacacggagggcgtggtactggcccggaaagtggaggccctgttccgggtggtgcagccgagtctgtacctggcactggggatgacggaaaaagaggagaagcagcaacggcgtgtgctgatggaacgctatggatgcagtgagctggaagccgcgttccgggtggcggatgagcttgaccggaaacggggattaccgtcccgcagaagggaatgttgctaa

SEQ ID NO: 306388 - DNA, 438 bp, Proteus mirabilis
gtgcagtcagtaaaatcattacggacctggcaacaggcgcttaaaaacggtaaagatcgcgttcatgtggtttttgggacaaaaggaggcagaccccgtgaagcattagtgccggataaagcccgtgtattaacattaattaataaagccattgaatatgcggataaacataacggttatttaattaatcgtccgtcattacattctgccaaagatcgttatattaatgtgatgcgacggataggcggatttattcacgaagaatcaaatcatggtttacggtatgcctatgctcaggatgttgaaaaatattatctcagtcagggattcagtcaaaaggaagcctatgcattaacctccatggatttagggcatggtgacggtcgtggcgattatattaaacgggtttatagtcagaaaggagatattgaggaataa

SEQ ID NO: 306389 - DNA, 198 bp, Proteus mirabilis
atgacgcaagatgaacaaaccttacttatgtttaaaggaatagttgctgaactaccagaacaaagcagagctaaggttgaacattgtattgctgaaataaacaagttgcttgcggaatatcctgatggtgaagcattgcttgctgtgggctatatcggtgccgaacagcagatgaaaggtaatattggtcaaggataa

SEQ ID NO: 306390 - DNA, 351 bp, Proteus mirabilis
atgccacctcgcatacctcgcgcatgtcgtaaacagggatgcgccaagacaacaacagaacgtaacggttactgtgaagatcatcaaaacctaggatgggaagcccaccagcgcggtaagtctcgtcatcaacgtggttatggtgccaagtgggataaactgcgagtgcgtatactcaagcgtgataagtatctctgtcaagaatgcttaagggcaggacgagccaccgaagcgaaaacggttgaccatatcattgctaaagcacatgggggtaccgatgcagaagagaacctgcaaagcttatgctggccttgtcacagagctaagacagcaaaggagagaacgttatga

SEQ ID NO: 306391 - DNA, 1005 bp, Proteus mirabilis
atggatgttataaaaataaccaacctatctgaggtttcgttagttataaataggattatagcgggcgaacaattagatatagatcaaattgacttatcggaactggctaatgtaaaaattaaagcttttggtgaaggagaccagtttacaggtcaattaacatcatcaatttgtaatggattaagagacttccataatgagcttctaaaggtttactgtattattaggtatggttctgataacctaagatacctaaaagactcagaaaaagaagctttagaagtaatattcaagatagaacccggttgcactcagctattagcagaattcaaagatgcagtaactgcgtgcggggatgcgttcaaaaaggtgaccgaaggcatgaatggaaatttaaaagctacctgctatatagtgacagtgctcacaattgctgggtacttcgcttttgacaaccattcaactagacaggcagacatagataaacaaaaaacagagttatcaacaactgtagagttacaaaaaatactcaaagatgggatcattgaagctcttgaagtcaatggcgggaagccggctattcttgatgaaatagaagccaagtcatcgcaagcgtatgaaaaagcactaaaaccattctctaatgctgataaagtagaagtctattcagcaggaaaggaatcaactcttggaaataaagagcttaatgaattcttagcaaaccccaccccaaaactagaaacaaaagactctatcaaaaatttagagatagaggggataaagcgcagccccgataaactgactgtaacttgcagtgaaaaagggacagatatttcatttacgctttacgttgacctaagttttattactcaaacagaagttgatattttgtttgatgcattcaagaaaaataaacctgtcacagttcaaggaagttataaggaacgctctggcttaatagaaagagccaatgcttcaacgataactcattaccaacagaattag

SEQ ID NO: 306392 - DNA, 906 bp, Proteus mirabilis
atgtcatcagtggtgcgtaaagtaagaaaagcggtgatccctgttgcagggctaggaacaagaatgttgcctgccaccaaagctatcccaaaagagatgctacctgttgttgataaacctttaattcaatatgttgttaatgaatgtatagcagctggcatcaatgaaattgtgctagttacacactcttcaaaaaattctattgaaaaccattttgataccagttttgaattagaagctattttagaaaaacgagttaaacgtcagttgttggaagaagtacaaggtatttgtccaagtcacgttactattatgcaaactcgccaaggaatagcaaaagggttaggccatgccattttatgtgcaaaacctttggtgggtgatgagcctttcgctgttatcttgccggatgttattttagaccgatatagtgctgatctgactaaggttaatttaaaagagatgctttctcattttgaacaatctggcgcaagtcaaattttagtagagcctgttcctgaagaggaagtatctaactacgggattgttgactgcatgggagaacatttacagcctggcgacagtaaacccattactcgtgtggtagaaaaaccgaagaaagaagaagcaccttcgaatttatctattgttggtcgttatgtgttgtctgaaaacatttggcctttattagccaaaaccgcaccaggagcaggggatgaaattcaattaactgacgcgattgcaatgttaattgaaaaagagcctgtagaagcttatcacctacaagggaaaagccacgattgtggtaataaattaggctatatgaaagcttttgttgaatatggtttacagcacgaagagtttggcgaagagttcacgaaatggataaaatcactgcaagcttaa

SEQ ID NO: 306393 - DNA, 462 bp, Proteus mirabilis; identical to SEQ ID NO: 298454

SEQ ID NO: 306394 - DNA, 696 bp, Proteus mirabilis; identical to SEQ ID NO: 305028

SEQ ID NO: 306395 - DNA, 441 bp, Proteus mirabilis; identical to SEQ ID NO: 103771

SEQ ID NO: 306396 - DNA, 966 bp, Proteus mirabilis
atgggctggaacagtgatctgatgtgcggcaattttgatatcaaaaccacggtgggcaaccagctgaacggggtgacggccggctttaagaatctgatgagtgaggtgatccagaatgccaccggggcggtggccagtctgccggcgatggctatccagcgggcgaatcccggtctgtatgaaatgttgaccaacggggtgttgcaggccaatgtggcgtttgataaggcgcagctgaactgtcagaacatggctaaacggatgatggacttttcagaaaataatcagtggacgcaggcggcgatcctcgaagaagcaaagaatatcatcaataacagtgacggggatgcggtaaaaactgaccagcaaattcagcaaagcagtggcgataaaggggttgtatggataggcgggaaacagcgcggtggggttggtcagcctgcgattcagccggcgcaggattttgcacaggccggctttaatatcatgaacggtctgccggcaaccagtacggccccggtgccggccggccagtgtaacggagccgcttgcaggcgctttgccaacagtgaggaagccgctcaggtggtcacacaggtgctgggcagcaaatcggtccgcacctgcaccaatccggcggattgtcagagcggcggtgaggcggagcaaccgggcagttcccagccaggaaccgggctggcaccggtgctggagaccaccacccgggaaaatttggaacagctgcataaactggtgaacagccggggcgcggtcggggcggcagagttggcgaaactgaaaaccggcagcctgacggtctcccggggggtgattgaagcgctgcgccgggatccggataaaacggcattaacacagcgtctggccggtgagctggcgatggcggacacgatggagctggcgctgacgatgcgccggatgctgatcaccggccagacgctgtgttaa

SEQ ID NO: 306397 - DNA, 375 bp, Proteus mirabilis
ttggtcctaggattaggtttatcactgctatctataaatgcctatgcggtaacatgggatgaattggaagcagtaaagacttcagagggctcgtcaccttttgaggggtgtaatgaatatattatgtgcgagcttttagcagagaaaggacgttatagcgtggtaaaaactcagctacctagagattgtgaatcaggtgggatttgggctgttaacgttaagaagaaacaagcggtctttatgcctaatattactaactgtgattttgatattgaaaaaaatgcagtggttatttatccacagcaaggatatgccaatatttatcaaggtagcacaaatgcaacaccaagtatcagtgaagtcgagttaccttaa

SEQ ID NO: 306398 - DNA, 756 bp, Proteus mirabilis
atgctattaaaaaaaatatttttagtgtcttttttattccctactctctcttacgctaataccttaccaacatcaaatatagataattcactaactcccaaccatgataatcttgcccgtttttcactcggtgacaatagtcaagcatccggtagcggtgccacagctataggtatcaatagccaagccaccaatactcgtgcggttgctattggttatggtgcattagccaatgaggaaaatacggtttcatttggcaatagtgaagagaaacaaacagcacgactcaccaatgtcagtgaaggtaaaaataatactgatgcagtcaatctggcacaaacaaaagcactacttagtaaaaataaaaggttaattgatagccaaataaatgtttttagaaatcaaactaataataacttaaacaccatcaaaaaaaacatccatgagtttgatgattattatcgaagacgccaagcatcaattaccgatgcaattgaagcacttgataaaaaagttatttcattagaaaaaaaagtctatgcaggtattgcttcctcaattgccatgaccaatattccttatcttactcatcatacttttagtggtggcatcggtattagtaattatcgtactggcatagcacttgctggaggtatccaatatcagccaaataacgatatagcatttcgatttaactcatcaattaatagtgaacaagagcttatttttggtggcggattagcttatggctggtga

SEQ ID NO: 306399 - DNA, 153 bp, Proteus mirabilis; identical to SEQ ID NO: 299306

SEQ ID NO: 306400 - DNA, 486 bp, Proteus mirabilis; identical to SEQ ID NO: 27141

SEQ ID NO: 306401 - DNA, 771 bp, Proteus mirabilis
atgttgcctgatagcatgagaggatttgcacctacgataaagggtattgcgaatagcaatgctattgttacagtcaagcagaatggttttgttatttatcaaatttctgtacctccaggtgcatttgaaataaaagatctctatgccacatcaagtagcggtaatttagatgtcacaatcaaagagaataacggtaaaattacacaatttgttgtaccttattcaaatgtgcctattttacaacgtgaaggacgcttaaaatacgaattgattggaggggaatttcgtagcggagcagattatcaagataaacctaattttggtcaattaagtttagtatatggcttaccttataatatgacgttatatggaggaagccaattttcaaataattatcaagcctatgcgattggtttaggtggtaatctaggcacctttggggcgatatcagcagatgtaatacaggcgaatagtatattgccaaacgatgagcataaaaaagggcagtcattccgattactctatgctaaatcgattaatagcacaggcactaactttcaaataatggggtatcgatattcaacgcaaggctattataccctaaatgaagttagttataaaaaaatggcagggcgtgaaatagtaacagataatggaataataagagatgaggataacttatctaactactataatttaaattattctaaaaaagggaggtttcaacttaatatctgtctcttatacacatctgacgctgccgacgaatag

SEQ ID NO: 306402 - DNA, 276 bp, Proteus mirabilis
atggttcttgcttttgtccgtctggatattggcgagcacccggacgaagataattttccgccaaacttctggataatcagtgccgttgcagagcaactgggcgcgttatctgtggaggctgattttacccgtccacatcttgagaaaatggtccgcgctgtctggaaagcggctgagcaaacgccttatgcgtctgactttcgccgtatctacaacgatgcgatcaaaaatgcacagtttgaagatccggttgaagcgctgatgtttggtgcttaa

SEQ ID NO: 306403 - DNA, 657 bp, Proteus mirabilis; identical to SEQ ID NO: 287490

SEQ ID NO: 306404 - DNA, 363 bp, Proteus mirabilis
atgtggggaaatctctatccgcgcagcggttttgtcaaccagcaggacggggataaagcggcggctgtggtggcgcagcgcgtggcagatattatgacccgcaccgggcaggcgcatacctatgtgcccctgaaaggcaaccgccgggatggctattggccgccggacgcggtgacggagaataccgggacaaaaaaccataaatggcagcgcctgtcgccggggctgaaaaacagctgtgcggtgtttccggatgagggcggagcacaggcacaggacggtaattatgcctgggcattgtggcagccgtacagctgctgcaagcgcatggggcaaaaatttttgtacagcacaacgttttaa

SEQ ID NO: 306405 - DNA, 597 bp, Proteus mirabilis
  misc_feature (532)..(541): n is a, c, g, or t
atggataaaattatgattaaaacccctgaggaaattgaattaatgcgtgaatcaggtcgtttattagcccaagtttttacaatgcttgatgattttattgtgccaggtgtttccacattagaaattaacgataaagtagatgattttattactcatgatctgcaatcgagacctgcaagcaaaggacaatatggttatgagtatgtacttaatacttcaattaatgaggtagtatgccatggtgttcctaaagccgatgagctattaaaaagtaaagatattattaatgtcgatattacactagaaaaaaatggttttattgctgattctagcaagatgtatgtcatgccagatgcctcacctatagcaagaagattagtcaaaacaacttaccaagcgatgtgggaaggtatcaaagaagttaaacctggtgcaacactcggtgatatcggtcatgcaatccaaagctttgcacaaagtcatgggtatagtgttgtaagagagattgtggacacgggattggtcgagaaannnnnnnnnngcacgaagcccctcaagtattacattatggtattcgaggacaaggtgttgtactaa

SEQ ID NO: 306406 - DNA, 390 bp, Proteus mirabilis
atgccattacatttttctggtaggatttttgcgtctcttttattagctgggacactattaacaggttgcgataacaatgataacaaccgttatgcaattaaagtgggggtgattaatggtgcagagcaagatgtggcagaagtcgctaaaaaagtggctaaagaaaaatatggtttagaggttgagctggtgggttttagtggctcattgttacctaacgatcccactgcaaacaaagaattagatgccaatgtgttccaacatcgccctttccttgagcaagataatcgttctcgtggttataaccacgagaacgattatcttgctcaaggaaagggcgatgttggaacacattggcatctaattctttgtttgcagtgggatcgttag

SEQ ID NO: 306407 - DNA, 390 bp, Proteus mirabilis; identical to SEQ ID NO: 306406

SEQ ID NO: 306408 - DNA, 219 bp, Proteus mirabilis
gtgggtgaaactaagacatttaccgtcaaatttaccccaaccgatgcgacgaacaaaaactacaccgctgtgagcgataagccgaactttgcaacagttactcagcttgtgaatgtagtcaccgtgcgtggtgttgctgaaggtactgcaaatatcactgtcacatctgaagatggtagtaaaacagcaaaatgcgtggtcactgttaccgcagcttaa

SEQ ID NO: 306409 - DNA, 276 bp, Proteus mirabilis; identical to SEQ ID NO: 299392

SEQ ID NO: 306410 - DNA, 666 bp, Proteus mirabilis
ttgaaaccgtcaaacagttcaaaatgcgctgttctgaacgggtcaaaatggcctgatcttacagagaatacaacagagattacttcagagagtacaacagagactacaacagagactaactcttcttgtcaggttcctactgaacccgacaacgctcctgaaaaattaattttggattatttcaacaaggtgacaaattccaaatatcgtgaaggaaaaacaacaaccgggcatatcaaggcgcgattagcagaaggatttacctctgaagacttgatattaattacggattacctgacagctaaatggcaaaaagatcccaagatgcgtgattacttacgccctaaaacattatttgttcctgaaaactgtattgaataccaagataaagcgatcaaatggcgtgatgcagggcgccctgaatgtgtgaatggtcgttggttaaagtctggagaagtttcagtggaaattaacacggttgaacgcgatgaaacttttagaaaaatgttcacctcaggctggaaacctgaaaatcgtattcaagcattagcagtcgagcaagcaaagaaaaatggtcttggtcgtatgagtgaagttgctggtttagcttcattccgtggtatctggaaacaggcgacagaacaagttgcactggaggctcagtga

SEQ ID NO: 306411 - DNA, 576 bp, Proteus mirabilis
atgacggcagagtgctattcagaaatcaaagctattgttcatagtcaccctgacggaaagcctttcctgagttctggtgatagaacaatacaaaggaaaacaaatctgccttggtggttggtatgtgatggagtgatccataagttcaggccaatagcgccactattaggtagagagtttaaacatggtgagcaggattgttattccattatacgtgatgcctatcatctgtcaggcattcagctagatgattttattcgtcccgatgaatggtggtacacagaacaaaatctctatcttgataacacggacaagcagggattttatcaagtagaagaggctcaagaaggcgatatgatattgatttgcttaggaacatcaaaaccttgtcacgctgcgttgtacttaggtaatcaagagatattgcatcacaggccagacagattgagtaagcgagatacttacggtggttactggtttaaatacactcacagcatttggaggcataaacaatggtcaaattacagtttgcaggctatttacgcagatttggacgcaggttcgagcttgaggtaa

SEQ ID NO: 306412 - DNA, 306 bp, Proteus mirabilis
gtggtgtatctggatgcgcctgaacgcctgctggatgaggccctgcttcagccggggacggaactgagtgaagcggatgccccgcacatcaccgccctgttacaaagtccggcctggcaggccagagaaacggcattacggcaggcttatcagggcgtggttcaggcctggcagctgggggtgtcatctctgccggcggtcgtcgttgatgcgcagtgggtggtttacggcaccaccgatattgcacaggcggtgacgcagatacagcagtaccgggaacaacaggaaggaggaggtcaaccatga

SEQ ID NO: 306413 - DNA, 165 bp, Proteus mirabilis
atgacgaaaggaaaaaccgggcgccggttatggccggtgctgaaagtaaccgggctgaccctgctcagtatggtggtgttgctggcggtggctcagctggggctgagttattacggtgaggcggacagtctgcgccgggccgtctcactgactttcgggtggtga

SEQ ID NO: 306414 - DNA, 480 bp, Proteus mirabilis
atgcagttatcccgtagtctgggattgagaaatgaagaagccgtgcagtcagtaaaatcattacggacctggcaacaggcgcttaaaaacggtaaagatcgcgttcatgtggtttttgggacaaaaggaggcagaccccgtgaagcattagtgccggataaagcccgtgtattaacattaattaataaagccattgaatatgcggataaacataacggttatttaattaatcgtccgtcattacattctgccaaagatcgttatattaatgtgatgcgacggataggcggatttattcacgaagaatcaaatcatggtttacggtatgcctatgctcaggatgttgaaaaatattatctcagtcagggattcagtcaaaaagaagcttatgcattaacctccatggatttagggcatggtgacggtcgtggcgattatattaaacgggtttatagtcagaaaggagatattgaggaataa

SEQ ID NO: 306415 - DNA, 306 bp, Proteus mirabilis; identical to SEQ ID NO: 306412

SEQ ID NO: 306416 - DNA, 504 bp, Proteus mirabilis
atgttacatcaagatatgatcaataaactcaatgaacagctgaatcttgagttttattcagctaacctttacctgcagatgagcgcttggtgcgatgataaaggatttgatggtgctgccaaatttttaaaagcacattcccgtgaagaaatggagcatatgcaacgtttatttgattatttaagtgatacaggtgctatgcctttgttagggactattgaagcaccacccgctgaatttttatctttatctgatttatttactaaaacttatgagcacgagaagtttattacagctgaaattaataaacttgctcacctagcaatgacaacacaagattactcaacatttaacttcttacaatggtatgttgctgaacaacatgaagaagagaagttatttaaatctattctagataaacttgctatggtcggtgatggtggtaaggcattgttcttgttagataaagacttaagtgctctttctacatccgcgcatatttaa

SEQ ID NO: 306417 - DNA, 480 bp, Proteus mirabilis
atgcagttatcccgtagtctggggttgagaaatgaagaagccgtgcagtcagtaaaatcattacggacctggcaacaggcgcttaaaaacggtaaagatcgcgttcatgtggtttttggtacaaaaggaggcagaccccgtgaagcattagtgccggataaagcccgtgtattaacattaattaataaagccattgaatatgcggataaacataacggttatttaattaatcgtccgtcattacattcagccaaagatcgttatattaatgtgatgcgacggataggcggatttattcacgaagaatcaaatcatggtttacggtatgcctatgctcaggatgttgaaaaatattatctcagtcagggattcagtcaaaaagaagcttatgcattaacctccatggatttagggcatggtgacggtcgtggcgattatattaaacgggtttatagtcagaaaggggatattgaggaataa

SEQ ID NO: 306418 - DNA, 480 bp, Proteus mirabilis
atgcagttatcccgtagtctgggattgagaaatgaagaagccgtgcagtcagtaaaatcattacggacctggcaacaggcgcttaaaaacggtaaagatcgcgttcatgtggtttttgggacaaaaggaggcagaccccgtgaagcattagtgccggataaagcccgtgtattaacattaattaataaagccattgaatatgcggataaacataacggttatttaattaatcgtccgtcattacattcagccaaagatcgttatattaatgtgatgcgacggataggcggatttattcacgaagaatcaaatcatggtttacggtatgcctatgctcaggatgttgaaaaatattatctcagtcagggattcagtcaaaaagaagcttatgcattaacctccatggatttagggcatggtgacggtcgtggcgattatattaaacgggtttatagtcagaaaggagatattgaggaataa

SEQ ID NO: 306419 - DNA, 225 bp, Proteus mirabilis
atgagcaatcagaatatcaaagaaattaaagatagtgatggtaacgtgaaatttagaatagcgaaaattggagtatttgacacatcaccaacaccatcaatagaagatttagtgaaaagaattgagtcactggaaaaacagctcgctgatatgcaaaaggcaacgagctgtgatttagatatactaagcacgcgaattactgcagtcgaaagctttagccgttag

SEQ ID NO: 306420 - DNA, 438 bp, Proteus mirabilis
gtgcagtcagtaaaatcattacggacctggcaacaggcgcttaaaaacggtaaagatcgcgttcatgtggtttttgggacaaaaggaggcagaccccgtgaagcattagtgccggataaagcccgtgtattaacattaattaataaagccattgaatatgcggataaacataacggttatttaattaatcgtccgtcattacattcagccaaagatcgttatattaatgtgatgcgacggataggcggatttattcacgaagaatcaaatcatggtttacggtatgcctatgctcaggatgttgaaaaatattatctcagtcagggattcagtcaaaaagaagcttatgcattaacctccatggatttagggcatggtgacggtcgtggcgattatattaaacgggtttatagtcagaaaggagatattgaggaataa

SEQ ID NO: 306421 - DNA, 276 bp, Proteus mirabilis; identical to SEQ ID NO: 299392

SEQ ID NO: 306422 - DNA, 327 bp, Proteus mirabilis; identical to SEQ ID NO: 103752

SEQ ID NO: 306423 - DNA, 384 bp, Proteus mirabilis
atgcctgaacttgtgctcacattgccatttccacctagcgttaactcgtattggagaaatattaagggccgaacgctgatcagtgaaaaagggcgtaagtttcgaattaacaccatcgcctctgtctatgagcaactaaaacgaaaacctaaagctattaaagaaaatgtctctgtcctagttcgtttatacccaccaacaaaacagcgcagggatattgataactttttaaaggccccatttgatgcattaacacatgcgggtatttgggaagatgatcagcaggtaaagcatatggatgtgatgttaatggaagtcgtaaagggtggaaagttagaaatcactatccgctcatttaataacgtgatgtacggtcacgaataa

SEQ ID NO: 306424 - DNA, 177 bp, Proteus mirabilis
atgaaaactaactattacagcgctatgcgtgattgcatggcggtgcgcatcactacgccttttttacaactcgcacgtcaagcggcaaggattgccgtctcaaccaataacaagaaagtttggaaattagcgattcaactacagatgagagcttatgggagaaaagtatgtcactga

SEQ ID NO: 306425 - DNA, 294 bp, Proteus mirabilis
atgcttggcgctggcggtgttttagttaacatggttgccaatcccgcggcggccacacctacaccagcggcaaataatgcggtcgatgtcatcgttgccaaaaatccgcccggtattaaaaacgatgcgccaattaaagcagctccaccaataatgcctagccacccgccagatttagcaccaccaactatggggacgatcgtaataacatcaccttcatttaatggcgtacttaatcccgtggaaatactatcctcggtcatatcattacctgcgatacgaacgcgaaactga

SEQ ID NO: 306426 - DNA, 153 bp, Proteus mirabilis
gtggcacacggacgtgaaagtgcattggaagctggagagagatataccattgatgaattagcaaatatatataatgcagctgatgaagttgttacagcttttcttttaaatctaagtgctcattgtaccaatcaaaattatattaaaaggtaa

SEQ ID NO: 306427 - DNA, 759 bp, Proteus mirabilis
atgaacagaaaaatatcagaatcagataaaattgccgcccgaaacttacgaaacatttgggaagcaaaacgagaatctctgggcttaactcaagaaaaagccgcagagattatgggatttgctactcaaggggcagtaagtcagtatttaaatggccgaacagccttaaacactgatacaattttaaaattcgcatcattattgaaagttgatcctgaagatattaatccagagctaaaaacgttgttagactacgttaggcgaacaggaaaagaagaagaaataaaacaaataacctcttctacatcaactcaaaatgaacatacgactttaagactgatggatgtatatgcaaaagcaggccctggtggctttataaataacgaattccctgacactataaaatctattgagttctctccagaaaaagtattcgatttattcggtagaaaaagtttaaaagggattgaaataattaacattagcggtgacagcatgtctccagcaataaacccaagagatgtcgtttttgttgatactcataatgaattttttgatggcgatggtgtttatgtgtttagttttgaaaattcattatttataaaaagattacaaagagttaagggcagaaaactagctgttaaatcagataatcctgcttatgaaacgttttatattgaagagtcagaaatgtatgatctccgaattattggaaaagtaataaaatcacttcctattaaaatgattgattttgcataa

SEQ ID NO: 306428 - DNA, 234 bp, Proteus mirabilis
atgaaaaataatttagaggatttacataatcatttatttgcacaattagagcgattatcagatgaagaactaaaaggtaatgagttaacagaagaaattaaacgcgctaacgcaatatcttctgttgcgtctcaaattataaataatggtaatttagctctaaatgttggtaaattaaaatataacgatcaaatacaaaagccacctaaatacttagaggtgaaaagtgtctag

SEQ ID NO: 306429 - DNA, 591 bp, Proteus mirabilis
gtgtctagattttcttatacagaagatatgaaagtttggatgagtaataattatttattattaccggatgatttaattgaagagtttaaaaaggaatttggtgaactacgaacattcaaatcacttcatagttttcgtaaaagattaggattgaatacaggaagaacagggaagtttattaaaggacattttcctgttaataaaggtactaaaggattgactggcgcgaataaaacatcatttaagaaaaataatcgcccttttaattatcaacccataggcgctgaatcaacaactaaagatgggtatataaaagtgaaaactgctgaaccaaacatttggaaattaaaacatcgtttagtatgggaacaatataatggaaaaatacctactggatatataattagatttattgatgataataaacttaattgtcatattgataatttaatgatgatctcaaagcgagaaaatgctgttattaataaacattactcaggagcacctgcggagtataaacataccacattacagttagcaaaaataaaattagctatttcagatagaacaaagaggcaagaccaatgctaa

SEQ ID NO: 306430 - DNA, 171 bp, Proteus mirabilis
atgctaagacactcccaacaaaaagaccaagcagtaaaaatcacattaccagatggatcatacggttttgtttcaacagatagacgttgccatgtttcatacgattttcctgcacacgtcaaaattgaacttcagcctactcccgcggagcaacaaaggagtgaacaataa

SEQ ID NO: 306431 - DNA, 432 bp, Proteus mirabilis
atgaaagggaagatattacgttgggttatcgttctgttattttcaatcccgttgttaacgggtgttttaacgcagaacgaaagtcttttaaatattgatgtgtcaatggcttggattactgtgttattggctttgttttgtagcagttttgtttttattgcttggtatgcggtttcatttatcaaaaatttatctgaaaaaaataaaagtgaattaagtaagcttttctttgaggtgacaaacacacctaaaaatagatttttctggttattcctcgccagtgacattgttggaattatctgtctgattttatcgggttggattattaccgcgatagccttcatctttgtttattttttgagtcaattaataaagtatttttctttagatgcactcgataccttgaataaaacgagtacaagtgaatgttaa

SEQ ID NO: 306432 - DNA, 1032 bp, Proteus mirabilis
atgtcattaaataatcaacgtgctagtgagtattggaatgcgtatagagccgcattttctgcatcatgcggtgtgcctaatgttagtaaatatttttatttaactgaacctaaagaaacacaattacgtgacgcattattagaaacatctgaatttctaagaatgattactgttgctgatgttgaccaattaacagggcaagttatttccgtaggtaatcctggtctctttacgggacgttctaaagatggtcgctttggtcgtaaagttggtgttgatggtaatgactataaattagtcgaaacagattcgggtgcgattttaccgtgggatttattgtcagtttgggcaaattcaggcggtgaagcagaatttattaatcgtatgcaagcctttgttcaagaatcttttgcattagatatgcttcgtattggttggaatggtcaatctgttgcagaaaatactgacccagttaaaaatccaaatggtgaagatgttaacaaaggctggcatcaaatcgctaaagagtggaataagggttctcaagttctgactgatgcaattacattagatgatagcggtgattaccgttcattagatgccatggcgtcagatttaattaacacctgtattccgccacaatttagaaatgatccacgtttagtgatcatggttggtgctgatttagtttctgcagaacaataccgcttatatcaaggtgctgataagccaacagaaaagattgctgcacaaatgctcggttctacgattgctggccgtcctgctatggttccaccatttatgcctggtaaacgtatggtagtcaccatcccaacaaatcttcatatctatacgcaacgtaatacccgtcagcgtaaagcggagtttgttgaagaccgtaaacaatacgaaaataagtatctgcgtaatgaaggttatgccattgagcaaccagagctttatgcagctatcgacgaatctgctgtgactatcggtaaagtcaccgagccgactgaaaaagtagaaggttaa

SEQ ID NO: 306433 - DNA, 339 bp, Proteus mirabilis
atggaacatcgatatacacgtgattgcccccgtccagactacgatgaaaaaattaccgaatggctaaataaacaaagtagaaacagttgttcatcaatgtcttaccccgttgcgctctatcatggtggttacatttatcgttgcattaagggttccggacttggtgattacgtttctatatgtgaatttctaaaatctcttaacttagtcaatatgattgcagatgatgctacttttcggggttatgacgcagtgttctcaacaatccctgacaaggttgatttactaaaaagaaaattttcactctcagatatccctagaaacgaaccggcaaaataa

SEQ ID NO: 306434 - DNA, 159 bp, Proteus mirabilis
atgaaattaaattcattacagcttcaaaaacataaatataaattatcaagcgattcatttaatgatggagttaataatagttcatcagaatctaatgttatttatattgtgagttttattttctttgtgggttatttattaatatcagctttaagttaa

SEQ ID NO: 306435 - DNA, 570 bp, Proteus mirabilis
atgtcagaaaaatatgaaacaagtgaaataatagataggatttgcgaagcatatggtttcacatcgagacttcaattagcagtttttcacggtatgacagctagctctattagcaatagaatcttacgaaagacatttcctgctgaattaatagttcattgcgtattagatacaaaagcatctatagaatggcttgtttatggtactggtaaaatgtttgataaataccaatctgatactgtaagaattcctacatattcattaaaggaatcatccttatttaaagatggtgaggtcatgtttgacaaggtaatgcttcccttctatgaaaatgaattagctattattatcgatggtgatattcgatacttcattgatatgactgacaaattaacctctgatggaaaatacttaattaaatattcagatacaataaacataagagatctaactattttacctggcaataaaatccgtattgattggggaaaatatcccatagactgcacaattgatgacataaaaatcagtggaaaagtggttgctacatatatggaacacaagcaatga

SEQ ID NO: 306436 - DNA, 1122 bp, Proteus mirabilis
atgaaagtattatttgcattaatgttaataccagaaatcgccttaggatcaagtgtattcctggcaaataatacaataaaaataccgagtgaatttaagcaatatttttataactcagaaattgtttctcaagtgtatcttaatgattctcccctttttgaagctgtcttttcacttcatgaaaatggacaaattaatctcttgagaattttagatgaagaacctgatattaaaccgcaagttaaaaatgaatgggctgagattttacaaaaaggcatctcattaggtgcttgtgatgcttcctgccccgcaggactcgtctctgctgaatatcgactagataattcttcattaaaattatttacttcgcactatgaaactgaacaagtgaaaagtgattatatctatttgcctagcgctttgccaaatggtgtcattatgcacaataatttgtcagccgtttcagtgcattcagcaaagacctggaattttagttcatccgtaatttcatctcttttcggctggacgcaaaatatatcactacagtcctatggctctagtcaggccaaccaatcacaagaaaccaatatttatgcgctatacacccaaaaagaattagccggtagctttatccgcttgggcattttttctccagatacggataaaggaaatgtcgaaaccaacggatttaatacaggctctgtcgccggagtgatgtggggaacatcaaatgcattattgataaataacgaaagtgtcagtgcctcccctatttatatcacggccgccaatcaagggatcgcagaagtatggctagataatcggctcatctattcacaacaactgcaacctggcatgcaagccattgacacacggcgtttacctagtggtatttataacataacaattaatacccttgaaaatggtaaagttgtggatactcaaacggctcaagtatacaaaccgctagggtggcaaaaccctaatcaaaaatggcgtttgaatttatggggaggacaaaaaaaggatttagttcttagtagtaagaatacaactgaaaatgatagcgcatttattggtggcggagccatagattacttattcacccccgtgtcattttag

SEQ ID NO: 306437 - DNA, 552 bp, Proteus mirabilis; identical to SEQ ID NO: 305600

SEQ ID NO: 306438 - DNA, 885 bp, Proteus mirabilis
ttggaatggtttatactcatagataatcttgcagatagtaatttgaaaagtagtattgaagcttcagataaaagaatttcaagtttaaaaaatgctggagcctgtgaaaaggaacatgatttatatggtctttatatcaatgaattagctgagcaccaaaaactatctcaatctttagagaataaaaaggtttatttaagaaagattgatctcattaagagtgtcatcaaaaacgcaattcctggatttaaagatatctatgttgataaaaaaacaggccgagcggaagttatgattgcaattgatgatgagagaattaacatcacacaaacatctcaaggacagcaagtcttggtttcactcatcactgatatagctcgacgtattttaactttgaatcctaatttagataatccattggattcttacggtattgtagtgatagatgaaattgaacttcatttacatccaaaatggcagcaaaatgttgttaatgccttactaaaatcttttaaaaacgttcaattcgttataacgactcacagcccacaagtattatctacgattgataagaagaatataagaatgtttgttaaaaatgatcaaggggaaatgagatctgtctctcctactttccaaacaaaaggtgttaaaagtgcggatgtgatggctcgtataatgggggctgattcaatccctgatgttaaagaagcaagagatgttgatgaattttctcaattattatctgaaggtaaaaaagatgatgcgctttctcttttagatgagttaaagcttcattttggagaagagcatcctgttattcttgattgtgaaaactctataaaaatttatgaattaaaagaaaggattaggaataagggctag

SEQ ID NO: 306439 - DNA, 783 bp, Proteus mirabilis
atgcaacgtttagagcaattagtcggcagagaactctttgcccgtcatggtcgtaataaactgttaacagagcatggcttacaattattaggctatgcacgtcaaattctccgtgctaatgatgatgcaactgcttcattaacatatagtgatgctgaaggtgagttacgtattggtgcatctgatgattccgtcgatacactactaccatttttgttaaatcgtatcgcatcagtatatccacgtttggcggttgatgtgcgtattaagcgttctcaatttattgagactatgcttgataaccacgaaatcgacttagcattaaccactgcacgtattggacatcatccacgcacagcgttacgtacagcgcctgttttgtggcattgtgcccctgatttccaattacaaatgaatgagcctattcctttagtggtcatggacgaaactaacccattccgtcagttggcaacaaatacactagatgacgcaggtattcaatggcgtattgcgtatgaagcggcttctttatctgcggttcgtgctgctgtaaatgccgaagtggggatcacagctcgtccattagaaatgcaaaatgctgatttacgtatattaggcgaaagcgaagggttacctcgtttgcctgagactcagtactggttatatcgtaattttgatgagcaaaacgaagctgtattaacggtattcaatgccatcgaaaataagaaaacgccttatactgtcacttcagtcgaagaagcgcattccttagatttagagtaa

SEQ ID NO: 306440 - DNA, 1026 bp, Proteus mirabilis
atgaaattactattaacaccctatattcagcccgatcttggtgttgttttattgaagcctgaagcggagttgcttgagcaacttaaacaacattctcgtgtgattattagtgatgtaccaaagagtttaaataaatggccttctggtgcattaacagggaacgaacaaccattattgaataacaaggatattattggctttttgaataatgaaaaagtgatccaagctatgggcgggctggtatcgatgaatatgtggataggcaggaatatccattgctgccagatcaacgatgagcatgacagttatcatcatcatgaattaacaaccacatggcataaagacggtgtgatacggacttgttggtaccatgataatcatattcgccattcatcagctgagtgggttgctgaattggctcataaaaatcgtattgcttggatggtagacactattcgcagtcatttgagattagatgataaccattcactgacgatacctgatttttttgcttttgccgtgatgcataaactggttgataaattacctgataccatattgcgccgtattctaaattggtctgataaacctaaagagcgcagggtacatggcggttttcctgaagctgatattattccaaatgaagtgacagcactatcagcaatgaatgcgcgtttagaggcgataaaaccggttattaaagttgctgtcgatccggagccaccagcctcatttctgctgaaacctaaaatgcaacgttgggaaaatacccaatggttgcaatgggtaaaaactcaaccgtgttgcgtgtgtgggcaacaggctgatgatccgcatcacatcataggtcatggtatgggaggcatgggaacgaaagctcacgacttattcactattccattgtgtcgcattcatcatgacgagttacatcgagatcccaaacaatgggaagccactcacggcaatcaactcgaattgttatttcattttttaaaccgttcattaagcatcggtgcatttatttaa

SEQ ID NO: 306441 - DNA, 222 bp, Proteus mirabilis
atgagtaatcaaaatttagaagtgttagttaatacgttgtcagcacaagtagtaagtcaaggttatcaaatagcagagttacaaaaacagctcgctagtatgcaattaacgagctgtgagttagaggttattaagaatgccatgctcatggctatttctaataactctattgaaataaaagaaagtaatggtgctactacttgccagttaaagcctttttag

SEQ ID NO: 306442 - DNA, 1686 bp, Proteus mirabilis; identical to SEQ ID NO: 77387

SEQ ID NO: 306443 - DNA, 348 bp, Proteus mirabilis
atggaatgcgcaaatacacgcaaacaattcaatcaatttatctctaatcacctaatagcgtcagcattacaagcattgagaaataaaactcagtctgccgtggctagaacgttaggtgttcatgattcaacaatcctacgtcgaactgaaaaatatcctgaaatatgcgaaacgcttgtcgcatcgggaattattgattttgtgatggaaggagaacgaaaaatctcagaagaagagtaccgatttttgtggaaacaaatgggtgaactttctcaaatgaaaataaaagaaaacgcctcgattgcggcaacaaacggggcgtgttgttcaatggaattcaccatttaa

SEQ ID NO: 306444 - DNA, 1422 bp, Proteus mirabilis
atgtcgatacctcaaaacaaccaagccattgaagagttaattactcttgttggaggttcagataatgttattagcgtttcacactgtctaaccagattacgttttgttctgaatgatcccaatctcgctgatatagataaaattaaaaaaatatcttttgttaaaggctgttttaataatgcgggtcaatttcaagttattgttggtatggatgttgatatctactataaattattaattgataagctttcattaaaagctaaatctaaagatgatataaaatctgacgcgaaaaagaatatgggatcctggcaaaagctgattgccaatttagccgaaatttttgttccattattacctatcttaatttgcggcggtttattgttaggattaagaaatgttattggcgaaatgcctatatcagataataaacccctcacttatttttatccttggttaacaccaatatatgattttctctggttaccttgtgaagccatcttccattttctgcctgtaagtatttgctggtcgagtgtaaaaaagatgggcggtacacctgcactaggtatcgtactaggtataaccttagtttctccacagctaatgaatgcttacaatttaggttcacaacttcctgaagtttggaattttggtttatttactattgagaaagtaggttatcaagcccaagtgatcccttcgattttagcgggactatttctgggatggtttgagactaaattacgtcgttttatccctgattacctaaaattagttattgtgccgattgtaacccttattgtcgccgtttttgttgcccatgttattttaggccctatcggtagaagcataggtgatggtctcgcccaactgatcaagtttttaatgttaggtgattttgcccctattggttcaactatttttgcctttttctattcccccatggtgatcaccggcttacatcacacaacgttagcgatagatttacaaatgactcaaagttatggcggtacacctatttggccgattatcgctctgtctaatattgctcaagcatccgccgttgtaggcattattatcgttagccgcaaattaaatgaacaagaaattactattccggcagctatctctgcttatttaggtgtgacagagccggccatgtatggcgtcaacttaaaatatggctttcctatgctgtgcgccatgattggcgctgcgctagcgggtttgatttgtggattaaataatgtgctatctaatggtattggtgtcggcggattacccggtattttatctatccaacctacttattggttagtttatttattagcaatgattgtggctattgtcgtccctattggattaaccattctggtctatcgctataaagaaaaagcaggcaccttgcaagtcgattaa

SEQ ID NO: 306445 - DNA, 231 bp, Proteus mirabilis; identical to SEQ ID NO: 289889

SEQ ID NO: 306446 - DNA, 1293 bp, Proteus mirabilis
atgaaattatataatttaaaagataaccaagaacaagtcagttttgctcaagctgttaaacaaggtttaggaaaacagcaaggactcttttttcccaaagacttgccttcattttctcaagcagaaattgatgcgctattaaaattagactttgcaacacgcagtagccgtattttaagtgcttttatcggtgatgaaattcctgctgatgtgttagcaaaacgtgtgaatacggcatttgcttttcctgcgccagtgacacaagtagaagaggatattagttgccttgaactcttccacggaccgacgctggcttttaaagactttggtggccgttttatggctcaaatgttatcagaagtcgcgggtgaccagcctgttacaattttaacggcgacatccggtgatacaggagcagcggtcgctcatgctttctacaagttagataatgtccaagtcgtgatcctctatccacaaggaaaaatcagcccattacaagaaaagctattttgcacattaggggagaatattcatactgttgctattcaagatgactttgatgcttgccaagcattagtcaaacaggcatttgatgatgaatatttaaagaacaccatgcatttaaactcggctaactcgattaatattagccgcctactggcacaaatctgctattactttgaagcggttgcacaaattccagctgaaaaacgtcaacaattagtcatttctgtaccaagtggtaattttggtgatctcactgcaggattactggctaaatctatgggattgcctgttaaacgttttattgcggcgaccaatgtgaatgataccgttcctcgctatttagatagtggtaaatgggaaccacatcggacaatagcaacactttcaaatgcgatggatgttagccagcctaataattggcctcgtattgaagagttatatcgtcgcaaaggttggctgttatcggatctttcgcatggggctgtgagcgatgaaacgacggaagaaactgtacgtgaactggcacaaaaaggctatatttcagagcctcatgcggcggttgcttatcgtctattacgtgatgagctacaagaaggagaatatggggtatttttaggtactgctcatccggcgaaatttaaagaaaatgtcgaacgtattttaggtgatacattacctttaccaaaagaattagctgagcgtgctgataaaaaattactatcgcatcttttaccggcagatttttctcaattaagagcatttttgttagaacgagcacctaaataa

SEQ ID NO: 306447 - DNA, 564 bp, Proteus mirabilis; identical to SEQ ID NO: 62449

SEQ ID NO: 306448 - DNA, 1542 bp, Proteus mirabilis; identical to SEQ ID NO: 30088

SEQ ID NO: 306449 - DNA, 813 bp, Proteus mirabilis
  misc_feature (764)..(773): n is a, c, g, or t
gtggaaaagttagcgcaatataataaatatttaatgaaaaacataaagtcactagatgctaactttttccctaatttagttgatcttaattcaatagataaaattctgcgttctattctaccattagaagaaatgagagaggccggttgcttttttacaggtgaagatttatcagttaaagcaatagactctttctgtaaatcgatatcttcacaatctattatattagatcctacttgtggagctggtaatctcctaattgcttgttcacgaaaactaaaaattgaggttacactttcaaaaacattacaattatggggaaatatactaaggggctatgatttgtatgctgcattcgttacaacggcaaagctaagaataattattgaagctctgagtagaggagcgcatagtgattgtaatattgatgaggctctagatttactgccatttattcagactagagatgcaatgacagtaacagccaaagatgtagaaaaaataactcatgtaataatgaatcccccgtttaatagttggttatcacctaggattaactactggaagcaagggaaagtaaattctgctggtattattcttgatcattatattagaattttacctaaccattgtaatattagtgcgatcttacctgatgttttaagaagcggtagtagatatcatcattttagagattttatatcttcagaaatgaaggctacgtgtgaaatatatgggcgatttatttcacaaacagatgtagnnnnnnnnnnctacactatcctcttcgtcggcagcgtcagatgtgtataa

SEQ ID NO: 306450 - DNA, 441 bp, Proteus mirabilis
atgtgtataagagacagttacacccctttatctaaattttttgatgtttgcattggtcctttagttgcttatagagatcctgaagaaggtaatgaatacccttatttccatgctaaaaatagccttgtatgggaagaaatatctacatcaactgaaaaacgcagatttcaggggaaagttttaacaccacctctaatcttaataaaaagaacatctagtccatcagataaatttagagcgtcagctactttgataaatttatcaggtcccgttgcagtagaaaatcacatgattgttttaattcctaagactgggaagctaagtgattgtagaaaattaataaaaatacttaagtcagaaaagacaaatgattttttaaattcaagggcaagaatgaggcatcttactgtgagcatagtaaaagatatccccattgattaa

SEQ ID NO: 306451 - DNA, 234 bp, Proteus mirabilis
atggaacaattaggtttaaaatttaatgatcttgaactaaaaagcaattttatagatcaagtattattaaataatagaaactgtattgctcatggtgaacgacttaattctcaagatattaccagcgcctatgataatataaaagaagaaattatagaaatgttggaagtagtcaacagaactataaaaaacgcagcctctaaccgagaatatttaaaagattgtaataattaa

SEQ ID NO: 306452 - DNA, 849 bp, Proteus mirabilis
atggcgacggaggctctgttgcaaagattggcggcagtcagaggtaggctgtcgctctgcgccgatcaggcggctgctgcgaaatggtggttgagcatgcccatggcctccgtcagcgccgagggcccaatgccaaaagctctctccacaaggcgcacctcgcccctgatgccgggctgcaggcaccaggggcgaggtgcgccttgtggagagagcttttggcattgggccctcggcgctgacggaggccatgggcatgctcaaccaccatttcgcagcagccgcctgatcggcgcagagcgacagcctacctctgactgccgccaatctttgcaacagagcctccgtcgccatgctcacctcgctttggtgcacacgagtattgagcatagtcgagattggtgcagatcacttctgatattgaactgtcaggagctggctgcacaacagccattacgcccaatcaactggtgcagtcgtcttctgaaaatgacatttggtatctctcataaacggatgtttttgagagaactatcttcggccttcacacgcacgaaaggcggcgaagctccgccgttaatccgtccgccggagatctcgcccaggcaggctgaaggccgagcaagcctgacaggcccgaaaagcccggcacgggcgtcggcggcgatgacggcggcggcattatccagggttgatgatggaagtggaggatatcgacaacctctcgcgcaaccaagacatcgcggtcggactgcaagtgatcttgaagccacgggcccgtcccaccccgacatggacctcgatgcccgaacggacgttagatttcgagttctaggcgttctgcgatga

SEQ ID NO: 306453 - DNA, 366 bp, Proteus mirabilis; identical to SEQ ID NO: 25794

SEQ ID NO: 306454 - DNA, 453 bp, Proteus mirabilis
  misc_feature (12)..(21): n is a, c, g, or t
atgtggttaatnnnnnnnnnngttaatatgcaacaacaggcattattcgatcctgatggattaaagacctggatcattgaaaatatcaccgctgactggttaatggattttattttgaattatagtgctgatgttgatttggctctttatcaagaaaataaattttttcctgtttatcaagcttgtatgaaagaagcatttaaatatggaaataagggctatgctcaagatttattaatcacgatgcaaccttggggatttactccagaaatgattagcacacctacaacattatggtatggactaaaggatacgagtactgttcactcgcctgattttggcaagttattgtctcaacgttttccccatgcacaacgttatgtctatgataatgaaggtggctctttgttgtggactaaaacatcacagattttaactaatcttattagttaa

SEQ ID NO: 306455 - DNA, 447 bp, Proteus mirabilis
  misc_feature (433)..(442): n is a, c, g, or t
atgaaagttacaagtgccgaaaaacatgcattgttattaccagataatcgaacgttaacttggtatgaatctggcccatcagatggtcaaccggtattattctgcacaggtgcagggatgagtgggctattaagtatggatgctgatctgttaactaagttaaatattcgacttattacaccgactcgtcctggtttaggtgaatcaacttttgatcctaaaaagacattaaaatcgttttctagcgatgtattattcttattagcatatcttaatattaagaatatcagtgtgataggatcctctcaaggtgctgtttttgcaatggccatttgttactatggtaaagtggataagctggcaattgttgctggtcaagatcaactagattatcctgaaataaaaaaactgttgtccagtgatgtggttaatnnnnnnnnnngttaa

SEQ ID NO: 306456 - DNA, 498 bp, Proteus mirabilis
gtgctctatggtgatgatggggatgatatgcttattgattattatggtgctaatatgttgaatggtggtaagggtaatgatcggatctgtgtagcctcaatggatagagggctccctggcagaaatatcattctagggggagaaggtgatgatgaaatatatttgggcacaggaactcatcgtataacaggtggacaaggaaatgatacctttaattttttctgctatgagggcgttgaaagcaatagttcaatttgggattttgaaaaaaacaaggataaaataacgttgatcactagggattatagaaaaatagatatatcaaaaatgaaaaaagttgataaattatcaggagataaaaatgaattttcattaaatcataacaaaccagccaacaaaaccatcatagacgtttcaacatcttctaacgatgataagtccattgtacatatagagattgtcggtatatttaaccatgatgaactctttgcagtataa

SEQ ID NO: 306457 - DNA, 657 bp, Proteus mirabilis
atgagaaaaagtagactcagtcagtataaacgagcacggttacttgagctgtttattgctggctccacagcccgtattgccgcagagttagttggtgtccacagaaatacagccgcttactattttcatcgcctcagagtgctgatagctgagcacgttgataagcacacttggtttgatggcgagattgaattggacgaaagttattttggtggtcgtcgtaaaggtcaacgtggcagaggtgctgccggaaaagtgcctgttttcgggcttctcaagcgtggtggcaaggtttataccaaggtcatacccgatgctaaatcgcggacattactgccaataattgagtcaaaaatttaccctgacagcatcgtctacacagataattttgccagttatgacgtactggatgtgagcgattttaagcattacaggatcaatcacagcacccagtttgtcgacaaaaaagaccggcaaaatcacatcaatggcatagagaatttttggaaccaagtgaagcgtcacatgcgtaaatttaacggtattccgaaggctcattttgagctgtatttaaaagagtgtgaatggcgatttaacacacctagtgcaaaacaacaattaactatgctaaaacagatagttaaaggtaaaatttaa

SEQ ID NO: 306458 - DNA, 564 bp, Proteus mirabilis
atgatgactcagagcattcgccgctcaatgttaacggtgatggcgacgctacccctgctatttagcagcgcaacgctgcatgcgcaggcgaacagcgtgcaacagcagctggaagccctggagaaaagttcgggaggtcggcttggcgttgcgctgattaacaccgccgataattcgcagattctctaccgtgccgatgaacgttttgcgatgtgcagtaccagtaaggtgatggcggccgcggcggtgcttaaacagagcgagagcgataagcacctgctaaatcagcgcgttgaaatcaagaagagcgacctggttaactacaatcccattgcggagaaacacgttaacggcacgatgacgctggctgagcttggcgcagcggcgctgcagtatagcgacaatactgccatgaataagctgattgcccatctgggtggtcccgataaagtgacggcgtttgctcgctcgttgggtgatgagaccttccgtctggacagaaccgagcccacgagacaagaggcaatctcgtatgccgtcttctgcttgaaaaaaaaaaactaa

SEQ ID NO: 306459 - DNA, 348 bp, Proteus mirabilis
atgctggataatgaatactattcattcatcattaataatgatagcaatcccaaatccctatcggaaagtgataaatttattaatgtaataacagagctaatcagtacgcatatttcaattctgaaacccgtacattattatcagaacttaatgattatctttattcctaaagaatcattaaaaatagattcagaattatttaataactggattaataaagcacatgaccagaaaaaaataatcaatctgccgaactattttagattaccaaatgaatatcatacaaaaccttatttgcatgaacttcgttatctgaaaatgccaaatccaaattctatttttcaatag

SEQ ID NO: 306460 - DNA, 705 bp, Proteus mirabilis; identical to SEQ ID NO: 8686

SEQ ID NO: 306461 - DNA, 267 bp, Proteus mirabilis
ttgaccccgaagaaacgttgggggttatcactgtacagtgaagatggagcacgggtctttaatacggactatctgccttttacccgaggacaatcaatggcattgttattacggaaggggagtgtagagactccatatagcttgcctttagtctgtgcaacaagtcagtttgtgaatgcgtcttatcaggatgaccctattgattgggccaagcgtaatacggggatacggggatcgttttcggggaaaacagatttttgtgagtga

SEQ ID NO: 306462 - DNA, 141 bp, Proteus mirabilis
atgaatgccgaaaaaaccgacgttgtgaaccagaaaaaaggttttaacgccattattaaccggataaaagccgatccgaaaattccgcttattattgcgggatcggcggcgattgccatttttgttgctgcttttttatga

SEQ ID NO: 306463 - DNA, 714 bp, Proteus mirabilis
atgcaaaaaaaagctgagttgtatcgtggtaaagcgaaaacagtttataccactgagtcttctgattatcttattcttgaattcagaaacgatacatcagcgttagatggccaacgtattgaacagtttgatcgtaaaggaatggtgaacaataagttcaattatttcattatgaacaaattggaagaagcgggtatcccaacgcagatggaacgtttgctctctgataatgaagtgctagtaaaaaaactcgatatggtgcctgttgaatgtgttattcgtaaccgagcggctggatcactggttaaacgtttaggtattgaagaaggtactgtcttaaacccacctatttttgatcttttcttaaaagacgatgcccgtcatgatccgatggttaatgaatcttactgtgaaacttttggttgggtatcaaaagaaaacctcgcagaaatgaaacgtcttagttataaagcaaacgatgttctcagtgaactgtttgataaagccggtctgatcctcgttgactttaaattagagtttggcctctttaacggtaaagttgtgctgggggatgaattctcaccagatggtagccgtttatgggataaaaacaccttagataaaatggataaagatcgcttccgtcaaagtttaggtggattaattgaagcctatgaagaagttgcacgtcgaattggtgtttctttagactaa

SEQ ID NO: 306464 - DNA, 1371 bp, Proteus mirabilis
atgggaaaagatattaattaccaagtattagttagtaaagatggattatatagctggcgacggataacactaataaatcctttctattatgtttatttttgtagattaattacatcaccaaaaatttggaagaagatacaggataagtttgaagagttcgacctgaatgagctcgttttatgttcaagtatccccataagcaaaaaaaactcatccaatatagcagcatcagttataaactggtgggaagagtttgagcaaaagagcctctctctagcacttgaatatgaatttatgttcagcacagatatctccaatttttatccatcaatttacactcatagttttgaatgggtttttattactaaagaagacgctaaaaataaaaaaaacaaggataatccagggagtttgatagacacccatatccaaatgatgatgaacaatcaaaccaatggtataccgttaggcagtacactaatggatacatttgctgaattaatcttaggtaggatagacatagaactacgaaataaaactaatgagttaaatatccatggctataaagtcatacgctatcgtgatgattatcgaatattttcaaatagtaaagatgacctagacaaaatatccaaatgcttggtctctgtacttggttcttttggcttggatttaaactctaaaaaaactgaactacaagaagatatcatttaccactcgattaaaccggaaaaaatggattacattaaagaaggacggtttaactccttacaaaaaatgttatattcaatttacttattctcccagaagcataaaaactccaaaataacagttagatatctaaacgattttttacgccgattgtttaaaagaaaaagacttactaataatggacatcaagtggaggctatgcttgggatcattgctagcataatggctaaaaacccaacaacctatccagttggaacagctatttttgtaaagctcctaagttttctttacaaagatgataaacaaaaatctttaaaattagggcaacttcacgataaattaggaaaacagcctaatacggaaatgcttgatatttggtttcaacgggttcaaggaaaaattaatcctaaatggaatgggttatatagcacagctttatgtttacgaatcgatgatgaaattaagaaaaagaaaacattcactattgatggtttatgggatatggattggatacctggctcagaaaaatcccaaaataaagcaaaaataatgtctttgctgaaaaaaacaaaaattgtagatattgatacttttgaaaaaatggattcagatatagaaccaaatgaagttaacttatttgatagagagtatagcgcctaa

SEQ ID NO: 306465 - DNA, 459 bp, Proteus mirabilis
atgcctaacattaaacctttttcattattcccaacattatctgacaacttactttcaaatcgttttgatcagatagatcgcctgtttagtcagttaacaggcagtaagccaattgcatcacctgtacagacttataacttgaaacagattgatgataaccattatgaattgacagtgagtgtgcctggatatcaagaaaatgacttatcggtttcattgaaaggaagccgtttattgattgaagggaaaaaagaagaaaaatcagaagaagacaatgataaatggatccaccggggcatatctcaagggcaatttacgttgcagtttgacctcggtaaaaatgttaaaatagaaaaagccgatttatcaagtgggcttctgactattgctattgagtatgagttaccggaagaagagaaacggcaaacaatagcgatagaaaataaagataaaagataa

SEQ ID NO: 306466 - DNA, 714 bp, Proteus mirabilis
atgaacgataaaaaaaccattaacacgcacacccctttacttacgaatattcgaaacctcttgatacaaggtagaaaaaacacagtacaagcagtaaacagcataatggtacaaacatattgggaaatcggtcgtttaattgttgaagatgaacaacatggagataatcgagcaaaatttggaaaaagagttttacaaactttatcagctgaattaacaaaagaatttggtaaaggatttgatacctcaaatcttcgatatatgaggaaattttatctcacatttccaattcgtgacgcagtgcgtcacgaattaagttggactcattatagaacgctactaaaactaaagaatgaactcgcccgtcaatggtatatagatgaagcaattacacaatcttggtccgcccgtgcattagaaagacaaattagcacattatattatgaacgattactttcaacacaggggaaacagcaaagtatttatcctgtattagctgaaggaaaacaaaaaactactgaactcgcaacttcagtcaaagattatttacgtgatccctatatttttgattttctaggactacctagtagtatcctgcaagaaaataaactagaacaaactttaatagaaaacctaaaagaattcttactcgaattaggaaaagggtttgcttttgtcgaacgacaacaacgtctgtctcttatacacatctga

SEQ ID NO: 306467 - DNA, 981 bp, Proteus mirabilis
atgtctcaatattttgatccaataccttgggctaagaatccccatttacagacacttttgcctcgaatagtgcgaagaacgccgctattaacgccttattggcaacggcttaatttgcctgataatgattttgtcgacttagcatggagtgaagaacccaaaacagcgcaacataagccccgtttggttatctttcatggtttggaaggtaactttaatagcccttatgttcatggcatgctagccgcggcgaaagcgcgaggatggctaggtgttgtcatgcattttcgaggctgcagtggcgaacccaatcggcaaaaacgcatttatcattctggtgaaacagaagatgcccgctattttctgaattggttaaaagagcaatttggcgaacaaccaaccgcagcagtaggttactctttaggaggcaatatgctggcctattatcttgccgaaagtggtgaaaatgcggtattagatgctgctgttatagtgtcagcacctttgatgttagaaccttgctcaaccaaaatagagcgaggattttcgcgcttctatcaatggtatttactgaaagggttaaaacgcaatgcaactcgcaaattgatccgctatccccaatcgttacctattagtctattaaccattaaatccattaaaaagttacgtcaatttgatgatctgatcacggcaaaaattcacggtttcaaagacgcccttgattattatcgtcaatgtagcgctctccctttactcaatcagatcaaaaaaaatacccttatcattcacgccaaagatgatccctttatgtctacagaagtgatacctgatatcacaacattacccaaaaatattgaataccaattaacagaatttggtgggcatgtaggttttgttagtggaaaactctctaagcctgtaatgtggcttgaaaaacgtatccccgactggctatcaacctatttggagaaagtaaaatga

SEQ ID NO: 306468 - DNA, 825 bp, Proteus mirabilis
atgttatctagccgttttcgttctgcaaatatcctgcgttctgaccgccctcttaacgatgatcagatcatgcgttatgccccgtctatctttgccactgaagcgcatgaaagccgctccgaccgttacgcctacattgcgaccagcgaagtattaaatggtctgcgtgataacggttttcatccattcatggtttgccagactcgcgttcgtaacctggataaacgcgaacacaccaagcacatgatccgtctgcgtcatgccgggcaaattaacggcactgaagcgaaggaaatcatcctgcttaactctcatgatggcagcagcagctatcaaatgctggccggtgtattccgtttcgtctgccataacggtttagtgtgcggtgataccgttgctgacattcgtatcccacacaaaggcaacgttaccgagcgtgttattgagggcgcttttgaagtgctggatcagttcgataacgttgaaaaccatatggatgctatgaagtctgtcacactgaatgcgctggaaaaacgtattttcgctgatgcggcgttagcactgcgttatgacgagaaagacggccccgcaccaatcgccgcgagccagctccttgaggcgcgtcgtttcgaagatcgcaaagatgatttgtggacaacgtttaaccgcgtacaggaaaacatcatccgtggcggtttgagtgccagaactaagcagggcaaatcaacccgtacccgcgccgttaccggcatggataaggatacttctttaaaccgcgctttatggattctcagcgagcgcatgaatgaactcaaagccgcttaa

SEQ ID NO: 306469 - DNA, 480 bp, Proteus mirabilis
atggcttcaagaggtgttaacaaagtaattctggtcggcaatctaggccaagatcctgaagtgcgttatatgccgaacggcggcgcggttgccaatattacgttagccacgtctgaaagctggcgtgacaagcaaaccggcgagatgaaagagcagactgaatggcatcgcgtggtattgttcggcaagctggccgaggtcgccggtgaatatctgcgtaaaggttcacaggtgtacatagaaggccagctcagaacacgtaaatggactgatcaagcgggcgtggagaagtacaccacagaggttgtggttaacgtcggcggtactatgcagatgttaggcgggcgctcacaaaacgcttctcagactggtaatcagccgcaaggcggccagcagttcagcggccagccacagaccaccggcacagcgccagcggcaggaaacgaaccgcctccgttcgacgatgatataccgttttga

SEQ ID NO: 306470 - DNA, 303 bp, Proteus mirabilis; identical to SEQ ID NO: 76887

SEQ ID NO: 306471 - DNA, 288 bp, Proteus mirabilis
atgaatacgactcttgttgttttagtcctcgccataacaggcgcgttatatctcccctggcgtcttgtgcgcgacggttacaaagaactggtgcagatgtgcctgttttgctcctgtatcgtcacgctggccgctgtatacgccgtgttagttaatctcgatactccacacccgtttatgccaatgtttatcgcggtaacggcgttcggtgcggcattcgtggctgactgcgctttatctctctggctctatcagcgtaaagctaacgctaagacggctaaccactaa

SEQ ID NO: 306472 - DNA, 225 bp, Proteus mirabilis
atggccgagaaagcaaaaggcgcggttgatgaagaggctgaagtgtatgaatttgagggaatggatgatctgatccggtttcgtaagaaattccctgaaaagatgaaatatgaatatcattacatcctttccggcggcacgaaaaattttcggcatatcgcgcttgttgaagccaaccattttaagcagttcaaaaagctggttaatctgtaccaggatcgctaa

SEQ ID NO: 306473 - DNA, 156 bp, Proteus mirabilis
atgaaaaaatttatctgcaaccgcaacggcaaggcggtttttcaggaaggtgatcgggagctggtagctgcttaccagatgaaatcctctccggttccggtgacaccccgcaagctgaaagctgaaatggaggctatcgccagaacagcccgataa

SEQ ID NO: 306474 - DNA, 258 bp, Proteus mirabilis; identical to SEQ ID NO: 76841

SEQ ID NO: 306475 - DNA, 252 bp, Proteus mirabilis
atgctttccgcgatatggccgagattaccgccgcttactacttacattttcggcggtaatacgatgaacgattatctatccctcatggaacaggcacgacaggcagaggatttgcgcgactggaaaaccgccgcgcagctctacactcaggcaatggccgttagtccaaaagccagaacgatgcgccagcgccgcgaaaggctgaacctacagcagcgtatcgacttttgcgagcgtaacgcgaggacgtaa

SEQ ID NO: 306476 - DNA, 771 bp, Proteus mirabilis
atgatcatccctacccaggaaacttacgacgagcttcaacgcgcctacgaatttttcaatcaacgcctatttgaaagtgcgctgccgccttgccttatcacccttcagcgcgaaaaaagaacgtatggctatttctcgaatggtcgctttgttggtcgttctaccggccaaatcgttgatgaaatcgccatgaacccggtctatttctcgatacgcacgatacgcgacacgctttccacgcttgtgcatgaaatggttcaccagttgcagcaacacaccggaaaaccgggccgccgtggatatcacaataaagaatgggcagcgatgatggagcgtatcggcctgataccatccgacaccggccagccaggaggtaagcgcgtcggagagtccatgagccattacatcgaggacggcggcgcgtttgataccgcctgcaaggagctgcttacaacggagtttaaactaagctggctggatcggttcccgccacacaaaccaacgccaccaacgccaaccggcgcagacggtaaagggtatgtcgatgacgaagattatggggatgaaggatacggcgacgatggcgagctggatgatgagatcacacaagccctttcgctggtaaacccgccgccagatacgccggtgaataaatcaaaccggacaaaatacacctgcccgaaatgccatacgaacgtgtggggaaagccgggcctgatcctgtactgtggcggcgaacactgcggaaaggcagaataccagccaacctaa

SEQ ID NO: 306477 - DNA, 369 bp, Proteus mirabilis
atggaaaagcaaccagataaattagatatcctgatggactggtttttaggcgatgcgaaagaaatcacctcaaaactggaaagcgtaaccacaagcgttaccgaaacagtagaacggctggataaagcctccgatgaaataaagaaatcatctgagatggcaaaaacagaagtgatcgcaagccagcgcgagctggtcaacactctgaagaaggagcagaaggttagcgaccaattttttgaacgtctggccggggcgcaaacagggttttcgcaagcgcttatcaggcagattctgattatcacggttgtctgttccttcgttggtggagcgctcggcgcggcggctataacgttcctgcttcactga

SEQ ID NO: 306478 - DNA, 711 bp, Proteus mirabilis
atgaaaattgcagtaatgaactacagtggcagtgtcggcaaaactattatttcgtcatacctgctgtatcctcgcatggctggcgctaaattctttgccatcgagacaatcaatatgtcggctgcggatttgggtgttgatgaagtgatgagcttaaccggcgataactttggtcaactcgttgaagaaatcgtatttgaagataatgccatcgtggatattggcgcgtcgaacgttgagcggtttctttctaccatgacaaaatatgagggtgcaattgacgaatttgataaatatctgattcctgtcaccccggatgataaagcatggcaggaaagtattaagaccgccctcgcgttaagtgccgctggcgttcctaaatctaaaattgttcttctgcctaaccgcattaaatcgactccgcaggaggatattgcttcggtatatgaatgggcgaaagattctaaaaaagcctctattcataaagatgccgccgtttttgaaagtgaaatttatgaatacctcgcgtatcacaaaatttcgtttgaagaactgctggcagaagatccagaaacctttaaagcaaaagctaaaacttgcaccgatgccgatgaacgtgcggcggctgcgcgtcgttatcgctggatgaaattagcattaccggttaaacgtaatcttgatcgcacctttgaaatattaacggctgaataa

SEQ ID NO: 306479 - DNA, 489 bp, Proteus mirabilis
atggacaatattaggactgtgttaagacaagtaagggctgttataatgactagtgcgaatcttggccctagaacggtaattgctgttgttagagcgtcactggctgacatagatatttggcaaaaaaatggcgttagtcgtgatgagattgcgagcgtattgactgagcgctacggtgtttctatcacattaacggccttcgataaggctctgtatagggcaaggaaagaactgaaaagtagattgcacaattcaacaaaacaggaagataaaagccagatagaaagtggattgcacaatccagaaaggagagaggaagtacagcaagcggattatggattgcacaacccaaaacaagataagctggttgaagatatgggcggcaataaagaatttttgtctgacaccgattttaaaaaaatcggtgatgaggcaaaaaaagtcgcatcctcattcaagggtagtgtaggtaataaaaaaggtttctaa

SEQ ID NO: 306480 - DNA, 348 bp, Proteus mirabilis
atgccatctatcagtttaagagtgaccgaagcgcaaaaaatcgaccttgaataccgttcggagggcaacgtatcggagtacatcaagcaacagctttttggacaaaaagagagtgccagtgaagtgatcgcccggcttgataaattgctggaacgttcatcttcagagcagcaagccgccggacgagatcggtacatcgaggcaatgttgattgaggtgttattgatacttcgccaggtgagtaaagcagatgcgcagaaagttgccggtggtgaaattcgccggttagggctggagccgtggtcagcagagctggcccaggagagagaggaacagagtcatgaatga

SEQ ID NO: 306481 - DNA, 1578 bp, Proteus mirabilis
atgaatgaagcggataagggtaaaatttgcctgggggcattgctttttaccccccttgttacgtggtttatcgcggcgaaaaccttgtatggttttacgccaaaagatgcgcgtgaacgtctggttttacttattcagcagacttttgatttatggcctttatggggtgctttattagtcggtgaaattattgccatcataggcttaatcatatttttcaaatttaatcaccagatatttaaaggtgcaccatttaagaaaatatatcgtggtacgcggcttgtttctcagcgggctttggcttccctaactaaagaaagagagccgcaaataacaatcgctgatattccaatccctacaaaagcggaaggtacacatatttcaatagccggggcgaccggtgttggtaaatcaacaatctttgctgaaatgatgaaaggttgcttgatgcgaggcaagatgcagcgggttgcgtccaaaaaagaccgcatgataatcctcgatccagatggcgattttctttctcgtttttataaaaaaggcgataagattctaaatccatatgatgccagaacagaagggtgggtatttttcaacgaaataaaaagtgattttgactttgagcgattcggggtttctatcgtacctacagcgaaggattcgcaaacagaagaatggaatggatacggtcgccttttatttaccgaggtatcccgtaaagtatttaacaccagtcgaaatccaacgatggaagaagtcttttactggacaaatgaagtgccactggaagaacttgaagaatatgtcagaggtactaaagcacaggctttatttgctggtagcggtcgggccgttggtagtgctcgttttgtgcttagtaataaacttgccgcccacctgaaaatgccagcaggaaacttctctattcgtgaatggctggaagatccaaaaggcgggaatttatatatcacctggacggatgaaatgcgtgaagcactgaaatcgcttatttcatgctggacagatagcatattttctattgtgttaggtatgagcaagagcaatacccgtaaaatctggacgtatatagatgaactggaatcccttgattatctgccatcattacgtgatgcgttaacaaaaggccgtaaaaaaggattacgggttgtcaccggttatcagtcgtattcacaggtcattagcatctatggcagtgatgtagctgaaacccttctgtctaaccatcgtacatcggttgttatggccgctggtcgcctgggtgaaagaaccctcgaatttgtctctaaatcattgggggagattgagggcgaaagagaaaaaacggggattagccgccgctttggtcagttgggaaccaaaaatatcaatgatgatcacaagcgcgagcgggctgtaacgccaaccgaaatcgccacgctggatgatctgaccggctacatcgcgtttcccggaaatctgccagtggctaaatttgagactcatcacgttaactacactcgttcgaaccctgtaccgggcgtggtcttacgtgaaagcaccgcatttgcaggaatgtaa

SEQ ID NO: 306482 - DNA, 2910 bp, Proteus mirabilis; identical to SEQ ID NO: 104313

SEQ ID NO: 306483 - DNA, 303 bp, Proteus mirabilis; identical to SEQ ID NO: 76887

SEQ ID NO: 306484 - DNA, 480 bp, Proteus mirabilis; identical to SEQ ID NO: 306469

SEQ ID NO: 306485 - DNA, 825 bp, Proteus mirabilis; identical to SEQ ID NO: 306468

SEQ ID NO: 306486 - DNA, 420 bp, Proteus mirabilis
atgaagaaatctctattcagtatcatcctgctggctaccacgtaccaggcaagcgccgaaccttgcatggtgatctttgaacatggtcagttaattacgttacctgcggctgtcacacaggctgaccaggtgaaaggtatgtcaggtgaaaatcacagcaccggcttaatcctcgcatggaaaacagcagaaccccgcgcagtctggatgaaaaatacgccaaccccacttacagccgcgttcatcggtgctgatggtgttattcagagtattcaggatatgcagcccaacagcgacacagcgcattcatcactacatcccacgatagcaatcatcgagatgagaacggaaaaatttaaacagttcaggctatccaaaggagacaaaatcatatccagccaatgtttccccctcaaataa

SEQ ID NO: 306487 - DNA, 207 bp, Proteus mirabilis
atgtacgtgtttttagggggtcggatgtacaaaaaaaagggggtcggatgtacaaaaaaagggggtcggatgtacgtggataactttatgtttcaacagcttttttacagggttgttcaccttatccctaactttactcaaagagggggagcggcattaacccgaaataaaaaaggcccgtatgggcctatttttttgcttccttga

SEQ ID NO: 306488 - DNA, 888 bp, Proteus mirabilis
gtgacagataaaccagtagtaccagcgaagcaggtaaaaacggttaataccggcatcgcaatcaaagaaaatcccccaaaaggggatgatatggcatttacccactcgatattgtgtcaggttggcctaccccgttctaaggtggatggccgcgagtttatgaggaaatcaggcgatgcctggctggtcgtccaggctggctggcttgatgaagggagcgggcctgtagaacaaccgatcccctatggttcaatgcctcgtttagcgctcgcatgggtatcctcttatgctctccgcaaaaagacccgcgaaataccgatcggtaagagtgcaaacgagtttctgcaattaatgggcttatcaagcggcggcagacaatacaagacgttgcgcgaacaaatgcacgcgctggccgcttgccgcttgcagctaggatttaaaggacgttctttcaacggtcagccggtagaacaattcgatgcctggcagaaagacgaccaaagcggccagctaagtttatggccgggcgtgatgacgctatcagaagggtattttaatgggctaattgatagcgccgttcctctcgataaccgcgctttgtacgcgctaaaaggttcggcattgtcgttagatgtttatacgtggctggcacatcgcttacaccgcatcgagggccgcccgattaaacttcactggatgaatttacgggaacagttcgcccaagagtacgtgggtaaagaccctgacaaggatttcaaaaagaaatttcttccagctctgcgcgacgttctgaccgtatatccacaggcgaaggtagaaaaagttaccgggggaatattactttacccttcccagcctcccatcccattcaaggaagcaaaaaaatag

SEQ ID NO: 306489 - DNA, 585 bp, Proteus mirabilis
atgaaaattggctacgccagaaaatcgaccaaagaacaagatacatcgcttgagtatcagatcgaggctttacaaaaagctggttgcgaaaaatggtacgcggagcaggtatcgaggggcggcagcaagcgcctgaagaaaggcacgccggaactggaaaactgtctgaaagcgcttcgggcaggtgacacactggttgtatgggcgctagaccgattaggcggcactctcttgcagctcttgcagctcatgaacgagctacgtagcaaaggcattcactttgaaagcctcaaagagcatatcgacacacaagcccctatgggcgaaatgtactattccctcattgccattttttccaattttgaggtagccagaaaccacgaaaggacaatggccgggcttgcagcggcgagaaagaaagggcgtatcggcggcaggaaaccgaagctatcaccacaggatataaaagaaattaacgcgcttgttaaatcgccagaaattacggtaaaagagatcgcagaacgttttaacgtgtcgcggccaacgatttacagacatataacccccgacaacagcactgattaa

SEQ ID NO: 306490 - DNA, 246 bp, Proteus mirabilis
atgactcaagtaataattaaaaaatggggtaatagtccgtctgttcgccttccttctgcgattgtgaaagctgcttcgttaaacgttgatgatgtagtggagctgtcagtagtggacggcgcaattaccatcgttcctgttaaaacgaaggagtattcactggatgcgttgatggccggtgttactaacgaaaatattcatgaggaaatctctttcggatctcctgtgggtaaagaacttttataa

SEQ ID NO: 306491 - DNA, 258 bp, Proteus mirabilis
atgctgaattttttgaaaaaaatttatagctacctggactttttaggtgctcttatttgggttggtgttgggttgtattccatttggttagggtttagtaaattatttaaagacaactcaatctctattgatcgtgttgaggctatatctttacttgatacaactccgtttgcaattatgtttattttttgtggggtgctcatcattacatttatatgggttgggtatataagtaagagactaaaaaatgaagcgtga

SEQ ID NO: 306492 - DNA, 327 bp, Proteus mirabilis; identical to SEQ ID NO: 163672

SEQ ID NO: 306493 - DNA, 438 bp, Proteus mirabilis
atggctattagcgaatcatctctaggcaagcagatacttgaaaagataaatgatcatgatcgtttaaattctaaattgcttttaaaaatgaaaattttaaacgtgcttgtgttcgttattctttttgcaataggagataagtttaacgaactagttatatgtgcgattgctttcgtggttttctttgtgctaaccggtgtgtatttgaagtgcaagatggttatttcatcgtcgttaatatttgattatttcgaacgtagtgctgttgacgaggggtttagaaacttttttatggggttatttaacagcaaaaggtttcttacgatccgggatgatagaaagaaaattcatgattatatttatgagcaagataagaagtttgaagaattgaagaaaatagaaactattaatcgtggtatgaatggacgtagtgagtaa

SEQ ID NO: 306494 - DNA, 402 bp, Proteus mirabilis; identical to SEQ ID NO: 76872

SEQ ID NO: 306495 - DNA, 726 bp, Proteus mirabilis
atggcaggtttatcaccgccgctaacaacgcgcgttcggggcttcggccccgttttttatggtacaggtagcatggatatactttcccttttcccctctaacgtaatcgcattgtgggccgtgtcttttggttttctggccgtcctgtattggtggaagatcaccgccagaaaacgcagacacaaacgtaagcaacaacaagcccggcgtgtactcgcaaaaattcagaccctaccggcgttcggctacaagatcgcttatctcaggaagatagaccctttcacctttgaggaactgttactggaggggtttaagtcgcatggcttcagcattatcagaaacaaacgctataccggtgatggaggcattgacggccaggtaataatcggaaaacatcgctatctcatccaggccaaacgctatcgcggccatattgctttacaacacgttcaggagttcgatacgttgcttaaacgacataactgtcgcggtttgttttgccataccggaaaaactggcgcagcttcaaaagctgttagcttcgccagtgatcggatggagattatcagcggccagcgcttgattgatttactcacgcccggcagctccttcaccatcgcaaccgcaccgcagacaatgatgaggcgtaccgcagcaacgcgaggaacgaacatcattgtcgaggaagcggataaaaatacaaccgatagtatgagagtcaattaa

SEQ ID NO: 306496 - DNA, 315 bp, Proteus mirabilis; identical to SEQ ID NO: 104331

SEQ ID NO: 306497 - DNA, 318 bp, Proteus mirabilis
atgcggaagataataattgcatccgtggtgatactggcatcgtcttattccgttgccagcttcgcaaaagatccatgcaagacattagcttgcatggctgcgaaatcaggtggtcaatttgggagtattggcgatagtgattgctctggtgctatcgctgacttcttcaatatcgtgaagaaaaacaagcatggcttccttcctaatcacacagcagatgcacgtaaagaatttcttatggaatgctcaggagcggagcagaacaccgccgctgttagcagggttatttcaatgtttggacgtatcaggaaaggttaa

SEQ ID NO: 306498 - DNA, 438 bp, Proteus mirabilis
atgagtaaaattattgattttcctaccggaaaaaagagggagaaaagggccaaagcaatccgagcgcgtcgtaataaagaagcgcagcagcggagcgaaataaccccctcccaattttggtgggttaagaaaataaagttactcaccgtgattaaacagtcggcacgttttctcttaatatatttagggttattaactgccgacatccttatctgtctccttcttattctaggaaaactcctaaaattctttacgatgattggtatcatcgcggtgcttctgtttctggtcgtggaatataggaatgattggcattatacgcaatctgcattccatgccgcagcaatatttgttggcctgatcgccctgcgcatcgggcatgacaaactactgaatggcctaataaggcttaaatcctatctatccagaaaagggtga

SEQ ID NO: 306499 - DNA, 402 bp, Proteus mirabilis
atgaagctacctgatttaccattatctcagaatgaataccaaacaacattatttgcaaaggcttatgcagatagcatcaaggcatatcctcaattaatgcaactcaagcgtaaacgaatacaagcacaagaagagtcagcgcctgaatggtttttacgcatggtagatatcgacatagactacatactttttcgtatagaacagcttgagcattggggacatgatgatgaccctagagtattcgcatcaaatatacaacagagtatccgcattgctattgatatggtatctaactttttaaatccatcaagaatgctatggggaagcgttaaacgaacagaggcttggcttgctgatggttataatgagacagaagagcaggcgataatcagcaatggctag

SEQ ID NO: 306500 - DNA, 180 bp, Proteus mirabilis
atgaaatttttaaccataacagccttattggttgggattgcgggcgcctgtttattgtcatttggggcttggttaacctatccaccgatggggtatatgtgtgctgggggattatgtcttttttggtcatatcttgtttcaaaagcacttggtcaatctcgaaatagcaaggaggaataa

SEQ ID NO: 306501 - DNA, 342 bp, Proteus mirabilis
atgatacagcaattaaaagagaccctttcaccgcttgtcgatggaagggttttttttcaggtattacccgaaggcaaagggcgttatcccgccattgtgatccaatttgccagtatcacacctaacagtgcgctggaggatacggatttagataactatcgtgtgcaacttgatgtgtatgcgccacagccacaaccccttatggtcttgcgtaaaaaaattgaggctcagattgttgaagcgatcccatttgcacaacgggtgaatgctgtctttgggtatgaagcggatgtcaaattgcatcggcttgttcttgaattaatgatttcatcagataaataa

SEQ ID NO: 306502 - DNA, 219 bp, Proteus mirabilis
atgagacaagttcaagcaatgacgacgttagtgttaattgacggtgttacgtatcaaatagctctacctaagcaatatgtctctcttcaggcaaagcaggcgttaatgtttgcccaggagttcggtggtgtaattatcccctgtacgtttactcacataaagccaatggaagcagatggattgccttttaatataggtgataacaaggatgaaagctga

SEQ ID NO: 306503 - DNA, 366 bp, Proteus mirabilis
atgagacaaattaaaataaattctggttcgtggcaaaaagatttagaaatggttgtcactgttatcgatgaagataaatttaaaaaatcatgtgaacaaattaataaattctattctggtgatgaatatagagctgatatacacggtagccatgagaaagcaggttttgcaatgttctgtgctgagtgcgtccagcaaatagcattcaataacttcaaggatgaagaatggcttaccgagcaattcgattggtctaaagataagggaattgatggctatccttctctagatgatatggggattcggattgatgaaatagaaccttggtttattgatctggaagatatagaaattacaggatggtaa

SEQ ID NO: 306504 - DNA, 174 bp, Proteus mirabilis
atgagtagacagatggttttagttgcacgtttagataatgcatcatcaacacgtagcgtagatatcggatacacacaatctgaatgggaaaagttaacagaagatgaacgagtagaaattattaatgatttcacgggtgaaattgttgatttatgggtgcagcctaaggaataa

SEQ ID NO: 306505 - DNA, 201 bp, Proteus mirabilis
atgactattacattaacaactaatcaattaatagctatggctgattttgctggcttaaaggtagacacacacggtttagacattgatgacgaaactgaatacacgctagatgatgagcataatttagactgcttcgataagtcaaaacctattttttactgcactgaatatccagaagaaggcgctattcagctgaaataa

SEQ ID NO: 306506 - DNA, 828 bp, Proteus mirabilis
atgtctcaattagacggtaatgctatttcgcaaattcaagatatgaccgtggcttcattaagcctcgaagcaatagaaaaatctctttgtccagcgattgtgcttccgaatgactttgaagtaagtagtttagaaaatttacaagaaggtcgtttccgttttcgcggggaaatgaaaacaaccagtatcagcgactttgttaaatactcaatcaagaatgcaattgatgaaggtgttagctgctttattgatgccgatgaaatgagtgccgaaactatttttaatctcggcacaataggtaaagcaggtcatgctgataacactgctattgtgaaattaaaacaaaccgccccattcacagcattattaaaaatggatggtgttaaatatcgtcaaaaacaattagccgagtggttagaagattggcacgattatttaatggcatttgatgctgacggtaatgttttagatatcaaacaagctatttctgctgttcgtcgtattacgattgaatcaacacgctctgctgaacatgaaaatgctgattttagtgctaaacgctcagtgttagaaaatgttgaagcaagaagcaaagacattatgcctgctacattccagtttacttgtactccttatgacgaattaaaagaacgtagcattaaattacgttatagcgtactcactggtgatgatattcccgttttagttcttcgaatcattcaacttgaaaaacttgaagaacaaatcgctcaagagtttcgagatatgctttgcaatgaattcaatgaaagcaaaatcgaaacattcattggtaaattttcagcgtaa

SEQ ID NO: 306507 - DNA, 444 bp, Proteus mirabilis
gtgattgctaatccagaatatcgtgagaaatttaaacaatgcttaattgccgcaggtattcataatcctggttacttctctgtccctgctttcttacaagcttataccttacaaggtcaacaatggatcaaagagcttaaacattaccttgctgaaaacaggcagtgggtaaaagagcaatgtgcacgttattttcctgattgggttatcactcaaagccatggcacctacatgctatggatcaattatcaaaaaatgcagttaaccgaacaacaattaaagcattggtttgtttcattagccgaagtagaaatgagttggggaagcggttttggtgcggctggggatggttttttccgcattaatattgctacacctcgttcaatattagaaaccgtttttactcggcttattcgtacctcacctcacgccagtttggaataa

SEQ ID NO: 306508 - DNA, 477 bp, Proteus mirabilis
atgaatcagatccctatgacagttctcggagcagaaaaattacgcgaagaactggaatatctaaaaactgttcgtcgcccagaaattaccgcggccattgctgaggcacgggaacatggcgacttaaaagaaaacgcggaatatcacgcagctcgtgaacaacagggtttctgtgaaggccgcattcaagaaattgaagcaaaattatcaaatgcgcaagtcattgatatcactaaaatgacaaataatggacgtattatttttggtgccacggtgacgttactcaatgtggatactgaagaagagcaaaaataccgcattgttggtgatgatgaagcaaacattaaagaaaacttaatttcagtcaactcaccgattgcccgtggattgattggtaaagagttagatgatgtggtggtcattaacaccccaggcggccaagtagagtatgaagttttaaacgtagaatatatttaa

SEQ ID NO: 306509 - DNA, 1581 bp, Proteus mirabilis
atgcaacgtcgtgaatttttaaaattaggggcaacattaagcgccgtcacactattaccaagttggagccgtctcgcattcgcccaaactaacacgccttcactcgctattccacctcaaattagcccagacaaacaacaaaagattgttcttaatatccaacaaggtgtttcccagtttactgctacagcaagtacaactacttgggggtataacggtagcttattaggcccagcattaaaattaaaacgtggtgaacctgttactattgagatcaataacacgctgccagagactacgacggtgcattggcatggtcttgagataagtggtgaacaagatggaggtcctcaagcaactatcgcaccgggtaaatcacgaacagtaacttttacgccagatcaagcggagtcgacatgttggtttcatccccatactcatgggatcaccggaaaacaggtggcaatggggttagggggattagtgatcatcgaggatgacgaaacggccaagcgaaagttacctcaccgctggggagtggatgatttaccggttattttacaagacaaacgcttagacagtaacggtcaaattgactatcaacttgatgtgatgagtgctgcagtaggttggtttggcgacatgatgctcactaatggtgcgattcaaccgcaacacattgtaccaaaaggttggattagattacgtttcctcaatggttgtaatgcacgtagtcttaatttagccaccagtgatggccgaccaatgtatgtaattgctagcgatggtgggttattagcggaaccagtcaaagtgacagaactccctattttaatgggggagcgttttgaagtactggttgatacttcagatggacgtgatttcgatattgtcactttacctgtccgacaaatggggatggtattagcgccatttgataatgtattacctgtattacgtctactgccttcagcagaaaaagcggtgggtattttacctgatcaattagccttaattcctgcattaccatcactaagtcatattgcgacacgttcattacatttacgtatggatatgcgtttagatatgcaaggtatgatggcgctaacggagcgttacggtgataaagcgttagcgggaattcaccacggtatgagtcatatgcgtcagggcaatggaaatggcatgatggggggcggcatgaattgcggccatggctctgcggatgtcgatatttataatgcaaatagcatcaatgggatcccattctcaatgaccgaacctgcatttgatgttaaacaaggggtttatgaacgctggctggtttctggtcgtggcgacatgatgttacatccattccatgttcacggaacacagtttcgtattttatcggaaaatgggcgtaaacctgaaaaacatcgccaaggttggaaagatattgtcagagtggaagggcaaattagcgagatccttgtaaaatttgaccatttagcgacaaaggaacacccatttatggctcactgtcacttattagaacatgaagatacaggaatgatggcgggctttacggtgagtcgataa

SEQ ID NO: 306510 - DNA, 375 bp, Proteus mirabilis; identical to SEQ ID NO: 304387

SEQ ID NO: 306511 - DNA, 678 bp, Proteus mirabilis
atggaatattatctgcttgtggttatcaagtttattattggttttacaataattttggctcatatgaatatttcagggaagacacaactctctcaactaactcccattgattttattggtaattttgttttaggggggattatgggaggggttatttacacagatgcaatcccgctttaccaatatgttattgtctttttgataggtgtattttttatttcttttctcaattatatcagtaaaaaatttaattttttccgagcagtagcgataggaaatcctatcccgatcatcaagaagggaaggtttattatggaaaacattactgagaagaaaaataagattgatattcttaatatcacctctaggttacatgcccaaggaattcattcttttcaagaagttaattatgctcaaattgaacctgatggacaaataacggtggtgtgtgatggtgctaaaatgccctctatcattattatgaaagatggtgttatccgaacttctgaacttgagcagatagaacgagatgaaaattggttaaacgaagagatgaaaaaacaacatatagataacccagaagatgtttttttagccgaattttgggatggtaaagtcaatttcattttgcaagacggtaagatcaaacacgatttcattccgactgctgagtactga

SEQ ID NO: 306512 - DNA, 354 bp, Proteus mirabilis; identical to SEQ ID NO: 296310

SEQ ID NO: 306513 - DNA, 2397 bp, Proteus mirabilis
atgtctataaaaaaacaagaaaaaaggcttgctaatcaagaggggatgccattaacgcgtcgtcattttgtacaagccagtgcagcattagtgagtatgccttttttcgcacaaaatacacaggccaatcttgataaaagcctacctattgccaacattgatgagaaacctgctactgtcgtcgcaacatgcagcacctttgactgtggtggtaaatgtgatatccgagctcatgttaaagagggaattgttacccgtattaccacaagaccagatgctgatttagatgaacaaatgcctataatgagagcctgcgtaagaggtagaggttatcgtaaattcacttatcatgcggatagacttaaatatcccatgaaacgtgtgggtaagcgcggtgaaggcaaatttgagcgtatctcttgggatgaagcaacctctttaattgctgagaatgtaacacgattaactcaacagcatggtgcagcaagtcgttttcttacggtaaataccgccgtcactggggggatcttctctggtgatactatgatgaaaaaactctttaatctcacaggaggatatcttccttattatcactcagtgagcttagggaataccgctaaagtcacaccttatacttatggcgtatctaaaacaggaagttctcttgatactttagcggatacgcctttagttattttgtggggacataatcccaacgaaaccatttttggtcacaccaatcactattttcaaaaaatgaaaaataatgggaccaaatttattgttgtcgatcctcgttattcagatacagcccaatctttagctgatcaatggatcccattacttcctaccacagataatgcactgatggatgcaatgatgtatgtcattgtgaccgaaaatttacatgataaagcgtttatcgataaatatgtggtaggttttgatgaagatcatatgcctgaaggggtgccagctaacgaatcattaatggcttatttattagggaaaaaagacggtatagcgaaaaccccagaatgggcgacaaaaatcacacgagtcccagccaatactatccgtcaattagcacgtgaatatgcgatgacaaaacccgcggccttaattcaaggttgggggccacaacgtcatatttgtggtgaacgtaccgcccgtggttcaacgttattagcagcaattactgggaatgtgggtaaaaaaggcgcttgggcggctggatatggcggaattggtaaccgtcaatctattcgtggtcccaatattggcaaaaatccggtaactgcacaaatatccattatgaattggatgcaagctgttgaggatgcgagcaaagtgacgccagaagatggccttattggcgtcgacaaacttgatagtaatatcaaaatgatcttttctttagcgggtaactatcttgtcaatcaaaaccctgatgttaatgcggcagctaagttacttgaagatgaatctaaagtagagtttatcgttgttagtgatctatatatgtcgccgtcagccaaatacgcagacttagttttaccagaaacgagctttttagagcgttggaatatcggtaatacatggggaacgggcaactatttcttactgtcagaaaaggtcgttgaacctgcttttgaaagacgttctgattatgaatggatcagcgatgttgctgagaaaatgggagtcaaagaggcttttaccgaaggacggacagaaaaagagtggatagcttatctcgttaatactaacaaagaacgctttaaagatagacctgatttcccaacttttgatgaattactcaagactcgccgctatcttttcaaagatgcaccttttgttgcatttgaagaaaatattcgtgatccagaaaatcatcctttcccaactccatcaggaaaaattgaaattttctctaaacgtctctatgacatgaataatgtcgatattcctgcattatctcattatgttcctgcaattgaaggtccagaagataaattgaccgagaaatatccactacaaatgttaacttggaaaggaaaaaatagagctaattcaacgcaatatgctaacccttggttacaagaggtacaacgccaagaaatgtggataaaccctattgatgcacaaaatagaggcatcaaaaatggcgatatggtgcgtatctataacgacagagggatcacccaaatacccgctttagttaccgagcgaattattcctggtgtggttggtttacaggcgggggcttggtggtctcctgataaagacggtgttgatcatggtgggtgccctaacgttttgacatcaacacgtatgacaccattagcccatggtaattcacatttaaccgttttagttgaggtaaccaaagcatga

SEQ ID NO: 306514 - DNA, 924 bp, Proteus mirabilis
atggcgaagcaactttcacccgctggcgtaatggctcttaaagaagcactatgttcagtatactggtacaaatctgatttgcgtggttttttaagtctttgcctttcaaatccagcagtcctgaattcctttaactgggaaaattacaaacgacagatcgcatctgatgtcgtcgatttccttgtagcaaacccaaccaaccatctcggagatcttaccaaaatttgctatgaactatgtaaattagcagatttttctcatcttaaacctctcgatgatggttccactaaagttgaaaaagcacgtaacgccgtcaatcagttgaagcaacttgtaggaacacatcaagaaagtaaacatgaacaagatgaaatcaagaagcggcaagaaatagcagcacaaaaactacgcaaaaatgcagctgttcgccagaaacttgaagcaatcaaaaacaaatatatggcgctaatcagctcaattgaccctcaaggaagaggatttgaacttgaacgaattatgtatgacctttttgaacttttcgacttagacccaaaggcttcttttaagaaccttggcgaacagttagacggtgcctttaccctagacggtactgaatatttatttgaagctaaatggcataaagaacttgtaaataaagcatctctggcagtgtttactgataaagtgcgaactaaactagaaaatacactaggaatctttctttcaatcaatggtttttctctcgatggtgtagctgcacatcaagctggtggtgcatccattcttctgatggatggtagtgatctcatggcagtgtttgaggaacgaatcgattttgtgagtttgttactaagaaaaaaacgtcatgcagcccaaacaggtaatatatatttttcatatcaccaaatggtttctagtgcataa

SEQ ID NO: 306515 - DNA, 423 bp, Proteus mirabilis
atgtcaaaagagataagcgaattacagtttagtcttcactatgcctcagaaacagacagtgaaaagaacacctctatcattttaacggcgaatatccatacggctgatggtgaaactcaacagcttacacaactaatttgcacgacatctcccgcaggtaaaaagcaatatcgaatcggtacacaaaaaattaatgatgcaggtgacccattgctggtggcgattgaatcctattggcgcaaaaacatacaagagagttgtgtttatttgttagagaaagcgaagcaatttattcaaggacacttacaacaaacgaatacatggatatccatgtatggtcttgtgattgtttctagtgcgtcacttgaagagcagttgcctgaaggtttattaaaggcacttaaagtatcaatacccgcctaa

SEQ ID NO: 306516 - DNA, 462 bp, Proteus mirabilis
atgaaatacgggaaactctatgccgtcattacgatggtaggcatcattgtgggtagttattgggtgattaactggcaagctaacaggattaattcactgacagataccaacaaaaaactaacagtggctctcgaagaacagaggtctattaatactgattaccaagcacgcataatgcgattaaaccaactggatattcaatatacacaggagttagcggatgccaagaataaaattagtcggttgcgtgatattagtgagcgtaatcctgagcgggtgtatatcaaagccgagtgtccaaaaagcaaaaccactccctccaccagcttggcttatacaaccaccgccagacctactgacaccgctatcagaaattattggttactcagagagcgaattgcagagtcagaacagatgattaaagggttgcaggattatattagagtggagtgtgtgaactaa

SEQ ID NO: 306517 - DNA, 693 bp, Proteus mirabilis
atgtctattgcaaaacgcaccaaagacaaacgtattgcgttaggtttaacacagtctgagcttgctaccttggctggtacaacgcaacaatcaattgaacagcttgagagtggcaaaaccaaacgccctcgttttttacctgaattagcaaaagcgttaaattgtgaattatcgtggttgctcgaaggggataataaacaaacacacgcttctgaaattcctccccaagatgaatggcattcagtcagtgaatgggataacgatacccctctcaatgctgatgaagtcgagatccgttattttaaaagtattgaacttgccgctggtgatggctgctgtactaacgaagatcataatggttataaattgagattctccaaaagcacactacgccgctatggcgcttcaccacaaaatgtgatctgtttttccgtctatggtgatagtatgtctccggttattccaaatggttcaacagtgaccgttgatacaggtaatacgcggattgtggatggcggtatttatgctatcgaacaagattcattatttagaataaaattactctaccgtcagccaggcggaaaattaattattcgtagctacaataaagatgaatttcctgatgaatttgcagaaattgactccgttaaaattatgggacgcgttattcactggtctgtgatggcttggtga

SEQ ID NO: 306518 - DNA, 624 bp, Proteus mirabilis
atgttaaccattcactcgttaactaccggtattttaaccgaggtttcattacacctagagcaagggtgttgtttagggatcagtggctcatcaggtagcggcaaaacaacgttactcaatgctattgcgggttataccggctatacaggggatattgttttagctaaccaaaatatgaataaattacctgtttggcagcgcccctgtcgttatttaaatcagcgtctttatttattcccttttctcactgtaaagcaaaatttatggctggcacaatatgcggctaagcaaaagcgcagtaaagaaaaagagatagcgttacttgaacagatgggaattgctcatttagcaacacgttatccatctcaaatatcagggggagagcagcaacgagttgcattagcaagagcactcattagccaacccaaactgttattaatggatgaacccttttcaagtttggattgggaaacacgttatcagctgtgggagcttattatctcattaaaaaaacagcagataacgatgataatagtcactcatgagcctcgtgaattgcaagcattagcagataaaacgctgttattatctaatgggaaaattgtgcaagaaagtaaaaactaa

SEQ ID NO: 306519 - DNA, 180 bp, Proteus mirabilis
atgagtgttcccgttttaggtcttggtacttttcgtttaaaagacgatgcggttataaattctgtaaaaactgcactagaactaggttatcgtgctattgatacagcacaaatttatgaaaatgaagctgctataggacaagctatttcagaaagtggtatatctcgcgatgcgctttag

SEQ ID NO: 306520 - DNA, 3081 bp, Proteus mirabilis
atgccaaattttagagatgaacaatatatttcagcgtttttatttaatatggggctttggaaaagtaagaataatataagcttgatggctggtaaagatattgttagtcagggaataaaatattatagtaacaaagaaataacttttaatgcaggacaagatatttttcttgcctccaaattaataaaagaagccgctccttttttcagtgatattcattacccccaactacaatctaaattattttcagataataaccttattttaaatgccgcgcgtgatattgatttaagttcaacagtattaaattcaaaagataaagttattgtattagcgggtagaaatataaaactgggtgcaaatgcttattccgccatcaaagatccccacgaagatgcgcaagacattcaatatgccaccacatccattatgggaaataaaggtatttctattgcatcatcaggctcactcacaacagaaggaaattcacttaaatcagagggggatattgctatttccagtggtggcaatatccaattgggatcagtaagaacacattttcgtaaagagtcggactcagagttagaagaacttcgtaaacaagtcagtactgaaattaatagcggtaatcatctaacactattatctgagggcagtattttatttcaggcctctcaattggctgctaataaaaagatggatattgctgctaaaggtggatttctttatgcacaggcaatggaagaatccagttactatgaagaagaaaagaaaaaatgtaattggtggacactgtgtgcgactaaaaagaaatataccaaaacatttaataacacaacgaataaagttaccgagtttattgctaatgacgatattaatttaattgctaaagatgatatcactttagaagcaagcaaattagagacagcaaagaatgccaaattaaccagtaaaacaggaggcattaattttaaagcggtgaaagatactgcttttaaacaagttattactcgttcaaaagatatatatatcactcaacgtaatcagggatacaccaagggaacatggctattacctgaactctatattggcggaaagctgactatcgatgcgccaaaaggcatatctgcagatattaaagccaaaaaagagcaatctttagagcaggcattaactgccttaagtaacacaccagaatatgcttggcttaatgcgctccaaggtcaagaaaatattaattggaatttagtgaaagacacttattccagttgggatgataaaacccagcagttaaatccagttgttggtgcggttattgccatcgcggtaggggttgcaacttatggtacggcaacagctgcctcaataggaggaatggcaagtaatgccactattgctgcaggagcctctgcgggggttgcgtcaacggcatcagttgcggcacaagccggttttgcttctttagtttcgcaagctgcggtctctttagccgaaaatcaaggcaatatttctaaaacatttggcgccttaagtcgcagtgatacggtgaaatccattgtcaccagtatggccgttgcaggcgccttgcaaggtcttgaccaatttatgggttgggatcaagcaatacaggggggaacattaccgacaacaggcaagttgcttgcgacggataatgccacatggactcaagttgctcaacgcgttgcctcacagtcagtagtgagttctacactgggcacagccattcaaggtggcagttttattgataattttaaaactgcgttattaagccatatcggcagtcaatttcacgctgaaggtgccaatctcattggtgataacggtgcgatattagggcatgcaggaaaggttttaagccattctgttgttgcaggagtgagcgctgaaattgcaggaggcagtgtaacaggtgcagtagccggcgccttggcagcagaaatagcggcaatatcgctacaaagtaaattatttgagcctagttatttaaatgaaactgacagacaagttgcattaattcaagaggcactacatggcaatgaaggaaaaacacagctcactaaattaattggtgcactgacaggcgctattgtgactcgtaagcctgagggcgtattttctgcggctaattctgcggagttagtttatcgacataattacagcgaacatatgctttcaaagctagcactagaaaataataaggacataattgcagcgtcaaaaggtgatgttgcagcagcagaaagagttgtaaatcgacaaaatgcagggatgattgcgattgctcttggtttaggaggaagtgcgagcattattggtggtcacactgttattgcagcaacaccagaacttattgctattacgcaagctgcatttagtacatgtaaagctaattgggtttattgtgctaatcagctaggtattaatattgctgggatatcagctccagaagctgcaatcgctggtgtcaccgttggtactggttataaagtattagctagttcagaagaaagtgctaaagctttctctagcatgttagctaatagttcaaagtctttaatgacttcaggaaaattaaatataactgctataaaaccgatagtagaacaagaaaaattattaataactaccaacaaaaaagctattgaaataatcaataacggggagtttataatatattcaggagtaactacgaatggatataaagtatctaatggagccaaaaccgtagtttttaaaaatgaattagaacatcctattgttcaatctaggattaatattaaagtgggagatgttgaatcaggttggttgcatgtacaaaaacgtcatttttcaggagcgcaaaatgctagccaatttacgcttagtgaacaggaaattaaagatatattattaagtcctgctgtcattaagattcctattaataaaacgagagaatcatataataaaaacaccaatagtattgatattttgtatgaaagagtgattcagcttgataaaaatataggaattgataaatttagtaaacagctccgtacctcaaaaaagtatttccatcattga

SEQ ID NO: 306521 - DNA, 315 bp, Proteus mirabilis
atggggtatatccctgttgatgaaggaattgctgctatcttacaagacggtggtattcctatacttgctcacccatgtgtctatgacaactatgatgaaatagaaaaatatgtccagtttggattgaaaggattagaaataagtcattctagaatgaaacctatcgactatgaactgacccaaaactatgctaataaatttggtttgctaaaaagtggcggtagtgacttccatgatcctgcgttacttaaatttggcgattttggcctaaatcaaacacaatttgagaccttaaaaaaggacgcaaataaataa

SEQ ID NO: 306522 - DNA, 864 bp, Proteus mirabilis
atggaaaagagacattatcaacttattgaacaagcctgccgttttattgaagaaaatcagggtgatgtttctcttgccgacatcgccgcacatattcaatccagcccatattatttccatcgacgatttaaatctataatgggaattacacctaaagagtatgcgaatgcttatcggcacaaactaattaagaaagcattagctggcgataaaacaattacagatgcgatatatcgatcaggctttaatgcgaatagccgattttatgaaaatgcgacggccatattaggtatgacgccaacccattggcgcaatggtggacaaaatatcgtgattttttttgctgtagggatctgctcattaggccatatccttgtagctcaaagtgaaaagggcatttgtgcgataacacttggcgatgatcctgcgtgtttattagaagaattacaaaaacaatttcctcaagctgaacttgttggtgcaaaccaagagtttgaaaaattggttgcccaagtcattggttttgttgaactgccaacacaacctttggcattaccacttgatattcaaggaacagtatttcaacaaaaagtttggcgggcattattagatattccttttggttgtaccatgacatatcaagaaattgctcaaaaaattggttcgccaaaatcttatcgagcagtggcgaatgcctgtgcatcaaataaactagcagtggcgatcccttgccatcgagttatcagacaaaatggtgaaatatctggatatcgttgggggattgagcgcaaagaaaaattattacaaagagaaaaatcccttcatcatcagcatgatagattggctattagcaagagcgattaa

SEQ ID NO: 306523 - DNA, 345 bp, Proteus mirabilis
ttgtttgaaattcctatgttaattgaaaatatcttgaatgaacaattcaaaggtttgcttagacttaattcgagtaaaactatcttttcatccaaagcacataatagacatgttactggcattacacttaacaatgatggcaaaatttctttaggtagagatagaaaacgatatatcaagcataaggttcatttgtataccttgggtatgttagatgctacagaactcaatcacctaaagggtatgatcacatttgctagattcatagagcctgcgttctttaaatcgcttgaaacgaaatataactcgaatgtgatttttaggcttactcaggagaaaatatga

SEQ ID NO: 306524 - DNA, 2550 bp, Proteus mirabilis; identical to SEQ ID NO: 20729

SEQ ID NO: 306525 - DNA, 579 bp, Proteus mirabilis; identical to SEQ ID NO: 300058

SEQ ID NO: 306526 - DNA, 162 bp, Proteus mirabilis
atggcattgttattacgggaggggagtgtagagactccatatagcttgcctttagtctgtgcaaccagtcagtttgtgaatgcgccttatcaggatgaccacattgattgggccaagtgcaatacggggataacgttttcgggggaaaacagatttttgtga

SEQ ID NO: 306527 - DNA, 141 bp, Proteus mirabilis; identical to SEQ ID NO: 300062

SEQ ID NO: 306528 - DNA, 504 bp, Proteus mirabilis
atggcacatcaagtgactttacaaggtaatgcggtgactttagctggaaatttccccactgtaggccaaaaagcagccgatttttctttagtaggtaaagatctaaatgatgtttctttagcgcaatttgccggcaaacgtaaagtattaaatattttcccaagtgtagatactggtgtttgtgcagcgagtgttcgccaatttaataaagtcgccaacgaattaaataataccgttgtactgtgtatttcagcagatttaccttttgcacaagcacgtttttgcggtgctgaaggtttagataatgttgtcacattatcaacaatgcgtggtgcggaatttaaagaaaactacggtgtcgcgattacgtcaggtcctttagcgggattaactagccgtgctgtgattgtacttgatgaaagtaacaacgttatctacacccaattagttgatgaaatcaccactgaacctaattatgacgcagcattagctgtactaaaataa

SEQ ID NO: 306529 - DNA, 309 bp, Proteus mirabilis
atgaattacattcagcgcaaacttcgccaaattaaaatcaagcttgctgaggcacaggacatttacttagacgaagacgatcccgaacaatttaatgaggcgataaatcgtgtctacgatgaatatgatgtcgccagaatgttggcctttaagttatgtgatgaaaaaggggaattgctttttgatgccgaaaatgaagaagacttaaaaggtcttaatcgtttaggacaagggttctctaatgcggtgtttacggccgaagcggggaacagcgaaaaaaacttggagaacggcgacaatttcaattga

SEQ ID NO: 306530 - DNA, 231 bp, Proteus mirabilis; identical to SEQ ID NO: 304438

SEQ ID NO: 306531 - DNA, 246 bp, Proteus mirabilis
gtgatccaatttgccagtatcacacctaacagtgcgctggaggatgcggatttagataactatcgtgtgcaacttgatgtgtatgcgccacagccacaaccccttatggtcttgcgtaaaaaaattgaggctcagattgttgaagcgatcccattcgcacaacgggtgaatgcggtctttgggtatgaagcggatgtcaaattgcatcggcttgttcttgaattaatgatttcatcagataaataa

SEQ ID NO: 306532 - DNA, 666 bp, Proteus mirabilis
atgacaaagccaaagaaccataaagcgacgcctttcctcggcacgaagatctttgtgcaaaccggcttaggggaggtgatgaccgtgacggaagcgacgttatcacccgcaactattactatcgccaataataagctgaaagccgatgacatgattatgttatcgggactcggggagttagatggacgttttcctgttgcacaggttgatggcaacaaagtgaccctgtgcgacgaagtggattggagtgataaaacgctacccactgatttttcaagtgctaaggcacaacgtattcaatggtctaataacttttgtgcggtaaaaagtttcagcaaagacggttcgacaaccgaacaaatcgatgtcaccaccatttgcagtgatggcaaggaatatgaatccggcgatacggaatacggctcaattaaattgacctttttcttacgttatagctccagtgatgtgcagcgactcttgcgtaaatatgaaaacagcaaagaaaaatttgcggtgaaaatgatcttaacacgagatgagggctccatgttttattacggctctgtcgaaacgggcatgaacattgatggcagtgtagggcaaatgatggattcggggatctcgattaaattgtctggccgtgattatttgaatgcgaagaaataa

SEQ ID NO: 306533 - DNA, 417 bp, Proteus mirabilis
atgtctaacgctttattgcgtgaattagtgttaaaccaagcactgaaagtgacgccttttacttatttagacaacaccttttatgtcaaagagttggatgttggcaccatgaattacattcagcgcaaacttcgccaaattaaaatcaagctcgccgaagcgcaggatatttacttagacgaagacgatcccgaacaatttaatgaggcgataaatcgtgtctacgatgaatatgatgtcgccagaatgttggcctttaagttatgtgatgaaaaaggggaattgctttttgatgctgaaaatgaagaagacttaaaaggtcttaatcgtttaggacaagggttctctaatgcggtgtttacggccgaagcggggaatagcgaaaaaaactcggagaccgacgacaatttcaactga

SEQ ID NO: 306534 - DNA, 246 bp, Proteus mirabilis
gtgatccagtttgccagtatcacacctaacagtgcgctggaggatgcggatttagataactatcgtgtgcaacttgatgtgtatgcgccgcagccacaaccccttatggtcttgcgtaaaaaaattgaggctcagattgttgaagcgatcccattcgcacaacgggtgaatgctgtctttgggtatgaagcggatgtcaaattgcatcggcttgttcttgaattaatgatttcatcagataaataa

SEQ ID NO: 306535 - DNA, 666 bp, Proteus mirabilis; identical to SEQ ID NO: 301254

SEQ ID NO: 306536 - DNA, 666 bp, Proteus mirabilis
atgacaaagccaaagaaccataaagcgacgcctttcctcggcacgaagatctttgtgcaaaccggcttaggggaggtgatgaccgtgacggaagcgacgttatcacccgcaactattactatcgccaataataagctgaaagccgatgacatgattatgttatcgggactcggggagttagatggacgttttcctgttgcacaggttgatggcaacaaagtgaccctgtgcgacgaagtggattggagtgataaaacgctacccactgatttttcaagtgctaaggcacaacgtattcaatggtctaataacttttgtgcggtaaaaagtttcagcaaagacggttcgacaaccgaacaaatcgatgtcaccaccatttgcagtgatggcaaggaatatgaatccggcgatacggaatacggctcaattaaattgacctttttcttacgttatagctccagtgaggtgcagcgactcttgcgtaaatatgaaaacagcaaagaaaaatttgcggtgaaaatggtcttaacacgagatgagggttccatgttttattacggctccgtcgaaacgggcatgaacattgatggcagtgtaggacaaatgatggattcggggatctcgattaaattgtctggccgtgattatttgaatgtgaagaaataa

SEQ ID NO: 306537 - DNA, 399 bp, Proteus mirabilis
atgaaacaacaaaactggacactccagttaccagaaacgataagggcggcgatgtgtcgccctttttcatggggtgaatttgattgttggatttttgcctcggaatgtatttacgcacaatgtggtttctcgccaataaagccttatctcaatcactataaaaccaaagccgaagccttcaacctgctcaaatctaaatttggctccttagagaaagccgtatcacgctatttcaaatccattgagattgagcgcgttcagcgtggcgaccttgtactgttcaaaggtgaggacggtgacagtttagcggtggtctgggcgaggcattattggggcgtaaccccacaaggcgtgaagccggtgcagattaacccaatcaaagcgtggagagtggaataa

SEQ ID NO: 306538 - DNA, 306 bp, Proteus mirabilis; identical to SEQ ID NO: 297209

SEQ ID NO: 306539 - DNA, 918 bp, Proteus mirabilis
atggaacttacctttttaggcactaatgcaggcgtaccttctaaagatcgcaacgtcaccagtatggtgcttgatttacaaaataaacaaaaaagtctgtggatgttcgattgtggagaggcgacccagcatcagatcttacatagccatgtaaagctatcacgcattaataagatttttattacccatttacatggtgatcatatttttggtttacccggactactctgtagccgttcaatggggggcacagaaaacccgttaaccatttatgggcctacaggcattaaggcatttatagaaacagcccttacattaagccaatcttatctcacttaccctttagatattattgaaatagaacaagatggttttctttttgaagaagaaggtatacgtgtaagttgtggcgcattatcacatcctgtcccctgctttggttatcgtctagaagaagacaataaaccaggtaaactcaatgctgacaagctagaggcagagaatatccctagaggcccttggtataaattattaaaacaagggaaaaccgttacactacctgatggacggatcatagatggaaaagattatctaagcacagagatcaaaggccgttgtattgtgatttttggcgatacacaaccaacgcctaatgcagttaaactcgctgagaatgccgatgttattgtccatgaagcaacctttaaacatgacatggctgataaagccaatagtcgtggacattcaagtaccatacaggcagctgagttagccaaaaaggcgaatgctaagcgactaatcattacccatatcagtagtcgctattcacctaaagaaacccccgaactattagcggaatgtcatactatatttgacaatacacaaatcgccagtgattttgagacattcaaactttaa

SEQ ID NO: 306540 - DNA, 441 bp, Proteus mirabilis; identical to SEQ ID NO: 294296

SEQ ID NO: 306541 - DNA, 306 bp, Proteus mirabilis; identical to SEQ ID NO: 297209

SEQ ID NO: 306542 - DNA, 399 bp, Proteus mirabilis
atgaaacaacaaaactggacactccagttaccagaaacgataagggcggcgatgtgtcgccctttttcatggggtgaatttgattgttgtatttttgcctctgaatgtatttacgcacaatgtggtttctcgccaataaagccttatctcaatcactataaaaccaaagccgaagccttcaacctgctcaaatctaaatttggctccttagagaaagccgtatcacgctatttcaaatccattgagattgagcgcgttcagcgtggcgaccttgtactgttcaaaggtgaggacggtgacagtttagcggtggtctgggcgaggcattattggggcgtaaccccacaaggcgtgaagccggtgcagattaacccaatcaaagcgtggagagtggaataa

SEQ ID NO: 306543 - DNA, 585 bp, Proteus mirabilis
atgagtttttacgccacaattattctcgcccttgctctttctatggacgcatttgccgtcgctgtctgtaaaggcgccaccttacataaacctcattttcgtgaagccctccgcaccggttttatctttggtattattgaagcaagcaccccgattattggttgggcattaggtttatataccagtcaatatattattcagtgggatcactgggtcgcctttggtttattggttatcttgggtggacgaatgatttatcagagtttaaagcgtggtgatgattgcatttgtgaagaggctcctcaacgtcacggttcactctctttaattgcgacaggtattgccaccagccttgatgctatggcaattggtgtcggcttagcctttctacaagtcgatattgtccataccgcgatgaccatcggtatgatgaccatgattatggcaacactgggtatgctgatcggtcgctatattggccctgtgcttggcaaaaaagctgaaattatcgggggtatggtgttgattgctatcggctttaatattctttttgaacatcttgatctgtttatgtacgcacattaa

SEQ ID NO: 306544 - DNA, 747 bp, Proteus mirabilis
atgaggggatctctcagagccgtgtatccacacagtgacagaatattactaaataatatcaattttgctctattaccgggagatatactaggtattattggcccgagtgcttctggtaagtcttctttagcaaaatttattgtcggtatatggcaggtcaaaaaaggcattgtacgattagataatgcggatatctttcagtggagtaaagaagaaattggtccacatattggttatttacctcaagaaatcgcccttttccccggcactatcgctgaaaatattgcacgctttactgaggttgatcctcaaaaagtgatccaagccgccaaaatggcacatgtacacgagatgattttacgctttcctcaaggatatgaaacccaaattggtgctcacggtgaaggattatccggcggacaaaaacaacgtattgcattagccagagcattatatggcgatcccacgttagttgtcttagatgagccaaattctaatttagatgatttaggtattagagcgttaacacaggcgatcgaaacattaaaacagcataaaaaaaccgttattttaattacccaccaaaaacagctactttctgtcactaataaattattagtgatatttgatggaaacaccaaattattcggtccaacggcgtctgttattgctgaattaaataatccaactatcacaaaaacggcaaacactatttcttcaacaccagcaacctcaaataacgcttaa

SEQ ID NO: 306545 - DNA, 306 bp, Proteus mirabilis; identical to SEQ ID NO: 297209

SEQ ID NO: 306546 - DNA, 399 bp, Proteus mirabilis
atgaaacaacaaaactggacactccagttaccagaaacgataagggcggcgatgagtcgccctttttcatggggtgaatttgattgttgtatttttgcctcggaatgtattgacgcacaatgtggtttctcgccaataaagccttatctcaatcactataaaaccaaagccgaagccttcaacctgctcaaatctaaatttggctccttagagaaagccgtatcacgctatttcaaatccattgagattgagcgcgttcagcgtggcgaccttgtactgttcaaaggtgaggacggtgacagtttagcggtggtctgggcgaggcattattggggcgtaaccccacaaggtgtgaagccagtgcagattaacccaatcaaagcgtggagagtggaataa

SEQ ID NO: 306547 - DNA, 306 bp, Proteus mirabilis; identical to SEQ ID NO: 297209

SEQ ID NO: 306548 - DNA, 399 bp, Proteus mirabilis; identical to SEQ ID NO: 306542

SEQ ID NO: 306549 - DNA, 309 bp, Proteus mirabilis
atgaattacattcagcgcaaacttcgtcaaattaaaatcaagctcgccgaagcgcaggatatttacttagacgaagacgatcccgaacaatttaacgaggcgataaatcgtgtctacgatgaatatgatgtcgccagaatgttggcctttaagttgtgtgatgaaaaaggggaactgctttttgatgctgaaaatgaagaagacttaaaaggtcttaatcgtttaggacaagggttctctaatgcggtgtttacggccgaagcggggaatagcgaaaaaaactcggagaccgacgacaatttcaactga

SEQ ID NO: 306550 - DNA, 342 bp, Proteus mirabilis
atgatacagcaattaaaagagaccctttcaccgcttgtcgatggaagggttttttttcaggtattacccgaaggcaaagggcgttatcccgccattgtgatccaatttgccagtatcacacctaacagtgcgctggaggatgcggatttagataactatcgtgtgcaacttgatgtgtatgcgccacagccacaaccccttatggtcttgcgtaaaaaaattgaggctcagattgttgaagcgatcccattcgcacaacgggtgaatgcggtctttgggtatgaagcggatgtcaaattgcatcggcttgttcttgaattaatgatttcatcagataaataa

SEQ ID NO: 306551 - DNA, 228 bp, Proteus mirabilis; identical to SEQ ID NO: 300275

SEQ ID NO: 306552 - DNA, 309 bp, Proteus mirabilis; identical to SEQ ID NO: 306549

SEQ ID NO: 306553 - DNA, 399 bp, Proteus mirabilis; identical to SEQ ID NO: 306542

SEQ ID NO: 306554 - DNA, 306 bp, Proteus mirabilis; identical to SEQ ID NO: 297209

SEQ ID NO: 306555 - DNA, 276 bp, Proteus mirabilis
atgcatgcggcgcaaggttatgcttcggggggctttgtgggggcggtcgcagggcgaataccggttacaccgcaaccgacgttagcccgtgcgggtggtgtacaaatgacggtcgtcaatcatattacggtgacaggaaatggtgacgctgtacttgcgcaggcaatgaaggaagccgcacaacaagggacagaagccggcgcacagaaagctcacgcgatgatgttacaagactttcaaagtaatggtgcagcacgcagaacattaggagtttaa

SEQ ID NO: 306556 - DNA, 228 bp, Proteus mirabilis; identical to SEQ ID NO: 300275

SEQ ID NO: 306557 - DNA, 228 bp, Proteus mirabilis; identical to SEQ ID NO: 300275

SEQ ID NO: 306558 - DNA, 246 bp, Proteus mirabilis; identical to SEQ ID NO: 306531

SEQ ID NO: 306559 - DNA, 309 bp, Proteus mirabilis; identical to SEQ ID NO: 306549

SEQ ID NO: 306560 - DNA, 306 bp, Proteus mirabilis; identical to SEQ ID NO: 297209

SEQ ID NO: 306561 - DNA, 321 bp, Proteus mirabilis
atgaatgagcaaagtcgaggacgcgaagtccggttgatgatggtcgccatcagtgaagagggaaaaccgttgcttgctgaagtcttatttgtcggacaaatcacatcgattaatgtggtgtctggcgaagaaaatgccgtatgtgttaatgtttctaatcgattcgagcgatggtcaatcgggttacccgatagattcactgatgaatcttggtcgtcaagaaggcaaggggatcgcatctttcgctatgtcgctcaaatggctgaacgggcgatttattggggcagcaagaaagatgcacctgcatttatttataagtaa

SEQ ID NO: 306562 - DNA, 321 bp, Proteus mirabilis; identical to SEQ ID NO: 306561

SEQ ID NO: 306563 - DNA, 306 bp, Proteus mirabilis; identical to SEQ ID NO: 297209

SEQ ID NO: 306564 - DNA, 321 bp, Proteus mirabilis; identical to SEQ ID NO: 306561

SEQ ID NO: 306565 - DNA, 306 bp, Proteus mirabilis; identical to SEQ ID NO: 297209

SEQ ID NO: 306566 - DNA, 768 bp, Proteus mirabilis
atgagtaataaattagatttatcacttaattcacgcatttatactgcagcttaccgagaaaaattaaacaaaatagcgaatattaatccaacgttagcattaacagatctaattactttacgacaattcattactagtcatgccatattcactttctttgatctaccttggttccctatttaccttttagttattactttatttaatccttggttaggattatttgcactttgtggtgcccttatcttatttgctttggctatccttaatgaatatctatctaaaaatcatttaaaaaaagcgaacaattttgccaatcaagcacaactaatacaaagtcatcatttagaacatccacagactatcgaagcgatgggaatgcttagtcaattacgtaaacaatggcaaacctctcatttcaaatatttacaagcacaaacacaagccagtgataatgcagctggtattaacgctatcacaaaagtaacacgtatggcattacaatctttaatgctaggtttagggggatggcttgctattgataatactatcagtcctggaatgatgattgccggttcaatacttttaggtcgagcattagcccctattgagcaagtgatcaatgtatggaaaagttgggatagtagtaaagcagcctacaatcgattgacaactttattaaaaacataccctcaagaaaataaaaaaatggccttacctaagcctcaaggccaattacttgttaatatcgatgaagccgtgtactga

SEQ ID NO: 306567 - DNA, 306 bp, Proteus mirabilis; identical to SEQ ID NO: 297209

SEQ ID NO: 306568 - DNA, 504 bp, Proteus mirabilis
atgaatataattattaatgatgatggttctgtccgtattgaaacaaaaacatacagtgcgtcttattgtgcgaatggttatttaaaactttcaataggtggtaaggctcctgaaaagataactattaatcatcctaaaaaagaaataggtgagctgatttacaaagtctcagtagatacaagtgacttagataagttagaagaacagctcactcgcattaagcaactgatgcaagatgtaggggtaaagcctaaatcaacaccacagtttgctggtaagttatttatcaaagatacctttgttaattccgcagaactaaaagatgtggctgtcagttataagttagaacagggtactaaggctgagttggcggatttacgcatgcgagctaatagtcaagatattgctatcactgagttaaaaagagtaatggaaactcagcatcaagcgtgggcacaagctgtgagtgagttaaataacaaaacgtggtgcagtcagagataa

SEQ ID NO: 306569 - DNA, 306 bp, Proteus mirabilis; identical to SEQ ID NO: 297209

SEQ ID NO: 306570 - DNA, 246 bp, Proteus mirabilis; identical to SEQ ID NO: 306531

SEQ ID NO: 306571 - DNA, 378 bp, Proteus mirabilis
ttgaaaagtcgtcaagtaaggcgatttgttcacgctttaagcgatgcaacaaaaagtgcatcggttaaagtgattaaaggtggactcaaccagggaacttgggctttagagttagtcgttattagatatgcagcttggttaaagccagaatttgaaatccttgtctacaacacgtttaaagaggctacgaggaagggattagatgtcatgtctaagttgaacaagctagatcatgtcattaataccgaaactaaaaatataagtaactgtgcaagaacgatggctaactggggagttggtggtagaaagcagttactactaacagcgagggaacgaattcttaaagaagctcaaatctatattcctggtattgaatag

SEQ ID NO: 306572 - DNA, 231 bp, Proteus mirabilis; identical to SEQ ID NO: 304438

SEQ ID NO: 306573 - DNA, 231 bp, Proteus mirabilis
atgcctgaaagccacttgtgtgaatatgaagccttttatcgcaaacaaccctttggtttatggcgagaggattatcggatggcacaagtggtgcatcttcttgcgatgataaatcgtgatccgaaatctaccccacctcaattaactgactttatgccaatgtggcagaaaaagcccacagaagctgaagagtgggatagtgttactgagagtgtattggctcatcgatag

SEQ ID NO: 306574 - DNA, 228 bp, Proteus mirabilis; identical to SEQ ID NO: 300275

SEQ ID NO: 306575 - DNA, 348 bp, Proteus mirabilis
atgagtcgccctttttcatggggtgaatttgattgttgtatttttgcctcggaatgtattgacgcacaatgcggtttctcgccaataaagccttatctcaatcactataaaaccaaagctgaagccttcaatctgatcaaatccaaatttggcacattagataaagccgtttcacgctatttcaaatccattgagatcgagtgtgttcagcgtggtgacctcgttctgtttaaaggtgaggacggtgacagtttagccgtggtctgggcggggcattattggggcgtaaccccacaaggtgtgaagccagtgcagattaacccaatcaaagcgtggagagtggaataa

SEQ ID NO: 306576 - DNA, 246 bp, Proteus mirabilis
gtgatccaatttgccagtatcacacctaacagtgcgctggaggatgcggatttagataactatcgtgtgcaacttgatgtgtatgcgccacagccacaaccccttatggtcttgcgtaaaaaaattgaggctcagattgttgaagcgatcccattcgcacaacgggtgaatgctgtctttgggtatgaagcggatgtcaaattgcatcggcttgttcttgaattaatgatttcatcagataaataa

SEQ ID NO: 306577 - DNA, 246 bp, Proteus mirabilis
gtgatccaatttgccagtatcacacctaacagtgcgctggaggatgcggatttagataactatcgcgtgcaacttgatgtgtatgcgccacagccacaaccccttatggtcttgcgtaaaaaaattgaggctcagattgttgaagcgatcccatttgcacaacgggtgaatgctgtctttgggtatgaagcggatgtcaaattgcatcggcttgttcttgaattaatgatttcatcagataaataa

SEQ ID NO: 306578 - DNA, 246 bp, Proteus mirabilis; identical to SEQ ID NO: 306531

SEQ ID NO: 306579 - DNA, 246 bp, Proteus mirabilis; identical to SEQ ID NO: 306531

SEQ ID NO: 306580 - DNA, 309 bp, Proteus mirabilis; identical to SEQ ID NO: 306549

SEQ ID NO: 306581 - DNA, 231 bp, Proteus mirabilis; identical to SEQ ID NO: 306573

SEQ ID NO: 306582 - DNA, 423 bp, Proteus mirabilis; identical to SEQ ID NO: 113698

SEQ ID NO: 306583 - DNA, 342 bp, Proteus mirabilis; identical to SEQ ID NO: 297214

SEQ ID NO: 306584 - DNA, 246 bp, Proteus mirabilis; identical to SEQ ID NO: 306531

SEQ ID NO: 306585 - DNA, 306 bp, Proteus mirabilis
atgagaaaatttcacttaattatcattatgatttgttttcatttagttagcattcaagctgctaatgcagagtcaatcttaattagtacagctaagttagtttgtgaagataaagaaactccagaattagtgaaaaagtgcaagttgatggtatacaaaattggtgagtcttcatttaatttaggcaaggcaacagcggcttgtgagttagccaaaaaaaataataaagattatgatggtgatcaaaaacgggcatgtgaagaaatttccaatatggctaaggattttttaaccataacatattga

SEQ ID NO: 306586 - DNA, 246 bp, Proteus mirabilis; identical to SEQ ID NO: 306531

SEQ ID NO: 306587 - DNA, 426 bp, Proteus mirabilis
atgagcgcttggtgcgatgataaaggatttgatggcgctgccaaatttttaaaagcacattcccgtgaagaaatggagcatatgcaacgcttatttgattatttaagtgatacaggtgctatgcctttgttagggactattgaagcaccacccgctgaatttttatctttatctgatttatttactaaaacttatgagcacgagaagtttattacagctgaaattaataaacttgctcacctagcagtgacaacacaagattactcaacatttaacttcttacaatggtatgttgctgaacaacatgaagaagagaagttatttaaatctattctggataaacttgctatggtcggtgatggtggtaaggcattgttcttgttagataaagacttaagtgctctttctacatccgcgcatatttaa

SEQ ID NO: 306588 - DNA, 306 bp, Proteus mirabilis; identical to SEQ ID NO: 297209

SEQ ID NO: 306589 - DNA, 306 bp, Proteus mirabilis; identical to SEQ ID NO: 297209

SEQ ID NO: 306590 - DNA, 246 bp, Proteus mirabilis; identical to SEQ ID NO: 306531

SEQ ID NO: 306591 - DNA, 321 bp, Proteus mirabilis
atggtaacaaaaattatcataaaaggattttatcgaccaaatgaattagtcataacatcactagatagtcatgctaagaagataacctttaaaaaagtaggtaataatgtgcaagtcaataacccaacaccttattattttacggtatcaaatttaaaattcgatggcaaaagttatcaatcagcaaatgcacctatggttgcgccattttcgtcactcaatttagctatagataaatcaattaaacaggttagttggcaatatattgatgattttggtggattatcaaatacatttgaaaataaaataattgtggagtga

SEQ ID NO: 306592 - DNA, 246 bp, Proteus mirabilis; identical to SEQ ID NO: 306531

SEQ ID NO: 306593 - DNA, 309 bp, Proteus mirabilis; identical to SEQ ID NO: 306549

SEQ ID NO: 306594 - DNA, 306 bp, Proteus mirabilis; identical to SEQ ID NO: 297209

SEQ ID NO: 306595 - DNA, 252 bp, Proteus mirabilis
gtgatttggacggatcatgcgacaaaagtacgtgcagcgatcatgccttatcaaggacgggaatattttcaagcccagcaagtacaaagtgaggccacaacgcgaattcttattcgctatatcgctgatatcgatacctcaatgcgtattgtatggggtaagcgactatttaatattatttcgattattgaccctgatgagcgtcatcgtgagcttcaattaatgtgcaaagagggcgtgaatgatgggtga

SEQ ID NO: 306596 - DNA, 333 bp, Proteus mirabilis
gtgcctatccttaaggaaacggtaccgcatcgacgtaaaggcaccatcaagcgcaatattcgttctaaaacgaaagtgcagcgcaatgggcaagtcaaaacacgtatttgggtaaaatcattatcgggtaaaaaagtgtctgcctttaaacaagcaacgggaaaaagtgcagcattgaacccaaatgatccgttttattggtggtttgtcgagtttggtaccgccaagatgcccgcacaaccgtttatgcgcctcagctttgaggcgaaaaaggaagcgacagctaaagtgatagttcaaacactcaaagaggatattgaaaaagcaaggtag

SEQ ID NO: 306597 - DNA, 1413 bp, Proteus mirabilis
atggggagtaaatttgaaactaggttacttggtgaactttgtcatgagataacagttggttttgttggtacgatgacgaatgaatatatcgaaaatggtattccatttttgcgttcaaaaaatattgaggagtatgatgttaaatgggatgacatgaagtatgtgtcatctgcgtttcataaaaaactttctaagtccgtcctcaaaccgggcgatgttgcaattgtgagaaccggaaagccaggaactacatgcgttataccaaatgaccttcgagaggctaattgttcagacatagttattgctcgagttaataacgagctactatgtccacattacttatcgtatttcatgaatgcaatggctcatgggcaagtaaatgctcatattgtaggagctgtgcagcaacactttaatgtcagttcagctaaaaaattggaaataccgctaccttctagagtgaagcaaactaagattgttcaagtacttaagactctggatgataaattaaaactcaaccgccaaatcaaccaaaccctagaacaaatggcgcaaaccctatttaaatcatggtttgtagattttgatcctgtggttgataacgcactagatgctggtttttttgagcaggatttaggcttttctgaagaattactgcatcgagttgaagtgcgcaaagcagtgcgtgaaagtgataattttaaaccgttatcagaggatattcggcggttatttcctaatgcgtttgaagaatgtgctgagcctgcattgggacttggggggtgggtgccgaaagggtggaagggacagcccattaaaacacattgtgtaaaaattcaaaatggtgggactccaagccgttctaattcagattattgggatggcggcaatataccttggctaacatcgggtgaagtaagacaatcaattgtcacgaatgttgagaacacaattacagacctaggcttacaaaattcatctgcgaagtgggtaagttcttactccactcttgttgctttatatggagcaactgccggtgaggtatctattaatgtagatccattaacaacgaatcaagcggtatgtgcactaattcctaaagaaagttattgttggtttaactacctccaagttcgaaataaaacaatagaaatgcaaaatcaagctgtaggctcagcacagcaaaatataagtaagaggttagttgagaacttaattgtgatatcacctctgccttatattgtggagatctttaaccaaagagtagaaccattatttttgaaatcaatatttaaccaaaaaatggctatggagctaaccaaactccgcgacacgcttctccccaaattgatctccggcgagctgtctctgagtgatataaaaatagatattccagaagaaacacttatttaa

SEQ ID NO: 306598 - DNA, 231 bp, Proteus mirabilis
atgaacattaaagtcggcgatgagtttttggtttatatggcattgggtgaagagagctatatgaaggaatattatcgtgtgttggagttagatagcgcattatcacaagtgaccggtaaattgctaagaaggacgacggcagatgataaaaatattgggttagggcattgtgaattagaaggtgggattgaacaatttgcgttagaagatatttatctaatagagaagtga

SEQ ID NO: 306599 - DNA, 693 bp, Proteus mirabilis
atgcttaaagataaactaaaattcaaactacaaaaaaccgcgattatactgatttgtatcgcattattggcttttttgatgcaaggcgcctcttattttagccgtgcaaatcagcacgcccgtatcacccagtttgaagagcttgccaaaacactggcagaacaagttgccttctcattatccaattatatggatgacagtagcaaagataacgtaaatccacacattatagctaatttaaatcatctaactcacgatagtcgggtactggatgcaagtctttattggcaagatggcacacaaatagcgcatagtggtgaaaatgtgacggtaaaagagcgattggccttagaaggacaaaaaagtggcggttcttttaatcatcagctggtggtacctatccctggtcaagatcagccaaagggttttctaagattgacgttagatacacaccaacttgtcacagaatctggccaagtcgataacaccaccaatttattgcgtgtgatgctattggttgctctggcgattggttttttactgtcccacagcttattgcaattaacaccagtgcattggcagcaatcgccctatttattaaccgcaagtttacccactcgtcatgaaaaagaagatgatgaacaaaaaagtgatcagcaaaaagaaacagaaaatagatctgaagttaaataa

SEQ ID NO: 306600 - DNA, 1764 bp, Proteus mirabilis
atggcttttacacttagaccttatcagcttgacgcggttaacgcgacaatcacttattttcgccaacataaaacaccagcacttattgtattacctaccggtgctggaaaaagcttagtcattgccgaacttgctaaaagagcacgtgggcgggtattggttctagcacatgtaaaggaattagtagagcagaaccatagcaaatatgaagcctatggtctatctgcggatatttatgccgccggattacagcaaaaagagagtcgaggcaaggttgttttcggcagtgtacaatcggtagcacgtaacttatcgcagtttgagcatgctttttctctattaattattgatgaatgtcaccgtattagtctgtctgaagatagccaataccaacaagtgatcaaacaacttcaaaccattaacccccaactacgcatcttaggattaacggctactccttatcgtttaccgactggttggatttaccaatatcactatcacggtatggtaaaaggagatgacaattgtttttttcgtgactgtatttatgaattacctttacgctacatgataagtcaccatttcttagtcccaccaacacgtttagatatgcctattttgcaatatgactttagccaagttagaactagccaaaatggtatttttaatcaagaagatctcaatcgcgaagtaaaaaaacaacagcgtattacaccccatattgtgtcacagataattgaatacggtgaacaacgccgtggtgtgatgatatttgcggcaacagtcgaacatgcgacagaaatcttcacattattaccccaaggacaagccgcgttagtcagtgctgagaccccctcttctgagcgtgacgcattaatttcacagtttaaacagcaacagctacgttatatggttaatgttgctgtattaaccacaggctttgatgcaccccatgttgatttaattgctattttacgtccaacggagtccgtcagtttatatcaacagatagtaggacgaggattaaggttatttgcaggaaaaacagaatgtttaatcttagattatgcaggtaaccctcacgacctttatcttcctgaagtgggtagtaaaaagcccaatccaaatagcaaaccggtacaagtgttttgtcctctctgtcaattcgctaacactttctggggcatagttgatgcagatggcgatattattgagcactatgggcgacgttgccaaggttgggagcttgatgagcaaggacaaaaaaaacagtgtgattatcgctttcgttttaaattatgcccacactgtaatgaagaaaatgatatcgccgcacggcgttgtgtgcactgtaatgaaatcctagttgatcctgatgatatgctcaaagctgctttaaagctaaaaggcgcccttatccttcgctgtggaggaatgcaattactcagtggtcaagatgaaaaaggtgagtggcttaaaatcaactattatgatgaagaaggtacttctgtttcagaacgatttcgtttaaaaacgcctgcccaacgtaaagtatttgaactcaagtttttacgcgaacaccagcgcgcccctggcgttccttttgtatggcataacgctcaagatattattaatcagtttgatttattacgttatcctgattttattgtggcacaaaaaaataaaaaagatggcttttggcaaattcgtaataagttatttgactatcatggacgctttcgtaaagcagataccttatattaa

SEQ ID NO: 306601 - DNA, 177 bp, Proteus mirabilis
atgaacatgaaaattaaaaaaatattaaataacagtgttgtgatctctctggatgaagcagaaaaagaaattatcgtcatgggaaaagggattgcctacgccaaaaaagtaggtgatgagataacatctgaacaaataaccaaaaaatttatcttaagtcctaaaaattgtccgtag

SEQ ID NO: 306602 - DNA, 387 bp, Proteus mirabilis
atgctaacactgcttcatttactctcatccgtggcacttttagtctggggaacacatattgttcgcaccggtattatgcgtgtgttcggctctgatttgcgccgaattttaggtaaaagtattaataaaaaatcgaatgcttttcttgctggtgtcggtgttactgccttagtacaaagtagtaatgctacggcattgctagtgatttcgttcgtcactcaaggtcttatttctattacacccgctttggtgattatgctaggggctgatgtgggtacagcgctaatggcgcgggtgctgacattcgatctttcgtggttatcaccgttactgattttattgggtgtcatgacttttttaagtcgtaaaaaagagcgtatcgggtaa

SEQ ID NO: 306603 - DNA, 1326 bp, Proteus mirabilis
atgactatagaaaaaaatgttataccactgtcagaaaaaatttcagatgatccaaagaaatttctcgttattggatggactgtggttttattaggcttagcaatttttattttttgggctgctttcgcgccccttgataaaggcgttcctgcaataggaaacgtagtaatatcggggaataaaaaaagtgtacagtcttctgttgaaggtattattactcatatttttgtaaaaaatggtgatccggtatcagctggacaaactctgatacagctaagccctattcaatctcaagccttagtaaaatcgttatcagagcaatatgataatttactgatcactcaacaaagattatacgctgaacttaatcaacaaacttcatttaaattaaataatagcgataaatactattcatctactgaaaatagagagaagttattactacaacaaaatcgtttattaaatgaaaaaagtgcagaattaataagtgaaataaatggttataaagcagctatcgatggcattactggtcgcctaacccatctaaagcgctcaattcagaataaaaagagtcaaattagtaatctacaaaatcagcttaatgatttacaaatattagctaatgaaggatatattcctcgtcatcgatatcaagaaatggtgcgagaattagcagaaaataataatcaactcaacgagacttttgggcaaataagtgcattagaaaaacaaaaattagaatatgagcaaagaatattacaacgtaatgccaatttccaccaactagctcgaacagagctaaataaaatacaattacaaatcagtgaaacagaaaaacaacttattatagaaacagataaattagctaaaatggcaattatcgcaccgatatcgggtactgtaatggatctttctgtttttacccaaggtggctttgtaaaaacaggtcagacattgatggacatagtgcctgaagatcatcaacttgttattgaagcgcgtcttgctccgcatcttattgataaggtaactcctggccttcccgttgatttgatctttagtgcctttaatcaaaataccacgccaaaaattcctggtgaagtaacgattatttctgccgatagattaattgatgaacgaacaactgagccatattatcaagttcttattaacataaaagattatacattattagcagataataaaaataaattgaaagcaggtatgcccgttgatgtatttattaaaactggcgatcgctcattattaaattatcttttcaaaccagtattggataggctccatacttcattaacggaagaataa

SEQ ID NO: 306604 - DNA, 2673 bp, Proteus mirabilis
atgtcgttacgtctgaaaaaggagagtctttctacgctctctgtaggtactcatcaatatgagtattaccgtctttctgaagttgctcgtcaattaggggatatcactcgtctccctaaatcgttaaaggttctgctagaaaatttagtccgctatcttgatgatgatacagttgttgaagatgatattaaggcattggtagattggcaaaaaaatgcccacgcctcccgtgaaattgcctatcgcccagcaagagtattaatgcaagattttacgggtgtacctgccgttgttgatttagccgctatgcgtgaagccgtaaaatctttggggggaaatgtagaaaaagttaatccactttctcctgttgacttggttatcgaccattcagtgatggttgataaatatgccagtgatgatgcttttgagaaaaacgttgaaattgaaatgcagcgtaactatgagcgttatctctttttacgttgggggcaacagtcgtttgaacgttttcgtgtagtacctcctggaacgggcatttgccatcaggttaacttagaatatttaggtaaagcgatatggtctgaacaacaaaatggccgacatattgcttaccctgatactttggttggaaccgattcacatactactatgatcaatggtctgggcgtattgggttggggcgttggtggcattgaggcggaagctgcgatgttaggccaaccgatttcaatgctgatccctgatgtggtaggttttaaattaacgggtaaactacgtgaggggatcacagcgactgacctagtattaaccgtaacgcaaatgttacgtcaacatggtgtggtagggaaatttgttgagttttatggtgatggactagcttctttgcctcttgctgaccgagcgacgattgccaatatgtcacctgaatatggtgcaacctgtggcttctttcctattgacgaaattacactagattatttacgtcttaccgggcgtgaagagcaagaaattgcattagttgaagcctatagtaaagagcaaggcttatggcgtcatgctggtgatgaacccattttcacctcaaccttatcgttagatatgggtactgtggaagcaagtcttgctggccctaaacgtccacaagatagagttaacttgctgaatgtaccaaaagcatttaaagctgctgtagagcttgaaacaaataaaaaacctcttgctcaatatcctcaggtcactattgataatcagcctccttttaccttaacggatggtgcggtagtaattgcagcgatcacctcatgtaccaatacctctaaccctaatgtcttaatggctgcaggtctactggctaaaaatgcggtagaaaaaggcctacagcgtaagccatgggtcaaatcgtcactagcccccggctctaaagtggtgacagactacttagcactggcaggattaacaccttatttagataaacttggttttaatttggttggttatggttgtactacatgtattggtaactcagggcctttattagccccgattgaagaggcgattaaagataatgatttaactatagccgctgtattatcgggtaatcgtaactttgaaggtcgtatccatcctttagtgaaaaccaactggcttgcttctcctcctttagtcgtggcttatgcgctatctggtaatatgaatattgatttgaccaaagagccattaggtgaagataagcagggcaatccagtctatttaaaagatatttggcctgacagtaaagccattgctgatgcggtggaaaaagtaaaaacgcagatgttccataaagagtattctgcggtatttgatggtgatgaaacttggcaatcactaaaaatacaagatacccctgtatatgcttggcaacctgattctacctatattcgccatcctcctttttttgaaggtatgacaaaaacaccagaggcgattaaagatattcaccaagccagtattttagccatattaggtgactcggtgaccaccgatcatatttcacctgctgggaatattaaagccgatagccctgctgggcgttatcttcgagagcatggtgttgaaccaaaagactttaactcttacggttcaagacgtggtaatcacgaagtcatgatgcgaggaacttttgcaaatattcgtattcgtaatgaaatggtgccggggatcgaagggggctttacaaaacatattccaacgggagaaacgttagccatttatgatgcggcgatgcgttatcagcaagaaaatacgcctttagccattattgccggtaatgaatatggatcaggctctagccgtgactgggccgccaaaggtacacgattattaggtgtgcgagtggtgatagccggatcgttcgaacgtattcaccgctctaatttgattggtatgggagtattacctttagaatttcctaacggtgtatcacgccagactttagggctcaaaggtgatgaaaaaattgagataacggggcttaattcgctaacaccgggtcaagatgtcgctgtcaatattacttttgcagatggtcgccaagaaactattatggctcgttgtcgtattgatacgcaaactgagctggcttattttgaacatggcgggatcttgcattatgttattcgtaatatgttgtaa

SEQ ID NO: 306605 - DNA, 519 bp, Proteus mirabilis; identical to SEQ ID NO: 299914

SEQ ID NO: 306606 - DNA, 303 bp, Proteus mirabilis; identical to SEQ ID NO: 296533

SEQ ID NO: 306607 - DNA, 132 bp, Proteus mirabilis
atgaaggtattcttaaattttcccaatcttgctgattatactgtttactacctaatgctattattttcattaatctttcatgagccgcaacataatcagctctactggccatatgagaaagaaaatatttaa

SEQ ID NO: 306608 - DNA, 270 bp, Proteus mirabilis; identical to SEQ ID NO: 299960

SEQ ID NO: 306609 - DNA, 261 bp, Proteus mirabilis
atggcctatgccgataatggctctcctgatattttttggaattctttagagtttaaagaattactcaaggatggatataaaccctcagatatagattggaatcgatatgaattaaatacctataacaataaccgtttgtttcgctatgaaataggatttagcagattatcgccaataaaacttgttaatcctgaagagagaacatttcattataatccttacctttctattattgatgggaaagtgactattgtccgataa

SEQ ID NO: 306610 - DNA, 252 bp, Proteus mirabilis
atggcatgtaaggcgaagctggcaaagtcacgggctaaggggcgcggtggctgggagtcccggacgcattgcagtgatacgctgctggcagagcagctggtggctcatttgctgaaaggtaacgcgggtacgtttgaagacattgccgtttttgccatgatgctccaccagcgcggtgcagacccacgggtactggctgatgccgttctgggacttaatcagaaggtgactgatgaaactgatcaaggctga

SEQ ID NO: 306611 - DNA, 894 bp, Proteus mirabilis
atggatattcgtgttttacgctattttattgaagttgttcaattaaatggatttagccgagccgctgatgctttatttattacacaaccagccattagtcgtagcattaaaaaattagaggatgaattaggcactgttttattaataagagaagtggatggggtaaaattaactgatgacggtgctattttatatgagcatgcaaagcagatcctcgctcaatttaatagtatgaataaagcattaaatgataaagatgaacctttaacaggcgccttaaatgtcggattacctcctgttatagcctcaacctattttgctgatattatcatggcgtttagctctcgccatcccaatgttgaacttaaaatttttgagctgggcaccaaacagatggaagatgcgatgttagaaggcacggtagaaactgctgcagtgatgttaccttttaatgataaagattttgaattaaccattttttcagaagatcacttgatgttattagtagcacaatcccatcctttggctaaagataagaaggttaattttaaacagcttattacagagcggtttatctttttttcagaagattttcgtattaatgatttggtacgtagtgcttgtgggatttataacactgaaccacaaattgtggggagaagtaatcatttagatttaattattgcaatggttaaagccggtgtcgggatcacactgttgcctaatagcatgtgtaataaatatcctatcgatgatttagtggttattcccattacttcccctaggttatcttatcaattagctttagccaccaatcaaaatagttaccaaagccgtagttgccaagcatggaataaattagcaatagagaaattaatgaaagagaatatttaa

SEQ ID NO: 306612 - DNA, 504 bp, Proteus mirabilis; identical to SEQ ID NO: 306416

SEQ ID NO: 306613 - DNA, 348 bp, Proteus mirabilis
atgccttcatctagtacagttccatacctattggctaggagggtttctcgtcatttcaagtcaacactctataatgagatatttataaaatgtacagtagaagaagttataaatcgttatgctaacagcacagtaaataaaaaagaaaatcatataaaattactaaacagaacgttatctgaattacaatctttatctcccaatacgattttcaaaatgaagcacatccctaataaaataattgatgatttgctttcaacaggaacaacattaaatatggcaactatcgaactaaataatttaggatttacctgttctactgcaatatgtcttctaagtaatctttga

SEQ ID NO: 306614 - DNA, 966 bp, Proteus mirabilis
atgtattgggcaaacgatacacctcgtgataaaccgatttatatcgatcaatgggggcctgaacatgaagccgatatggcaatcaagttcctcaaaaatgaaaataatcaatttagagataattcaaaaccatttgcattagtggtttcaatgaacccacctcactctccttatgatcaagtaccgaaaaaatacctcgatgcttatcaaggtaagacatcaaaagagttaaatacacgccctaatgtacagtgggacagtgaatatcaagaaggttatgggcctcaatatttcaaagaatatatggcaatggtcaacggtgttgatgagcaatttggtcgcattgtcgatgaattagaaaaacagggccttgcagataatactctcgtcgttttcttctctgatcatggcagttgcttaggatcaaatggacaagcaacaaaaaataatccgtatgaagaatcgatgcgtgtccctatgatgtttcgcttaccgggtaaaatcaaaccaggttttgatgatgcattaatgtcagcacctgatatttacccaactattttagggttacttggtttatcagaatggatccctgattcagtagaaggcacagatcttgcagatagagtcatcacaggcaaaggcgacacagcaaactctcagctttatctttttattccttatggtgaaccttcattcggtaaacgaggtgtaagaaccaaaactcatactttagtgatagataggcaagatggacaaccattaaaatatactttatatgacaatgtgaacgatccatatcaaatgaaaaatattgccaaagataatatgcctttaattgataaattaattaaagaagaattaaccccttggttagaaaaaacaggagattcttggagagcgactgaatttattacagcgacaacgaataaattaaataaaaaaatatcaatatgtgaagaaaaataa

SEQ ID NO: 306615 - DNA, 522 bp, Proteus mirabilis
atgactgtttcccgtagaacttttatcaaaggtcttgccgccagtggggcagcaatctctgtttctacacctgctcttgctacttcaggtgactttacagcaagcaaacgcactcgaccagaaaatgcacctaacttattaattgtttttcctgatgaaatgcgagcccatgctctacagtttatgggggaagatccatcgattacaccaaatcttaataaatttgccaaacaagccaaagtaatgacacaaatggcatcaaattaccctctatgctccccttttcgaggcatgtttatgacaggtcagtaccctgtgcgtaatggtatcacaggtaatgcccatgattacggtggaaaagtaggtattgacttgtctccttacgcaaaatgctggtctgacgtacttaaatccttagattatagcactgggtatattggcaaatggcaccttgatgctccctatgagccttttattgaaagttacaataatccaatggaaggtcgttattggaatgaatag

SEQ ID NO: 306616 - DNA, 831 bp, Proteus mirabilis; identical to SEQ ID NO: 298198

SEQ ID NO: 306617 - DNA, 597 bp, Proteus mirabilis
atgaaaatttcaatatctgaatccacatacaaacgactcgaacaaaaagcaattggttttgacaccccagaacaagtaataattaggctcttagatcaatctgatgggttttcttcgtcaaaaccagagctctatttcgctccaaatgaagatgaatttaagagagattttcttaattcaggcatttcagaaattgctctttattataagagtggcaaacgagaaatcgtccattggaaagctaaaaaattcacaaaggattcaaatcttcgtgctaatttatggtctggatacttaagaaattggagtgacaaaggaatcataaaggcggaattagtagcacttcccaaaggaactaatagtccagatgatgatacacgaaaaactatatcattagccgaaattcttggtttgaaatactatgaagaaatgcaagtactagatgacttatatgatatccatgcagataataataatgacaattatcctgtaggatattacattgaatttagcgatgaagctcctgaagatattttgaataaaataagcgggttacacaatctcacagtttatttacctaatcatccttttgagtaa

SEQ ID NO: 306618 - DNA, 306 bp, Proteus mirabilis
atgaagctcggagagacaacgcgatttagtaatcgaaatggagcttcgttttctaaactcaaaaaaccaatgattattccagatgcacaattcgttaactggagaatacagggaagcaatagagatgatgttatctatatgcgaacaggatttggttttagaaatgatgggaataatgtctattgggatgacatatacagtatcagatccgaatacggtgggccatggggggctgatggcggtaatgcgtttaaaatagaatttgatatatacggcatcgaactcagcgactacttcaatatttaa

SEQ ID NO: 306619 - DNA, 732 bp, Proteus mirabilis
atgtatggtgtttatgttaaacccgatataggcaacgaatattatttagatgctgatgataatcaggttatggggtatttaggttcagcaaaaatagggtggtacaataaccatttctacccaataaatgaagggtggaatacaatgaagcacaatattcctgaatatggaaagtacaatattattattatcccaagagtggtatctcggacatacaaaatacccggttcctattattggttctcatcaaatgtaacagcgtataatatatccggtgataattttaatttttatgttgatgaaaggccagcgggatcgcgagtagattcagaagatgacgaaagagacccagaattcatgtttgatttttatggttacccaaaatcaaatagtgaatcatacggaatacgtctacatggaatgaacggtattagtgaattaacgccatcaatgcgagggtattgtatatttgctgacatcgtacaaataaatgtaggtaaaaataatggctggagaatgccatcaaatattactgatgaaatgaatcccattattttcgtgcgaccgaaaaattcaggtactgtcttctcatataataaagcaaggggtttagttgttagtagttcatgtgaaatgtatgttgttatattttgcactaactttactttaactcctccaaaatatggcattgtgatttataacgataaaaaagaaattacattttcatcataa

SEQ ID NO: 306620 - DNA, 2922 bp, Proteus mirabilis
atgggtaagacagtcacaagcgttgtctctgcgggcttaatgatagcaggggttattgctacaggtgggttgggtaccgcattgattgttgctggtattgctgttcaagcggcgagtgcgtttatttttaaagataaagtgcctggttccggttatcgtgaccaatctgaacgtaaacagatgctacgctctgcctctgcacctgagacggtggttgtaggtaaaacaatgatgtcagggttgcttttctttgccgaagaagaggaaggtgaacaagacgaaaatgaagaactctacatggcattagccatagcatcccaccctatccataaattaggtcaaatttatttcaatgatgacaaaattgaagatttaggcgacaacgcacaatacgaatttcataacagtagaactgaggcggatccatacctattaaaacatgccccttcatggaaagaggatatgattggtcgagggcttgcatggttacgcttaacattacgctttgatcaagaaaagttcccttatggtgtgcctaatgttaaaagtgaactatggggaaaagaaatttacgatcctcgcaatgaaaaaacagtatggtcaaataacggtgctttgatcatattagattactatcggcattacttaggtgttccagactccgatattgattgggatgcatttaaaagtgcagcagatatttgtgatgaaaccgtacaaacgccagatggaaaaagtgagcctagatacactttaaatggcgcttatgaacttgaagaaagtcctgcctctgtattagagatgatgcataaatgtattgctggtgagccgacctatattgcaggtaagcatggtattttgatgcaggtttataatggacctgcattactcacaattgatgagtcacaaattatcgatacggtaacggtgacgccagaactttctttgcgtgatgcgactaatgcgatttacggtacttttgttgatgcagagcaacaatataacaaaactgattttgaacccgtagttattgaggagtggatagaagaagacggcttagaaattaaagaaaatatggactatcgttttgtaaccagtccataccaagccaatcgactagccaacctctacttacgtaaaaaacgcgcaggtcgtcgtattcaattgcgcatgaatttagatggttatgcttatcgccctggtgatgttgtaaaactcgaattaccttcgctggggattagcgatttagaatttcgcattgctgattggaaatttcacccatcagagggggtagagattactctcgaagaagatggtccttatatctatgaagacttagccagtaaaccttttgttagacctccattcactaaactacccactggtggcgtaccagcaccgatcaatctggcttttgttcctcttgctgtcaccgatatcgttcaaggttacatatcatggcagaacgtggcatctgatattcgctataacacggttaatattctccagaatggcaaggttatacagtctattcaggtaccgggtgagcgtgttgatattaacggtttaacgagaggtacttatcgtgtcgaagtgagagctattaatgttgctggcgctatgtctgcatcggctatcagtgattttgcaattcaagcacctccgtcaccaatcggtgttgaaataacgccaggtatgtttagtttaacggcgtcacctaaacagggtgatagtgctgtttttggttatacctttgagttttggtttagtgagaaaaaactcgctaatttctctgaaaatgaagtgatcaccaaaacaaacaaagttggtcaaggcaatttctggacgcaagagaatttaaaagctggccacacttactatttctatatccgaacgatcaatagttatggtaaatctgcatttgtagaagcttcaggtattccagtttcattgccagacgacatatttgatgatttagataacacggttagagaaacggatgcatttaaggagctagataaaaaactcaattggaattctgagtctgtactaattcttagtaatgcaagtcatcgtaatttcaggcagttgctaataaaacatgctgaatctcaagccggcattagtgagctatggcaggccaatgcaactcaagaagaagcctgggcacaggaagttaaagaaatttactccgctgttggtgataacacgtctgctattaaagagactcaaacgtcaattaccaaacttgatgaggcttttggtcagcggtttactgaaatccgcacggaaatggataaggctaaggccgatatcatttcaaactctacagccatctctaacacaaacaaggcatttgctgaaaacaaaacccaagttcaagctaagtttgatgaacaggagggaatgatacaggagaaaatgcaagccacgtttgagcagtctggcgacggcgttgtcacacactcaatcaatatcacgattgttcataacggcactaaatacaatgcagcaggtcaggtcattagtgctcaagttaagaacggaaagctcgaaagtatcataggctataatgctaataattttgcgtggtacaacccaagtaacggaaaaatggaattattcatgtacgttaaaaacggccagatgtttatgcgtgaggcctttattaacgaggcatggcttaattccgttgttgttaccgaatatattaaatctggtgattatgtacccggtaaggatggttttttgattgacggtaaaactagcaatattgaaatgaataaaggaacgttccggggtgaattagatataggaacaaataaaacgggtgcacataccgttatcaccaatgaacggattgcggtttacggtgctcaaggagaaattaggattgaaataggaaaaatagaagggagataa

SEQ ID NO: 306621 - DNA, 399 bp, Proteus mirabilis
atgagacacccacaatggaccactcgccttcctgaaaccttaaagaatgccataaatcacccttttgcatggggggaacatgattgctgtttgtttgcatctgattgcgtcattgctgtttgtgattttgacccctgcgaaagcattcgtgggcgctataaaacaaagataggcgcattcagagtattacaaaaagagtttggaacattggacggcgctgtgagccgtttttttgatgaagttccaacaaacgaagcagggcgtggtgacattgtgatgtttgagggggatgagggaaatacattaggtgttttgtgggcgggtaaattgtgggcagtttcaacggatggagttcgcgctgtgagcaataaaccgattaaagcatggagagtacaataa

SEQ ID NO: 306622 - DNA, 609 bp, Proteus mirabilis
atgaaaaaaaatattattattttattatccatacttttaattttacctaatttagcttcatgtgataaatccgactcagataaaaataaatatagtgctccttttggcctagagtggggtatgtctataaataaacttaaaaaagaaatagggaacgatattgaaattttaaataatcaagaaaattgtccatttgttaaagttaaatctgaaagtctacctaatggtttaaataataaaaatgaaacctacacacttatatttttaccagaaaataaagtaattaattttaacggacttatgggtgtggactatttttacttcataaaaaataaagaaatatatgatatagactttaaaaaaatgctaaataatcttgaattaaaatacggggaaccaactagaaaaaaagaagacgataaattatttaaatatgtttattattttgatttggaaaataagaacattattttagctggacataaaacagagtacgggtacacgatttggatgttgcaagcattcttgccaaaagaaaataaaaataccatagatcaagccgtagaaaagttaaatttagaatgtaaaaaagaaagaaatcctctgtaa

SEQ ID NO: 306623 - DNA, 582 bp, Proteus mirabilis
atgaaatatcatccctttagtaatgacatggttaaggcaattaacgaggggtattatttggttgttgcctctcgtttagatctcaaatcaggtgttgtaagagcacatactggtgtgggcaatatcattattgcaggtgaagtttaccaaggtgtagggcaatttggtgccattgagtctgtgggtgaaaatatgaccactagcccacaacaactcattatgaaactctcaggcttcgattcttccttgattggagaagtgatgaacgagcgggttcgtgggcgaaatgcacaattgatgttagttgcattaaatgaagaaggaaaacctgcgcttgctgaggttttatttgctggccaaatatcaaccattggtgtgacaacgggtgaagagaatgaaatagcagttactgtttctaatcgatttgaacgttggtcttatggattaccagacagatttactgatgagtcatggtctaaacgtaaaaatggcgataggatatttcgttatgttgcgcagatggctgatcgggctatttattggggtagcaagaaaagtgcacctgcgtttatttataaataa

SEQ ID NO: 306624 - DNA, 600 bp, Proteus mirabilis
atggcaacgatattatcgtggccacaatccatcgtgccagccacattaagttggcaactcgtgagtaacagcaaaacctttacatcaacctttacgggaagtgtacagaccgtacgctttcccggctcacgttggcgttgcagtatgtcatttaataatttgactgatgagcaagcaagggttttagaggcgtttgttgccgagttagatggtgaaagtggtcgagtgaaaattagtgattgggcgcgctctggtttaactcagcgtggtaaacctaaagttagccaacccaatcaatctggaaaattattggagagtaaagactggttacccaatagcattgttttacgcattggtgattatatcacggtaaatgatgaactaaagagagtgacggctaatgtgattagtgatgcacaaggaaacgcaacaattcctattgcccctatattacgttatgcaccgacagtaaatgatttgatagaaaatgaaacgccatacggtatttttaaactaaccagtaacgatcaaggtaatttccagcgtaaaccgggcatacttactagcacttctttgtcattcgaggaggccttaacatga

SEQ ID NO: 306625 - DNA, 3309 bp, Proteus mirabilis
atggccactaatttagccgatttacgggttgggctattgctgaatgacgccagttttagaagcaatattacaggcgcattaaaccatgcagggcgtgaaacagaacgtttttctaataaagcaaagcgtgaaacaaaagcggttgcagatggtttttattcaatcagtcatcaagtgacgaatgttgcaggacgactggcgatgttagggggagtgagtttatccattggtagtattttaaatatttctcgcaagtatagtcaggcaatttctgatctgagtgcgattacgggggcgtctattgagcgcatgaaagagtacagtattgcttctcaagaaatggggcgaacaacggaatttggcgcaataaaagtcgcggatgccatgaaacttattgcgtcagcaaaaccgtcattactgcagacagcgggagccttagaagatgtaacggcgaaatcgattaccttggcgcaagcttcaggtattgagttagccgatgcggcgaaatctcttaccttaagtcttaatcagtttggtgagtctgctgtctcatctgagcgttacattaatgtgttagcagcaggtgcgaaatacggtgcatctgaaattaacgaaacagcacaagctattgtgaaaagtggcaccgttgcttctcaagctggtgtttcatttgaacaacttaatgcgtctattcaagttttagcaggaaaagggatcaaggccgaagttgccggtacgatgttgcgtaacgttctattggctttggagcgttcagctgataaaaacttgcgtccatctgttgttggcctagccacagcattagagaacctcgacaagaaaaactattctactactgcatcaacaaagatatttggtcgagccaatgtcagtgcgggtactattttagttaagaacagggatcagctagttgatttaactaaggcactcactgatacagaaacagcgtatgaacaagcgggaaaacgagcgcaaaatctaaatgctgatttagaattaatggaaaagtcgtttgaaggcttggcgattaaagtcggtaccagtgccgatggtcctttacgtacaggtgttcagaatgttacttccgctgtgaatgcattaaataacaacttctctacgttagccaatattgcgacttacgctgtcttacccgtcattggcgccagaatgacgagaggacttcaagatcaaaccaaagagtgggtgaaaaatgaagttgcagtaagaaataatgtcaaacaaatgagagaaacggctcaaagaaccattgattcagcaaaagcatctagagagttagcccaacaagagtcaagaaggctagcaactcaatccatattgaataggcaacatggtatcaatgctaattatcaaaaagagtatctggcattaaataggcagattcgagaagccaatcgactagaaatgttaggtaagcaacaacttgctgcagccaacaatcagctgtcttatagtcaaagggcattgcgagcatctagcttaggactccgaagtgttgtttctgccttaggtggaccagttggtgtcttggctttagcaggttcagctatttattattttgcaactaaagctgatgaagctaagttgaaggttgatggtttacggggctcagttgctgaaacaatagaagagcttcagcgtttatctagagtcaaattagaaatacaggctgatgaaatcgcagaaaatatttctttattagaagctgagagatctcgaatctatggtgagttagctagatattctgaagatagacaaacctcgatgtcagaaataaaagacagcggttggtttggtaacgccatggtcagtgcttttggggatgatcctgaagaggtgcttcgaaataggcgaagtgcgttaggaaaattagaagatataaataaggatttagagactcaatatcaacgacaaacaagaacaaaagaagccatagaaaaaggtgtttttagtcaaccgactaaagaagataagccactgggagatagcggaggcggtggaaatgatggagggaatgacctagcttcaggttctaaacaaaaagttagtcaataccatcaattacgcatgcaaatagagcaagagcatgcaacaagtttagagcgaatatccttaagtgaatcggaaacaatgcgcaagcttcaggaaaacttaaaagctggtggtatgaagcaggaagagtatgaacgattaaaaacacttaacgctgaaaaccatatgaaacagcgtgcagagttagcagaaaaatactctcctatgcgcgcatccatccgaaatgaacaagagatgaccaaagagcttaaatcactctttgagcaacaattgttgactgaaaaagaataccaatatgcacggcgccaaatggcacaagatacgacaaaatatcgtttatcagagcaagcaaaaggtatttctctccctaatatcagtatccttggtgaaatagatccggttattcaattaagaaaccaacttgaagagcagaaagcactttatcaggcttattataacgatggcatgattagtaaagaacgttatgaacaattgatggtcgcagcaaccaataaatcaaaagaggctcaatatcaggctagcaaagagttatatgcatctcaaggaatgtggcaacgcatgcaaatgaatttagttgataccattgaacaaagaacagcgaattcaatgactggtattttgatgggtacaaagtcattttctgaaggtattaaagatttttcagcttccattgctagttctattatttcggatttgatccgtatcgccattcaagctcaaatcactaatgcattaacaggattgtttggtggagtttttggtggtggcgaagcagctacgggtgcaaaaactacgggaaaagttggtgtaaaagcaaacgctaaaggtgatgtttatagttcaccaaacttgagtcaatatagtaatcaagttgtgagttctccaacgttatttgcctttgcaaaaggcggcacgcctaatcttggcctgatgggagaggcgggtagtgaagctattatgcccctaaaacgtggacctgatggctctttaggtgtaagagcaacgggggctaattccatctcttcaggtgacactattattcaccaaacatttcatgtgacaggtaacggtgatgaagctttgtatcaagccatgcaggaagctgcaagaatgggtgctgaacaaggtgtctcaaaagctaaatctgacattatgcgagattttcaaaccaatggtacgttaagaaggaatctacgataa

SEQ ID NO: 306626 - DNA, 351 bp, Proteus mirabilis
atgaaaggattaaaagcctctttacttactgcgaaacctcaaattatcgaagtcgatattctatgtggagtaaaggtaaacattcgtcgtatgacggctaacgagttgatgaatttggaacttgaggtttctgaattaaatcaacatggcaaattacgtgaggcatcattacgaaacgtaggtatgttgctgaattgcttggttgatgatgaaggtaaaccgataagtaaatcgttactacccaaaccagaagaattggttaacgtccatgataatgcgatcctcatcgaagcgattaacgtcgtgaagcaacactccattggcacgttagacgaggcaaaaaaaaactaa

SEQ ID NO: 306627 - DNA, 474 bp, Proteus mirabilis
atggcagatcaaaaaacatcgccagaatacgccatgcttcccgcgggcactattgtgaaatttggtaaagcgggtgataccgttgaacaaatgaagccactggttaactgtaaggcattaggtgccacaggacaatcaggaagctttgttgatgtcacgacacttattgataaaaacaaacaatttatctctgatttaccggaaggacctgaaaagtcgttaggcttcattgatgatccagaaaatgaaaactttgttgcgttcttgaatgcagcagaaaagcgtgaaacggtgcagttttactgcgagcttcctaataaacgtaccgcaaccatgatcctttcattgtcaggctgggaattaaatgacatctcagcgcctgctaatgaagccatccagatcaccgtaaaaggaaaacaaaataaccttgtatggggaacttcttctgcaacatcaacaggagatcagggttaa

SEQ ID NO: 306628 - DNA, 405 bp, Proteus mirabilis
gtgataaccaaccttagcgtgacagggttggatgaattaggtcggaaattaaaacagttagaagttgagttaaaaaccaagatattacgcgatgcagggcgagaagccatgcaggtcgtgaaagatgatatggaagcccatgcagggtttgatgcgaaaagcactgagcctcatatgcgagacaatattaccatcaaaacgacacgagtaaaaaatacaaatggggctgtcatggtcaccgtaggaccgacaaaacctcattatatgaaagcacgcgctcaagagttcggcaccatcaaacaagttgctcgtccttttattcgtccagccctcgattacaaccaacgtgcggtgctcaataccttaactgagcatattcgccatgccctttctttatatacttag

SEQ ID NO: 306629 - DNA, 321 bp, Proteus mirabilis
atgggcgaagaattaaacgcattgggcgtaatgagcacactcgatgctaaggcattagaaatgttagtcgaagcctatgttgagtatcgacaacattgcgagacactcgatgaagaaggttatacatacgatgtcatgtcatcgatgggcgataaattaaaaaaagctcaccctgcagtcgccatgaaatctgatgcatggaaacgtattcgtgccatgttaagtgaatttggtatgactcccgcttctcgagcaaaagtcactatgaatacacccgccgaagaagatccttttgaggcatttttgaaaaagcgcaaatga

SEQ ID NO: 306630 - DNA, 1089 bp, Proteus mirabilis
atggcttactataccatatcaaaacgtgatagagcagatggcactgctcgatacagatgttctgtttcggtgaaagctggtggaaagagaatttataatgaaagtagaacgttcactaaacaagctcatgcaaaaacatggggaactaaacgtgttttagagttagagcaaaacggcataccagatccaactgatgcaacaaaaataacagtcagagatttactgtttaaatatttaaatgatccagatcttggcgggaaagcaggaagaacaaaacggtatgttttagaaatgctgtttgattctgatttgtctaaatatgggctaacagagcttaccgtttcacatattgttgatcattgcaggcatagacacgcatcaggtgcatcaccttcaaccattaaccatgatgttagttatttgacctcggtattaaaatcggcaaaacctatctatggtatagaatatacggctaatccagcgtatgaggcacgcccgttactcattcaaatgggattgattggtaaatcgcaacggcgtagtcgtagacctcaaaaagaagaattaaaacaactaagagaagcgcttaaaaaacgaagcgaacacagagagtgcattatcccttatgttgatattttagatttttctattcttagttgcatgcggattggtgaagtgtgcaaaattctatgggcagacgttgacgaaaaaaacagatcagtaattgttagagatagaaaagatccgcgtaaaaaatctggcaatcatatgtcagttcctttgcttggtgatgcatggacaatactgagtcgacaaccaaaaacaagtgatagaattttcccttataaccctaaatcagttactgcaggttttcagcgtactaggaacgcattaggaattgaagatcttagatatcatgatttaagaagagaaggggcgagtcgtttatttgaagctggctttagtattgaagaagtggctcaagtgacagggcatagatccttaaatgttctttggcaggtatatacagagttatatcccaaatctctacacgaaaagtttgaaaaaataacatcaaaaaaggcatga

SEQ ID NO: 306631 - DNA, 150 bp, Proteus mirabilis
atggctttaaaaccaattactagcaaaccagcaccaaaaggttttcgctggatattttgcagattccgtaaagttcgtggtaaatctggtaaaagattagatgcgcatgcatacggatatcaagcttgggcatttttagtaagatgctaa

SEQ ID NO: 306632 - DNA, 522 bp, Proteus mirabilis
ttgagtggtcaagattatagagttccctctctaaatcgaagggatataaggacgctaactcatcaaataaggagtatgttaagtattacaaacttacactttcctataatggaatttgttgaatttggattacctagccttattgatgattatgaactcagtataatgcccattgaagatatgccgggaactcacgggttaacaatacctcaagagagcaagattatattaagggaagatatatatgagggagcattaaatggaaatggtcgggataggatgactgttgcacatgagctaggccatttacttatgcataaaaatatatctttcgctaggtctatgcctaacgttcgaataagagcgtttgaaagtagtgaatggcaggcaaaatgtttcagtggtgagttacttatccctgccaccaaaagagaaatactattaaacatgacacctattgaagtcgctcaggtgtgtggagtttctctagaagcagctgaatatcagttgcaaaaaatataa

SEQ ID NO: 306633 - DNA, 357 bp, Proteus mirabilis
atgttaacgccgttcggtaagactgtaaggaaaatgcggattgatttaggcatcactttaaaaagtatggctgagtcaatggacatgacatcttcttacctttcagcgattgaaactggcaaaagagctgtcacaaatcagattttagaaaatataataaaatttttccaagcaagtggtgatgtgaaagaaaaattgataaaggcagccgatgaatctcagcaaacagtggagattagcttgttaggtagacaagaaagagcaagagatgtggctattgcattcgccagaaattttgacgatttaagtgcagaagatttatctcgtttacaaagtattttgaataaaaatgaataa

SEQ ID NO: 306634 - DNA, 246 bp, Proteus mirabilis
atgaatacagtatttttattgttagctgaatatgaaacgtctcaaattccgttatctgttgttgctgagaaattccttagcatatcgccttcttgggctgataaaaaggctaatcttggcgagttacctttcccaacatatagagataatcaaaaatcagggcgactcgttcatatttcagatcttgcagaatggatagacaaaaaacgagaagtagctaaagctgaattcaagctattacaataa

SEQ ID NO: 306635 - DNA, 474 bp, Proteus mirabilis
gtgaaaccgatacttgatatgtgttgtggctctcgtatgttttattttgataaacaagatgaccgtgttttatttaatgatattagagctgaagaacatattttatgtgacggaagaattttaaatataacaccagatgttatttctgattttaaaaaccttccattttctaataatacattttaccaagtgttatttgacccacctcatttaattagagttggtaaaaatagttggatgtttaaaaaatacggttcgttaaataaagaatcatggagagaagatttaagtaaagggtttagtgaagcatttagagtgcttaggcctggagggacattactgttcaaatggaatgaaacccaaataccagccaaacaaatattagctttaaccaatgaaaaaccaaccgttgttcagcgtgtagggaaaaatgataaaacacattggatctcttttcttaaagagattgaataa

SEQ ID NO: 306636 - DNA, 168 bp, Proteus mirabilis
atggataaatcaataaacaaattaagtcccaatgatgttattaaaattggtgataaatggtatcgaattaggtatttaagatattggggaaataagacatgtttaagattatcgataaataaagattcaaatattaaatttgaggctaagagtgaaaccgatacttga

SEQ ID NO: 306637 - DNA, 456 bp, Proteus mirabilis
atgtcaattactccagaatttgtagaatatgatgaaaatggttattgggctcattcagaactgccatattccgaaaatggtaatgaaattatacagtgggtagcggataaccaattagaacaacgctgtatttatatgagtgaagatgtcggagagaatacacctgttttccaaaactatttcactcacggtaaccctaatgtatcagcttggatgccaacggaacctcctggtgaaggctggtttattggagctatatacgatagtgaagatggacccgtctgcctttggttgcgctcttcaagatatcaattaaaagaacagtttttaaaagcccaccgagaagctgaaaaaacagcttatgaatatttttgtgcttgcgatatcggcgaagagagaattcaagcacaagaaatctaccaacgtatcagaacagctacgcgtataggtggatga

SEQ ID NO: 306638 - DNA, 315 bp, Proteus mirabilis
atgaatagctataataagtacaccgaccttcaaattaatgaattagttgctacaaggttaaagaagaaatgcttattaacggaagaatctgtattagcgtatatggatagcggctatcggactttcgatccatgcaacaaccctactgacgcaatgccgattattaacgaatatggcattagccttatatatcaagatagaaaattccaatttgcaactaatgacgggaatatagagtgtagtgtcagcaacccattaaaagcagcaatgattattttcatgtgtattaaggatgcggatgatgaaaaagtatga

SEQ ID NO: 306639 - DNA, 234 bp, Proteus mirabilis
atgaaagataaaacaggtggagcggcttttccaattccagcaacagaattgcacggcactaatacaggcatgacattgctagactatttcgctgctaaatgcatgcaaggtgattgggcaacggagcgcatggatagcggttattggtcacaggatgacattgacgccattttcaaggatagagctgaaacctactaccgcatggcagatgcaatgttaaaggctagggggtga

SEQ ID NO: 306640 - DNA, 273 bp, Proteus mirabilis
atggcaatagatgatttccataatggaaagaaacccatgccgaagttatttagacctgttcgagtcgagtttgattcactggttccaaatggccctaatgatgaatattgggttacaacaatcaggtatgtaagacgagttagacatgctgatggttggcgttggcaattagtcaggacgcatcacaaaggtttggatagatgggatccatacttagagttagatagggaaggacttaacgacattaatcatgtgtacggactaattaaatag

SEQ ID NO: 306641 - DNA, 696 bp, Proteus mirabilis
atgaatcaaataactactttagtaaacagtggtgaattaaccatgagtagcttagaaatatctgaactagtcgaatcaaggcatgacaaggttaaacaatcaatcgaaagactgtcagaaagaggggtaataactttacccccaatgggggaaaagcccacagcaggtaggccgagcactttttacattttttcaggcgaaaaaggaaagcgcgatagcattattgtagtagctcaattatcacctgaatttacagcaagactagttgatagatggcaagagcttgaatctcaaaaatccatcatccctcaaacgctgccagaagctttacgtctggcggcagacctagcagagcagaaacaaatcgttgaacagcaattagcaatcgcagcgcctaaagctgaatttgttgatcggtatgttcaagcgactggcttacttggttttcgtgaggtatgcaaactattaaaagtcaaagaaaacttctttagagagtttctactttcaagacgaattatgtacaagttggctggaaaattaacaccttattcagagcatcttgacgcagggcgttttgatgtaaaaacaggtgagaatcaaatcaacggtcacgcatacacacaagttaaatttacacccaaaggaattcagtggatcgctgggttactggctagagagcaattggaggcagcatga

SEQ ID NO: 306642 - DNA, 231 bp, Proteus mirabilis
atgagcatattatttcacaaggattatgactattcagcatccaatgagtgttttaaaaactatgaattattactcgataaacagcagccacaagaagtgaaactattccattttgatggtgcgaaacctaaaagcaaaacgcccaatttggatcgaaaacttgatcgatgcttcccaaggggaagggcgtatctaaaggtttctaactcagagattttcaacagaatgtaa

SEQ ID NO: 306643 - DNA, 213 bp, Proteus mirabilis
atgcagggaactaattgggttaaggtgagtgagagattgcctgacgatcgctcagtagttttgactaaaaacaatggtgcaaatgctagagctatatttatctacgacgagcagaaaacgccaacatttattcactttagtcgaaacgggaaaatgcgaacactgaatagtgtgaccgaatggtgttcaccaccgatgccagagggtgaatga

SEQ ID NO: 306644 - DNA, 456 bp, Proteus mirabilis
atgaatctaggcgaaacaatagtgtccgtgggcgttattctggcaatgatcatcactattgagtggcagagcggcagaattgataagctgaaaaattcaaatgctgaactaaccactcaattatcacaacaagtcgaaatcaacaaagactatcaagcccgtatcactcgattaaatcaactcgatgttcgtcactcacaggagttagctagtgcaaagaatgaaattgataggttgcgtgatgctgttagttctggctctaagcgggtgtacgtcaaagccgactgtccaaaatccgaaggcgttaccacctccggcgtggctaatgcaaccaccgcccgacctactgacaccgctatcagaaattattggttactcagagaacgaattgcagagtcagagcaagtgatattgggcttgcaagattacattaacactgaatgcctagctcaatag

SEQ ID NO: 306645 - DNA, 567 bp, Proteus mirabilis
atggcactcaccgataaacaggaaatgttttgtcgtgagtacctcgttgacttgaacgctacacaggcggctattcgtgcggggtacagcgaaaaaaccgctaacagaatagcggctcaattattgtcaaaacttgacattgaaaaacgaatccaagagctgatgaatgggcgtagcgagaggctagaaataaatgccgattacgtccttaataggttggttgaaatagaccaaatggatgtattggacatactcaacgagagtggcgatttaaagcctgtaagggaatggcctaaagcttggcgtacaacattaagcggtttagatgttatgtcaatttctacaggtgaggaaggaaccgatgctttactcaaaaaaatcaaatggcctgacaaagttaagaaccttgagcttcttggtaaacacgtcaaagtgcaagcattcaaagagcaaattgagcaaaaagtcgaagctacacacaacattatgcccgttccatcttgtgacaatgtggatgactgggaaaaggctgcgcaacagcaacaaggtgaggtattaggtggatga

SEQ ID NO: 306646 - DNA, 126 bp, Proteus mirabilis
atgcagggtggttgttatgcttttgtttttaacaaaaaatgtcatgaaaagctaaaaaataaatgggaatacaccaatagaacattactaatcaaggtcacttcggtggccttttttattacctaa

SEQ ID NO: 306647 - DNA, 609 bp, Proteus mirabilis
atgagatatctaatatcaattctttttattttttttataggaaatgtttttgctaaagatataccaataactgaatatcaaaagtgtaagctattaaaaaatagcgatgaaaaacttagctgtttcgataaattagatgaaagtaaagtttcggaagatgctaataataatgatatagaaagtaagtggggtgtgtttaaagaaaaatcccaacttgatgacacagaaaccgtaattcttagtgttgatggtgatagtgccataaatacaagtttactgggcgcatcaataccaactttaatagttagatgtcagaacaataaaacccaagtatatgttgtttggggggcctacttgggaattgatgatataaaagtatcatatagaatagataaaaataaagccattacaaattggtggagtatatcaactaataataaatcatcattctataatggaaatacaatatcgtttattaaatcaatgtttaataaaaataatctttttatgcaattaacaccatatggggaaaatccagttaatgttaatttcaatataactggattagaatctaaaattaaaccactcagaaactcttgtggttggtaa

SEQ ID NO: 306648 - DNA, 393 bp, Proteus mirabilis; identical to SEQ ID NO: 304083

SEQ ID NO: 306649 - DNA, 669 bp, Proteus mirabilis
  misc_feature (27)..(36): n is a, c, g, or t
atgcaattcgtgatgtatatactcatnnnnnnnnnnggttatgcaattcgtgatgtgtatactcatgatggctttgattacttgctcttagttgaggataaattagctcaaataattgttaagagatcaattgaaaaattaaagctgaataatagtcgattagtaaatgtaatgcccgttggtggctggtttaatgttttgaaattacactatgatttgtcagataagaatgtattaggtgtcggtaaaacaataattagtgtgcttgatggtgatgtatccagcaacatccccaaacaatataagagtttgaaaaaatttttcctacccgtaaatagcgttgaaaaatatctaagaaatatattaataacaacccccaacaaggcaataaaaaaagaaataaatgatgttttttttgatatccatcatatagataagctattaactaattatcaaaaggaagaaagtgagtttaaaaaacaatctcctgagttttataaggaagataatgatgggaaaagactttaccgtaaaatatttaattttatgcaagaaagaaaaattgacgaagaggcatttgtaataaaactatatgaaatattagaacaacacgttgattttacaagcttatatagaaaccttaaagacggacttagtcaatataattaa

SEQ ID NO: 306650 - DNA, 933 bp, Proteus mirabilis
  misc_feature (907)..(916): n is a, c, g, or t
atgaatatacttcaaatgacaatacataagattaaaggaattcctaatggcgttcttcaactacccattgaaaatggcatttatgctatagtaggtaataatggaagtggtaaaagtaccataatgtcatgtcttgctcaattagtatcaagacataacttaggattactcaaaaaacaagattttaacaatgagtcatacgtcgaatttactttcaatgggcaaactgataaatggtattgcgaagataacttttggaaatcagacacatttcctaattgtataaagtttaatggaacatatgaaggaagccttttttatggaatgcggtttattgattcaaaaaatgttgatgaacttgttgaagaaggaaaaatcttagaaaacgaaattgttttggcggattcatatgtaatagaacacctcggtgaaattcttcattccaacaaaaaacactattctgatcttaagcgtattaaaaataaaacaataagagaaaagttaggattaaaaaatacaccatactttatgaatggtggtgattctataataagccaatatagaatgagttcaggagagtgcttaaccatatcattactccatttcatttataactctctagttcgaaggtctttatcaagaaatacaccaatattgatgcttattgacgaaattgaactagctcttcatcctatagcaattacaaaccttttaaatttattgaaaaaattagtatctgaatttgacaacttaacagttatcattacctctcactctccagaagtaatacgctcaatatcacctaataatatttttaaacttgaatttgactcaaacgatcagaattgttttaatattatcaatccttgctatcctggttatgcaattcgtgatgtatatactcatnnnnnnnnnnggttatgcaattcgtga

SEQ ID NO: 306651 - DNA, 681 bp, Proteus mirabilis
atgaaaaatggcaaactctctttcgatgcaaaaatcatatcatcagtcttagtctctatctgccgttttttaaccgggatcagagccaaacaaatatctccgattgagaaagataaaccttgtatttattacgcaaatcactcaagtcatctagatggtttagttatttggtcttcacttgccccccatattcggccatttgtgcaccctgttgctgcagaagattattggaataaaaaccgtttacgtcgttatctttctcgtcgtatctttcgtgcagttttgatcccacgccacgcgaataaaacaaatgttactgaaggaaatggtgaaacaacaactgcacctcagaaagtaaatgctcttacactgatgcaggctgttttagataaaggtgaatcgctaattatttttcctgaagggactagaggtaacggtgagtctattcaggattttaaagccggtctttggcatttgtcccgtaacaatccacaggctcaattagtccctatctatcttgaaaacttaaaccgcgtacttcctaaaggctctcggcttgttgttcctatcatttgtagtgccacatttggccctcctattgagccgacacatgaaaatgaagataagactgaatttctattaagagccaaaagtgcgttagaggagttacatcatggatag

SEQ ID NO: 306652 - DNA, 795 bp, Proteus mirabilis
atgaacgatttaactttagcatcacatgaaacaaatgtcactatgtcaagtcgtgagattgcagaattaacaggaaaggctcaccatcacgtagttcgtgacattgagaaaatgtttatggaactagattttaattatccaaaaacggatgattatgtttctaaagagttttttattaagcgtaaaaattacaagggtcgttctgttattgatgaaataggattagaccaagatcttacaatgacgttaatgactggatacagtgttccattgcgccataaagtatcaaaacgctggagggagcttgagtcagggaaagcaacaccaattgttgcacttaatgaccctgaattcttgcgttctgctttattaaattacactgaaaaagtattagcgcttgaatcatcaaataaagagctaacaaataaagtcgagtgtatgtctaacttgttcaaagaaggcatgacaccgactcaattttgtaaaatgcttaacggtgtaaatactcaacaagttcaaatgtggttagctgaacgcaactggttatttaacgaaagcaggtcaggtaaaaatattcgctggcgtgttgcttcatacgctcgtgataaatacatgacagaaaaccagagtgaaattaatccacatggtcacgagccttttattaagtatcaaccagttttattaaagaaaggtgctaaacgcctttatgatctctatcttgctggtgaactaccaatgaaaaagaactgggatggattatttactcatgacaaggaattcaaagaagtagcttaa

SEQ ID NO: 306653 - DNA, 255 bp, Proteus mirabilis
atgtcacaacttgactcagcaaatactcttgctttacagcaagtggtatcagcaataatattagtcctcactgaaaaagaaagggaaagagtaaaaaggattgttaagcacttaagcgaaataaactatctagataatattgataaagaatcaatacctagtgaaaaattaaatgaatacatcgatgagatgaattcaacatatgctcatattcttgaaatggttgctaacttagagttggcgcaaaaaggctaa

SEQ ID NO: 306654 - DNA, 381 bp, Proteus mirabilis
gtgagaaaattattattaatttgctttagtattattgctttatctggatgtgtttcgccaatgacaaagcaagatgtagccaatgcaacttattctgagttgcccgctaattacaaggatgaaataacagaggtaattaaatattcattgaaagatccagattcagcaaaatttatatttcatgagccaagattggcttacactgccgcaagtaaaaatgttgcttatgttgttcctattgatgttaatgcaaagaatagttatggcgggtatgttggatataagacaatgtattacgcatatacaaacgaacgttaccaagatgtgacgactggcataaaatatacagcggttaagtgggttgatgaaataaccgaatag

SEQ ID NO: 306655 - DNA, 390 bp, Proteus mirabilis
atgaccgtcaatatgacgttcaacgggataaacaatagcttacgtaataaagtggtcagagtttactcacttcgtggcgctcacctgatcgcaatgttctcatctactccagtagctaaagagtttcgtaaatgggtgctggatatattagatcgagaggttacaggaagtaacttagatgaacatttattacttagaaatttaactacagctaaaaagcacatcgaaagagttcgtgatatttatcgtgaaatactttcaccgtcattaattaagctgaatgaaaaactggaatcagagctatacaccttgataggtgatgctaacggcacagtttattcatcactaaaacacttggagagcagaaccaaagaggagttattacattga

SEQ ID NO: 306656 - DNA, 348 bp, Proteus mirabilis
atgccacctcgcatacctcgcgcatgtcgtaaacagggatgtgctaagacaacaacagaacgtaacggttactgtgaagaccatcagaatctagggtgggaaacccaccagcgcggtaagtctcgtcatcaacgtggttatggtaccaactgggataagctacgagctcgtatactcaagcgtgataagtatctgtgccaagaatgtttaaggttaggacgagccaccgaagcgaaaacagttgaccatatcatagctaaggcacatgggggtaccgatgcggaagagaacctgcagtcgttatgtatttcatgtcatagaactaagacagcaaaggaagggaaataa

SEQ ID NO: 306657 - DNA, 204 bp, Proteus mirabilis
atggataaaatttatatttcatcgtctaacatcatctctgttgcttacgattaccacagtaaaacattagcaattaatttcaaatgtggggaaaaacatcagtataatgaagtgccattttgcatatatcaaggattgatggcatcaaactccaaagaagcattttattattctatgattgaacataaatacccttatagttaa

SEQ ID NO: 306658 - DNA, 483 bp, Proteus mirabilis
atgaagcattggaaactttacattgtcattgtgatagtgggtattgttgctggtggctgcgtgctgattaatgcacaagcgaaaagaattaatacacaagctgaaaaaattaacacgctgacaaaaaacaacaaagaacttactaatacgctcgaagaacaaaaggccatcaatgctgactatcaagtgcgcatagagcgactaaatcaactcgatattaaatacactcaggagttagctagtgcaaagaatgaaattgatgggttgcgtgatgatattcgcaatggctctaagcgggtgtatgtcaaagccgagtgtccagcagtcaccaagaattccaccgaaagcggaagcaatgaaaacaccgcacgacttaacaaagcagttgaacaagattatctacgtctcagagaaatgatagtcgagaacgaacagcaaactttgtatttgcagaattatattaggacggagtgtgtgaactaa

SEQ ID NO: 306659 - DNA, 471 bp, Proteus mirabilis
atgaatctaaaacagaaagtagcagcagttgcgagtgccggtgcggtaagcattgcgctaacagtgattggttactttgaaggtattcgttatgaaccttaccgagatgttgctggtgttctgacggtttgttatggacacacagggagtgacattattcaaggcaagacatacacacagcaagagtgtgatgaattactgcagaaagactttattagaacgcaacaacaagttgatgtcctggttaaagtgccggttgatgataaaacaaaagcttctctatattccttcgctttcaatgtcggtactacagcctttgcacgttctacgttgctaaagaaattaaatgctggtgatcagtatggtgcttgcgaagaaatgaaacgctgggtttatgctggtggaaaggtttggcgagggttagtcagtcgtagagatgcggagtcagcactatgtcatggaaacctttaa

SEQ ID NO: 306660 - DNA, 270 bp, Proteus mirabilis
atgcgcatggaaaaattaaccaatgctacctacggaacagctggcttgactgccttttttgcaagtctctcattgtatgaatggggatttgtaatagggatgggattcagcatgctccttggattagcaacttactttatgacacagcgagaacagcggaaacgaacagcgttatttgctgaattagttcatcgaaattgttctagcgatccgcaagacatagaaaagatagttggcgagatgctgactaaagctaaaaaggacatttaa

SEQ ID NO: 306661 - DNA, 345 bp, Proteus mirabilis
atgtttataaaaatagaaaaaaatgaagaaatagcccatgcatatgatgttgatgaaagacagcgctatacattgttaactcatgatttttacattaacttaaatcatacaaatgtagtggaattcatattgaatgatgatagttgctatctcaatggcgatattatggggatgggattcaaggaaacaattgtattttttatgaatgatgcacctcacattttattatttaataaaaacagcatgggagaatatcatcgtataaagagagaatttgaagaatatgtgagtgacataaaatcaactaaaaaacaaaaggaagaaagtgttaatgaaggtgtttga

SEQ ID NO: 306662 - DNA, 786 bp, Proteus mirabilis
atgaaactagagtcagcattaaaacaattttatccaaagtcaccgatgatcaccgatacgtcaaactgtacagatcccaacagaatgaaggggatggataccgcaggagcacttggcatgacggaacatcgtgctaaatttggcatgtctgcgttttttgctaagaatgacgtgagtgaaaaagataagttcagcaccgtagagcagttaacacaatatgcacttaaagtaaccccaaagctggtggcgaaatcggcaggtaataagttgggctactgtttagtgatcctcgcaaaaatggcgtttgaagattacgcccgttcagcgggttcggtttgcgaatgttctgcgtgtgcaggcaaagggctaatttacagtcacaaagatgttgttaagtaccaagggaaaacgagtattgatggaactgttgtcattgaatcttggagtgaaaaagaaaaagttggtgagttatgcaaaacctgcaatggaaaggggaaattaacttaccgctgtcgttgtaaaggtcgaggtaaagtattagatgaaaaacaaacggaattacaaggcggtgtacctgtatttaaagattgccctcgttgtgctggtagagggtacaagagaatgccttcttcagtcgcatatcaagccattagtaaattgttaccagagcttaatgagcggacatggcgtagaaattggaagccattctatgagatgttaattagtaaatgttttagtgaggaaagtgatgctgaacagatttttaaacaggtgactaggtgttaa

SEQ ID NO: 306663 - DNA, 1026 bp, Proteus mirabilis
atgaaattattattaacgccttatattcagccagagcttggtgttgtgctacttaaacctggtgctgaattactcgagcaatttaaaaagcatcaccgcgtgattattagtgatgtgccaaaaagtttagatgtgttgccctcaggcgcattaacgggcgatgaacagccgattttaaacaataagcacatcattcaatttcttaatagtaaaaaagtgatccacaccatcgataaagtggcaccgatggactcttgggttattagtaatatcaaatactgtcagattgataacgatgaagataattaccatcaccatgagttagtgacgacttttcacgaggctggggtgatccgcacctgttggcatcatgataaccatattagaaattcatctgctgggtgggttgctgaattagctcataaaaaccgtattaattggatgttagacactattcgttttcggttgagattagatagtagccaccagctaacgatacctgattttttcacctttgcggttatgcataacgttatcgatgaattaccagaagcgatattgcgccagattttaaattggtcagataaacaagaagaacgcagagttcacggtggttttcctgaatctgacattatcccaagcaacgtaaccgcattatccgcaatgaatgaacgtttagatgcgataaagccggttattaaagtatctgtcgatccggagccaccagtatcatttcttcttaaaccaaaaatgcaacgttgggaaaatatcaactggctccaatgggtgaaaactcaaccgtgttgcgtgtgtgggcaacaggctgatgatccgcaccacatcataggtcatggtatgggtggtatgggtactaaggctcacgacttattcactattccattgtgtcgcattcaccatgacgagttacaccgcgacccaaaacaatgggaagccactcacggcaatcaactcgaattgttatttcattttttaaaccgttcattaggcatcggtgcatttatttaa

SEQ ID NO: 306664 - DNA, 291 bp, Proteus mirabilis
atgaaaaaactatattgtctagagtgctctgcttatttagagggtggtgatggtgaatgcaaggattgccactgcggatggaagcaaccaatggaagaagaaaagcaatcaacacctgaacagttacaagaagaaaatgaaaagttgaaagaagttctttttgctggcgctttcttaatggctaaagcggttcataaatatgatttcggtattggaatggaagagcaagccaccgactttatgaaggacgcagaggaacttacaggtaataagctaccaaagttcgcatga

SEQ ID NO: 306665 - DNA, 180 bp, Proteus mirabilis
atgagcaatgagaacccaaaccaacttgatcgctactacaaaaatcacaggggtatcgttgttcatgttgttcgttatgacagagaaaaacagcgtgtcatttttatgcttgatggttgtgacgatccgcaatgtgaacctgtacagcgttttaaagagaaatacaccagagttaagtga

SEQ ID NO: 306666 - DNA, 549 bp, Proteus mirabilis
atgaaatcacttaaaggtctttggttggtttctatttactctgcagtagaacgttcggttaatacaataatagaatctgcacttgaggtaattattagccataataatcgaagtatagattgtattgcttccattcatagtatacttcactttaatgaaattaaatcaataaatgaatgtggaaaaaataaaatattcgataaatcaatatctttatttcaagcaaccttcagtgaaacagccttaaagataactgataatcctttagcggaaagtttgcaaaatgttgatgctaatacaatgtcttgggttctaaaactgtttggcgcgcctaatttttcagtatctcctgcgtcaataggtcgagttaatactttacgagaaaggaggaatgctgtggcacacggacgtgaaagtgcattggaagctggagagagatataccattgatgaattagcaaatatatataatgcagctgatgaagttgttacagcttttcttttaaatctaagtgctcattgtaccaatcaaaattatattaaaaggtaa

SEQ ID NO: 306667 - DNA, 744 bp, Proteus mirabilis
  misc_feature (729)..(738): n is a, c, g, or t
atgggaggattagaatatttaagaagcattattgttatacgtatgagtaataaattagatttatcacttaattcacgcatttatactgcagcttaccgagaaaaattaaacaaaatagcgaatattaatccaacgttagcattaacagatctaattactttacgacaattcattactagtcatgccatattcactttctttgatctaccttggttccctatttaccttttagttattactttatttaatccttggttaggattatttgcactttgtggtgcccttatcttatttgctttggctatccttaatgaatatctatctaaaaatcatttaaaaaaagcgaacaattttgccaatcaagcacaactaatacaaagtcatcatttagaacatccacagactatcgaagcgatgggaatgcttagtcaattacgtaaacaatggcaaacctctcatttcaaatatttacaagcacaaacacaagccagtgataatgcagctggtattaacgctatcacaaaagtaacacgtatggcattacaatctttaatgctaggtttagggggatggcttgctattgataatactatcagtcctggaatgatgattgccggttcaatacttttaggtcgagcattagcccctattgagcaagtgatcaatgtatggaaaagttgggatagtagtaaagcagcctacaatcgattgacaactttattaaaaacnnnnnnnnnnacctaa

SEQ ID NO: 306668 - DNA, 204 bp, Proteus mirabilis
atgacaactgaacccgtaatcataccgccagccaatttcactgatgcagatgttgttgattggatgaaagagaaactatcgtctatcaaagtcctcggtgagttaaacgcaagacgtgaagagctggtggataaactagcaaaactggatgctgaaatagcagagtacgcaaataaaagtgctattcagacccaaagaaaatga

SEQ ID NO: 306669 - DNA, 1062 bp, Proteus mirabilis
atgagtttattattactaaaaagtcgccctttagtcgttattcctgaattagcggtacgtcttggtttaaatgaggcgatgctgttacagcaaattcaatattggctaactgaaactacttcaggtgttgaatatgacggctcgcgctggatttataacacagttgaagagtggaagaatcaatttccttttttctctgaatcaacgattaaacgtgcttttactaatttgaaaaagcagggtgttttacgcattgagcaaatcaataaatcgaaccatgaccgtactaattattatgcgattaactacgatcaccatctgctaactgatggggtcaatatgacccaatcgaacagtgataatacatctaatcgagcagttcaaaatgaccttatcgataagcgcaaattgaaaccgtcaaacagttcaaaatgcactgttctgaacgggtcaaaatggcctgatcttacagagaatacaacagagattacttcagagagtacaacagagactaactcttcttgtcaggttcctactgaacccgacaacgctcctgaaaaattaattttggattatttcaacaaggtgacaaattccaaatatcgtgaaggaaaaacaacaacagggcatatcaaggcgcgattagcagaaggatttacctctgaagacttgatattaattacggattacctgacagctaaatggcaaaaagatcccaagatgcgtgattacttacgccctaaaacattatttgttcctgaaaactgtattgaataccaagataaggcgatcaaatggcgtgatgcagggcgtcctgaatgtgtgaatggtcgttggttaaagcctggagaagtttcagtggaaattaacacggttgaacgtgatgaaacttttagaaaaatgttcacctcaggctggaaacctgaaaatcgtattcaagcattagcagtcgagcaagcaaagaaaaatggtcttggccgtatgagtgaagttgctggtttagcttcattccgtggtatctggaaacaggcgacagaacaagttgcactggaggctaagtga

SEQ ID NO: 306670 - DNA, 579 bp, Proteus mirabilis
atgtttaagaaggcgttattgagtttaactgcaggtgcattattatttaatgctagttcagcattagcggctgattatcaaattgataaacaagggcaacatgcttttgtgcaatttcgtatccaacacttaggttatagctggttatacggcacatttaaagattttgatggaagcttcacttacgataaagaagatccttcaaaagataaagtcgatattgtgattaaaacgggtagtttagatactaatcacgctgaacgtgacaaacacttacgtagtgctgatttctttaacgtcagtaaatatcctgaagctaagtttgtctcaaccaaagtgactcgtgatggtgaaaattatacggtgacgggtgatttaacacttaatggcgttacaaaaccaatttcactaaatgcaaaattaattggtgaaggtactgatccgtggaaagggtatcgcgctggttttgaagcaacaggtaaagttaatctgaaagagtttaactttaaatcagatttaggaccaaaatcgcaagaagcagaattaatcatctctgttgaaggtgtgaaaaaaaattaa

SEQ ID NO: 306671 - DNA, 555 bp, Proteus mirabilis; identical to SEQ ID NO: 301358

SEQ ID NO: 306672 - DNA, 702 bp, Proteus mirabilis
gtgggctatagtcatggagaagaaattgatagccaatcaagtatcagtggttattattctcgcgacttttctcaagctaacttatctgctaacgcaagttatgtaccacaacaatatcgtagtgttggtgcatcaattaacagtggtattacagctacaactcaaggtattgcgttgcatcgttcagctaatggtgatactcgtttaatgattgaaacaccaggggttggtgatgtacctctagatagtggcgttatcaaaactaattactttggacttgcagttattcctaatgttaatagttatcgtaaatctacggtttctattaataccagtcagctacctgaaaatatagaaacgctagaatcaacaactgatattaccttgactaaaggggcgatagggtatcgcagtttatcagtaatgaaaggggaaaagttgtttgccattatatccctaaatgatggtaagaaaccgccttttggggcaagtgtacgtaatgcggataatcgtgagttgggtattgttggtgaagatggtgtgacatggctagtaggcatttcatcaaaagaaaaactatctgtttattgggcagggaaaaaacaatgtgagttgtcacttcctgaagatttagcatcgccaactagcatgttattgctaccttgctcttcacctactatatcaaaaattacagaaaattaa

SEQ ID NO: 306673 - DNA, 393 bp, Proteus mirabilis
atgaaaatcacagagcaaatcttagcgttgtacaaagtcggtgaagtagtagatcgcgacattattactcgtgatttagaaaccactttaggtggtgcctctcgtgcacttgctcatctccatagtctcggtgcattaaccagagttagtgaaaattacccgctttactatcaagtgacgaatgaggctaaaaaagttcataacgcaatgatagaggaacgtaagtcaggagaatccgtctacctcgaaaagctaaatgctcagaaagcaaaaaaacgaggtattccaacaatcatatgggtaaaacacgccacttctaattttgcacatatggggaaattaccaactgagccctacgattcgttagtcagagcagtaaggagtaatcactaa

SEQ ID NO: 306674 - DNA, 171 bp, Proteus mirabilis
atgaacaataaaagctgtccattctgtaactctaaaaaactagaagtcatgcaagtgatgatcaatacattcactcgctgtcagaaatgtggagcaagaggtcctattgctaataacgcggacgaagccctgaaagcttgggataaaaggagtgtaaacgatgctaactaa

SEQ ID NO: 306675 - DNA, 174 bp, Proteus mirabilis
atgaaagatacagctaagactagatgtgaaatagaaaaattaactcttagagtgcctaaaaaagttaaagaggcagtagcgtttaaagctaaagaggaaggtttatctcttaattctgcgcttgttcagcgcatagtgtggagtttgaataatgaacccagcgtacgtggataa

SEQ ID NO: 306676 - DNA, 321 bp, Proteus mirabilis
atgagcaaatacccaagtcaaacccaagataaatttaccgttagatttccagatggaatgcgtgatgaaatagccaaaagagcagaggctaacgggcgctcaatgaactcagaaattgtccaaatcctacaagatgcgctaaataacgatgatattagtaatattgaagattacgacaaaccaacatcggatgatttcaaaaaggcagcaagaagaatgcttatagctatagaagagttcgaggagcaaaaacggaagctctataatattacagaagaaaacggtggtattagccttttaagtatttcacctaaagactaa

SEQ ID NO: 306677 - DNA, 264 bp, Proteus mirabilis; identical to SEQ ID NO: 300155

SEQ ID NO: 306678 - DNA, 351 bp, Proteus mirabilis
atggattttattttgaattatagtgctgatgttgatttggctctttatcaagaaaataaattttttcctatttatcaagcttgtatgaaagaagcatttaaatatggaaataagggctatgctcaagatttattaatcacgatgcaaccttggggatttactcctgaaatgattagcacacctacaacattatggtatggactaaaggatacaagtactgttcactcgcctgattttggcaagttattgtctcaacgttttccccatgcacaacgttatgtctatgataatgaaggtggctctttgttgtggactaaaacatcacagattttaactaatcttattagttaa

SEQ ID NO: 306679 - DNA, 504 bp, Proteus mirabilis
  misc_feature (490)..(499): n is a, c, g, or t
atgaaagttacaagtgccgaaaaacatgcattgttattaccagataatcgaacgttaacttggtatgaatctggcccatcagatggtcaaccggtattattctgcacaggtgcagggatgagtgggctattaagtatggatgctgagctgttaactaagttaaatattcgacttattacaccgactcgtcctggtttaggtgaatcaacctttgatcctaaaaagacattaaaatcgttttctagcgatgtattattcttattagcatatcttaatattaagaatatcagtgtgataggatcctctcaaggtgctgtttttgcgatggccatttgttactatggtaaagtggataagctggcaattgttgctggtcaagatcaactagattatcctgaaataaaaaaactgttgtccagtgatgtggttaatatgcaacaacaggcattattcgatcctgatggattaaagatctggatcattgaaaatnnnnnnnnnnattaa

SEQ ID NO: 306680 - DNA, 375 bp, Proteus mirabilis
atgagccaagaagatcgtaagacaaatgtccctgactttctttccgaattggacgctggcgtttttgaaaataaagtctctgctgttttaaatgatgtggctttaggcgttttaaataatggtggaaaaggcaaagtcactattgaattagattttgctcgccttagtaattcaatggaagaaaaacgagttgaaataactcataagcttaaattctctgcaccaacacctagaggaaaacggactgaggaagataccaccaaaacacctatgtacgtgggtaaaggcggcaagttgaccattatgcaagaagatcaaggtcaattattttctttacaaggtcagcccgatggtaaattaaaagccattaattag

SEQ ID NO: 306681 - DNA, 375 bp, Proteus mirabilis
atgagccaagaagatcgtaagacaaatgtccctgactttctttccgaattggacgctggcgtttttgaaaataaagtctctgctgttttaaatgatgtggctttaggcgttttaaataatggtggaaaaggcaaagtcactattgaattagattttgctcgccttagtaattcaatggaagaaaaacgagttgaaataactcataagcttaaattctctgcaccaacacctagaggaaaacggactgaggaagatactactaaaacaccaatgtacgtaggtaaaggtggtaagttgaccattatgcaagaagaccaaggtcaattattttctttgcaaggtcagcccgatggtaaattaaaagccattaattag

SEQ ID NO: 306682 - DNA, 138 bp, Proteus mirabilis
atgacaattggagatgtaagtgttgttgatggttcacaacaatttgagtttggtgtttttgtccgtaagccagcaataggagaaattaagattggtgaattttccagtatcgtaacttttaatgtggagtatgaatag

SEQ ID NO: 306683 - DNA, 180 bp, Proteus mirabilis
atgaataagatggtgaaatttctagggcttatttctttaacaatatgtaattggcagtctcaaacattagcggccaataatttagatgttgaatttagcggtgagttaatcagtgttgcatgccaagtcgcttcagaatcaataaataaaaaactgacttacagaaaagtattaaattaa

SEQ ID NO: 306684 - DNA, 390 bp, Proteus mirabilis
atgttaaaattaaataaaattcatcatgtggcgattatttgttctgattataccatcagcaaacatttttattgtcaaatactggggcttaccctattaaatgaaaaataccgtgaagaaatacaatcttggaaagctgagcttgcgttaggtacagtctaccaaattgaattatttagcttccctgatgcgccagcacgtttaagttacccagaagcacgtggtctacgccatgtggcatttgcagtggacgatcttgatgcttcagttgcttatttacaacaaaacaatattcaatgcgagccaatacgtatagatcctagtagccaaaaacgttttaccttttttcaagatcccgatggcttacctttagagctttattcaatatag

SEQ ID NO: 306685 - DNA, 246 bp, Proteus mirabilis
atgcacgaagcccctcaagtattacattatggtattcgaggacaaggtgttgtactaaaagaagggatgacctttaccattgaaccgatgattaaccaaggtggacacaaaataaaaaccaaaaaagatggttggactgtagtcacccgtgataaaaaattatcggcacaatcagaacatactattttagttactgctgatgggtatgaagtactcactttgcgtccagaagaaacacttccataa

SEQ ID NO: 306686 - DNA, 390 bp, Proteus mirabilis
atggcatttgatgctgacggtaatgttttagatatcaaacaagctatttctgctgttcgtcgtattacgattgaatcaacacgctctgctgaacatgaaaatgctgattttagtgctaaacgctcagtgttagaaaatgttgaagcaagaagcaaagacattatgcctgctacattccagtttacttgtgctccttatgacgaattaaaagaacgtagcattaaattacgttatagcgtactcactggtgatgatattcccgttttagttcttcgaatcattcaacttgaaaaacttgaagaacaaatcgctcaagagtttcgagatatgctttgcaatgaattcgatgaaagcaaaatcgaaacattcattggtaaattttcagcgtaa

SEQ ID NO: 306687 - DNA, 276 bp, Proteus mirabilis
atgtcactgactatacgttacacctatgcagatatgaccagtagaaacagaaataatggcacggaaatagcctttcagaatcttaacgatgtccgcattgaaacagaatcattcagggaacttactcagtattaccaacctgagccatcagaagtcgttgattatgtcattaatcagtatgacgcaaagtcactcgcagcagctattcatctctcaggacgaggggaagtagtcgcaaagatactcaatgagttgtatttcaggagggttgcgtga

SEQ ID NO: 306688 - DNA, 1725 bp, Proteus mirabilis
atgtcagacactaagcacttaaatgtgttgattgcaaaagctcttttacttaaccaagatattactgatagcgaacaagtagatatgctaacagctcatatcaacggtgatattgaaaaagaagagtttaagcaatatgaccactttattaatatcacgctacttgcactttcattggttcctaatatcagcagtgaattaagtgaagagcaaatcattaacgctattatgtcatttattgataaccctgatatgcgtagcgttcgtcatagagttaatcactttaactcattaataaacccaaaaaccgcctcaattgaggtagaaaaaaaagaagcacctcaggaagaggtgatttttcacgccaacaaagataaccaaaacggtcaacgcaaggaggcggaagatattccaaaggaagaaaatgaccaacctgcttattttgaacctggtcggtatcccgatattcctaatgaggtgtatcacagttcaaacggcatcagtagttcgatgctaaaagatgctcgtattagtttgatgtattacgagttacgccatgtaacaaaagttattgagcgtgaaaataagcgttgtttcgacttaggtagtgcatttcacacgttaacaatggaacctgaaaagtttgatgctgaattcagtgttaagccaattattccagaaggtgcctttacaacaacggaaacaatgaagtcatggattgacgaatacaacaataagttgcctaaaaagctctcacaagatgagttaaaagcaattattgaagaacataatgccactctgacaccgcaactttccaccagcggaaaagccgaagagctaggtcagatatacatgcagttgcccgatgaatttaaaaccatccctgaagatgggaaatttactggcgcagcaatgaaagcctgtatcaaagcctataatgatactttgccaacaccattgaaaacctcaggtaatacagatgcattacttgagcagatataccaccacatcaatcctgaattatatttagcagaagtaagtaagcctgagccacttagaaaacccgtcaagaaagatgatctcatacaggtcattaaagaagtaaaacctgatgctgtatttgaagatgaaatcattagccaatggcttagtgacgattcaaaaattcatgttcaaaccgttgactatgaaatggcaaataacatgcgtaacgctgttatgaaccacaaagaagcatccagtttattaaaccaccctaaccgtgtatcagaagtgagttactacggcattgatgaagataccggccttgaaattcgtgttcgtcctgatatcgaaattcaaacagaaaataaccgattaggttttgacctcaaatctgtagcacttggtcgatttaaacaagatgccattgaaaccatgatccgcagagaaatcattaatcgcgattatcacatcagtgcagctatgtattgtgatgtggcaatgctggatcagttcttctggatattcgttaacaaagacgagcattaccactgggtcgctatcgttgaagcctctcctgagttacttgaactgggtcgcgctgagtacaaaaagatactgcgtgatatccgtgaagctatggatacaggatattggccagcacctatcaccactactctcactatcggtatcactgactttgagcagagaaagttagaagaactgcaaaacgaagtcgcttaa

SEQ ID NO: 306689 - DNA, 564 bp, Proteus mirabilis
  misc_feature (512)..(521): n is a, c, g, or t
atggcaataagtagaagaaaatttattcttggtggcacagtggttgctgttgctgcaggcgctgggattttaacacctatgttaacgcgagaagggcgttttgttcctggtacgccgagtccattaccgaaacaagatgatgttgttgtaattggtgcgggtattttaggtatcatgaccgcgattaaccttgctgagcgtggcttatctgtcacaatcgttgaaaaaggaaatattgccggcgaacaatcatctcgattctatggtcaagctattagctataaaatgccagatgaaaccttcttattacatcacctcgggaagcaccgctggcgtgaaatgaacgctaaagttggtattgataccacttatcgtacacaaggtcgtgtagaagttcctttagatgaagaagatttagaaaacgtaagaaaatggattgatgctaaaagcaaagatgttggctcagacattccatttagaacaaaaatgattgaaggcgctgagttaaaacnnnnnnnnnnctcggcgtaccaggaacaaaacgcccttctcgcgttaacatag

SEQ ID NO: 306690 - DNA, 132 bp, Proteus mirabilis
atgtttataaatagcgctaaaatcgatgctctgattattaaatatgctgttgaacatttttttcaaaaaactattgccagcctcagaaaactccctataatgcgtcctcgttgtcacggcatagggcgctaa

SEQ ID NO: 306691 - DNA, 579 bp, Proteus mirabilis
ttgtggaaaaaaattatagatgaaaatattgatgtggctggaatttttgaagacgatatttatctaggaaaacattctgaaaatttactaattaattattcatgggtgaataaagacattgatattataaaaattgaaaaatctaataaaaaaataaaaacgtctatcagaccaatgaaaaaagttaataatattcaaatagttagattaagaagccgtcatttaggaacagcaggatatattattacaaataaaggtgcccactttttatttaatcatatttcccaaaggcccattagcaatcctatagatcatgaaatatttaatgatttattaatagataataaatatattgttggacaaaccatgccttgcttgtgtatacaagattttgttttcaataaaaatgataacaattttcctagtgcattagaagataatagaattcatcgtattacacataataacacaggaaataagaataaaatttcacgagaaatatctagattaaaagaacaaataatagggttcacgctaaaaggcacaatagaaagaaaagtgtatttttacttaaaataa

SEQ ID NO: 306692 - DNA, 507 bp, Proteus mirabilis
atgcctaaacatttaactttaggtgcttatcttcaacatatagataaaaataatattcttatgaaagaaagcgatgcatttaatatgctactgtacctatttaacttcaacaatgtatctcttagagaaatagagaaatgttattctttaatttcaattattaaaaactccaataaaataatgatgcttgataagccatatcaagttattgttgctttggtttgttttttgaaaattaacaatgagccattattagataaattaaaaagaaggaatacaactccagaagaagtacttacactattgaatataccattggatcagggtttatttgatacatcaattcactatttatatatagtactacgttatgaattacttactggtgaagaatttaaaaaacttaaaaatgaaaattattttataggtatagaaggttatgctggaagaaaagtaagatacttagaaacgataaccgattactttgaaaacatgtccatagattaa

SEQ ID NO: 306693 - DNA, 1221 bp, Proteus mirabilis
atgaaagcagagcgtcataaaaaaattgttaatctgatcaaaggtcatggtgcagtaaaagtttctgttttagcaaaagagcttagtgttaccaaagaaaccatacgatcagatttaaatacattggctgagaaaggaataattaaaagatgccatggtggggcctttattgaatttgaaacattagacaaagttgccaaaaaagaaatcatacaatttttagaatgtaatgatcaaattgataaaattaatttagcggggcagccggcagtaaataaagtatgtgtattaggttcatttaatgttgatatgattagttatttgcccagactgccagaaaccggggaatctttattggcgaataaatttatcttctcaccaggaggtaaaggatgtaatcaagcattagcggcaagttatgctgatgcacaggtgcattttatcaccaaaatcggtactgatcagtttagtgattatgcagtaaattttatatcgtcatcaagaataaaaacatcaacgatatatcaaactgaaaatcatcaaactggaacagcatcaatctttgtgtcagaagagagtggtgaaaatattatttctatttattcaggggctaatatggatatttcttctgatgaggtaaaaatacaaaaagataaaattatagatgccgatataattttattgcaattagaaactaatattgaagcattaaaggaaattatttcaatcggaaatgaaaataatattcctattattttaaatcctgcaccttacaataaaattattgataagttattgccaatgttagatatattaacacctaatgaaacagaagccagcttattatcaggtattgaagttgttgatttagtatctgctaaaaatgcagccaatgctatttatcaaaaaggtgttaataaagttgtcattactttaggtagtaaaggttcattagcttatgacggttataaatatatttactcaccagcttatcctgcggtggtaaaaaatacagcgggcgctggtgatgcttttaatggtgcactagcagcctcattagcaaaaggaaagcagttttcttacgcgttacgctatgcatcagcttttgcatcactagctgttgagacgagtaatgcttcagaaatgcctgaagatattaatgtcatgcatcgcatcaatcaaacaacatattcacagattgtcactcaatcccctgaataa

SEQ ID NO: 306694 - DNA, 2367 bp, Proteus mirabilis; identical to SEQ ID NO: 297671

SEQ ID NO: 306695 - DNA, 5289 bp, Proteus mirabilis
gtgagttcaaattattataataggctaacgggctggaaggactctagcatcaaaaaaggatatgacgaacgccctgcaaacggttgggatattagaactcaaagttatcttcctgcataccctcaattgggtttaaaagctaattttgagcagtactatggtgataatgttgatttattcaataatacatctaatttaacaaaagatccttttgcatttactgcaggactaaattacaccccatttcctcttatcacctttaatgccgaacataaattaggtaaaggtggtgataatgatactcaacttagtctctccttaaactatcaatttggtacaccaattaaaacgcaattagatcctagtaatattaagccattgcgtctacttgaaaatagcaaatatgattttgttgatagaaataataacattgtttttgattataaagagcaaacttacctttctctcaaaacccctgatttaatcgaaggatatagtaatgagcaaaaagtcattaccattagtgtagaatcaagtgcagggcttgattatattgatgttaatggcgctgattttattcaaaatggcggtaaaattattaaacaagcgccaaatagctatttactctatttgccttactataaccaacaaaaaggggctacaaatacctataatattgtcgctattgcatacgataaaaaaggccgctcatcatcgccagaaacaacaaagattgttgtattaaaagataataacgctgaaaatgcgactatttctgccacaccacaaaaaataggtattgatgaatcatcaatcattactttaagctttacaaatcatgaaggtgaattggttgaaataaatgatgcccgtatcgttcttgataatggtgttaacggagtattatctgatacacaatacaatgccaaaaataaaacttaccaggctaagtttattggcgtaataccagaaacagctcgtttttatgctttctataatcaagtaattcatcaagatatatcaacaacggttagcgtagaaaaaaatacttctcgttatcagcaagtcacattaaaagcagataaaaatgccattacactaggcaattcaacactattacgccttactttctttgataaaaataagcaaccaatcgaggtagataatgcacaaattttattaacaaatagtgagcaaggtgatatttcaaacacaacctatgatcctaccacgaaacaatatacggctacatttgtaagcaaaaatgtcggggatgcgattttccaaccgtcattaaataatgaagttatttctgatgttaaagaaatagtgaacgtttctaccttcaaaaatattaatttaactacagttaatgaaatgtatgtaggggattcatctaaagttgtcatgaccatcttggatgataataatcagccaatggaagtcgataatgcaaaaattcagatgattagagtcaataatcaaacaggtaacggcgttatctctgaaacaatctataatgctgcagataaaaactattcggctcaatttcaggcaacagaaacaggtaaagtgactttctacccttatgtcgcgaataccccttaccctgatagtaaagctgagacatccattctttctcattcagagaaatataaaattgtttccttaacggctgaaccagaacaaattatccaaaatcaaacttcagtgatcacggcagtagtgcaagataatcaaggtcaacccgttactgataaaaccgtcgaaattgttttaatcacaaatagcggaaccttgactaaaacgacgaaagtatcaggaaaagcgggggtttaccaagccacttataccggaactgaaccaacaacggcaacttttaccgtcaatgtcgatgatatacaaaataatgatactaaagtaaatgtaattgtttggggaagaaatgatgtcaatgcaacacttgttgccaataacccgtcattggatctaacacaggtagagcataactcgttattaacacttacactaacagataaaaataataatccattacctacggataacgcggttattttacaagaacaacccaattacgggatcctagatgcgactaaaaaaattagtgcaacccaatatacagccaattttaatgcaactaaggtaggtacggctaaattctttgttgaattagaaggatttcgtttaaaaacaacagcagaaattaacgttattgatagtaaacctacaattgatttgaataatgccaccattgcgtccaatcctagccatatttatagcacagaagaaaagcaaaatggccatacacgtagtaatgacaataacaattggcgtacatccactattactttagatataaaagatcaatatgggaatttattctcccctgatgtccctatcgatatcgtgattaaaaatacccaaaatggacgtgtaagcgaagccaaagaagtcaaacctggagaatatcaagttgtttatacgccgactgagcaaaatataccttttaccgcgactttctatgcggtaataaacaatgtacaacaaaatcaaatttcaaccaccgttgatgttgaaccgttaatacataatgtaaaaatgggcgcaagtttaattccaatcccttcacatattactgtgggtaatgcatcaatattaaatgtgatcttctatcaagacaataaaccttacattccttccggcaccgttgaaattagactcgctgatgattcaaaagcgttaggccatatggaggcaacaacgaaaagtggccatatctttcaggctaaattcatcggtgaaaatgtaggtaaagctaactttgaaatatttgttgataagcagcagtatactgaaggtaatatcaacgcaaccgttaatgtaacagaatcttatcgaggaaaattgaatgcggagccgagttctattccggtaaaacaaacttctgtattaactttacaaattcaaaatcatcttggtcaatcaataaaagtcagtgatgatgatgtacaaatcattatgttgcaaggtgatggtaataccgcagaaggtactattagtgaaacaacttatgatgccaatacaaaatcatatcaagcgactttcactggcactaaacaaggcaaagctcagtttatctcgatcattgatggacaaacttataataatacctcaactactgtcactgtaaagcctgcctataattcagccaatatgggaagagaaacttctccgatcacattgaataaaacctctgatgtttatttaaccctactcgatgcgagtggtcagcccattcaagttgataatgcaaaaatcatgttaaatacaccgaatttaggctctttaactgtgacaacatgggacaataccaataaacgctatgtggctacctttacaggctcagcgataggtaatgcagagtttagtgcttatgtcgataatcaaaaaatagcagatgttactacttctattcaggttaatgatagccctgatgcattttataatccgagtctagtaccatctccaagtgttattacagtaaataataaatctgaaattaggttaactattcaagatattaacggcctgcctattaaaggaaatagcgccaatattatcttagaaacaccaacattaggttcattatctgaaacagtatgggatgaaagtataaatgcatataaagcaacctttactggtaatcaggtaggtaaagcaaacttctcagctattattaatggcaaggtggggcaagcaaagacatccgttcaagttaatgaagtctataattcagcgacgttacaacctgatcctagcactatactatcaggggatacctctgagctaaccttaactttatttgataaatcaggtgaacaagtgaggatcacaaatgacaatgtcagtattaacattcttacaccaaagcttggttcactcaataaaacaacatttgacgccaagacaaaaacatataaagcaaaatttaatagcgctgggttaggtactgcacaatttaacgtttcgataaatggtattgttcgttctgatattaccgcgagtattatcatcaaaaaagcgtatgaaagtgcatcattaactgcaatgccttcatccatctatacaggtaaaacatcggaattaacactgacatttaaagatgccaacaataaacctattgaagttaatggtgccaaaattatcttacgagatggtgaagcaggacaattaacggatacaacttataacgaggccaaaaaggtatatacagcgacatttactggtacgctagcaaccaatgctaattttaatgcatcaattaacaataatattgatacatcaatcaaaactacggtaacagttaaggagctatccttagatagtttcaactatcaactgatcagtaaacctaactctatctatattaatgatgaatcaacattagaattgaaaataacagatgctaatggcgctgtagttcaattggatgatgtcagtattgctcaatcatcaaataaccaatacggcactctcagtaaaacgacctataacagcaaaacaggcacttataccgcaacttttaccggtaaaaatgtgggaacagaaaccttctatgtggttattcaacaaaccgtgttaagcgaggtgaaaacaactgttacagtggataaagtcataccgatcaccgatattgcttatattgattcgaataattactcatttgaattaaatgaaggattccctacaacaggttaccaattctcaagtttcagttttgtgatgaaaaatggaaccaaagcatcggattatacatggaaagcaaatcaatcatgggtcactctgactcaaaatagtaacaaaatgaatgtcatgttctccaaagcaccaaacagtgaaaataaaacggtaactattacagcacaacctcgtgtagaaggtgtaggaaccgcattctcctatacatttacactaaaacgttggtttacattctatggtggacaaccgttacctgctccgagagcatggaaaatatgtacagataatggattagataccacaccttcatccttacttacctcaggtacaaataaacgaggtataggaactgttttctcagaatggggtaaaggaggttcagttttccacgcatggtcttccgatatcaacgatcaacaacaggttggtttagtgaatctttatgatgggtcagttaaataccttaactcatattttcaatatgaccctgtatgtaaaacagacttgtaa

SEQ ID NO: 306696 - DNA, 273 bp, Proteus mirabilis
atgcttgaggatatgggggtgagaggatcattcccgctgattttaggttattaccacaccaaggaaaaaaatatattattagcgtcagcaggactacgagctgaaataaaaacagagaataaaaaatatgttttaaatagtggtatacctttaggaacactacactctttatatattaaccaaataaagtgtgtgggaatagattggcaatgtaaaatttggaatcagcaccataaaattaatttaatgttctcacctatacataaacgttaa

SEQ ID NO: 306697 - DNA, 333 bp, Proteus mirabilis
  misc_feature (261)..(270): n is a, c, g, or t
gtgtttgacccgtttaatgattttgagcaagtcggttatttacgtaactattatggtgaaaaagatccgataattattcgtcaacttgaacacacaatgtttcgtgctggtttagatgaagcattagcttacttagtaggaaaagaaatcttacattatgaagattttttgggtgttcatcggatattattcgaagcattctacccatgggcaggtcaagatcgtgccattaccgcacctaattgtgcggtctctaaagcnnnnnnnnnncacctaattgtgcggtatctaaagctggtacgatgttttgccatcctcatcatgctcgattag

SEQ ID NO: 306698 - DNA, 426 bp, Proteus mirabilis
atgatggcctcttttttaggaaaattaggtctaattaaatggctttcattaagtgttggtgccggtattgatagtatggggataagctgggtaagtggtatgatattgctcgtgctgatttatgtctattctcactatttctttgctagcaccacggctcatattaccgccatgtttgctgcattctatgccgcaggtttaacccttggcgcgccaccaatgttattaggacttattttagctttctcttcttcattaatgatgtctttaactcattacggtacaggtactgcaccgattattttcggctcaggctacgcgaccttaggtgagtggtggaaagcaggttttgttatgagcattgttaacctcattatctggataacccttggtagtttatggtggaaggtgctggggtattggtaa

SEQ ID NO: 306699 - DNA, 1032 bp, Proteus mirabilis
atgaataaattaactccattacgacctatacctaccttaattgctgttgttattacccttatcatttggtttgttatccctgttccccaaggggtagatcccaatgcttggcacttgttagcgctgtttgttggtactattgcggctattatcggcaaagccttacctataggggcagtatctattattgctattgcgcttgttgccgcaacaggcgtcactaacccagactcaactaaaggggcgattaatgatgcattaagtggcttttccaacaatcttatctggttaatcggtatttctattatggtttcaatgagtcttaataaaaccggattaggtgctagaattggttactattttatttcgttatttggtaaaaaaaccattggtatcgcttattctctagctattgcagaaacgatcctcgcccctgttacgccaagtaatacagctcgaggtggcgggattattcacccaataatgcgatctattgccgatagctttaattcaaaacccgaagagggtactagtggtaagattggtcgttatttatcgctagtcaattataatatcaatcctatcacctcagcgatgtttattactgcaaccgcgcctaatcctcttattgtaagcttaattatcggtgaaacagggcctgaaaatgagttaacttggtcaatgtgggcaatagcggcttttgttcccgccattgtttcattatttttaatgccgattgtgatctactttttatataaaccagagataacccatacgccgaatgctccccactttgccaaagagcgtttagctcaattaggccctatttcattgccagaaaaaatcactttgggagtatttgcactgttattaattatgtgggcaggaatacccgcactattatttggtgatgcttttagtattaatgcgactactgcggcttttattggtttatcaatcttattatgtactggcgtattaaattgggatgatattttaaaaaacaaaggcgcatgggataccgtggtttag

SEQ ID NO: 306700 - DNA, 564 bp, Proteus mirabilis
atgtggcgaatgcttggtgaaggggctgattttgttgtcggtatcgatcccactcagctctttttatgccaatttgaagcagtcagaaaattattaggtaacgatcagcgtgcccatttaattcctgtcggcattgaacaaatgccagaactaaatgcttttgatacggtattttcaatgggggttctttaccaccgtcgttcaccacttgatcatctttggcaattgaaaaatcagctcgtttctggtggtgaattagtattagagagtcttgtgattgatggtgatgaattccaatgtttaattcctggtgagcgttatgcacagatgcgtaatgtgtactttataccgtcagccaaaatgctcaaagtatggttagaaaaatgcggttttaaagatgtacgcattgttgatgaaaatgtcacatcactcgaagagcaacgtaaaacggattggatggtgactgattcattagaagcattcttagatcctctcgatcacaccaaaaccgttgaaggctatccagcgcctaaacgggcaattttaattgcgactaaaccttaa

SEQ ID NO: 306701 - DNA, 1563 bp, Proteus mirabilis
atgacgatcgcctgtcaattttctcagcttaatattgaattcaatcaagaagcgcttttcccaccgctgactcattcactggcttgccaaagaaatgctttaattggtcagaacggtaaaggaaaatcggtgctgttaaaattgttagcacaaaaactattgccttcatcaggccatatcatgtggcgtatgccttttattcatgtcgatcagcttactcgcctaacaggtaacaccattgctgatgctttaggtatagatactttttttcaagcatttaaacgggttgataacggcagtgcttcattagaagattttgagttacttgaagataagtggcatttgcccatgacttggcaaaatttacttcattcagcacaactgccggtttcacttgatacacctattccccacttaagtggtggtgagcaaacgcgtttagcattatgtcaggcttttttacatgacgatcattttctattattagatgaaccagataaccatctagatcatcaaggtcagcaatggctcgttgaacaattaatgcatcataaatcaggtgtattatttattagccataatcgacatttattatcttatgctgaaaatatatttgaactgagtgaaaaaggcttacaagaatatggcggtaattattcgctttatgaaacacaaaaaaatgcgcaaatagcctcaatcgaagctgcaaatgagcgtatcaatagtcaaataaaacaggaaaaacgccaacaacatgtaacattacaaaaagcattaaagcgacgtaaacaaggtgaaaagataagaaacagcggctctcaatcactgttacttcttgatatgcaaaccaatcgagctgagaaaaaacagtcatcaatagctaaacgacatcagcgcgttatggatgatatgcagtcacaaaaacaacagttagaacaagagttaactcatattcatcagcaaaaattaatattaaactatcaaggcgatggccatcggttaaatgtatttgccacagagcttgttttaccttttggcaagcaaactccctactccttttccgcttatggtggtgaacattggcatatacaaggtaaaaatggcagcggtaagtcaaccttattaaaatgtttaatgggcaagctatccccgttatccggcgaatatcgtctcaacccaaattattgctatcttgatcaacatttaactttattagataaatcattacccgttgctgaagcgttatatcaatatcagccattaatgaccattgagcagtggcgcacaaaactgggtatgttacgtattcgaggtaacaagtctttatttcctttaggaacactcagtggcggtgagcaattaaaagcaacactattagcattaatttatagtcctcaaccccctgccgttttattattagatgaaccagataattatttagatttagactctaaacaattattggaaaatttattatttcaatatcaaggaacattattattaatctctcacgatgaagattttgttaaacaatgtggtataacaaatacattattactctaa

SEQ ID NO: 306702 - DNA, 912 bp, Proteus mirabilis
atgtattatggttttgatatgggcggcacaaaaatcgagctcgccgtttttgataaagatcttactcaagtatggcaaaaacgtgtaccaacgccaaagaatgattatcaagctctattaaatgtttttaaaacactcactttagaagctgataatgatttaggctgtaaaggaaaaataggtatcggtgttcctggcatcgtcaatgcaaaagaaggaactgtatttaccaccaacgtgcctgctgccaaatataaaccgatgatccacgatctggctaatattcttgaacgccccgtcaaagttgagaatgatgctaactgttttgccttatcagaagcatgggatcctgaatttcgtcattatccttcagtactgggtttaatattaggtacgggtgttggcggtggttttgtcattgatggcaaagtactctctggtaaaaatggtattgccggtgaaataggtcacatgaatcttaatgtagatgctgataatgtgattggtgagaccatgccaaaaatattgtgtggttgtggtagaaaagcctgctttgagacttatttatctggtcgtggttttgaacgtatgtataaagcctttaatggctcaccacaaagagcggtggatatcgttgcacaatattatcaaggcgatgaacagacccaacagcatgttgaccgctatatgaaagtattagccatttaccttagcaatattctgactgtacttgacccacatttaattgttattggtggcggtttatcacaatttgacgcactgtataccttattaccggattatctctcacattgtgtatacggtaatacacaaattccaacaatagaaaaagcacgttatggtgatgcgggtggagcaagaggtgctgcctgcttaaatttattagactga

SEQ ID NO: 306703 - DNA, 567 bp, Proteus mirabilis; identical to SEQ ID NO: 302846

SEQ ID NO: 306704 - DNA, 426 bp, Proteus mirabilis
atgcaacaacaggcactattcgatcctgatggattaaagatctggatcattgaaaatatcaccactgactggttaatggattttattttgaattatagtgctgatgttgatttggctctttatcaagaaaataaattttttcctgtttatcaagcttgtatgaaagaagcatttaaatatggaaataagggctatgctcaagatttattaatcacgatgcaacattggggatttactccagaaatgattagcacacctacaacattatggtatggactaaaggatacgagtactgttcactcgcctgattttggcaagttattgtctcaacgttttccccatgcacaacgttatgtctatgataatgaaggtggctctttgttgtggactaaaacatcacagattttaactaatcttattagttaa

SEQ ID NO: 306705 - DNA, 510 bp, Proteus mirabilis
atgaaaaaaatcatgataacggccctattggctttatttttatcgggatgtgataacaacccgccagcaccctacggatttaagtgggggcagtcggtggaggatatacaaaagttaaacttagaaggtgatggatgtcagttccccgtgtgtcaggtaacaaagactccaagcggagttatgggatcaaccgtattaatatttaataaaaaactagggctggttcaagtgttgcgctctgaggtactgagtgaaacaaaccaacaagagataatgaagaagtttaacaatgctgttgatgaggtgaatgtagcatatggtgttccgacaaataaaataattaaaattgatgatgaatcaaactttattgattgtttaaataaaataggttgtagcaagataaaggctgaatacgacaaagaaggttacaaagtgttagtctcagttggtattagagataaggatggtaagctagccattctaaccaactatgcaaaacctctaaattag

SEQ ID NO: 306706 - DNA, 285 bp, Proteus mirabilis
atgacaacaaataaagagttattacgaaaagagattggaagctttttaaaaaaagcaagaaagaatcaatctctcacaggacatcaattgggcaaattaatgcagattagtcagcaacaaatttcgcgctatgaacgaggcgaatccagcattaatatagaaactctcgatgttatgctcaatattttagggaaaaattggtcagaattttttttctccgtcatgattaattactcaggtgaaatgatggaaatgagaatacaggaaaaaaagcactttctatag

SEQ ID NO: 306707 - DNA, 552 bp, Proteus mirabilis
atgaaattaactaaattagcgattgcaactgtatttgcggcatctgttgttccattcagctcaatggccgataacacagggacaattaactttctgggctctgttgttaacacaccttgcaatattgagcagtcttctctgaaacaaactgttgattttgggcagttgtcacgtaaagcattagaaagtggtaaagcggcggaagcagatttcgatatcaaatttacaggctgtgattttgctaactttggcaaagatactgaaggtaaacctgtagcagtgaaatcaatggaattggtatttactggtcaaacttatgcagataaagacaatacattgttggcaacttcaacaggaaatacaaacaaccttggtattttgatcgacggtttcgaattcggtaaagcgactgacgtattacctcgtattgcaaaccaaactggtgataatacattaactttcaaggcactagctaaagcagttgatacaactaaagatgtagctgaaggtaaattcagtgctatctctaacttccgtatcacatatcaataa

SEQ ID NO: 306708 - DNA, 579 bp, Proteus mirabilis
gtgactgtttatcaacatgttggtctgcaaataacagggatcttattttcgcttatctttggtggtacaccagtttttgccgcaaaagaggtgggtatgcgccatgaaggggtgactcaacttgttggcagtgtgatctcaacgccatgttcgattgtgatgtcaaatcgttatcaaacggtcgatttttcatctttaacgatgacaaagctttcaacggcggtagaacgagagcaacaaactcggccgtttgatattgagcttcgtgattgtggcagtgtgtatagcactattgatagcaaaacatggacgatacgttttgatgggcaaggagctgacaatatccatgcatttgtcttacaagggccttcccaaggtttaggagtctctgtgcttgataacacgaaaaatatcttgatacctggagaaagctaccctttgtttaagagtgtgttacggcaaggtaaatcagggcaaaccctctttttacgttattttttacggctagagctgactgggaaaccgttacaagcaggaagttatcaggggctagttcgtttttttatcgattatcaataa

SEQ ID NO: 306709 - DNA, 2526 bp, Proteus mirabilis
atgatgttcaaacttagcaaaataaggctggccgttttattggcggtgagcgtcagtgcatgcacggtgtatgcaacagaattcaatacagatgtattggatgcagaagatatgcaaaacgtggatatgagccaattttctgttgccggttatgtgcctcccggaaactatgtattaaccgtttttgttaacgggcagcgcttaggcgcgcctcgtgatattgcggtccttgaacaaaatgctcagcaccaagcaacttgtataccggctaatttattggatctgattggtttgaaagattcggcaaaagaaaaagtcacgacttatgatgatggccagtgcctcgatctttccgcattaaaaggtatgcaatcgataattgaattgcccacgctatcactgaaaatcaccattccacaattatggatggaatatcgtgatcctaactggacaccacctgcattatgggaagaagggattaatggggcttttgttgattacaacgcgaatgtttcggtgaccgaagagaacaaaggcaacaagcgtacttatttatctgctaatggtacggcgggtattaacctaggtgtttggcgtttacgtggcgactataacgcgacctatcaaaagcagcacggcggcagtaatccacaagaaacgcataattttgattttagccgattatatgcgtttacgtctttgaagaaacttgcctccattttaaccattggggaaaactacttctattccgctgtatttgagtcatggcaatacacaggtctttccttagaaagtgacgaccgtatgttaccgcctaaattagtaggttatgcaccagaaattattggtgtggcaaatacaaatgctacggtcattgttcgtagccaagatcgaattattttagaaactacagtacctccgggcccattccgtattcaaacgttagacagtggtgtacgtggtgtacttgatgtgacggtgcgtgaagaaaatggcgaagagaaaaaatttagcattagtacggcctcgctaccttatttaacccgtcccggacgcattatttataaattagttgcaggtaaaacacgctatgacggccataacctgaccggtaaacctgtaattggtggtgaattgtcgtatggtttgtccaatgcatggtcactatatgggggctcacaacttaatagtgattaccaaactgcggcgattggtattggtcgagacttgtttgttttcggtgctttgtcattcgatattacacagtctttcgcccattttaccaaccaaactctgcaaggacgctcatttcgcctcaactatgcaaagtcgtttgatgcgttacgtacggatattaccttcgcgggttaccgatttgcggatagaaattaccgcaccctcactcagtttatggatcaagagcggacagggtacgtggtgcgagcaccaaaagaaaactatcaaatttatttgaataagtattttgataatttcaatttatcgctgaattatcaatacagtacttattggcaagataagccacagacacagtatggattatatgccagcaccaatatcagtgttcccatgctatcacagcaagatgccaatatttcattatcggcaatgcgtactgagcgtaataacgggtatagagatgatgcgatcaacctgtatttaacgattcctttgtataacgggcacaatattaccttttccgagctgtattcgcgcgccgggggtaatacccaatataaccatagtattgggtatagcggctatagcgaccgtgataattacagcctgaatgttggctataaccacggacaaaatatggaaagtcaatcgagtatcagtggctattattcacgtgacttatcgcaagctaacttatcggcgaacgctagttatgtgccgcaacaatatcgtagttttggggcttcaattaacagtgggatcaccgcgacggctcatggggtcgctttacaccgtagcgcgaatggcgacacacgtctaatggttgaaacaccaggggtgagagatgtacctctagatagcggtgtgatcaaaactaaccgttttgggcttgcggttattcctaacgtgaatagttatcgtaaatcgacagcatcgattaataccagccagctaccggagaatctagaaacattgcaatcaacgacggatatcaccttaaccaaaggcgcgattggttatcgcagcttatcagtgatgaaaggtgaaaagctatttgccattttatcgttgaataatggtaaaaatccgccgtttggtgccagtgtacgtaatatcgataaccgtgaattaggcattgttggagaagatggtgtgacgtggttggttggtatttctcctcaagagacactctctgtttattgggccggagaaaagcaatgtgaattacaaatgcctgacaatatcacatcattatcaagcatgttattactaccatgctctccagtcattcccgcattatcaacgggtaatgcaacgccagcaaaataa

SEQ ID NO: 306710 - DNA, 732 bp, Proteus mirabilis
atgttgaatttaggtcatgggttatatcgtgtagtagcaggggttgcagcattagtttcaatcagtgcttacagtgccgttacattagatagaactcgtattatttttcctggctctgaaaagtcaattaacgtgactatttctaatgataatccagaagaagcttacttagctcaaagttggattgaagacttacagggtaataaactgaccaaaggtgcgatcttagcaacgcctccgttgcaacgcattgagcctagcagtaccagtttagttcgtttaagtacgacgcctgaattgagcaaactgccacaagaccgagagtcagtgttttacttcaatttgcgtgaagtaccaccaaaatctaccgatggcaatacattacaaatcgcgttgcaatcacgagtaaaactgttttatcgcccacatgctattttagctgagtcggaaacaaagtgggcacataaggtcacattaaccaaaatcgcaaaaggttatcgcatcaacaataacaccccctttaatttaaccgtaattgggttaggaaatagcaaagcggcctctgaacaaaattcatttgatgtcgtcatggtaccacctaagtcaatacaagatgtagtgtcaccagcgttatccacaccgtatctcacgtacattaatgattatggcggcaagccgacgctggcgtttcgttgccaaggtgatacatgcgctgttacgggtgaacagtaa

SEQ ID NO: 306711 - DNA, 429 bp, Proteus mirabilis
atgcgcaaagacaatattttcatgaaattaacatggtacaaagccgcattactcattgcgtgcagtgtattcggtcaattggccaacgctgagctccctgtggcgaatacaccagtaaatcaatcggactatgaaccgttgcatcaaggacgaatacaagtgagtgccacactatttaatgctccatgtaatttaagtctagataaaacgttgcgtttaacagggtgtggcgcaggaaatgattaccgagaaatgaaattatttgatgccactgctaatacgccagcaagtatacgattttatgatgtgcaacgcgatgtgttttcagtgcgttatccgctttcattgcctaatggggataatccaattcgcctgccaatattgatgagtgatcggcatacattgcgtttagaggtgagctatgagtaa

SEQ ID NO: 306712 - DNA, 534 bp, Proteus mirabilis
atgagtaaggctacgatgcatttttggttatttcctgtggtacttctaagttgcccagcacagacatgggcagcgaacagcttggatgttgagtttagtggagaattggtcagtactgcatgccaagtagcagcagaatccatcaataaaaagatcacactgtacaacttacgttggcaatttattaatgaaaatacgaccagtgcagtgacgcctttttccattgccattgataaatgcagtgaaacggatttgcaaaaaagtatcaaactgacttggcaaagtcaggaattagtcaacattggtggtgatagttttttaactaccaaaggtgacagtggggtggtgctagggatcattgatcatgatgaaaaacctattgtgtggaataagccaatgacgattggtgatgttagtgtcgttgagggtttacaacaatttgattttggcgtttttgttcgcaagcctgctacaggggaagcaaaaattggcgatttttccagtatcgtaacctttaatgtggagtacgaatag

SEQ ID NO: 306713 - DNA, 534 bp, Proteus mirabilis
gtgaccatacttaaccaaatacaaaaaccgttagggttactcctcttgttcacagcattaggcagttcagccgacgtattagtggaggttaccgccagcatggtcgacccagcttgtaacattcgcagtgaaaatagcagttcaccgttgaaaattggttttggtacgctcaatccagagtctctcagtaaatcgacggcagtgaaagatttttcactctatatatcggggtgtaatttcaataatagcctcgcgatcatgttgaacccgaaagggagaagcaccttgttatacaacggaaaaaatattctcgccaccagtatcgatggcttagggattgattttaaagaagtgacgggcggaacggtgcgtgcgctggaaatgagtaaaaaacaacaaatctatcccgaacgggtgaattcgacattataccgtatggatttacaggcacagttagtcaatgcggtgccaatcaatcagttgacgctggggaaatttacttcaactgtcacccttgctgtgacttataactag

SEQ ID NO: 306714 - DNA, 1113 bp, Proteus mirabilis
atgttggacttaaaaggtactattcctacacactggttgctatcttttcaaaaaaagaaaatttggtgtggcttaatttccttgggtggcttgttacttccatcaattgcattcgcaaactatgcacctaagattgttgatccaagtgctggttataaagtaaatctgaataataatacgtcaattagtacttcaccttatattggttctgatggattaaattattatcaaataggccaaacaataaaacttcaggagatgatggtaagtggtaatgttctttgcgtaggaacaacatggggagatgtgagttcccatcaattgggacaaacagcttaccataaaatgtttatataccctagcccagccaatataactatcaataatagtgatgcttacattatcaataataatgtgttaatgacagtgtataatgatatgtctgaatggacgctattggatgaatctataggctgttctaatccaaggtcagatacttattcagttcctgtttcgggctttgtgactcctaggcgacttacactgacattttatattagagataatattattgatggaaagatcattattcctgcaatggatcttgcaggatatgttagagcttttgttaagccacttaaaacacctgattttacttcatggccaataggaactagctctgcacctgtaaggattttaccatcctcaattaatctcaacgcatcttgtagtacgatgagcagtacagggcaagccgaaacgattaatttacgccatggtaatctaaatacgttaaattacgatagcgtagttactgaaaatgtgacttataactgtaagttttcgattccaacaaaagtccgattacatctggattatgctactgacagtgatccgcaaaaacgattaccaatgacgaatagtcagaatagcaattataaaatttacagtgaattaactatgaccgatgaaataactggtcaaacggggaaagattttaaaattgatattaaagatttaagaaccattaagataacaagtcatattcaaggcagtaatgccgtagcaggtgactataaaggctccgcttggctgatagcgacatttgattaa

SEQ ID NO: 306715 - DNA, 252 bp, Proteus mirabilis
ttggtagaacgaattgaagatcgcaaaggcaaagatggtaaaacgatttctggctcaagaaagaaaaaagggcaaatggaagttcgtcgtatgcttgaagctgatgttgtccgtgttttaggtgagtttatggcgcatgaggtgacccgaaaagatgtgatagagcttgtgcgtgaaattaatggacgaggcgctaaggttcaagcactacgagaactcatcaatatttcaggtgctcgattacggatataa

SEQ ID NO: 306716 - DNA, 1878 bp, Proteus mirabilis
atgaatgtaaaagagatcattcgtcatgaaccatttggaacattactcggttatgcacctggtggtgttgcgatttactcttcagattacagcagtatagataaagaagattatgccgccaatgattcattccgtagttatattggtaatgagtatatggggcataagtggcaatgtgttgaatttgcacgccgttttctctatttacattacggggttgtttttactgatgtgggaatggcctatgagatcttctcgttacgtttcttacgaagaacgattgatgacgatattttacccttgcaagcttttgcaaatggcagcaaacagccaccgacggtaggagcgttgcttatttggcaagaagggggagagtttaaagtcaccggtcatgtggcggttattaccgaagtattagaagataaaatccgtattgcagaacaaaatgtgatccacactaggttaccgcgaggtcaacaatggacacgagagttaccacttaaagtgagtgataatggctattttatcgaagatacctttgataataccaccttgctaggttggatgatccaaacagaacctaatgcctacagtttacctcaacctaaagttgcccctgaattgttagctattcatgaggccaaattagccaacaaggggcaatttgctggaaaatggctagatgaaagcgatccgttagaaaaagcctatgtgctagcacagcacggtcatacgattaatcaagacagctatgaatatttcaccatttcagaaagtgctgagcatgaacttatacgtgctagcaatgaaatgcatttgatgtatctgcatgcaacggaaaaagtgctgaaagacgataatttactgcgtttatttgcgatccctgaagtgttatggccccgtatccgcctatcatggcaaaatagacgtcatcaaatgatcactggacggttagatttttgtatggatgagcgcggtatcaaggtgtatgaatataacgctgattctgcatcttgccatactgaagccggattaattattgaaaaatgggctaaacagggtggcattaaagcaggttataacccgggtgaacgtctattagatgcgttatcagatgcttggaaacacagtgatgcgaagccatttgtacatattcttcaagatgatgataatgaagaagattatcatgctcgctttatgcaacaagcactgactaaagccggttatagcagcaaaattctgcgtggactaaaagagctgcattggaatagtcgtggtcagttaattgatggtgataaacgtattgttgaatgtgtatggaaaacatgggcttgggaaaccgcgttagatcaactaagagaagagagtgaacaacagtcacttattcctattcgtattggtgatccggcgggagaagttcgtttagttgatgttcttttacgccctgaaatcacggtttttgaacctctttggacacttattccaagtaataaagcgatattacctattttgtggcaacttttcccagataatccttatctacttgatactgagttcactttaaccccacgtttgtcgcagagtggttatgcagttaagcctattgctgggcgctgtggtagtaatattggtttagttgatcaccaagaaaatgtattaggtgaaaccagtggtcaatttgaacatcaagaaaatatttatcaagagttatggtgtttaccaaaagtgtctaaccgatatattcaggtttgtacctttacggtagatggacattatggtggttgttgcttacgctctgatccgacattagtgataaaaaaagacagtgatattgagccattaattgtccttgaagataaacactttttagcggattaa

SEQ ID NO: 306717 - DNA, 411 bp, Proteus mirabilis; identical to SEQ ID NO: 298166

SEQ ID NO: 306718 - DNA, 126 bp, Proteus mirabilis; identical to SEQ ID NO: 302109

SEQ ID NO: 306719 - DNA, 426 bp, Proteus mirabilis
atgagtggttatgtgtatgcagggtttccaagctctgtaggagtcattattggtggttttttcctcgtgatactttttaagtggttacgatttgcattgcaagacaataaattacccactgctacaatgccagcaacaacagagcctgagcccgttttatcgtctccagcaacagaaagcccagtaaatcagttattacccaaagaatggggattatatgtcgcagccccttatgcggtaatgaatgagtgggcatataacgaatataatcaaggtaaagatgatggtgggctatcagcggcttggggagttaatgatcggtgggatttaatctaccaattattttggttgctgactcaaggtcataccaatgacttttaccagttacgtgaccagattttgaatctgtctcttatacacatctga

SEQ ID NO: 306720 - DNA, 654 bp, Proteus mirabilis; identical to SEQ ID NO: 305621

SEQ ID NO: 306721 - DNA, 273 bp, Proteus mirabilis
atgagttcaaaagaatcagctgagttcgagcgtgcttttggctttccgcctgacattgatgatgttgaggtgtggcctgacgtttgggaatcgtatcaagtattttcagccatgaagacacaatggcgcgtaggcatgagtggcatcactggcttggattacaacccgttaaaccaagtgatggacttgctcaacatcaaagatagggcgaccgtatttagcgatctgcgcattatggaagctaaggcgttagaggtaatgcataagaagtag

SEQ ID NO: 306722 - DNA, 393 bp, Proteus mirabilis
atgctagctattttcggcgttaagctaccagagattttacaaaactcagtgaatgaaatagggaaaacatctggtggtgtagcattatttttcttaggactattaatttcagggctcaaactcaaagttaatactgaaattgtttttaatgtgataataaagaatgttgtacaaggggcattaattttaggaacgggatttgcacttggattagaaactgaattattaaaagccgtctttctaattggtgtattgcctactgcaacagcggtgcctgctttagctattacaaataaggcctatgctgatatggcaacgggcactgtattattaagtacgttatgttcattactttctattattggtggtatcactattgtagaaatgatgtaa

SEQ ID NO: 306723 - DNA, 795 bp, Proteus mirabilis
atgagatatttaatcaataattgtccacttattattttagggagcgttgttttactattatcaggttgtcattcactaacttctaagatagatacaacatttttgcccccagaaaatggtagaacagttaaaatttcggttgatgtgccggatatggctgaattattgccaatgaaagtcatgtatcgttcaaatctttgccaaaaaacatatcataataatgaagtacctaaatatacagtacccggttttaatagtgagataatagcattagaaaaaagagagaatagctcattatatagtacagagatcccttataggggaggcggaaaatgtgattggcaattaagtaatgttacattaagattgacattaaaaaagaataattcttttactaaagatattgttgatatagtaggaaccggagtaattattatttttgataataatcaacctcaacaaactggtcataaaccaattaaaataaagggtagttttgatatagtagagcattatttcccgtgggtaagtgattcatttaaaaatagtaatgatattagcttatggttatatggaaaagaacttttcctttattaccaatctcgtgatgctcaacaaataacatggaagcccatcattcatagtgatattgtggtttattctgaatatccagcagaggaaaaaacagaaggtgtaagtacaatctattcttatccagatggtacaaaaagtgcaaatagggatgggaagcctgattacaaaaaactactctctttaattaagccgtcatcgtaa

SEQ ID NO: 306724 - DNA, 1704 bp, Proteus mirabilis
  misc_feature (1113)..(1122): n is a, c, g, or t
atgagtatgacaacagatgaaattaacaatttaagtgaagaagctgattcgtatatactaaatagagactatgaagccttggaaagtcttattgagaggttgatatcaaaagactttgattttgaacaccctctttatgaggctcattacctttacataatagcaaactgctattccgtactttacgaggctcggagggttgaatggtactcagacgacctaatgaaagccattatctattacagaaaatctcttcacagaataccaaaacctgactggaatgacatgcctgaaaatattcaggcatttaataaccttaagtcgatggttctaactaacttggctaaccatctttcttctcaaggaagagttttatgttgtatacctttttatgatgaagccatagctataaatagaaaaatagaagcgattgcatcaaaggctagaaatcagctatttcttggcgaatctctttatgacaacgggcacaaagagtatcactattttatagcctacaagcttaccaaagaggtcgcagataatatcgaagaattgtatcctgaacacagagtcgatttagagggggatgggtacttaattaaattcaaggagtggttcgaggagaactttgaagaatcttcattcgattacttttcagaaaagtataacagctcaaaaacgagaaaggaaaaacaatacctgcaatggtgtgcaaagaataagctatttattaacgacctaaatgatgtctgtgattttgaaatatcccatcaggatgttcttgctcttccttctttctctcaatccataaactcaacactcactatgtatgaagaactagcttatcatggcaacttcgatgaaataaaaaatgactactgctacgcacgctacttgttttttactgcccacagcatacctgacgaagaacaacacttctataactcaacatatcgacatgttgacgacatgtctcactcgataaacaaccttaaaatcagtcattacaaaacatcattccggatactttattcattattcgacaaaatagcttatttagtaagtcgcttttttgatcttaatgatataaaagatgacaacatgataagtatnnnnnnnnnngacaatctatttcgtgacttcaagtcaagtaactggagaaaaagttggagtccaaataaaaagctagagactagcgacaatcatttcattcatgctttattttacatattaaaagatattcgcgacgtaaaaggcacttcatctgtttcaaaatggatagacccagacgctaaggcattttctgaaattaggaatgctatggagcatagatcactcaaaatagtagatgatttcagttatgaactgacaacctcatataacagttatcatgatggtgaattagaaaaacttaacctagaaataaaaaaaataaaagaacaattaaagtcctccttgcacactgaaaaaccgagaacactagaatccgacctgaaaaaacttgaatcggatcgttatgaaaagaaaaaattaagctcacattctctattaatacctttaggccaatttgagacccgattaatgacgctaatgaaactggcaagaaactctattatttacctatcgctatccattcacttcgaagaaaggaaacgtcccaaaaacaatctatacttgccaaagcacgttcccttaaaagattaa

SEQ ID NO: 306725 - DNA, 585 bp, Proteus mirabilis
atgaatagcagagatttggttgattgggttgttattggggctagcgttttatcttcatttagtattttagcaactatcttcgtttatatctggcaaaagaacaataataaaaaagagaaaataaaaaacttaaagataaggctaaagcatcattctgatgttaacttgaatataatatctgatttgcttgaattatcaaaagaaataaaaagaaggaaggatgaagtaaatgttacagccactaattttgtggatttcatattagtagatttaaacaaccaatcaataaaacacataaaaggagtaaatccaaaaacatatggaatatataaaataaacacagaaaaattagaggagtcattaatattatgtagcgagcacctaccatctgatgttatagagatttttcaaaaacatattatatgttcttataatacgctatttgactcaatattgcttggtcatagattaatagataaaaaaccaattgaatcactgaatgatactctagaatcagttataagtagttgtaatcaatttactcaaagtttagaaagactagagatagaaattgactcattatag

SEQ ID NO: 306726 - DNA, 768 bp, Proteus mirabilis
atgccaacagctagagtattatcaactataccagcttacaatcgtgaatttgatgattattgtcgtaaattgaaaactctttctgagcgtgcgacagtttatcttttgcatgatcccgaaataaaaacaatttatagggagaatattagtaggacgatagcatatttacgtgaagaattttatcgaaaaatgaatagtggtgaagattattttacttatagaaatagccgccaaaatatatttaatggtcttatttatttatatcaaaatgaagagacggattatcagaaggggagaagaaaagactggtctatttatgaaagtacaaaaaaatttgaagagcagggatggattttctatacaagagaagggtttcaagtccttggtggtggtgttcaaatagcgggtggatatttgacatttaaaacaggaaaaatagtgagatcaaataaattaaaaggaataggtactttggctattgcaacaggatttagtgatatcgctgaacatagtgctatcatccaatatgagataactaaaggtgagtctggagggtataataataattatatacaaaatattatggctgatatttctgaatatgcgggatatagtaggaatagcggggcgttgacttacaagacagtagattttggtgttagtttgtttctttcatttggtgcattagttaaattaaaagatcctaaaaggttactaaatactccttttattcctataaaaaatagaaataaagctatgtatgaatga

SEQ ID NO: 306727 - DNA, 180 bp, Proteus mirabilis; identical to SEQ ID NO: 301481

SEQ ID NO: 306728 - DNA, 519 bp, Proteus mirabilis
ttgacctcattaatttcagagttagaatacagtataaaacaaggtgatcatccatttgataaagtcatttatggttatgtcagtgtatttttatccgcttattatcataaaaataaagcttattctcaggctgcacagacaataaaaaaggcctttttttatcttgatgaagttgttgaacaaaatccaactaattggcggttgatctatctaagattaagaatggatgcttttacacctcgttatttagggcgctgtgtggtggctaaaaaagacagtcagcaattacttgagaatattaatatcaatagtgaacttatacccatgattaactatatgtatgcgcgtgcattatttagttgtgagcaagtgacacaagcaaaaaagatcatggctcaattacttcaagaaaatgaagcgagtaaaaaaattgctcgatatagtttcactagtgttcctccttggttatctattgaacagaccgcggttattcaaccaataacattagagagtgattaa

SEQ ID NO: 306729 - DNA, 588 bp, Proteus mirabilis
atgagcctaaaaacaatacgtctatatggtgttcttggcgcaaaatttgggcgtgaacacaaattagatatagattcacctcgcgaagcaattaaggcactctctgtgctttatgatgggtttgagctgtttcttgctaatgcacatctgaaagggctggagtttgctgtatttaaaggtaagcgcaacattgctgaagatgaattacatcttgataccaaagaagagatccgcatagcaccaatcattaaaggaagtaaacgaggaggattctttcaaactatgttgggcattgccatgatcggtgtcgcgacatttgctccttggggtactgccttatttgcaagtgacttgattggggccataggtcttggtgtggcgcttggtggtgtttaccagatgctttcaccccaaccgcgaggtctatcaatgaggcaagattcagataacaaaccatcttatgcctttggcggagctgtaaactctactgcgcaaggaaatccagttcctttactttatggactggacaggcgagaggtaggtggggcaatcatttccgcaggtatttatacagaagatcagcaataa

SEQ ID NO: 306730 - DNA, 381 bp, Proteus mirabilis
atgaaattttcatctcttgctaagttggtctgctttgagaaatattatgatgtcaatacggggagcgctggcaaaggctcattaagaatcgcaggcaaaagtggtcatcggtatggcatgattaagactcgctctatggggtattttcataatacaaacatacgaagctacatagaccctgacacgtgggatgaagtttggacattcaaaagatatagcgagcgttatgtcttgattgatgatgtgggagggttaacatttgagtatcgatacgagttcttaggagaagaggatggctggataagtatgcctccgagtcgagaaggttctggattaatggaacaagggcttatgatagacgtttcaatgttagaagattaa

SEQ ID NO: 306731 - DNA, 189 bp, Proteus mirabilis
atgagcattaaagaatttgaattcgatgaaatggaagatgaaatcaacacattaaaatctttaggagtacccgaagaacattgttatcaagcattgactgtcttggaactcaaacgagtgagaaagagtttacgtaatttagaagataccgctgaggggcaattaacagcgattcagctactggattaa

SEQ ID NO: 306732 - DNA, 759 bp, Proteus mirabilis
atgtgggtaaagatatggggaggagtggtgctgactgcgaatactgaatcaggaacaagagtgatagcacatgaagcagaaaaaaatggaacgcgttatttttgtcccgaatgcaattcagaagtaaccctgaaaaaagggcaggtattaactcatcattttgcacacaaaccaccagtaacttgttactacggtgtgggtgagtcagaagcacacagacatgcaaaagtgtgtatttataatgcgttgctccaatgtgaggatgttgaacaggtcgaaattgaaaagtcgtttgatgatgtgcgtgcggatatatttgccgtaataaaaggtactcctgtagcgatagagatccagaagagcactcttaagccggaaacgatcatcaaacgcacagaggcttatacccgaaaaggaatatatattctttggttattactagaggatcagcgtattcatgaagctagatttatacctaaatggtgggaaaagtggatacatgccgcctattttggaaaagtgtttttctggttttcaggggaatacgttatgcccgttagttttgatacggcgtacacttatgtagaagcaacagattggggcggtgggtataataagccactaaaaaggtataaaaaacctatttgttatgaccttattagtatagtagaagattttattccatcgcgaggcaaagcttggaatggtggtgcatttaatataccagatagacttatttttattcaaaagcgaaactaa

SEQ ID NO: 306733 - DNA, 1989 bp, Proteus mirabilis
atgactaatattgagttgatccgtgaagtaaaacgtaatgcgaccaatcattgggatagtttattacctctgtgtggggttaatgtacctgaacgaggtaaacatggcgcatgccctgtatgtgggggaactgaccgctttcactttattgatgatcaccataacggcaattggttttgtcgccaatgtgatgagcctaaccacggtgacggattagatttaattgccaaagtaaaaggcatctctatctatgaggcggccaaagaagtctcacaagctttgtcattgcccttacctgaaccagccagaaaggaggctccaaaatcagagtctcaacctataacagaaaaggtacaaaagctggtggctcaaacgacagtaggcaaatcagcgtacctgactcaaaaggggcatgagtgccccgtaaaattacttgctgatggttcgatgctgttaattattcagcgtggtagtgaggtgacaggggcgcaggttatcaagcctaacggtgaaaagcgtctgatatcagggacaaagaaaaagggcagttttatgcccttatctgaattaccagaaacgactgagacagtattgattgccgaggggtacgccaccgccttaacagtgagtcaactacatagtggtttggtgttggctgcgattgatgaaggtaatttattatccgtcactgaatgggctagaaagcattatcccaaggcaaagataattatagccgcggataatgatattaagattggtcagccaaatgtgggtaaaatttcagcagaaaaagccgctaaaacggttaatggttgggtaactttaccgccgacagaagataaagccgattgggatgattaccgtcagcaatttgggattgagaaagcaaaacaggcatttagcgagggaatgtatcaaatggaaagcacagcaaaacagcataataacattgaacaaattcattcatctcgtaaaacaaaattaccgttatcagtaggttctcagggatttgatttacaatctgattatgtgattaagggcgttattccggctaattcactatgcagtatctacggagccagcggatcgtataaatcctttctggctggctcatggggctgccatatatccacaggtaaggcgtgggcgggtaaaacggtggcgcatggctcagtgatgtatgtcgtcggtgagggcggtataggtgtgccaaggcgtgtaaaggcatgggaaattactaacggacagaccgttgataatatgtatcttgtcaatacgcctgttttccctgcatccccgtcagaggtatcagaaatggttatcgcggctaaacaggtagaggctgaaacaggtaagccggttcgtctgataattatcgacacacttgcgcggtgttttggtggcgcagatgaaaacgactctaaagatatgggggcatttatccgtgggtgtgatgagcttaaagccaaaacaggggctaccgtgctagtagttcatcattcaggcaaagatgagagtaagggcgcgagaggctcaagcgcatttagggcggcactggatgcagagtataaaatcagtcgtgagggtaaaggtggtgcgctgattattgcctgtaccaaaatgaaagatgcggaagaactggaaacaaaagcctatgatctgagagtggttgagttatttaccgatgcagacggggaacatatcacgtcactgtctttagtcgataaaccgcgagatccgcagaaaagcgacgaaatagaatttatagccaacaaaacctataaccatgcggtattatggcagtctatacggtcgcgtactgccatgaatgaggcgtgcaccgtagcccttgtccgtgatgatttgaaagcaatgggggttaatgtgaagcattttagccgctggctgacgaaattggaaaaagacgggttaataagaaaagaagggcagaaattattcatcatcaaccaaagtaaagatattgagtga

SEQ ID NO: 306734 - DNA, 321 bp, Proteus mirabilis
atggctgatatctatgattttattgtgcggagggattttgattcaatgagtacagacgaattacgcctcctgaaaagtgtatcttctgatacttatcacggtctactatctagtttaaaggtaatgggggagtgtgcattctgggcatgtatcaacgaagaatattctaatgagcaggcaaaggacgatttatttcgtattagtgagtcattgatgtatttaccgcgattaattgatgccatgcgttttaatgagcaagaagcggaatttaaaatttatcaacgtgagggctttccttatacggaggtaagcaatgactaa

SEQ ID NO: 306735 - DNA, 171 bp, Proteus mirabilis
atgcgtaaccctcaacctaatgaattctacacgcacaaaaacggtgagacagtcaaagtgctgtccattcagtttaatcgtgtgatctttatccgtgatggatttgatagcccagtcattatggctattaaccaattcaccaaagaatatacctacgcagggagagcttaa

SEQ ID NO: 306736 - DNA, 198 bp, Proteus mirabilis
atggataaatcaatcgcgctgtataacgcagagtataagtcacagcaaattggtacgttatttgaggtgatttttgactacgtttgtaaacaggaagaaatagatcactatcttttagatctgataagcatcgtctgcgatatgaatcagcagattcatcaatatgcggcttctgctatgggggaaaatcatgcgtaa

SEQ ID NO: 306737 - DNA, 921 bp, Proteus mirabilis
atggctgatataaaaataccatttaaatattgtcgaattgaaagagccgcagaattattaaattgtaaaatagaagacttattaactttaggttttgataataaaataaatataaatgtaatgtttgattctgatatctcatttttatttatggaaggcaatatcgatgaggcagaacaatggaaggctaacttattaccttcaaactattgctatggaggtgcttctgcaatttctgaatattcttcctttaaatttgataacttgtcagttgatgaaaatgataatcctatttggtctccttattttcaggaatccaatggtcttgtattcagttgcgaggggagagcctatggattatggcgtttaattagaaacttagatgatttaattaattatcgggtggcttatgttggtgagtgctcttttattccttgttacccaccagaaaataatagagctatgcagctaaatagcggaggatttggtaatgagtcattggagcctgaatctagtatagatgagtatgaagtagaagagcgtagtattaggattacagataaagatttatggataacagcaccagatataagaaaattactaaactgcaatggtgattattatttaatagatgatcttgactctgtttataaaatgccacagaaagaaactaagctacaaaacattcacccaacaaaaaatagacatgcagtgaaccgagagcaaattcttattgctgcaattaaatttaaagagcaacaaccaaatgtatttagagaaaactgtataaagacagataattcgataaattacactgaatttgctaggcaacttttagcgagacctagttttttccctaacggtgattgtcctatgaaaactacagaagcaataataaaagtcctcaagaatgcgttttga

SEQ ID NO: 306738 - DNA, 1224 bp, Proteus mirabilis
atggtggctttaaacaaattaacagatagaaaactcaaagctctttacggacaggaacaggataagcctattaagttggcggacggtgcagggttgatgatccgtgttaccaaaaaaggcgctattagttggatttttaaatataggattggtggtagagagacggaggctaaagtaattactttgggtcgataccctgatatgagtttaaaagaagctagagaactccgtgataagtgtcgtaattggctggcattaggcaaagatccaaagctacaactaaacatagaggttcaatcgtcgttaaagcctgtcactgtgagagatgctttagagtattggattgaaaattacgggaaagataaccgagttaatatagttaggcatgtggctcaattagaaaagcatatttacccttatattggtgaaatggctttaaacgattgtgaaactcgttattggctaaaatgttttgatcgagcaagaaaagaatcacctgttgcgactggttatgtatttcagatgtgtaaacaggcattaaaattttgcagagttaggcgatatgctgttagtagtgctcttgatgatttaactattcctgatgttggtaagaaacagaataaaagggatcgggtacttactgataaagaactaggggaattatggcaatcactcaatgggaataaacatattccttattataagcatttaattaaaattcttattatttttgggtgtcgttcgcatgaagctagattatcagagtggaaagaatgggactttgataattggatttggactgtaccgaaagagcatacaaaaacaaatgagaaaattattcgtccaatacctatttatatacgagattttgttaaagaattatattcagtaaataaaaagacaggttatttattgggtgaattaaaaaaatctgaggcagtttctcaatacggtcgtaatttatgggaaagatttaatcattccgagccttggacattacacgatttaaggcggacatttgcaacaaagttaaatgatatgagaattctccctcatattgtagagcaattactaggtcatgctttgccaggagtaatgactatttataatcgtagtcaatatttacctgaaaaattagatacacttaacaaatggtgtgagcgattagatttattgtctggtaatcatgaaaatgtagttttaatagatagtaaaagagcttaa

SEQ ID NO: 306739 - DNA, 174 bp, Proteus mirabilis; identical to SEQ ID NO: 305610

SEQ ID NO: 306740 - DNA, 171 bp, Proteus mirabilis
atgatgaaaattaatgaatctgaacttgcacttgagtatcttcgcagaagcaaagaagaactaactcctgaagaattttttgataaatatttgtccttgatggagttatttaaaaaaaacatagaatcaagagaacctaagaagttgagtgctactgatgtattattttaa

SEQ ID NO: 306741 - DNA, 1026 bp, Proteus mirabilis
atgagcaaagatgatgaagtaaatttcaaagttgaagtttatcaaaaggatgatcaacttattgatgttagagttgatacagaaacacaagaaatttgggtaacagaaaaacaaatcgcgaaactatttgaattaacacctcaggcaatttaccaccatatttcaaatatctacaatgatggagatctagatcaaaaatcaaccaccaaaaatcttttggtagttcaaaatgagggaaatagaaaagtttccagaacaatcgcccactataatattgatgtaataaattttatagggtttcgcgtcaacggtcgtcgcgctgttgagtttagacactgggcgtctgagttaattaaatcatacctgcgtgatggctttgttatcaatgaaaaagcattgcgtgaatcaccagaaaaaacaaatgaactagccgcaaaaattcgtgccattagagctgatgagcgccatgtttatgacaagttaaaagactgttttaaagaaagcgcatctgattatgacagtagatctcaagaagttagaaatttctattcaaagatgcaagataagtttcattacgccataacaggaatggtaagcgctagattgattctagatagagcaaaccatgaagatgacaatatgggactcagtacctttgcaggagttgcaccaacacaaaaagaagtaactgttgggaaaaactatctcaaagagactgagttatatagaatgaatcttttgtcagagcaattccttttacatgcggaaactactgcgttaaaaggaaaacaaatgacaatgaaatcattgaatgaccatgtagataaattacttatattcaatgaatatcaactgcttcctgatagtcgaaatggggctgctttacgtgacgaagccaatgagcacgcgcaacgacaatataagctttttaagaaaaagagaattgtagagaaagctggccttatatacgatccagaattaatggcatatggtgaatataattacttatttgatgatgaagactaa

SEQ ID NO: 306742 - DNA, 360 bp, Proteus mirabilis
atgaaacttaaaaatattttagatgccatgcggtgcggagctaactggttatttggaatgtatcagcgtccataccttaaagagtgggacgattatctaaattacctgatcgacaaatgcggtgttgtggaagagtgtagttgcacaatcacatttaatgataacggtgaaaacgtaaaggtttggaaagaaaataaatattatgcctatggtcatcaatacaaatttcccagcgatgaggcgtatgagttcagaccgtcattcagaacgatgattaaattatcaaacctagttgatagtcgtgagaagaatcgagtgaatattttcgccaatgagttaagacagaaggtaaaaaaatga

SEQ ID NO: 306743 - DNA, 222 bp, Proteus mirabilis
atgaaaaaattaacagttttggcagctaccattatactcgctgggtgctctactacgggaaataaacaggtaggaatggcaaaccctgcctctgtgtactgcggtgaaataagcggaaagctggaaatagttaacacagataaaggtcaagtaggatactgtacattaccttctggtgaaagaattgaagagtggactttgtatcgaagagatcataagtaa

SEQ ID NO: 306744 - DNA, 927 bp, Proteus mirabilis
ttggataataataaactagcagtaatcaatccccaaggggaattagaattatttccagtgaaagaagttgagttcgatggtatccagatgggaataatgaatgatggcactccgtatttaacattgagagggctttctagattatgtggagtagatcatagagctcttggtaggttaacaaccaactggcttgaagaaagaacgaaaccgagaggaaagaaaattgactcaatccttagaggaaaagggttaacgctctccagcctatatactgttcttaataataataccggtgaagtatatgcatactccgatcgcgtatgcatggccatattggagtattacgcccttgatgcagattcatctgcatttgataattctgtagctaagaaaagatatagagacttagccgaatatagcttaagacgctttattttcctcaatcttggtattgacccagaaaacccattacgtagtgcatggaagtgctttcaagagagattgcagctaaatgcaaatataccattcgggtatttttctatttttagcgaaatggcagatctaacactgcggatgatcaatacagggttcaaccttgggccagcctcaatacctgatataagcattggaataacctggggaaaacactgggtaaaaaatgacttatgcagtaaatacggagaaaggacaaagcacccgcaccattatcctgattggttccctcaacacaaagcaggagctatagaagcgtggatatatccagatgacgcattaggtgagtttaggcgctggttacagaaaatatatttaccacaaaaattccctgcatacatagaaagcaaaataaaagatggagcaataccgaaggtgaatgcaggaaatttactgacgcaagtaaaaaaaccagagctgccaaacaaacactaa

SEQ ID NO: 306745 - DNA, 159 bp, Proteus mirabilis
atggcggtagatcattatcgtcgaagttctcaagcaagtagaaaagggcgaatgtttgacgactgcttacatattgccaaagtatgggcgaataaatttgctaaggatatgataaaaatatttatatctagcgcgttgttatttagacatattctgtaa

SEQ ID NO: 306746 - DNA, 504 bp, Proteus mirabilis; identical to SEQ ID NO: 306568

SEQ ID NO: 306747 - DNA, 411 bp, Proteus mirabilis; identical to SEQ ID NO: 277239

SEQ ID NO: 306748 - DNA, 975 bp, Proteus mirabilis; identical to SEQ ID NO: 277240

SEQ ID NO: 306749 - DNA, 294 bp, Proteus mirabilis; identical to SEQ ID NO: 277241

SEQ ID NO: 306750 - DNA, 1002 bp, Proteus mirabilis; identical to SEQ ID NO: 292787

SEQ ID NO: 306751 - DNA, 195 bp, Proteus mirabilis
atgaagcaggaacaaaaacgcgaattggaaaggttactagagccgcatcaatcaaaagtattaatgctaatcaccttgctttccacgtggctagaagctgaagagtgtaacgaaactagagacatgatctgggcggtgttgattgttgtttattcgattagggatgaaatgaacgaagcagtagagggtaagtaa

SEQ ID NO: 306752 - DNA, 1005 bp, Proteus mirabilis
atggcatggatggctaaatatggcatgactcgagcaagaccccatgaattggtgccgggcacattgcgtgtgatcagcgtcagaatgaactatttgccaacagatgccgcttttgctcgtacccttaataatccagagcaaggctatattagccgttatgcattaggtagagattatcacaaagtattaagacaacgccttaaaaaattaggtgaaaaaattacgcaatattgccaacagtttgaatatcaaggtattgttaattttcgcccttttgttgattcagcgccgataatggaacgaccattggccgtgaaagctggtcttgggtgggttggtaaacactcacttgttatcaataatcaggctggctcttggttttttctcggtgaattattaattaatttacctttgcctattgattctcccgttgaagagcaatgcggtaaatgtgtagcttgcatgaccacttgcccaacaggcgccatcgtagagccttacaccattgatgctcgtcgctgtatttcttacctaacgattgaacttgaaggcgctattcctgaagaatttcgccctttgatgggcaatcgtatctatggttgtgatgattgccaattaatttgcccatggaatcgtttttcttcgctcacagaggaagatgatttttctccgcgccgtgccttacatacaccagaattgctggatctattccaatggagtgaagaaaaatttctgcgtattacagaaggttcaccgatccgacgaattggctatttacgttggctaagaaatattagtgttgcgttaggcaatgccccttatcaggacaaaattgtactggccttgcaagagcgctttggtttaggggaggttttagatgaacatttgcactgggctatcgcccaacagaaagccaaaagagaagaaaaaacactaaaaatacagacttcacaacaaaaacgtctagtaagggcaataactaagggcctacctcgtgatgcttag

SEQ ID NO: 306753 - DNA, 192 bp, Proteus mirabilis
gtgatcgttgttgatcctgagttatcttattcttcaaatttattggttgttgcgcgtttggatgattcgaaagaagcaacctttaagcagttagtcattgacgatgaacagaaatacctaaagcctctggactcccaatattcagcaacagcgatcaacgacaacggcaccatcattggtgtggcacgataa

SEQ ID NO: 306754 - DNA, 393 bp, Proteus mirabilis
gtggatattcatgttcgctttacacaaggtcaaagcatccaaaaaattgcccgtgaactgggtatttcccgcaatactgttaaacaccatttacagcaggaaccgatgccaacgtatactcgacgcgcacccaaacagaccaaattagtgccatttgagccgtacttaatccaacacatccaactggctaaacccgactggatccctgcaactatcttgtttgatgaactttgtcaaaggggatatcaaggtgcaggattgcgcaattgcgtcgtttcgtttgtcagtttaaacccattattgcacctgagccgattgtgcgttttgaaacgcctctcggtcagcagatgcagattgatttcaccactattcgccgaagtaaacagaagctaa

SEQ ID NO: 306755 - DNA, 132 bp, Proteus mirabilis
gtgtcaaaaaacagtcgtgatttaaaaattatcgttactagtcaatatttagcaggtaatggttatgaaagtctatatttcgctttaccattatcagacaatgaacctgagtggcgagtggttgagcactag

SEQ ID NO: 306756 - DNA, 366 bp, Proteus mirabilis
atgagtgaggctgaagcaagagctgtatttgaagctcaggggttagtcttaaataacaaatcattaagaaaagcagtatgggtaaatacagggaatgcggattttaaccctagtggtgaaaaatatagagttactctagaacttggggataaatctgcagctttattaaatggtcatattgatatatctaaatcacctatagattggagagaaacggggcatcctaatggtattatatctaaaacaaatgaagtgggttctagagggatcggagttaatgtattagatgatattaataaagatataaagagaataacagtagaaacaaaagggaaaaatggaaaatggggaaagttcaagtgttag

SEQ ID NO: 306757 - DNA, 141 bp, Proteus mirabilis
atgcagcatcatgcatttttttctttaaaggtttatgaccacactctgaaaaagataattgatatttttgaatatgttgtaatcgttcgaatgaaaatccatgatttacatcttgccatacatccacaagaagttgattaa

SEQ ID NO: 306758 - DNA, 549 bp, Proteus mirabilis
atgagtcattttaacattggtgttgtagtcggaagcttaagaaaagattcctataataaacaaacagcaaaagcattaacctcgctatttcctcaagaatttacttttcagttccttgatatcggtactcttcctctctacaaccaagatgatgacgacaaaacacctgaagccgttgtcgagtttaagcaacaaattaagcaatgccaaggcattatcttcgtaacacctgaatataaccgctcaatccctggtgtgctaaaaaatgcgttagatcaagcctctcgcccttatggtactaatgcatgggatagtattcctgctgggatcatcggtgtttcaatcggtaatattagtactgctattgcacaacagcacctgcgtaattcattagcatttttaaatatgccaaccttaaatcaaccagaatgttttttaaaatggtatgatggaatggtagaaaacggtcagttttctgaaaaaacagcaggttttatgcaaaactgggttaatagctatattaactttgtaaagcataatcaaaaatag

SEQ ID NO: 306759 - DNA, 1977 bp, Proteus mirabilis
gtgaaagaggatggcttagaaattcgagagaatattgactatcgttttgtcaccagcccttatcaagcccaacgattagcccgccaatatcttcgcaaaaagaaagcaggaagacgagttcaactcacgatgaacttagacggctatgcttatcgtccgggtgaagttgtgcttttagcattaccttctttggggattagtgggctggaatttcgtattgccgaatggtctttccatgctttagacggtgtggctttaacgttggaagaggatggtgcctatttatatgaagatgtgattggcaaaccgtttgagcgtccgccatttgtgagtttacccactggcggtgttgcttcaccgattaatcttacctttgttccacttgccgtcagtgacatcgtacaaggtacactttcttggcagaatgtggcgtctgatgtgcgttataatacggttaatatccttcaaaatggtaaagtgattcaatctattcaggtaccggccgagcgtgttgatattaacggattagtacgagggacttatcgtgttgaagttagagcgacgaatatggcgggggcaatgtcggcacccgctatcagtgattttgctatccaagcaccaccgcctcctgagcatattgatgttacctctggcttatttaatctgaccgttgcaccgaaacaaggcgatagtgctgtcttgggttatacctttgaattttggtttagtgaggaaaaactcgctaatctttctgaaaatgaagtgatcaccaaaacaaataaagttggccaagggaatttctggacgcaagagaatttaaaagcaggacatacgtattatttttatgttcgaacaatcaacagctatggcaaatcgccgtttgtggaggcttctggtgtttgctcagctcaaaccgatttaattcttgaagaattagcggggcaaatcagccgagaccaactcgcacaagacttattgggtgagataaatagcaaagctgaccaatcagccgttgttgagttaaatacgcaagtgaaagcgaaccatgatgcgattttagcggagcaagttgcacgaggagcagtaattaaccaagagcaacaagctcgcgctgaagctgataaagcggaggctcaacaacgccaattcttagctacacaacttcgtggtgattatacaggcaatgatttatcgaaagtcaccgcaggacttatctccgctgagaagcaagcgcgagttacaggtgaccaagcggaaaccaaagccagacaatcactggaaacacggatgaatgggaatgtttccgcaattaataaatcactagaaacactcacctcgaaacagcaagcgcaaacgcaagagatttcaacgctcaattcaaatttgaaagggaaagctgatagcagtgcggtaaatgcgttaaatacgcgggtgtcgaatatcgatggaaaaatgacggctaccgctcagcaagtcactcgcctagaaagccaagtgggtacaagttcagccaaaatcgaacaaacgtcgaaagtggtcaccgacataaatggcaaaatttccgcatcatggacaatgaaagttcagcaagatagcaaagggaataaagtcattacgggcattggcttagggtttaatgcacaaggaaatagccaatttctggtcaatgcccaaaactttgcagtgatatcgtcattaaatggcaaagtggtgacaccgtttatcgtgaagaatggacaggtggttgttaatgaagcttttattggtgatgcaactattaccagtgcaaaaatagctaatgtattgcaatcaaccaatttcagccatgcaaacaaggtgggctatcaacttaatatgcgcactggtgaagaaattaaatatgggaataacgctcaggggtactggattgaaacaaacatattaaaacgtttgtttgataaaaaaggcacaatgcgtatcagaatggggatatggtaa

SEQ ID NO: 306760 - DNA, 294 bp, Proteus mirabilis; identical to SEQ ID NO: 297932

SEQ ID NO: 306761 - DNA, 399 bp, Proteus mirabilis
atgaaacaacccaactggacacttaaattacccgaaaccataagggcggcaatgagtcgccctttttcatggggtgaatttgattgttgtatttttgcctctgaatgtatttatgcacaatgcggtttctctccgataaagccttatctcaatcactataaaaccaaagccgaagccttcaacctgctcaaatctaaatttggctccttagagaaagccgtatcacgctatttcaaatccattgagattgagcgcgttcagcgtggcgacctcgtactgtttgaaggtgaggacggtgacagtttagcggtggtctgggcggggcattattggggcgtaacgccacaaggcgtgaagccagtgcagattaacccaatcaaagcgtggagagtggaataa

SEQ ID NO: 306762 - DNA, 399 bp, Proteus mirabilis
atgaaacaacccaactggacatttaaattacctgaaaccataagggcggccatgaatcgccctttttcatggggtgaatttgattgttgtatttttgcctcggaatgtattgacgcacaatgtggtttctcgccaataaagccttatctcaatcactataaaactaaagctgaagctttcaatcttatcaaatccaaatttggctccttagagaaagctgtatcacgctatttcaaatccattgagattgagcgcgttcagcgtggcgacctcgtactgtttaaaggtgaggacggtgactgtttagccgtggcctgggcggggcattattggggggtaaccccacaaggcgtgaagccagtgcagattaacccaatcaaagcgtggagagtggaataa

SEQ ID NO: 306763 - DNA, 1122 bp, Proteus mirabilis
atggagtttagtgagtttgataataattcatctaatgaatttgatcttatgtctactatccctgcagaaaacttaattaataatcctgatttgatgtctggaaaacttaatgaaattgcaaaaaacaatggaacaattaatgttaatgcaagaatggctataattaaagaaaacaataaagcgaatgccgcgttagttggaactgatggtgtattggtgacaaaagaagttcctgtatataaagttaattacgctgctaatagctatcatgtagatataaagaatttaggaatagaatatttacttaggcccactagttcccctagcggccttggtttacaaggaaatattattcaaaaacattcaaatgaaaataaaaaattctcatatccagaaaaaatagaattacctaataaggtagaaaacaaaaggatagaagcaccatctccacatcaatttaatgatgcaattattgtgtttcctaaaaattcaaacttacctcctttatatgtttattcaggctttcctacaattaaactgaaggataaagatcctcgtcctcagcaggaaaaagagtttaatgacatcaaagatggtgtgaaatttacaatttcattttatgagaaagtaactcaagaatttggtaaaaaggcggctcaattatctagagaattagcagaacaagcaaaaggaaaaacaatcagaagtgtagaggatgcattgcgtacatatgaaaaatatgggcagaatattaataataaaattaatgccaaagatagagctgctattataaaagcattagaatctattgatgcaaaacagttagcttcaaacttaggtaaatttagtaaagggcttggatataccaatcacgcgattaatgccgtggaattacttgttgaatttaaaaaagcggttaaaacaggaaattggcgtccattttttgttaaagccactgcaattactgctggtatggcagcagtggcattgacagcctttgcctttagtttaattgtcggtgggcctgttggaattttagggtatgccctcatcattgcaacagttagtgccttgattgacgatgctttggttgaaaaagtcagcagtgcgataggtatttaa

SEQ ID NO: 306764 - DNA, 318 bp, Proteus mirabilis
atgcttcagcaggtatactctgatattgacttttctttaggtgactttgattcgttatcatttaataaaaacactatctataataatttactttctaattcatttaacatgctacatgttggttgtgaaacttgtgcttttcagccatattgtggcgttgacccttgtcaaaatatcagtttatttggtgagccggttggaaataaaagtctttcacgattttgtctttatcataaagggatgtttaaactactagtaaaaaaaattgatgaagataatgcaggggctacattactaaaaagttggatttatgcttga

SEQ ID NO: 306765 - DNA, 132 bp, Proteus mirabilis
atgttggctgatgcagatcgccgttttaaaagttatttagtcgagtttggtttaacccccgccgctcgttcgaaggtgaagatggatggtggagaagaagaggaagatccgctcaaccaatatttcggttga

SEQ ID NO: 306766 - DNA, 873 bp, Proteus mirabilis
atgcaatttgaaacttccttaataggaaaatcgcgcgcagagcaagaaaagcttaatgcccttcgtcagattgatgtgctgtatcagcaagccagtgtggatttaggcgaaaaagagctggtgaatttacaacgcaatgttgaactcactaaacagcagattgaggaagagctgaggaagcgagaggccatgaaaggcgatccgatggcgggattaaaacaaggcttatcggatttcagtgagtcggccatggatgtgatggagaacgtcagaaacgtcaccaccaatgcccttaataatatgtctgatgcattagccgattttgctttaacgggcaaaggaagctttaaagattttgccaatgcggtgatttccgatatcactcgaatggtgatgaaaatgttggttttcaaagccattgaagcgggcgggcaggcaatgggttttgatatgggatggatgagcaaagggcatgcttacggtggctatacggggcatggcgggaaattcgagcctaaagggattgtgcacggtggtgagtttgtttttaccaaagaagcgacggctaaattgggtgtcggcaatctctatcgcttaatgtatgcggcgcaaggttatgcttcggggggctttgtgggggcggtcgcagggcgaatacccgttacaccacaaccaacgttagcccgtgcgggtggtgtacaaatgacggtcgttaatcatattacggtgacaggaaatggtgacgctgtacttgcgcaggcaatgaaagaagctgcacaacaagggacagaagctggtgcacagaaagctcacgcgatgatgttacaagactttcaaagtaatggcgcagcacgtagaacattaggagtttaa

SEQ ID NO: 306767 - DNA, 873 bp, Proteus mirabilis
atgcaatttgaaaccaccctgataggaaaatcacgcgcagagcaagaaaagcttaatgcccttcgtcagattgatgtgctgtatcagcaagccagtgtggatttaggcgagaaagagctggcgaacttacaacgcaatgtcgaactcactaaacagcagattgaggaagagctgaggaagcgagaggccatgaaaggcgatccgatggcgggattaaaacaaggcttatcggatttcagtgaatcagccatggatgtgatggagaacgtcagaaacgtcactaccaatgcccttaataatatgtctgatgcgttagccgattttgctttaacggggaaaggaagctttaaagattttgccaatgcggtgatttccgatatcactcgaatggtgatgaaaatgctggttttcaaagccattgaagcaggcgggcaggcaatgggctttgatatgggatggatgagcaaagggcatgcttacggtggttatacggggcatggcgggaaatttgagcctaaagggattgtgcatggtggtgagtttgtttttaccaaagaagcgacggctaaattgggtgtcggcaatctctatcgcttaatgtatgcggcgcaaggttatgcttcggggggctttgtgggggcggtcgcagggcgaatacccgttacaccacaaccaacgttagcccgtgcgggtggtgtacaaatgacggtcgttaatcatattacggtgacaggaaatggtgacgctgtacttgcgcaggcaatgaaagaagctgcacaacaagggacagaagctggtgcacagaaagctcacgcgatgatgttacaagactttcaaagtaatggtgcagcacgcagaacattaggagtttaa

SEQ ID NO: 306768 - DNA, 963 bp, Proteus mirabilis; identical to SEQ ID NO: 304657

SEQ ID NO: 306769 - DNA, 873 bp, Proteus mirabilis
atgcaatttgaaaccaccctgataggaaaatcacgcgcagagcaagaaaagcttaatgcccttcgtcagattgatgtgctgtatcagcaagccagtgtggatttaggcgagaaagagctggcgaacttacaacgcaatgtcgaactcactaaacagcagattgaggaagagctgaggaagcgagaggccatgaaaggcgatccgatggcgggattaaaacaaggcttatcggatttcagtgaatcagccatggatgtgatggagaacgtcagaaacgtcactaccaatgcccttaataatatgtctgatgcgttagccgattttgctttaacggggaaaggaagctttaaagattttgccaatgcggtgatttccgatatcactcgaatggtgatgaaaatgctggttttcaaagccattgaagcaggcgggcaggcaatgggctttgatatgggatggatgagcaaagggcatgcttacggtggttatacggggcatggcgggaaatttgagcctaaagggattgtgcatggtggtgagtttgtttttaccaaagaagcgacggctagattaggtgtaggtaatctctatcgcttaatgcatgcggcgcaaggttatgcttcaggtggctttgtgggggcggtcgcagggcgaataccggttacaccgcaaccgacgttagcccgtgcgagtggtgtacaaatgacggtcgttaatcatattacggtgacgggaaatggtgacgctgtacttgcgcaggcaatgaaagaagctgcacaacaagggacagaagctggtgcacagaaagctcacgcgatgatgttacaagactttcaaagtaatggcgcagcacgtagaacattaggagtttaa

SEQ ID NO: 306770 - DNA, 873 bp, Proteus mirabilis
atgcaatttgaaaccaccctgataggaaaatcacgcgcagagcaagaaaagcttaatgcccttcgtcagattgatgtgctgtatcagcaagccagtgtggatttaggcgagaaagagctggcgaacttacaacgcaatgtcgaactcactaaacagcagattgaggaagagctgaggaagcgagaggccatgaaaggcgatccgatggcgggattaaaacaaggcttatcggatttcagtgaatcagccatggatgtgatggagaacgtcagaaacgtcactaccaatgcccttaataatatgtctgatgcgttagccgattttgctttaacggggaaaggaagctttaaagattttgccaatgcggtgatttccgatatcactcgaatggtgatgaaaatgctggttttcaaagccattgaagcaggcgggcaggcaatgggctttgatatgggatggatgagcaaagggcatgcttacggtggttatacggggcatggcgggaaatttgagcctaaagggattgtgcatggtggtgagtttgtttttaccaaagaagcgacggctagattaggtgtaggtaatctctatcgcttaatgcatgcggcgcaaggttatgcttcaggtggctttgtgggggcggtcgcagggcgaataccggttacaccgcaaccgacgttagcccgtgcgagtggtgtacaaatgacggtcgttaatcatattacggtgacgggaaatggtgacgctgtacttgcgcaggcaatgaaggaagccgcacaacaagggacagaagccggcgcacagaaagctcacgcgatgatgttacaagactttcaaagtaatggtgcagcacgcagaacattaggagtttaa

SEQ ID NO: 306771 - DNA, 390 bp, Proteus mirabilis
atgttaaaattaaataaaattcatcatgtggcgattatttgttctgattataccatcagcaaacatttttattgtcaaatactggggcttaccctattaaatgaaaaataccgtgaagaaatacaatcttggaaagctgagcttgcgttaggtacagtctaccaaattgaattatttagcttccctgatgcgccagcacgtttaagttacccagaagcacgtggtctacgccatgtggcatttgcagtggacgatcttgatggttcagttgcttatttacaacaaaacaatattcaatgcgagccaatacgtatagatcctagtagccaaaaacgttttaccttttttcaagatcccgatggcttacctttagagctttattcaatatag

SEQ ID NO: 306772 - DNA, 684 bp, Proteus mirabilis
atgaataagataaaattaatcctttttttattattgtggtttccattaaaaaatagttttgcagtaaatgtaggtaatataacagagataatatcttctgatgaaagtactcttgccaaagaaattgaaaatacagtaaatacggcaagattagtcaatttgacaatagaaaaattagactcaccacttgaaaatgggaaaattattccggttactgatcccaatgaaattttatcaacaccggctaatctgattcttcccggtcatgcaagtgatgtatttaaaatcatttatcaagggcctaaggatgataaagagcgttattatcgattaaattggaaagatgatcctattgctgaaaatggtataacacaaagctcaaaatcagcgacagcaacaacatctgcaactattagtacaattttagtggttgcacccagaattgagaattttaattatcagtatcatgataataaagtttctaatatcggtaatagttcatttcgtgttgtggcttcaggcccttgtctagcagaaaaacaacaatatggtgtggaggggatgtgtcgcgagcgttattaccttatgccacatttagccgttaaattacaacttgtcgatctcacaaataaaaaatctagcgtaggcatttggcacaaaggagagttcattgttgtcaaataa

SEQ ID NO: 306773 - DNA, 624 bp, Proteus mirabilis
atgttaaataaaaaaatagcatcggtgatgctatcaacaattattgctgcttcttttgctacggctgctaatgcagatactcgtgttgcacaagcaaccgcgacttggcaagcaactgcaattaaagatacaaccagtatgttagttgtcactccattaaaaagtctgacttttaattatgctgaaggccaaaaatcatttaaccaacaaaatggtgcatttgatattgctattcaaggccaatctggcgcaaccgattttaaattatcatcaaaactaattgctaatacgttagcaagaacaactgatgattcaacattaacagttggcgttaaatggaatggggaagacctttctaaaacaactgatgtcgtgttaattgatacatcaaaagggttaacctcaggtttagataatttagctgctgatggtatttacaatggctctgagcgcgctacagatcgtggtgaattcacttttgtaattgccagtgcacaagcagcaggagcaacagccgattttaaatcactggctgatggtgtctgggatggtgatgtaaaagtgcaatttaccgccacttgggatggtgacttttctaccgttaaacctaatccagaaccttaa

SEQ ID NO: 306774 - DNA, 534 bp, Proteus mirabilis
atgaaagggcggcgcggtattcagtctcccggactggatcccctgacgacattgggtattgaggcccggtcagacgaagagcgccgccggctggctgaaaagtgggtacagcaggaatttgccagggcagaaaaagagctggcgtttcagcgggaagtagatgctgcctggaagcggctctatggtcaggtattaccggtcagtctgggaacattcggcaggatggaacagggaacagcgcagcgccggcaggcactgtttgtgcaggcggaaaattgtagcgcgtgtgatgcccgtctggctactctgctggccggcaaacagccgtttgatatttatgtgctggggacaaagggggatgataaccgcctgagggcttgggccagacaaaaaaatatcccggcagagcgcgtcagaaagcgggaaattacgttaaatcatgatggcggtctctcgcttcagtacggactgaccaccacaccggtggtgatgcaacagttaccggatgggcggtggcgtccgctcacaccttaa

SEQ ID NO: 306775 - DNA, 423 bp, Proteus mirabilis
atgggatggatgagcaaagggcatgcttacggtggttatacggggcatggcgggaaatttgagcctaaagggattgtgcatggtggtgagtttgtttttaccaaagaagcgacggctagattaggtgtaggtaatctctatcgcttaatgcatgcggcgcaaggttatgcttcaggtggctttgtgggggcggtcgcagggcgaataccggttacaccgcaaccgacgttagcccgtgcgggtggtgtacaaatgacggtcgttaatcatattacggtgacaggaaatggtgacgctgtacttgcgcaggcaatgaaagaagctgcacaacaagggacagaagctggtgcacagaaagctcacgcgatgatgttacaagactttcaaagtaatggtgcagcacgcagaacattaggagtttaa

SEQ ID NO: 306776 - DNA, 189 bp, Proteus mirabilis; identical to SEQ ID NO: 299239

SEQ ID NO: 306777 - DNA, 342 bp, Proteus mirabilis
atgatacagcaattaaaagagaccctttcaccgctggttgatggaagggttttttttcaggtattacctgaaggcaaagggcattatcccgccattgtgatccaatttgccagtatcacacctaacagtgcgctggaggatgcggatttagataactatcgcgtgcaacttgatgtgtatgcgccgcagccacaaccccttatggtcttgcgtaaaaaaattgaggctcagattgttgaagcgatcccattcgcacaacgggtgaatgcggtctttgggtatgaagcggatgtcaaattgcatcggcttgttcttgaattaatgatttcatcagataaataa

SEQ ID NO: 306778 - DNA, 153 bp, Proteus mirabilis; identical to SEQ ID NO: 301682

SEQ ID NO: 306779 - DNA, 162 bp, Proteus mirabilis
atgaatgacaaatacagagctgaactaattaacggcaaaccagttattttattaaatggaaatatgattgaaaaaggatttatttcaattatagatgcggaaaaaagagctaatagcttaaactctaaattcaaagtagcccacacatataaaactaaataa

SEQ ID NO: 306780 - DNA, 288 bp, Proteus mirabilis
atgaaagtttatctcgacgacgaacgtaaaacgccagagggctttgtgcgtgtttattggcctgatgaagcaattaaattactggaaactggcgagattgagttaatcagcctagaccatgatttaggtgatgatgaacgaggtacaggctatgacgttttattgtggatagaagaacaagtttatttaaatggatttaaagcacctgaaattattgttcattcttctaattcatcagcacgtcataaaatggaattggcaattgcaaatattagaaaggtggagtga

SEQ ID NO: 306781 - DNA, 231 bp, Proteus mirabilis
atgcagggaactaattgggttaaggcaaatgagagattgcctgttattggtgatccggtacttgcgttatgggatggaactccgttggttttatttttaaatcaggtcaatcttcatgacgatataacgatgtccattcaatgggaagctgtttatttgtctagtaaagccatcaaattctctgatgtcgaatactggatgccactcccaccaatgccagagggtgaatga

SEQ ID NO: 306782 - DNA, 189 bp, Proteus mirabilis
atgaacgaactcaagaaatgcccgttttgcggatgtgaacggatttttgttggcacgtatgattatgaagaatttgacgataaaacatactacaaggcagagtgtaattcatgtgaagcggagacgggatttaaggatagcaaacaggaagccatagcagcatggaacaggagagctaacagtgagtga

SEQ ID NO: 306783 - DNA, 1158 bp, Proteus mirabilis
atgtctttattcagaagaggtaaaatatggtacggaaactacacgacgccaagcggtaaaagaatcaaggaatctcttggcacagaggacaagaagctcgcgcaggagctgcacgacacaagaaaggtcgagttatggcgcatagaacgtcttggtgactttcctgatgttactttcgaagaggctatagttcgatggattgaagagaaagcagacaaaaaatcactggatgacgataaaggtcggctttctttttggttagatcactttgaaggttaccgacttaaggatattacagaagcaaaaatatattccgttatcaataagatggtaaacagaaaagcaagggagagatgggaaaaacaagcggaatcagctaaaagaaagggaaaggaaatccccgcatttactgatatccctgtcagtaaagcaaccaaagcaaagcatcttgccatcatgaaatctctgttaagagctgctgaacgtgactggaaatggttagaaaaatctcccgttatcaaagtcccaacaatcagagaaaagcgggttcggtggttagaacatcatgaagctaaaagactgattcaagaatgccctgaaccactgaaatccgtagttacatttgcattggccactggattaagacgatccaatattatcaatttagagtggagtcaaattgatatgcaaaggaaagttgcatggataaacccagaggatagcaaatcaggccaagcaattggtgttgctttaaatgacactgcctgtcaggttcttaaggaacaaataggaaaccatcacaagtgggtatttgttcatactgaatcaaagaagagaccagacggaacattaacaccaagcgttaggaaaatgcgagttgattctaacacagcatggagagcagcgttaaaaagagcaggaatagaaaacttccgctttcatgatctgcgccacacatgggcgagttggttaattcagtcaggagttccgctttcagtattacaagaaatgggcggatgggaatcagttgatatggttagaaggtatgctcacctagcacctaatcatttaactgaacatgcaaagcaaatagacagtatttttggctcttgcgtcccaaatacgtcccacttaagaaaagtagagaatttaaaatga

SEQ ID NO: 306784 - DNA, 546 bp, Proteus mirabilis
atgagggctgattacggaggtagccacacaccaaaggaattgcgtgatagatggcaaactcccctacctttatttacagcactggacgctgaatttggtttttatttagatgccgctgccgataaaaataatgctctctgttctcattacctaaccgaaaaagacgactcgttaaattgcgattgggaaagttacggggctatttgggtgaaccccccttacagtgaaattcaaccttggattaataaagccgccgagcaatgtaaaaagcaattacagcctatcgtgatgttaattcctgctgatacttctgtcggttggtttaattctgcattagaaacagttgatgaagtgagactaattacaggaggaagaatatcttttattaatgcaggaacaaacaaaccagttaacggtaataataaaggctcaatgcttttaatatggagaccatatatcaaaccacgaaagataattaatactgtcgatagagacgagttaattaacatcggcaataaaatattaaatgaatggaaaatagcatag

SEQ ID NO: 306785 - DNA, 219 bp, Proteus mirabilis
atgaagcaagttcaagcaatgacaacgttagtattaattgatggtattacttatcaaatagcattaccaaagcaatatgtttctcttcaggcgaagcaagcattgatgtttgctcaagagttcggcggtgtaattatcccatgtacgtttactaacataaagccaatggaagccgatggattgccttttaatataagtgatagcaaggatgagggctga

SEQ ID NO: 306786 - DNA, 366 bp, Proteus mirabilis
atgagacaaattaaaataagttctggttcgtggcaaaaagatttagaaatggttatcactgttatcgatgaagataaatttaaagctcagtgcgaacaaattaataaattctattgtgatgcagagtatagagctaaaaaatacggaagccatgaaaaggctggatttgcaatgttctgcgcggaatgtttccaacaggtggcatttaataacctcaaggatgaggaatgggttaccgaacaattcgattggtctaaagataagggaattgatggatatccttcgctagatgatatgggaattcgaatcgatgaaattgagtcatggtttattgattacgacgaaatagaaatcacaggatggtaa

SEQ ID NO: 306787 - DNA, 162 bp, Proteus mirabilis; identical to SEQ ID NO: 306779

SEQ ID NO: 306788 - DNA, 255 bp, Proteus mirabilis
atggatgaatcaagacagcagtttgaagagtggtttaatgacgaatatgaaacaataatgaaagactacgatgagccattaattgagttcgttatgaagcaactatttattgtatggcaagcatcacgcgagagcttgggggttgaattgccagagccatttattgcaaatgaaaattgcggaacttggtgttatgacgaagatttagttaatcaggcattaatcagcaacggagtgaaaataaaaaatgaatga

SEQ ID NO: 306789 - DNA, 288 bp, Proteus mirabilis; identical to SEQ ID NO: 306780

SEQ ID NO: 306790 - DNA, 321 bp, Proteus mirabilis; identical to SEQ ID NO: 300106

SEQ ID NO: 306791 - DNA, 510 bp, Proteus mirabilis
atggaaatgacaagacaagaaacaattgattcttacaaacaaaaaggctttacagtaataccccataattattcaggaattggtactgatgttctaattaaaagtaacactgttgttcgtattgggagtgactctggttattccgcatttgctaaacttgctcagaatactacttctggcctaactaatgtagttaaaatatattctcacagtgagcctttagggccggttaatgattcaagtccaaataacgaatactcaatcaccgaaatggaattattaactccaatgtcccaatccgaaagtggtgcttatgaagaatggattttacctgctttagatgaaataaggaaaggaaaaaatcctgcatctgacccttataatttatctaatgacttgaaaatattacttaattattcaaaaacacataatttcgacattgatttacttaaatcagccaatgtaatgaaacggggaaatgtgtttataatactagacccatttggttaa

SEQ ID NO: 306792 - DNA, 579 bp, Proteus mirabilis; identical to SEQ ID NO: 296690

SEQ ID NO: 306793 - DNA, 1956 bp, Proteus mirabilis
atggttaagaatgtgttgaaaatctcaacattagcaatgttggtcgcattcaatgtgaatgctgcgacagtcgatctccgtattatggagacttcggatgttcacagtaacttaatcgactttgactacttcaaagacaaaccaacagaacagtttggttatgttcgtacggcgaatttaattaaagccgcgaaagctgaagcaaccaatgcgattttagtggataacggtgacttgatccaaggtagtccactggctgactatcaagcagctaaaggcttagagaaaggggaagctcatccagcgcaccagttaatgaataccatggggtataccgtaggtaactttggtaatcatgaatttaactatggtttagattacctgaaaaaagccattgcgggcgctgaattcccatatatcaatgccaatatcatggatgcgaaaacaggcaaaaactatttcacaccttatatcattgttgatacaccagtaaaagatcgtgatggcaaagagcacactatcaagattggttatatcggctttgtaccaccacagattttaatctgggataaagccaatctggatggaaaagtcgttgtcaatgatattacagaaacagcgaaaaaattcgttcctcaaatgaaaaaagagggtgcggatctgattgtggctatccctcactctggtttctcttctgaaccttataaagctatggctgaaaactcagtctattatctgagtgaagttgatggcattaacgctattatgtttggtcatgctcacggcgtattcccaagtaaagaatttgaaggcattaaaggtgttgatgttgctaaaggcactgtaaatggtgttccagcagtaatgccaggccaatggggtgatcacttaggtgttgtcgatatggttatcaataacgacagcggcaaatgggtgatgacccaagcaacaggtgaagcgcgtcctatctttgataaagcaaacaaaaaagcattagttgaacgtgatgccgagttagcgcaaatcattgaaaaagcacaccaaggtactcgtgatttcgtcggaaaacatattggtaaagcgtcagctaatatgtatagcttcttagctttagtacaaagtgatccaacggtacaaatcgttaacgatgcacaggttgattatactaaacactttattcaaggtgatccgaacttagacggcctgccagtattaggtgcagcagcaccatttaaagccggcggacgtaaaaatgcacctgcagacttcgttgaagtagaaaagggtgacttaacattccgtaacgcagcagacttatatctgtatccaaatacattagtggttgtaaaagcaaccggtgcagatgttgttgagtggttagaatgttcagcgggtatgtggaaccaagttgatcctaactcaaccaaaccacaatacttaatcaactgggatggtttccgtacttataacttcgacactatcagtggcgtagagtataaagttgatttaactcagcctgctaaatatgacgttgattgccaagttgtcaataaagatgcaaaccgtatcaaaaatgtcacttaccaaggcaaacctatcgatcctaaagcaactttcttaattgcaaccaataactatcgtggatacggtggtaaatttgcgggtacaggtgaaagcaatatcgcctttgcatcaccagatgaaaaccgtgcaatcttagcttcttatattgctaagcaaacgaaagaaaatggcgaagttgcaacaaaagctgcgaataattggtctttcttaccgattaagacagataaacaattagatgttcgctttgaaacttcaccaagtgaaaaagctgctaactttattaaagattttgctcagtatccaatgacctttgtggaaaatgacgatatcggttttgcaatttacaaaatcgacctaactgagaagaaataa

SEQ ID NO: 306794 - DNA, 444 bp, Proteus mirabilis; identical to SEQ ID NO: 300258

SEQ ID NO: 306795 - DNA, 636 bp, Proteus mirabilis; identical to SEQ ID NO: 297270

SEQ ID NO: 306796 - DNA, 846 bp, Proteus mirabilis
atgttttatactccactacgctatcctgggggaaaaggtaagctatcttattatattaaatcattaattgatgaaaattcactcaatgatggctcttatattgaaccttatgcaggtggagctggggtcgcattagaacttttattacaagaatatgtaagatatatccacatcaatgatattgatatagctatttatagcttttggaattctattcttaataatactgaaaacttcagtaaacttgttcacgatacaaaaattgatctcgaaaattgggagaaacaaaaaaatattttactaaactcagaaaaacattccacgttagaaattggttttgctacattttttttaaatagaactaatcgttcaggaatattaaaagcgggtgttattggaggaaaagcacagttagggaaatggaaaatagatgttagatttaataaaaaagatttactaaaaagaattgaaaaaatagctaattactcatctagaatttacatttacaacttagatacattagatttattaaaatcattgcctatacagtcaccagaaaaaacattactttatcttgatcctccatattatgttaaaggtcaaggcttataccgtaatttttatgaacatgacgatcatgtggcggtcatgaatgcactgaataaaactagctttccatactggatcgtatcctacgataatcatgaagaaatcaaaaatatttataataaatttagaattaaagagtacgatttacaatacactgcgcataaaaaaagaactggaggggaaatcatgattttctcagatcaattaaaaattccaaatatctatcttggaaaataa

SEQ ID NO: 306797 - DNA, 150 bp, Proteus mirabilis
atgcaaggccaaccttttgagctatatttatgtaaattaaagttccagatagcaatgtgtttaaattttacaagcttactaaaatcaaagatataccttatagcatctgaatttttaattggaaacaccaaaaaacctcctacccattga

SEQ ID NO: 306798 - DNA, 627 bp, Proteus mirabilis
ttggaagggttactaataaatatatctcaaattatacaagaaaatgacgctgactatactaattcggcaattcaatactgccttaataactctctttcaataagctattccgatatcaaaaaacataattcattttatgaatatgttaaagatgttatttataaaaatatgtttgaagaacagaatgaaaatgaacagttcaaagaagaaaatgatcaaaagattcaaacaattctgaatgtaaatatagctgaatggttaaattgggtttcatttattaatgaagaaagagatgagaatacaaaggtaatttatcatacctaccatggaactaaaggtgctgaatacgataatgtagccattatcatggagcatagttttgggggtattaatactggccgagataagtttaaaaaatatttctctcatattcaatcttctccagaggagcaacatcagaatttgcaggatacagcatataaggagcaattagaaaacactcagaatttaatttatgtggcttgttctcgtgctaagaaaaatcttcgggttttgtatttagatgatatcagcgatattcgagctgggataagtcaattattcgatagaatagatcaatttaattag

SEQ ID NO: 306799 - DNA, 216 bp, Proteus mirabilis
atggaattcaatgatgttaaactattaaaagtgcttgaagaggaaaatgcgaaactgaaaaagctatttgtagaagtcagccttgaaaatcatgcaatgaaggagcttttctcaaaaaagttgatgatagctaagaataaaacctgtgctcagactttaaaagaagcgggtttaccagccatcattaaggtttgcgagcttacaacattaccttga

SEQ ID NO: 306800 - DNA, 687 bp, Proteus mirabilis; identical to SEQ ID NO: 298352

SEQ ID NO: 306801 - DNA, 231 bp, Proteus mirabilis
atggctgaccaaatggcagcgactattcgccataatcgggctagagggcaacatcaagtggcagcaatgtcggatatagttagagatttatcaagattaggttggaatgaccaaaagattggtgatgaattaggtatgtcacaagatgaagtactacgtttaaaacagattagtggcttagctgaattattttcagagcacgacttttcagaagcttggacggttaagtag

SEQ ID NO: 306802 - DNA, 312 bp, Proteus mirabilis
atgacgaccaaacgcacagaaaccgtgattattcgcctgacccctgacgagaaacaatcgttacttctgcggaaaaccaaaccccgtttagcggagtggttacgtgaactggcgttaggtcagaagccaaggcgtcagccgaaaagcgttgacccagcattactgtttgagcttaaccggataggtgtgaaccttaatcagatagcccgtcattgtcatcaggctccggcctcgatggagacggtcaatattgccttagcgttacggcatattgaggcacagcttcgggaggtgcttgaccgtgctgattaa

SEQ ID NO: 306803 - DNA, 576 bp, Proteus mirabilis
atgaaaaaatcattattttcactattaattctatctatgctttctttatcaacgcaagctattgcaacgaatcatgatttaggaagtaaaacaataaccttaactgccaaggtacttaaacgtattccatcttgtacaattagtgagatagaaccaattgagttaggtgatatttacgatgatatgattggaacacttcgtccaacggcgattagtataagattttctgactgttctaatctaggattagctagaactgtcaaccttgttcttaaaccacaaaaccaaccttatttagaaaataccattaaaaatggaaccaatgctgtagtaaaaataacggattttgataataatcgtgaaattgatttaagtgataagacagaaggagcaatgctatttacttcctctattaatggaaataatgacgcttattttctatttggagcaacattagtgaaaccaacaggtgttgctgaagttacagcaggtgaattcaatgccagcttaacttttgatgcttttatcgatgatatgttaccagaaagaccaaaatcaccaggaagttcagattaa

SEQ ID NO: 306804 - DNA, 531 bp, Proteus mirabilis
gtggaaattaccgttcatcattctgggcgtactggtgctgatattggcagggatcagtctgtttctcacgtactggagcgtgagcgaataccagaacctgaccgagtggaaacggtcagccgagatttaccagacgcagagccacaatatcaaactgaccaactgcaccatggacgacaagagcaaacggctgtgcgtcgccgtcgatccaaaatacaaaaccgagagttggggcgagaaaaacgaaccctacaaaattctagcgaagtgagccacgatgaccgagacagaacaactcttagagaacgccttgaacaccttgttacaacaggaaaagaccgttatcagcaatttatctcagcgtgtcagggaactcgagacacagaacagtcagttagccatgcaatacagggaaatcagtcaacagttagcgactttaaccggactgctgaacaggtatcagaacggctgacacagcagatccagcgacaggaacagaaacgaagtcgtgggttcagtatcggcttttaa

SEQ ID NO: 306805 - DNA, 240 bp, Proteus mirabilis
atgataagtaaggtaatagaaagcgatagacaaacttttaagtcgaccccttggtttgacattccgctagctagtgcttgtgtatttaaaaatttagaaagaatttggccatccttagatgaaacctacaacggtgattttaaagcaatggtcataaataaagatttgccggctccagatttattattttcaatgtcgttggatatctattcaaaattaaataagttcgattgcttataa

SEQ ID NO: 306806 - DNA, 465 bp, Proteus mirabilis
atgctatttcaagtaggagagatcgctaaaaagacgggattaacagtccgtactctccatcattatgaagagataggtttattgcaaccgactgcaagaaccgatgcaggttatcgactctatgatatgaaaagcatagagcgattaacgcaaattcaaatgctacgtcaaattggcgtcaaactgaaagacatcggtcatattcttaatggtcatagtgcagagatagcttgtttaattgaagagcgcattagccaattaaccacgcaaatgcaacaaattgccaaattgcgttatcagctagagcatgttcaacaacaaatacaaacaggcactccatttacgcaacatgactggttttctttattggagatgatgtctatgtacgataaatattttacttattctgaattagcgcagttacccctctatactgcgcacacattaaaaagccaagcatggtaa

SEQ ID NO: 306807 - DNA, 573 bp, Proteus mirabilis
atgaaatatattattgggatcgcggtattgatgctgacggcttgttcaagtgtgcctgataaagcttattatcaattacctgatgtttatcaaggtgcaaataataaggttgttacaactactgagagcgcaaagcaagatcagatttgggttcagcctatccgtttatctgatatgttagttaacacgggcattgtctatcaaaccagtgatatcaattataccgttgctaaccaacatttgtggataaacccgcttgatcaacagctacagcaaaatctggttgtgggattagcaaaagaattccctaatcgagtggtttcgacacaacctattgaagataaacttgctaaattgactgtcaatgttaattattttcaaggtcgatatgacggcaaagtgattattgctggtgattggatctacactcaaggcaataaagtgattagtcagcctttttctgtcgcgttaacacaaacgcaagatggctatccggctctggtacgtacgctaggggaaggatggcagaatgtcgtcgctgagatcgcaaaaacaattaaatcacaatattaa

SEQ ID NO: 306808 - DNA, 237 bp, Proteus mirabilis
atggttgatggtcaactgagtatggttggctcggttaaccttgatatgcgtagtttatggcttaattttgaaataactgttgtgattgatgatgaatgttttgctagtgatcttagcatcgtacaatatgattatattgcacgttcaacacaacttactcttgatgaatgggaaaaacgtccatttatgaatcgggtgttagaacgcctttgttatttctttagcccacttctctag

SEQ ID NO: 306809 - DNA, 3276 bp, Proteus mirabilis
atggctggcgcattaggtagattaaatattgatttgacgctgaatacggcaaatttcacaaatgcgatcaaccgtagccagcgccaaacagaacaatttgggcaaagtattcgcgtcagccttcaagctatcaccgtgcaacaagagcgaatggtatcgcaaaccgcaaaatcctcggcgctttttgcccgttttgcgagtgtcaccgcaagtgcattatccattcatcaagtcattaattatgctgatagttggacggaattacagaaccgcttaaaactggtgacagaaagttctgtcgagttaaataaagccacacaagcggtctatgatattgcccaaaaaacctatcaatcattggatgccacagcacaggtttatcaacgttttgcagataatgccgaacgcttaggcttaagtcagcaaaaagtggccgaactcacggaaaccgtctcaaaagccgtggcgatttcaggcgcgagtgtaaccgcagcccaagcggcattaactcaatttggtcaagcattagcctcggggcagttacgtggcgaagagctaaattcagtgatggagcaaacccctgcgttagcgaaagccatcgctgacggaatgggtgtcagtgtgggtgaactaaggaagaaagcccaagacggtgaaatgacgattgaaaaagtcattcaagccttagagcgtgcagccgacagtgtggataaaaaatttgctaccagcgtgacgacggttagccaaggtttcactaatcttcaatcggcgatgacaaaatttatcggcgaagcgaatcaaggtacaggtgtgactcagctttttaccatagggatgaccactcttgccgataatctatcgttagtcgctaaagtggttgaaggaattgctgtcacggcattggtagcaaaactctctcaatggacgaaagccacttatctgaaaaatcagacaacgttgaatgaagccaaagccacattacagagtgcagaggcaaacagtgtggcagcaaccagtgccgtgaggaaggcatgggtggataaagaagctaccacatcggcgctcaatagagccaaaatggaatatcaagttgctagaggcactaacgcggaaaaaatagcactcgataaccttatcgccacaaagtcactcgcaagaacagcctctctaaattatacacaagcattaacagccgaaaacgttgctcaacgtgcattaacgaccgctcggcgtcaatcaacggtggcagggcgagcacttaacagtgttatgggattagcgggtggccctattggattagtgttgacgggtgtggcggcattgggtatgggattgtatgaatacagcgaaaatgtcaaacaagccaagttagaatcgattgaatttgctcattcccttgatacatcaacagaagcgttaaacaaaatgagcaatgccacgttagtggcgaatttaagcaaagtttcatcgggcattaacgcgcaattggagaaaatcgaggaacttaaacaacaggtcatttccttacaaggtctatcaaaatacagcgttgagagtgaaaaggcgtttactgaacaaggtgtgggggatttataccttaaacgagtagctgaaaagcaaaaagagcttgatgctgcgatgggaatgtatgcagagcaagttaataacttagagcgtcagcgagccaatatgcaaaatatgttggcgacactcaaagaaaaagtgggtgatcaagcccctgaatataaacgctatgccactgagttacaaaatgttgatgccgttatcaattcacttaaggcgagtttaaagagtttaggcattgaatatgaatcactcattgatatcacgcttcaggcgacaaatagccaagtgaatgccgccacggcgattgctaaacagattgatgaatcgattgaaaaatcgcaacgttcagtagcaaaagcacaagccacagggaaggcattagcgaaattaaatgcagaagatgtattggcttcacgcaaaattacgccagatatgcaaggctacgataaggccttacaagctgaaattgaggcacaactggcactgcaagccaaacggacgtataaacccagccataaatccaccattgattatgccaagcaatacaccaaaatcttaacggaattggaggaaaaacaagcctcactgattgcagatggacaaagcattcagctgtacggcactacctcttcctttaatgaatacacatccgcattagccgatatcaaacagaataaagacaagtttgatgccatcttaaaaatcgatcccaacgccattgagacgatcaaagaaaaagcgaaagctattgatgatctggcgcgtgccaattcggtcgcgcaatttgcttatgatcgcggtaaagaaattgagcagatgcaatttgaaacttccttgataggaaaatcgcgcgcagagcaagaaaagctcaatgcctttcgtcagattgatgtgctgtatcagcaagccagtgtggatttaggcgagaaagagctggcgaacttacaacgcaatgtcgaactcactaaacagcagattgaggcagagctgaggaagcgagaggccatgaaaggtgatccgatggcgggattaaaacaaggcttatcagatttcagtgagtcggccatggatgtgatggagaacgtcagaaatgttaccaccaatgcgctgaataatatgtccgatgcattagccgattttgctttaacggggaaaggaagctttaaagattttgccaatgcggtgatttccgatatcactcgaatggtaatgaaaatgttggttttcaaagccattgaagcgggcgggcaggcaatgggttttgatatgggatggatgagcaaagggcatgcttacggtggttatacggggcatggcgggaaatttgagcctaaagggattgtgcatggtggtgagtttgtttttaccaaagaagcgacggctaaattgggtgtcggtaatctctatcgcttaatgcatgcggcgcaaggttatgcttcggggggctttgtgggggcggtcgcagggcgaataccggttacaccacaaccgacgttagcccgtgcaggcggtgtacaaatgacggtcgttaatcatattacggtgacgggaaatggtgacgctgtacttgcgcaggcaatgaaggaagccgcacaacaagggacagaagctggtgcacagaaagctcacgcgatgatgttacaagactttcaaagtaatggcgcagcacgtagaacattaggagtctaa

SEQ ID NO: 306810 - DNA, 459 bp, Proteus mirabilis
atggggattctttctagaataagtaacttattgttggtgattataggtttgtcgatgatatctgtttcttcttatgcagatccagataatgggcatggaagaggtcaaaataaaggatatcaagaagagaagccaaacaaatggcataataaatcacaaaataatcactttgataatgaaacctctttctcaatttctctatcttataatgaggctagagcaattgcgttgaatggtggatttactggatattcatcactccctccaggtattgctaaaaatttagtaagaggaaagccattgcctcctggtattgcgaagaaaatggttcctgaaaaaatgcttagccaattaccttactatcctggttacgaatggcgcattgttggaaatgatttggtattgatcgcattaagtacagcgatagtcacttcaattattaataatgtttttgattaa

SEQ ID NO: 306811 - DNA, 462 bp, Proteus mirabilis
atgaaatacggaaaactctatgccgtcattgcgatggtaggcattattgtgggtggctattgggtgattaattggcaagctaacaggattaattcactgatagataccaacaaaaaactaactgtggctctcgaagaacagaagtctattaatactgattatcaagcacgcataatgcgattaaaccaactggatattcaatatacgcaggagttagcgaatgctaagaatgaaattagccgcttgcgtgatattagcgagcatcatcctaagcgggtgtatatcaaagccgagtgcccaaaaagcaaaaccacttccgccaccagcttggcttctgcaaccaccgccagacctactgacaccgctatcagaaattattggttactcagagaacgaattgcagagtcagagcagatgattaaagggttgcaggattatataaggctggagtgtttgaaataa

SEQ ID NO: 306812 - DNA, 813 bp, Proteus mirabilis
gtgcaaaatggtattcacctgtcagaaaaaatattaaatgcatttcctactcgagccttaacattatctccattaaaaggggatggcggtttattccgtaccttatttttagtgattgccatgttagggatgacagtatttagtgcttatcaaattcctaatattgtttatgattatcaaattagtaaaaaccccgtgtttattgatgccgatgttgatggctcttgccgttcaaaactatttgttttaaccaattgtagtgttgacttacgctataaaggtaacgaggtttcacgaaattttacttttcttgattttggcaataaagatatattggttgagccagtagcagatgaaaacgatctgactaaaatgaccgttgatgtggcaattgataatatttggttacgcttaattagtgcattagtttttactgcattatttgctttttgcgtgatctttttcatttatcgtcaaatgatcagcaataaagtcaaaaaagcattgctttcagtaggcaccaaacctttaaaattaacggctatccctgctaaggtcgttgtgagtaataaacaatttattgctacctataaaaccaatgttgccggaaaagagacttcaattacttattcaggtaataagaaaacgccacccattacattagaaatggaaggcaaaacttatgttttggcggtgtacgagccacaacaaaatattccttatgtattagatgttcctttagctcgaattcaagcaacagaagaagaaaaacaacgttttcatgaggcattaatagaggaaggtattctctaa

SEQ ID NO: 306813 - DNA, 861 bp, Proteus mirabilis
atgagatttaacaccccgctaagatatcccggaggaaaagggaagcttactcagtattttaaagagattattgataaaaataatctcaaaggttgccactatgcagagccattcgctggtggtgcaggccttgcattgaacttattagctcatggatacgttgaacatgtatatcttaacgatatcaacccagcagtatatgcattctggcactcggtattatatagaaatgatgagctatgttcgttaatagaaaatactgatgtcactatgagtgagtggcataagcaaagagatgtaatgaacaagctagacttaagtgacttacttatcttgggcttttctgcatttttcctaaatagaactaaccgatctggaattttacttggcggtgttattggtggtaaaaagcaggaaggtgagtggaagttagatgctagatttaacaaagcaaatctaattcagagaatcaaagctattggtgataatagtaaaaaggtttcagtgtacaatttagatgctgtggattttattgatagtgtagttaaaaagcttccagaaatatctcttacttatatagatcccccatattatgtcaaaggtgaggggttatatgaaaaccactatatacatgataaccatgttgctatagctgataaaataattaatgaaataaagtcaccttgggtagtttcatacgataatgtaaaagaaatcgccactatgtatgaagggtgtaaaactctagattatgagttaagttatagtgcacatgaacggaagaaagggatggagttaatgttttttagtagagatctcgtcatacctaaaacttccgatccagctaaatataagaaatag

SEQ ID NO: 306814 - DNA, 1743 bp, Proteus mirabilis
atgaagaaaaataacaacccaacaagaattaattctattgaagttttaaaatttagaggtttagaaaatgtaacaataaactttggtaagagaataaccgctatttgtggcaaaaatggaacatctaaatcaacaattttaggtattttggctcaggtttttagtttcagagaggatgtatcagtagagccatcaataaaattaactgactataaaacattaacaggtaaaggtttcaaatcagatttttcagaccatttcaggttttctgaaaagtatgatgtaggtggaaatatgcatgttaaattgtcagtttatgatgcatatactggaatcaccccaccagatttagaattaaaaatatatgattattcagatcgaagcaaagcaaggcctgtagttagaaaaaatacaacaattgaggggaaaaatgaaagtcggaatctgacgcacccagtaatttttttaagccttcgaagattgttgcctataacattacggcctgaatataaagcggttacaaactcttttttagaagagtataacagtgacatcagatccatgtatcaatatttaacaggaaaagatggttctaattttttgactggaactgagggaactattaattctatggtgatgcactcagattgctatgatcatgagtcggtatctgttggggaagacaatatagggcaaatagttcaggcattgttttcatttagaagattaaaaacacagtacgcagattatcatggtggattacttctaattgatgaagctgatgctgggcttttccctgcggcgcaaaaaagactgattgagatattagagaaagagtgtaaaaaatacaacttgcaagtagtgtttacaacgcattctccaacattgatagaagctgtacataaactacaccgtaatgatagggagggaaattataaggtagtttatttaacagatacttacgggaaacttgaagcaaaggatgattatacgtggctagatataaattctgatttacatatcgaaactatagatattaatgataaattatcactcccaccaataaatgtttactttgaggataagcaggcgtttcaattgtattcttctttggttagaagtcggaagattagtaagatcactcagccattaaaagaaatatcaatgagttgcagtaaatatatagatttaatctattgtaaggttcctgaatttacatcaaaaagcatcatcgttttagatggtgatgtaatggaacaagatggtgataaaatgaagaaaatattaaaaaataaaaatcttgtttttcttccaacaaatcttgctccagaccaattgttatttgaatttttgtataatctaccagccgagcatgatttttggagaaaaaacccgataaaatttactaaaccagtattcagaaaaattggtaacgagataattagtcgcctaggaattagtggtgaaaatatacaactcattgagtacataaagcaggataaaaataacaaagaagatgtcaataagcttcgtttgctatttaaaaactttagcacaagtaatgagattgaaacattaatctcaggtaaaataaggtttaatccatatgcagtttgggcaaaagaaaacaagaataaaacagatatttttgtagaaaaaatgaccgaagcattgaaatccgtattgttaaatgggcatcatatagacaatgttattattgattcttattttattgaaaaataa

SEQ ID NO: 306815 - DNA, 399 bp, Proteus mirabilis
atgagagatatgcaggaagttttatcgcgttggggagcgtggtcagctaatgagggaaatagtatcgattactcatcaattgccgcaggttttaaaggattaattccaagttcaagacgaagccgagagcaatgttcagatgatgatggtttaaaaataaataaagcggtattacatttaaaggtaaataatagttacttgtttcagttggttattatgtactatgtgaagaattatcctttacgctcaatggcttcaaaacttggcatttctcataatgaagtggctaagcgattgcagacagcagaaggatttattgaggggtgtctatcggttgataacgtaaaattagatatggataaaataattagaaaacacagcatttatagtcttgtgtaa

SEQ ID NO: 306816 - DNA, 273 bp, Proteus mirabilis
  misc_feature (256)..(265): n is a, c, g, or t
atgtcattttcaacaggtataaatagcttaagcggcataaaaataaataacgtaaaattatttatttttatacttgcgctactattttcagttgactcaaagtctgaggaggagttttattataacccctatttcttatcagataacccggagtctgtcgctgatctatcttcttttgagaaaggattagaagtacctgaaggtaattatctggttgatatttacttaaatgacatattcttaaaaacccaatatnnnnnnnnnngagaataa

SEQ ID NO: 306817 - DNA, 195 bp, Proteus mirabilis; identical to SEQ ID NO: 14548

SEQ ID NO: 306818 - DNA, 1701 bp, Proteus mirabilis
atgcttattacaagagctaacgttgatcaatatcctgggcttccggccgatattattcgtgacatcaaacattatggctggacttacgataccgaaggcgatggcggttggataacagatggaggaaaagtaagtgataatggtgcggaggagcatctagtggcagtgctaagtgggataccaattaataagtctaatcatgattttaattggtcaaaaatacccactcttgctgatagtgataaagatgaatatccgtctcctaacttgggtaatggtgggacatcaccctttaatccaaatactaaatttaaagtaaataaaccgcaaaaacctgtgattatttctagcaataataataaattaaacactagttcaaataataaagaattagttacaaacaaaggtgtaatgcattttaatggtgttgttattgagcaactcgaaacatttaaaaagaaatattttcttacgaaagaggctgttaatttaattcaagataaattgatagagtctgttattagtttatacagtaaagaaaatagtattgatgataataaagtgaactcagtaaattttatggagtttagtgagtttgataataattcatctaatgaatttgatcttatgtctactatccctgcagaaaacttaattaataatcctgatttgatgtctggaaaacttaatgaaattgcaaaaaacaatggaacaattaatgttaatgcaagaatggctataattaaagaaaacaataaagcgaatgccgcgttagttggaactgatggtgtattggtgacaaaagaagttcctgtatataaagttaattacgctgctaatagctatcatgtagatataaagaatttaggaatagaatatttacttaggcccactagttcccctagcggccttggtttacaaggaaatattattcaaaaacattcaaatgaaaataaaaaattctcatatccagaaaaaatagaattacctaataaggtagaaaacaaaaggatagaagcaccatctccacatcaatttaatgatgcaattattgtgtttcctaaaaattcaaacttacctcctttatatgtttattcaggctttcctacaattaaactgaaggataaagatcctcgtcctcagcaggaaaaagagtttaatgacatcaaagatggtgtgaaatttacaatttcattttatgagaaagtaactcaagaatttggtaaaaaggcggctcaattatctagagaattagcagaacaagcaaaaggaaaaacaatcagaagtgtagaggatgcattgcgtacatatgaaaaatatgggcagaatattaataataaaattaatgccaaagatagagctgctattataaaagcattagaatctattgatgcaaaacagttagcttcaaacttaggtaaatttagtaaagggcttggatataccaatcacgcgattaatgccgtggaattacttgttgaatttaaaaaagcggttaaaacaggaaattggcgtccattttttgttaaagccactgcaattactgctggtatggcagcagtggcattgacagcctttgcctttagtttaattgtcggtgggcctgttggaattttagggtatgccctcatcattgcaacagttagtgccttgattgacgatgctttggttgaaaaagtcagcagtgcgataggtatttaa

SEQ ID NO: 306819 - DNA, 474 bp, Proteus mirabilis
atgaaatgggcatgtttagccaacgggtacaattatgatattaaaggctgccagttagctatcttagagcaagaattcaataaatatggaattagcactgattcactatctgtattagaaaccgactttatcaaagatacgctaggggtagatgatgcgctcgttaaaactatccgctacggcactatatttaatgctggctctgttagtttgtcagcgaagggaagtatggtgaaaaagctacaaaagctctattccgacgattatgtatcagaaatgctgaaacattgggaattagaaacaaaagaactttgtgacagtttaaacctacttcttgacgagtatctaaagacaggaaagaagaatggatatgggttatgtgttacaaatgctgtaggacatccatttaacacaacgtggaggaagtcacatagcggtgagtggaaaaatggactaaagatagtaaaaagatga

SEQ ID NO: 306820 - DNA, 2565 bp, Proteus mirabilis
atgactgacagccaaaatttcgaatcccacacccccatgatgcagcagtatcttaagcttaaggcagagcacccagaaatcttactgttttatcgtatgggtgacttttatgaactgttttttgatgatgctaaaaaagcctcacgcttattagatatttcattaacaaaacgaggtcagtcggcaggtcaacctattcctatggctggcgttcctcatcatgcggttgaaaactatctggctaaattagtgcaattgggagaatccgttgccatctgtgaacaaattggtgatccggccaccagcaaaggccctgttgaacgtaaagtgatccgtattgtcacaccgggcaccgttacggacgaagcgctacttgaagagcgccaagacaatctattagccgctatctggcaagataaaaatggcgcttttggttatgccactttagatatcacctctggacgttttcgggtcactgaaatgccggatagcgaaagtatggcagctgaactgcaacgcactcacccagcagaactactctacccagaaacctttgagtcaatggcattaattgagcgtcagcaaggtttacgccgacgtccaatttgggagtttgagtgtgaaaccgccaaacaacaacttaatttacagtttggaacccgtgatttaactggatttggtgttgaaaatgcccgacttgcactttgtgctgcaggttgcttattacaatatgttaaagatacgcaacgcactgcgttgcctcatattcgtagcattaccatggagcgtccgcaagataccattatcttagatgcagccactcgccgtaatttagaattaacccaaaatcttgctggcggttgtgataacaccttggcatctgtacttgatctgtgcgtgaccccaatgggaagccgtatgctcaaacgttggatacacacccctttacgccagcgtgaacaattaattaaacgccaagatgcgattagcgccttacaacccctctattttgagttacagccttttttacgtcaggtgggtgatttagagcgggtacttgctcgtttagcattgcgatccgctcgtcctcgtgacttatcacgtatgcgccatgcctttcaacaatatcaagatatccaccaagtgcttgatcaggcggatatgccctatattaaagaattacagcagcgtatcagccagtttgatgagttgcgtgaattactggaaaatgccattgttgaaacaccccccgtattagtacgggatgggggggtgatagcctctggttataatgcagaattagatgaatggcgagcactggctgacggtgcgagtgactatcttgaaaagcttgaagttcgtgaacgtgaaaaatggggtattgataccttaaaagttggctttaatggggttcatggttactacatacaagtcagtcgcggccaaagcaatttagttccaatgcactatgtgcgtcgtcaaacactgaaaaatgctgaacgctatattattcctgaactaaaagagtatgaagacaaggtattaacctctaaaggtaaagcattagcaattgaaaaaatgctctacgaagagcttttcgaaaaactattacctcatctaaccgccttacaaaccagtgctgaagcgttagctgaaaccgatgttctggctaatctcgctgagcgtgcagaatcactcaattatacacgccctgaattaacagaaaaaacaggtattcaaatcactggtggacgtcaccctgttgtagaacaagtactgagtgagccatttatctcaaatcctctacaactcgcgcctcaacgtcgtctactcattattaccggccctaatatggggggtaaaagtacctatatgcgtcaagcggcattaattacgctactggcttatattggtagttttgtgcccgcagaaaaagcggtaataggcccaattgatcgtatttttacccgcgtgggtgcctctgacgatctggcttcgggtcgttcaacatttatggtggaaatgacagaaaccgcaaatatccttcataatgccactgaaaacagtttagtgttaatggatgaaattggccgaggcacttctacttatgatgggctttctctcgcttgggcttgtgccgaaaatttagcgaatcgcattaaagcgatgacactctttgccacacactattttgaattaacgacactgccagaaaaactagaaggcactgccaatattcacttagatgcagtagagcatggagaaactattgcctttatgcacagtgttcaagaaggtgcggccagtaaaagttatggtttagcggttgcggcattagccggtgtgccaaaagaggtgatccgccgtgcaaagcagaaattaaaagagttggaaaccctatctggtcattcaggggcaagccatgtagaaacgtcacaactgatgttattagcagatattgagccttctgaagttgaattagcattaaataaaattgatccggattcattaacaccaaaacaagcgttggaattgctctatcacttaaaagagctaaataaataa

SEQ ID NO: 306821 - DNA, 990 bp, Proteus mirabilis
atgagccaaagtacgctaagagtagacgagttatatactgatgatattgatgagaacatggaagagttcgatgaagcagccgcaacaaaagaggctgaaaatgaatctgacgctcaagatgaaattgaactcattgaaggagtcaatcagcgtgcgttagatgcaactcagctctatttaggagaaattggctattctccattgttgagtgctgaagaagaagtattctttgctcgtagagcgttacgaggtgatatcccgtcaagacaacggatgatagagagtaatctacgtttagttgttaaaatatctcgccgttatacgaaccgagggttagctcttcttgacttaattgaagaaggtaatttaggccttattcgtgctgttgaaaagtttgatcctgaaaaaggatttcgtttttcaacctatgccacatggtggatacgtcaaactattgaacgtgccattatgaaccaaacccgcactattcgcctccccattcatatcgttaaagaactcaatgtctatttaagaaccgcaagagaattagcacataagctcgatcatgagccaagtgttgaagaaattgcgcaaacgctggataaaccggtcgatgatgtcagcaaaatgctacgtttaaatgaacgtatttcttctgttgatacaccgattggtggggattcagataaagccttactagatattatttcagacgaaaatgaagaagggccagaagcaaccattcaaaataataacctcaaggaaaatatcgtaaaatggttatttgaattaaatccaaaacagcgcgaagtattagcgcgtcgctttggattactgggttacgaggctgaaacattagaagatgttggtcgagaaattggtttgacaagagagcgggttcgtcagatccaagttgagggattacgtcgtttaaaagatattctgcaagggcaaggattatgcatagaggcactttttaagatgaactag

SEQ ID NO: 306822 - DNA, 252 bp, Proteus mirabilis
gtgggctcggagatgtgtataagagacagacgcttatcaatgctagtcatgatcactagactcatataccacggtgtggggtttgttatcatcacaccatgtgaggtagcactaaaatgtagacgctgttcatccttttctgtcggtacttttaatcctgcggggcgaataaaaacttttaatcgcaaacgtagtggtaaaattaattttcgtgacacatcttgtgttgcgaggttttctggtggtatctga

SEQ ID NO: 306823 - DNA, 519 bp, Proteus mirabilis
atggttgataaacgcgaatcttattctaaagaagacctcattgcttcaggccgtggtgaattatttggccaagatggcccaccactgccttcaggtaatatgctaatgatggatcgcatcattaaaatgactgaagatggcggctcccataataaaggctttatcgaagcagaattcgatatcaagccagacttatggttttttgattgccactttgtcaatgatcctgttatgccgggttgtttagggcttgatgcaatgtggcaactggtaggtttctacctaggttggttaggcggtgaaggtaaaggccgagctttgggtgtgggtgaagtgaagttcactggacaaattctaccaacagccaaaaaagtcacctataaaattgatttcaaacgtgttatcaatcgtaagcttattatgggtattgctgacggtgaagtttatgttgatggtaaactgatttatgaagccaaagatttaaaagtcggcttatttaaagatacctcagcattctaa

SEQ ID NO: 306824 - DNA, 558 bp, Proteus mirabilis
atgcaagagcaagcaaagcgtatggacttattagtacaacaactgttacagctttcacgtattgaatctgcgcctcatattgatttgaacacggttgtcgatatgcctgcgctattaagcgtgcttgagcatgacgcgcactcattaagccaagaacaacaaaatatcatctttgatattgaccataaatgggctgttcgtggtaatgaagagcaattgcgtagtgccgtatctaaccttgtctataacgccataaatcatacctctgagggtacgactattcgcgtgagttggaaaaaagtaccacaaggtatgttgtttagtgtgtcagataatgggccgggtatcagtgctgaacatttaacgcgcttaactgaacgtttttatcgtgtagataaagcgcgctctcgccacaccggtggtacagggcttggattggcgattgtcaaaaagtccttacaacatcatcactcaatactgaatattgaaagtaaagtcggtgtaggaagcactttttcttttatcatgccgcaaacattgttaacagaaaaaaaataa

SEQ ID NO: 306825 - DNA, 1287 bp, Proteus mirabilis; identical to SEQ ID NO: 297424

SEQ ID NO: 306826 - DNA, 294 bp, Proteus mirabilis; identical to SEQ ID NO: 295186

SEQ ID NO: 306827 - DNA, 2280 bp, Proteus mirabilis
atgagtattagtcgtcgttcttttattaaggggatgggtataggatgtgttggttgtacggtgggaagtttaccaccaggggccctcgcacttaatccagtaacatctcttaagggtcagtctaaattaacaccaagtttgtgtgagatgtgttcttaccgttgtcctatagaagctcaggttgttaataacaaaactgtctttatccaaggtaaccgaaattcaccacatcaaaaaactcgagtctgtgcgagaggaggcagtggtgttagccttatttatgatccgaaacgcattgtaaagcccatgaaacgcaaaggccctagaggtgccggagaatgggaagttattagctgggaacaagcttatacagaaattgccgaaaagatggcaagcatcaaacaacattatggtgctgaaagtatctttttctcatcaaaatcaggttctctttcctctcatttatttcatttagcggcggcatttgggtcaccaaacacctttacgcatgcatcaacttgtcctgcgggcaaagccattgctgcatcggtaatgatgggtggtgatttaaaaatggatctcgcaaattctaaatatattctttcttttggtcataatctttatgaaggaattgaagttgcagaaacctatgaattaatgacggcacaagagcgtggtgcaaaattagtcagttttgatcctcgattatccgttgtttccagtaaagcaaatgagtggtttgctatccgaccaggtggcgacttacctgttctaatggccatgtgtcatattatggtaaaagaaaatctttatgataaagattttatagaaaaatttactgtcggtttccctcaattggtggaagtattacaagataccacgcctgaatgggcacaagctcactctgatgttcccgcaaaagatattattcgcataacacgtgaaattgcagctaaagctcctcacgcattagttatgccaggccatcgcgcaacctttaataaagatgaaattaatatgcgcagaatgatcttcaccttcaacgccctactgggaaatattgaacgtgaaggtggcatgtatcaaaagaaagctgctgcaaaatataataaattagcgggcatcgacgttgcccctgaattagctaaaccaaccgttaaaggcatgcctaaaattacggcaaaacgagtcgatgctacagcgcctcaatttaaatatatcaataaaggcggcggtattgttcaatctatcattgactctacactccatggtgtaccttaccaaaccaaagcttggattatgtcacgccataatccatttcaaacagtaagttgccgacctgatctagaaaaaacagcccaaaaactcgacttaattgtcagttgtgatgtgtatttaagtgaaagtgcatcttatgcagattatctgttaccagaaagcacttatttagaaagagatgaagagatttctgatgtctctggtttaaatcctgcttatgcattaagacaacaagttgtcgaacctattggtgataccaaaccaagttggttaatttggatggaattaggaaaaaaactgggattagcgagttattttccttgggaaaacatgggagttcgtcaactttaccaagttaaaggggatgaaaatctctataaagagatccaccaaaaaggctatttatcttatggtattccgctacttttacgtgaaccatcctatgtaaaagcctttgttgcacaatacccagatgctatcaaacatgttgatagtaacaatatgatggaaaaatctctttcttttaaatcaccaagtggtcttattgagatctattcgcaagagttagaaagtctattagagaattatggtattcctcgtttccataacttcccattaaaacaaaaagatgaactctattttatccaaggaaaagtcgcagtacataccaatggtgcgactcaatatgtacctttattagcagagctaatgtggaaaaatcctgtctggttacatcctgataccgcaaaaagtcatggaattaagcatggtgatgagatcattttagaaaatagcgtaggcaaagagaaagcccatgccttaattaccacaggtattcgtcctgacacagtgtttgtctatatggggtcaggttctaagactggcgaaaaaacgccagcaaccacaaatgggatccactgcagtagtttattacctcatgaaattagccctgtttcaggcactgatgtacatacttcaggcgtcaaaattagtctggcttaa

SEQ ID NO: 306828 - DNA, 384 bp, Proteus mirabilis
atgaatagcaactctaaacaatttgtcatgctacacgatgaaaaacgttgcattggctgccaagcttgtaccgtagcatgtaaagtcatcaatgatattcctgaaggatacagccgactacaagtacaaattcaaggccctcataatgatgaggcaggagatccacattaccaatttttccgagtttcctgtcaacattgtgaagatgcgccttgcgtttctgtctgccctacaggtgcttcatttattgatgaaaatggcattgtacaggtgcttcatttattgatgaaaatggcattgtacaggttaaaaaagagctctgtattggctgtgattactgtgttggtgcttgtccttatcacgttcgatatatcaatccattaa

SEQ ID NO: 306829 - DNA, 768 bp, Proteus mirabilis; identical to SEQ ID NO: 301090

SEQ ID NO: 306830 - DNA, 1644 bp, Proteus mirabilis
gtggcaatccattcaagagctgggcaacatactcgtcaaagcgatctgattaatgtagcgcaattaaccgcacaatattattcactaaaaccacaagcaaatcagaatgctcatcgtgtgaaatttggtacatcgggtcaccgaggcagtgccaaacgtcatagctttaatgaagcacatattctagcaattgctcaagctattgctgaagtccgagctaataatggtgtaacggggccttgctatgtaggtaaagatacccatgcattatctgagcctgcttttatttcggttttagaagtgcttgctgcaaataaagttaacgtgattattcaagagaataatggttataccccaacgcctagcgtttccttctctattttaacttacaatcaagggcaccaagacattgctgatggtatcgtcattacaccatcacataatcctccagaagatggggggataaaatacaatccatcaaatggtgggcctgctgatactgatttaacctctgtgattgaaaaacgcgccaatgaattattggaaaataatttatcgggggttaaacgtctttcttatgatgatgcattagcgagtggttatattcacgagcaagatttaattatgccttatgttaaagcgttaggtgacgttgttgatatgaaggcaattaaaaaagcgggtttgaaattaggtgtcgatccactgggtggttcaggaattgaatactggaaacgcataggtgaatattacgaacttgatcttgagttggtaaacgatcaggtggatcaaactttccgctttatgacattagatcatgatggtgtgatccgtatggattgctcatcaccttgggcaatggaaggtttattgcaactgcgtgataaatttgacttagctttcgccaatgaccctgattacgatcgccatggtattgtcactccttcgggcttgatgaatcctaaccactatttagcggcagcgattaattatctttttcgccatcgtcctcagtggtcaaatgaggtaaaagtgggtaaaacactcgtctctagcgcgatgattgaccgagtcgtggctgatttaggccgtgaacttgttgaagtacctgtcggctttaaatggtttgtgcaaggtctattcagtggcgagtttgggtttggtggtgaagagagtgcgggggcatcattcttacgttttaatggtaaaccgtggtcaacagataaagatggtattatcttatgtttactggctgctgaaataaaagcggtaacaggtaaagacccacaacaacattataatgagttagcgcaacgttttggctctccaagctataatcgtatacaagcatctgcaactcatgagcaaaaagcgttattgtcacgattatcaccagaaatggtcaccgcaaataccttagcaggtgatcctattactgcgcgtttaactcacgcatctggtaatggtgctgctattggtggtttaaaagtaatgaccgattatggttggtttgccgctcgtccttctggaactgaagaagcgtacaaaatttattgtgaaagcttccgtggctctgagcatcgcgaattaattgaaaaagaagccattgaaattgttaataatgtttttgccagtaaacaataa

SEQ ID NO: 306831 - DNA, 2082 bp, Proteus mirabilis
atgattgacttcgtttttggtaagaagaataacccagtagctatagatgatcttgttgattgtctatctagacttgatgcggttgggacgctttatataggttatccaatgttcgattctggggaggacgctatattaacagatgcaatgctaattactcaagaacatggtgtggtaatatttgatttaacaacgcttagtgagcaaaatttagataatatttttacatatcaagatgagttgtatagaggtgtttttcaaaagtttttatcccaaaaagaattactaaaaagaagagaacttgcatttgaaataaacgttatttctattcggaatgataaattagaagatagttcattctcaaaaatggaagaattattagataagataagatcttttgatgcactaagtgaaccgttatttaagcagattaatgcaacaatacagaaaacagatgtattaaaaccattgaaaaaaagaagtaatgtcactcgtgaagattcatatggcggagtgatgaagagtattgaaaaagaaattgctaatttagattcttggcaaaaaaaagcagctatagaaagtccagataaaccccaaagaataagaggattagccggttctggaaaaacaattattttagcaatgaaagcagcttatttacatgcttatgaaaaagaaaaaagaattgtagttacatttcaaagtagaactttatatcaacaatttaaaaaattaattgaaagattttattttgatcataaaaaggatgaacctgattacgaattcttaactatacaacattcatggggaggagcagaacagggggtatattctgaaatttgtaattatttaaaatacgaacctatgaactggtattcggctgaatccaaatacggtcgagatgatgcttttaaaggtatatgtaaggagttacttgattttataggtgatcaggaatttgaacctatatatgattatgtgcttatagatgaagctcaggattttccagaagaattctttaaattagtttataaattcactaaggaacctaaaaagatagtttgggcttatgatgaattgcagaatttaggtgagcataagatgcttcctcctgaaaaactatttggttcaaagggctcaatacctttagttacattacaaaactcaaaagataaaccacaacaagatgtgatgttacctatttgttatagaaatcccccttggacactaacgttagcattagcatttggattaggaatatatcgtgaagaaggattggttcgtatgttcaaagagccattattctgggataacattggatttgaaacggtaggggggcgcttgatatatggctcaggggtaactcttcaacgagcgaaggatcgaacccctgattttttctatgatttgattaatcctgaagatgccattgttgttaattcattcccaactaacgaggagcaagcacagtgggttgctcagcaaataaaggacaatattgaaaaacaagagcttgagccgagtgatataatggttatttatccagttccttatactatggctaagcaatctgcttatttaacttatgaattgagaaaattggatataaaatgtcatatagttggcaaagatactagcagagatataatttccaaagaaaaatctgtttcaattacacatattcatcgcgcaaaaggtaatgaagctgcaatggtttatgttatgaattctcaattttatcaaggtggatatgaacttgggagaaaaagaaactctttatttactgcaataacaagaactaaagcatggttgcgtatttgtggggtgggaaatggtatggatgtgttaatgaaggaatatgatcaggttataaaccaaaactaccgtttatcatttaaatatccaaaagctgatgaaattgatgcaatggagaatacttatggtgataaaagcgaagagcaacgtgatgagcttgctacaagttttgaggaaataaaaaagattaaaataatgttagaaaaaggcgaacttacattggaggatgttccagaagatcttagaagtatatttggaggagaatga

SEQ ID NO: 306832 - DNA, 690 bp, Proteus mirabilis
atggcaataacacctaggtcaatggttgattctttaaataagttttgtcttgtctgggataaagctggtttaacattagcttcaaaccgttctaatatctataaacttggcaacaatttatcgcgtgttagttgggatagcaatcaacaaatagttttaaaagataatgaattctcctcgctttctgaatatttaacattgttatccagttctcaatatacattggttttaaccgatggttcgcttattcaaatatcatatacctttcgaaggaatgaaattgtaggtcataggctatgttggtatccatctccgatagatatttcaggagtaactgaagtagatgagattatagataagacacaactgatattaaaagaaggaggggacgcattagaggaacatattacaagccctgatgaacccaaatatcctgtgaatgttaaaggattatataataaaagccctttaagattcgattttagtattatgtctgatggcgaaaaagatgcgcatcctgatgtacatttacatattagtgtcgaaaattgtcggattccagtcaaaacgccattatgtataagaatgttcatgaaatttattcttgaaaatttttattcggaacttcctacaactggagcccttattaataatattcctagttgggaaaataatgatatatatcattaa

SEQ ID NO: 306833 - DNA, 243 bp, Proteus mirabilis; identical to SEQ ID NO: 297991

SEQ ID NO: 306834 - DNA, 306 bp, Proteus mirabilis; identical to SEQ ID NO: 305268

SEQ ID NO: 306835 - DNA, 1071 bp, Proteus mirabilis
  misc_feature (982)..(991): n is a, c, g, or t
atgcttaaaatagaagatatctttggagttagtggaaagcaagttggaagctacattgagcgtgaccatgttgatgcaaagctaatagatgcattaagaacagagaagcaaattatagtttatggagcatctaaacaaggtaagacagccttggttaaaaaatatattacttatgacgatcatattttgattagcttatcccctacacacactttaaaagatatatatcaatcaatacttcgaaaatgtaacgttgtactcaaaacttcttatacagaaggtactggagaaaaatataaagcaactggtaaagcatcaattcaaggagctgtagcactaattgctaaagtaaatgcatctttcacaatacaagatgaaaaaaatacaagcaatacagaacactacgatgaaattgaattcaatttagatctgcctgatgatgttgcgtatttgattcatcatgttggtagtaagaaaatcataatacttgaaaattttcactatcttcctgaggaaatacaaagagcatttgcttttgatctccgtacatttcatgatttgaaagtacggtttattatattgggagtatggaaagaagctaatcgacttacccaattcaacggagaactacaagatagaattagtgaaatacctgttgaaccttggctagaggccgattttaggagtatagcaaaaaaaggtggggatcttttaaatatagacattacacctgcgattattgaaaaatgtatctccaactcattcggaagtgtaggtgtttttcaagaattattaaagggatcatgtattgcggatggtattctcacaaaacaagaaacaacaaaacacttcattaatatagatgcagttaatactgcaatagcgatgaaaacaaatgaatattctggacgtcatttacgaaacttagaaactatggctgttgcaaatagtgcatctataactaaaggcaatcctttaccannnnnnnnnncctttaccatatttcctaaattattatattgtaatgcacattctttccctaggatatcatggggtaaatggtggaattag

SEQ ID NO: 306836 - DNA, 909 bp, Proteus mirabilis
atgcaaaatgtgttgttaacgttatggcctttatttgcgttaattgcgctaggcgctattttaagaagaaataaagcatttgaacctgcattttgggtaggggctgaaaaattaaattattttttactctttcctgcattacttctcaatagcttggctaatgctcctttatctgatcctcaattacctcaccttgctggggctattttctcagtagtcatcattaccactattttgtgtgttatttttaaaaaaataaccggctggtctgctggccgttttggtgcgatcgttcaaggcaatattcggtttaacacttatttaggtttagctattgtcgctgatttatttggcgttgaaggtttaggaatagctgctttgatattagcaaccttggttcctctatcaaatgtgacttcagtgctttgtttaaccgcagggcaaaatgtaacttttcgtcaattaatcttcccaattattaaaaatccattaattatctcttgcgtaatagggattgttatcaatttatcaggaatagggcttccttttggtagcgatcaatttctaaaattgttagctgcgactagtttacctttagggcttatctgtattggtgcggcattacatttatcaacactaaaagcagaaagtaaaatgattagtattaacacagtgactcggttgcttattgtaccgataattgcatatagtgttgctaattttttaggtttgtctccattagttatgatgcttttagtcattttcttttctatccctacagccccaacttcttatattttaactcgacagctaggaggggattctgagctaatggcggggatcattacttcacaaaccatgcttgcagcaattaccttaccgatcgtattaagttttttaattccataa

SEQ ID NO: 306837 - DNA, 507 bp, Proteus mirabilis
  misc_feature (453)..(462): n is a, c, g, or t
ttggcacctgacttaggtaatacttttgctattgtaaatacgaatggcattgccggaattaaaactaatcgttcttcacaagccattacagacaataacggtaatttaatattaccgcacatcatgccatatcgtaaaaatactattggactaaacataaattcgttacctgagtttagtaatactaaaactcaaagtaaaatcatcgtacctactttaggagcggtagcaaaaatcaatttccctataaataggggctataatgttttatttacctcaaatacaccaattccttttgctgccaatgtaatggcatttgatgataataataatctcatttctagtgattctgtctatgaccacaatagaatattcctctccggaataaaagaaagcggaacggtacaagtaaaatggggagatacagaggagcaacaatgtttcttccattannnnnnnnnnataattcaattattaagaaacaaatttattgccaataatgaataa

SEQ ID NO: 306838 - DNA, 510 bp, Proteus mirabilis
gtgggctatagtcatggagaagaaattgatagccaatcaagtatcagtggttattattctcgcgacttttctcaagctaacttatctgctaacgcaagttatgtaccacaacaatatcgtagtgttggtgcatcaattaacagtggtattacagctacaactcaaggtattgcgttgcatcgttcagctaatggtgatactcgtttaatgattgaaacaccaggggttggtgatgtacctctagatagtggcgttatcaaaactaattactttggacttgcagttattcctaatgttaatagttatcgtaaatctacggtttctattaataccagtcagctacctgaaaatatagaaacgctagaatcaacaactgatattaccttgactaaaggggcgatagggtatcgcagtttatcagtaatgaaaggggaaaagttgtttgccattatatccctaaatgatggtaagaaaccgccttttggggcaagtgtacataacttgcgttag

SEQ ID NO: 306839 - DNA, 249 bp, Proteus mirabilis
atgaatgaaaataaagcatatagccaatttacctcagcagacaaagatctcgcgtcaaaaataacccataaatgtacttacaattcagatgctgtatttgaacaatgtttaccaaaaatactgacttgggaagcaaaaatttatcaatcatataatgcacatcgtaaaatttctgatagtgaagcgataaaatatacagaagaagaattacgcgataagcataattactggatcaacaaaaaacgctaa

SEQ ID NO: 306840 - DNA, 408 bp, Proteus mirabilis
atgttaaccgaagggtttcgtgctttatggttgagttttcctgtggatcttattaataatgctacaacggaagatattgagcgttgggcaacaatagtagctatattagtttatattacgcaggatagtgaaaaacactttgctactattgcaggtgaaaaagatgagagtaaaaaatcttgtatcagtgaatcccgttttttacaactacaatcttcgcgtacttatgatgagtttattcggcgtttaaggagaattttaattcagattaaagggaaatcatctgtcttatcaatgtgtaaagatattgaaaagtgggttttagaaaaacagcgctttagttctatacaaacaaataaacaaattattattgagtgggcaatgaaatattatcaggctgccatttaa

SEQ ID NO: 306841 - DNA, 291 bp, Proteus mirabilis
atgcgccgtcagcttgagtacaagcagctctggcgaggtggtcaggtactggcaatacccccagcctacaccagtcagaagtgcgcttgttgtggtcatacagcaaaggaaaaccgacagtcacaaagtcaattcgagtgccttgaatgtggatatacagcgaatgctgatatcaacggggcacgtaacattttagcggcaggacatgccgtgcttgcctgtggagggagggggcagtcagaccgcccgtcgaagcaggaacccgccgaggtgattcagacatcagtctga

SEQ ID NO: 306842 - DNA, 291 bp, Proteus mirabilis
atgcgccgtcagcttgagtacaagcagctctggcgaggtggtcaggtactggcaataccacctgcctacaccagtcagaagtgcgcttgctgtggtcatacagcaaagggaaaccgcccgtcacaaagtcaattcgaatgccttgaatgtggatatacagcgaatgctgatatcaacggggcacgtaacattttagcggcaggacatgccgtgcttgcctgtggagggagggtgcagtcagaccgcccgtcgaagcaggaacccgccgagttgattcagacatcagtctga

SEQ ID NO: 306843 - DNA, 270 bp, Proteus mirabilis; identical to SEQ ID NO: 294436

SEQ ID NO: 306844 - DNA, 132 bp, Proteus mirabilis
atgttaagttttactcctattctaatcgctttattatcatctttttctccaaatatagaaggtagtgttgaacttattagtgcagataaaatgaatgcccatgagcttgataatgttactgcaactgaataa

SEQ ID NO: 306845 - DNA, 3822 bp, Proteus mirabilis
atgatgaagtggttgaaaaggataacactaacgctacttatcatcattttactggttttaggtgctcttgcatggattttagggacgcaatcagggctacattttgccattaatagtgcagctcgttgggtgccaggtttaaccattaatagtgttaatggcggttggcaagatttacgtttaacgggtgttgagtatcaaatgccgggtgtagacgtcaatgtgggggagttatcactaggcttaaatttaagctgcttgaaggacaaacaactgtgtgttgaggccttaggcacacgtgatgttatcgtcaatgtagataccagtgcactccctccagcacaagaaacacccccttctgagcctttaactgagcttaatgtccctttacctatctatttaaactctctctcattagccaatacgcgtgtacaaattgatgatatggccctatcactcaatgagtttactacggcagcacaatgggaagggcgtcaagttaccttaaaaccgacagtcattaatgatttgttggtggcgttaccgaaaacacccgaagacggtagtgttgccgccatggcgcaagatgtaaaagaagttgcagcaacgacgcctcaagcggagcctaaaacaccgcaagagcaagagcaggcactagctgacactattaagacaattttcgccaagcctttattagcgcagttacccgaaattattattcctgttgatatcaatgtggaggggatagaaggtaaacagttacaagttagtggtgatacgcctgtgactattaatcaactctcttttcaagccaatacgcaaggtcaacaggttaatctcactaggctcagtattgatgcgccagaaggcgaagtcagtttaaatggtcaaattacactggataaacagtggccggttaatctagatatgcaagcgatgcttcgtgagatggcaggattggaagagtttaaagatcagcaagcgacactgtccttacaaggtgcgatacttgatgaattaaaactcgcactctctttaacaggaactgttaccgcaagccttgatgcacaagctgagctcgctaaagcacatcttccactaaaattaaccttagagagccaaaaagtgcgctggcctttaacgggagatgtgcagtatcaacttaatgatactcgactacgtcttaatgggcagacggataattatgatctttcattacgttctaatattgaaggacaagagatcccgccagccaaattgaccctagacgctaaagggaatgaagagaaaatagcactcactcgtttgcgtttagctgcattacaaggtcatgcggatattactggtgtggcagattggagtaaggcgattagctggaatgcattattgactatctctggtattaatacagctaaacaatatcccgatatgccagcgaaattagatggacgtattgctacaacgggtagcctgtatggaggcagttggcaactgcgagtgcctgaaattaccttagatggtaatttaaaaaataatcttattaaggcgcgaggaaacgcctatggtaatgattcggggcaatggaatattcctcaattaaccttaattctaggtaaaaataatctcgatattgcggggcacttaggtgagcagtgggcgcttgatgcgaacatcaatgctccggggttaaatggtttagtgccggggttagcgggcgttattaaagggaaagtgaatgttcgcggtgatattaataagccgaaaattattgctgatatcaatgcacaagggatcaaatggcaagatcagctcagtgttgggtcagttgtggttaaaggtgacattcagtcagatgacgtgatcagtggcaaactggcaattacggcacgtcagttaaaacaggctgatttgattattcgtcaattaacgctagatgcggccgggacagaaaaacagcataagcttaccttgaaaatggatggggaacccgtatcgggtggcctgacattagccggctcgtttgataaagaaaaacagcagtggcaaggcacacttaacaataccgcatttgatacgcctgtaggcgaatggcgtttaaataaagcgatggcgctaaatttattagcggaaaaacagcaagtgacgattggttcacattgctgggtaaatcctaatgcacaactgtgtgtacctaaagagatcactgtaggtgagagtggtagtgcggcaatcacgttaacacgttttgatttagccatgataaaaccattcttacctcctgaaactgcgctacgcggtgtctttacgggagatgctacggcaacttggaatgcgaaaggcggattacctaaagcgtcagttaaccttaaaggtcagggcgttggtgtaaaacaaaatgtcgatggtacggtattacctattgattttgatgcagttacgttaaatgcgggcatcaataatggtaaagcgaccttgcaatggttgattagtattgccggtaatggtgactttaaaggccatatcaatgttgctgatctagaaaaaacacgtcaattatcaggtacggttgatattgataacctgacattagatctgattaagcctttcttgggtaaaggtgaaatagcacaaggtagtgtaggggcacagctacgtttaggggggaatgcacaatcaccattgctatttgggcagtttggtattaaccagttaaaagtagttggtcactggatcccatttgacatcaccaaagggaatgtcgatattcgctttaatggtgcgacttctgatttaagcggtagaatcgaaacaccggaaggttatttaaatctgacggggaatgcggactggcgcaaactagatgagtggcgtgccgtggtggctgcgaatggcaacaaactgcgtgtgtcattaccaccaatggttcgtattgatgttaacccagacttagtttttgaagctaatccacatttgcttaaattagatggacgtattgatatcccttgggctcgtatcgtggtgcaggaattacccgagtctgcggtgtcggcctcttctgatgaagtgatgttggataaagaattacaacctatagcaccaaagcagacttctatacctattcaaagtaatttggcgattaatattggcgatgatgtcacattagatgcctttggattgaaagccagattaacaggggcattaaaagttgctcaaagtaagcaagggttgggattaaatggtcaagtggatattcctcgcggggaattcaaagcttatggacaagatttacaagtacgtaaagggcaaatcttgttctcagggccggttgatcagccatacttaaatattgaagcgatacgtaaccctgataatacggcagataatgtcattgctggggttaaagttaccgggcttgcggataagccgaaagtggaaatattctctgagccggccaaaacacaacaagaagcattatcctacttgttaagaggtgaaggattagcaagtggtgattctgattcagcacaaatgacagccatgctaataggattaggtgttggacaaagtggacaactcgtaggacgtattggcgaaacctttggtatttctgatttagcgttagatacacaaggtgtaggggatagttcacaagttgtcgtcagtggtaagataactgatgatttacaagtgaagtatgggatgggtatatttgattcgctagcgacgttaacattacgttatcgcttgatgcccaggttgtatttacaagcagtgtctggtatgaatcaggcaatagatctgctttatcaatttgagttttaa

SEQ ID NO: 306846 - DNA, 1449 bp, Proteus mirabilis
gtgaaaataactgacaatccctatttccgtgaacaaggatatattgacggtatttggtgtgatgcaaaaagcaaagacacggttgaagtgattgatcctgcaacaaatcagcccattggtactgtgccaaatatggcaacagaagaagccaaagcggctgttgatgcagccgccaaagcattaccgacatggcgtgcgttaaccgcacatcaaagaagcactttactgcaacgctggttccaactgatacaggataacaagcgtcaacttgcagaactgatgacgtttgaacaaggtaaacccgtggccgaagcggaaggcgaaatcacctacgcagcctcatttattgagtggtttgctgagcaaggtaaaagaaccaacggtgaaattatcccctccccttcatcagataagcgtcttatggtgatcaaacaagggattggtgtttgtgcggctatcacaccttggaacttccctgctgccatgatcacccgtaaagcagccccagcattagccgcggggtgtactatggtgataaaacctgccaacgaaaccccctatacagcccttgcgttagctgaattagccgcgcaagcaggaatacctgccggtgttattaatattgtcaccggtgatgcagttaaaatcggtgaagtgttcacatcagacaaccgcgtgcgtaaattgagttttactggctctacaggggttggccgtttattaatgcgccaatgtgctgacagtgtgaaaaaagtctcactggagctaggaggaaatgcgccatttattatctttaatgacgccgatattgagaaagcggttgcaggtgctatgggggcgaaattccgtaatgccggacagacttgcgtgtgtgcaaatcgtttttatatccataaagatgtatatcaacaatttagtgaacgctttgttgctgaggttaaaaaactaaaagtcggtaatggctttaccgaaggcgtgactattgggcctcttattaatcataaggcggtagaaaaatcacaatcactccttgctgataccttacaacgcggtgcgacactgctatgtggtggtgaaagagataaagcaggtgaaaatttctttcagcctaccgtggtcggtaatgtgcctgctgatagtcatattcttgaagaagagatctttggccccgtggcacctttagtcatttttgacaatgaagaagaagtagtacatctagccaataataccatctatggcttagccgcttatttctacagtgaagatccacaacgtatttggcgtgtggctgaaaatctagaatatggcatggtcggtattaacacaggtctaatttctaatgaagtggctcctttcggtggtataaagcagtctggcttaggtcgtgaaggctctgagcatggtattgaggactatatggaaatgaaatacctctgccaaggcctgtaa

SEQ ID NO: 306847 - DNA, 666 bp, Proteus mirabilis; identical to SEQ ID NO: 296837

SEQ ID NO: 306848 - DNA, 648 bp, Proteus mirabilis
atgcaaaaaccaatcctttcttgtcttttgattatgggttttttaggtagtgctatgtctgttttggcacatggacatcatcatgaaaaagtacgcacacaagcacaaatagatgctgcgaatgggatttttgaggacaaggacgttctcaatcgctcattaagcgattgggatggcgtatggcaatctgttgaaccctatctgcgtagtggcgaattagatatcgttttgcaaaagaaagcggagacgaagcaagataaaacagtagaacaatatcgagcttactatacacaaggctataaaaccgatgttgatatgattggtattgagaataatatcgtagagtttcatcgtggtgataaagtcgatagctgtgaatatcactatgatggttatcgtattctacattatcaatcgggtaaaaaaggtgttcgctatctgtttagatgtgacgatgccaacagccaagctccacggtttattcagtttagcgatcatattattgcaccagaaaaagcacagcattttcatctatatatgggaaatagttcacaagatgaattacttaaagagctaactaattggccaacctattacccttattcaatgaaaggggaagatattgttcatgaaatgctttatcactaa

SEQ ID NO: 306849 - DNA, 126 bp, Proteus mirabilis; identical to SEQ ID NO: 295415

SEQ ID NO: 306850 - DNA, 249 bp, Proteus mirabilis; identical to SEQ ID NO: 295416

SEQ ID NO: 306851 - DNA, 660 bp, Proteus mirabilis
atggttcgtgctagtatggcaacaagaaataaaaaagaggttacaattagtgatagtgattcacagttcaatcatgaggtgaatatgggcaaattcccaggcttacatcgtcgagcaatcgttgttattgccattattttgttagtcgtttttttctggccaacaagtgaaaataccaccccacctcaaccctcatcttcgacacaagatcttcctgtgcctgtagcaccttctgtctcaaatgaaacacaaaatgtccctaatacactaccaccagcacaggatagcctaaatgctgagcaagaggcagaagacttaccagaagaaggtgaagccaataataccaatgacaatacgccagtaaacacaacgcctcaaacaccgtcaaccgcgactgaaaattggcaaacttataccattaaagaggggcaaacccttgcacaactatttagagataatcagttgcttgtcaatgatgcgtttactatggcgaaatcagaaggcccacaaaagccgttaagccagttacgcgccggacaaaccattcgtttacaacgaggttcacaaggtgaagtgagtatgcttgaagtgactgacaataccggtactgttattaccttcacacggctaagtgatggtagttattatcgtacgccatag

SEQ ID NO: 306852 - DNA, 450 bp, Proteus mirabilis
atgcaaattattctgcttgataaagtagcgaatctgggtagcctgggtgatcaggttaacgtaaaatcgggctatgctcgtaactatttaatcccacagggtaaagctgtttctgcgactaagaaaaacatcgagtttttcgaagcgcgtcgtgctgagttagaagctaaattagctgaaactttagctgcagctgaagctcgtgcagcgaaaatcactgcactgggatctgtcactatcagctctaaagcgggtgacgaaggtaaactgtttggttcaatcggtacacgtgacatcgctgatgcagtaactgcagctggcgttgaaatttgtaagagcgaagttcgccttccaaacggcgttctgcgtacaactggtgaccacgaagttcacttccaagttcacagtgacgtattcgctgaactgaatgtaatcatcgttgctgaataa

SEQ ID NO: 306853 - DNA, 228 bp, Proteus mirabilis; identical to SEQ ID NO: 295419

SEQ ID NO: 306854 - DNA, 318 bp, Proteus mirabilis; identical to SEQ ID NO: 295420

SEQ ID NO: 306855 - DNA, 396 bp, Proteus mirabilis; identical to SEQ ID NO: 295421

SEQ ID NO: 306856 - DNA, 744 bp, Proteus mirabilis
atgagcgaagatattatttatggtattcacgcagtaaaagcactgcttgagcgtgatccgacacgttttaaagaagtttatgtgttaaaaggacgcgaagatcgtcgtttaatgccggtgatccatgcgttggaagaacaagggattttagttcaagttgctaatcgccaatggttagataatcaaactgaaggtgcggttcaccaagggataattgctaaagtaaaacctagtcgtcagtaccaagaacaagatttaccggacttattagctgaagtaggtacaccttttctattagtgttagatggtgtgactgatccacacaacttaggggcatgcttacgtagtgctgatgcggctggtgttcacgcagtcattgtaccaaaagatcgctcagctcaattaaatgccacggcgaaaaaagtcgcttgtggtgctgcagaaagcgtacctttgatccgtgtaaccaatctggcacgtactttacgcttactacaagaagagaacatctggattgttggcaccgcgggggaagcggatcatacattatatcaaagcaaactcacagggcctttagctttggttatgggggctgaaggtgaaggaatgcgccgtttaacccgcgaacattgtgatgagttaatcagtattcctatggcaggctcagtctcttcattaaatgtctccgtggcaaccggagtttgtttatttgaagcaatgcgtcagcgtattcctgtaaaataa

SEQ ID NO: 306857 - DNA, 2490 bp, Proteus mirabilis
atgtccaaagatccttttcaggatagagaagccgaaaaatacgcctctccaattgctagtcgtgaatttattttagaagaaatgaagaaacgcccggccccgatgagccgtgaagatatcgcgcaggcattgaaaatttcaggtgaagaaaatctggaagcattacgtcgtcgtttacgggctatggaacgagatggtcagttagtttttactcgacgtcagtgttatgccttacctgaacgcctcgatctttggaaaggtaaagttatcggtcaccgtgacggctatggttttttacgtgcggaaggccaaaaggatgatctctatctttcacaagatgaaatgaaaaaaaccatgcatggtgatgtgattttagcgcaacccctaggcatggatagaaaagggcgtcgagaaggtcgcgtcgttcgtgttcttgaacccagaaacagccaaattgttgggcgctattttattgagtcaggtatgggatttgtggtacctgacgatagccgtttaagttttgatattcttatccctaaagaagatatcatgggcgcacgtatggggaatgtggtggtggttgaagttaccacaagaccaacacggcgtactcaagcggtaggacgcattgttgaaattttaggtgaaactatggggacgggaattgcggtagaaattgcactacgcacccatgaaattcctcatacttggccacctaaagtagaaaaagaaatcgctgatttaaaagaagatgtgccagagtcagcgaaacaaggccgcgttgatttgcgtgatctccctttaattaccattgatggtgaagatgcgcgagactttgatgatgccgtttattgccagcgtaaaaaaggcgggggctggcgtttatgggtagcaattgcagatgtgagctattatgtacgccctcaaactgcattagacacagaagcacgtagccgaggcaattcggtctatttcccatctcaagttgtccctatgctgccagaagtactgtcgaatggattatgttcattaaatccacaagtcgaccgtttatgtatggtttgtgaaatgaccgtttctgagcaggggcgcctttcatcttataaattctatgaagccgtaatgagctctcacgcgcgaatgacttacaccaaagtatggaaaatcattcaaggtgatgaagagttacgtgagcactaccaaccgatcgtaaaagatattgagcacctttatgagctataccaagccctcgataaggcgcgtgaacagcgtggtgccattggttttgaatcggaagaagcgaaatttattttcaatgcagaacgtcgtatcgatcgtatcgaaccggttgtacgtaatgatgcacataaattaattgaagagtgcatgattttagccaatattgcggcggcgcgttttgttgagaaaaatgaagagcctgcgttatatcgtgtgcatgataaacccaaagaagagagcgtaatgaatttacgttcggtatttaatgaactgggtttaacgttaccgggaggattaacaccggagccaggcgattatgcgcgagtcatgaaagaagtcgaagagcgtccagatcacgaaatgctacaaaccatggtattgcgctccatgaaacaggcgatttacgatcctgaaaatcgaggtcactttggtttagcattaaaatcttatgctcacttcacttcacccatccgtcgttatcctgacttagcattacatcgtgctattaaataccagatagcgaaacagcaaggccatggctcacaacgctggacaccaacgggtggctatcatagtgatatggataccatgcttcagttaggggaacactgctctttaactgaacgtcgggcggatgaagcaacccgtgatgtggctgattggctgaaatgtgatttcatgcttgatcaaattggtcagcaatttaccggtattattaccagtgtcactggtttcggtttctttgtgcgcttaaacgatctatttattgatggtcttgttcatgtatccacattaaataatgattactatcaatttgataatgttggacagcgtttaattggtgagtcatccggtcaggtgtatcgtctgggtgatgaagttgaagtgaaagttgaagcggtcagtatggatgaacgtactattgacttctcattgatttcaacaacacgtaaagcacgtaaccccgggaaaacagcacgtgttcgtgcgttaaaagggggaaaagacaagaaaaatgcgagcagtagtaagtctcgtcgtcgtgatgccagcaaagacaaaaactttgaacctgatagtgcctttaggaaaggtaaatcaagtaaagaaaaacagagcaaagataaagtcattaaagagaaaattgcgaaggacaaggcgagtactaaacgtaaaaaagcctctgcacaaaccaaaaagatagaggcgaaattaaaagccaaacgtgcggcgaaacgcactaaagcgtag

SEQ ID NO: 306858 - DNA, 429 bp, Proteus mirabilis; identical to SEQ ID NO: 295424

SEQ ID NO: 306859 - DNA, 1299 bp, Proteus mirabilis
atgagtaataacgttgtcgtattaggcacccaatggggtgacgaaggcaaaggcaagatcgtcgacttgctgacagaacgcgctaagtatgttgttcgttaccaaggcggacataacgcaggtcacaccctagtcattgacggtgaaaaaaccgttctccacttaatcccatcaggcattcttcgtgaaaatgttgtcagcatcatcgcaaacggtgtcgtattatcgccagaagcactgatgaaagaaatgacacagcttgaagagcgtggtattcctgttcgttcacgtctactactgtcagaagcttgcccactaattctgccttatcacattgcattagataacgcccgtgaaaaggcgcgtggtgagaaagcgattggtactacgggtcgtggtattggtcctgcttatgaagataaagtcgcacgccgtggtttacgtgttggtgatctatttgataaaaaagcattcgctcagaagcttaaagagatcatcgaataccataatttccaactggttaattattacaaagttgagcctgttgattaccaaaaaaccttagacgatatcatggcgatcgctgatatcttaactgggatggttgttgacgtttctgacttactttacaaagcaacacaaaaaggtgagttagtgatgtttgaaggggcgcaaggtactctattagatatcgatcacggtacttatccgtatgtcacctcttcaaataccaccgcaggtggtgttgcaacaggttccggcttaggtcctcgttatgttggttatgtattaggtatcattaaagcctattctacccgtgttggtgcaggtccattccctacagaattatttgacgaaacgggcgatttcctgcgtgaaaaaggccaagagttcggtgcaacaacaggtcgtagtcgccgtactggttggttagatattattgctatccgccgtgctgttcaaatcaactcattgtcaggcttctgcatgaccaaacttgatgtcttagatggtctgaaagaagttaaagtgtgtgtaggttatcgcttaccaaatggtgaagtgattgaaactacaccattagcagcagatgattgggaaggtattgagcctatttatgaatctatgcctggctggaacgaaagcactttcggcgttaaagataaagcacagttaccacaagccgcgttaaattatattaaacgcgttgaagagttaactggtgtgcctgttgatatcgtttctacaggtccagatcgttcagaaacgattattctccgtcatccatttgatgcataa

SEQ ID NO: 306860 - DNA, 1005 bp, Proteus mirabilis
atgcgtaaagttatcgctgttgttgcagttattattttagcgttgttgtactcctcagtatttgtcgtgcaacaatatgaacgcggtattattttacgtttctcgaaagtggtacgtgatggtgaaaataaaccggtcgtttatgaaccgggtattcactttaaaattccatttattgagaatgtgaaaaaactggatgcgcgtatccaaacgatgaatatccagcaagatcgcttcttatcaggtgagaacaaagacttgttagttgactcttatctgaaatggcgtatcagtgattttagtacttactacctagctactggtggtggtaatacgatgcaagcagaaaccttattgcgtcgtaaatttagtgaccgtttacgctctgaaattggtcgtatgagtgtaaaccaaattatcactgattcacgtggtcgtttaaccattgatgtgcgtaatgcgttgaatgaaggtacaccttctcgtgataaaagtgatgcagatgatgctattgctattgctgcgaagaaagtggccgaagagaccaaaggtaaagcccctgctatcaatatgaacagtatggcggcattaggtattgaagtgattgatgttcgtatcaaacaaatcaacttaccaatggaagtttctgaagccatttatcaacgtatgcgtgcagagcgtgaagcggttgctcgtcgtcaccgttcacaaggtcaagaagaagcggtgaaaatccgtgctgcagcagataaaacagtgacagaaaccttagctgaatcggagcgtgaatcgttacgtattcgaggtgagggggatgcgcaagcaactaaactatttgctgatgcattcagtcaagatcctgacttctatgcgtttatccgtagcttacgtgcttatgagaatagctttaataaagacggtaatgacgtcatggtgttaagtccagatagcgatttcttacgctatatgaaagcaccaactaaagcgagagcgattgaagagtaa

SEQ ID NO: 306861 - DNA, 1275 bp, Proteus mirabilis
atggcgtggaatcagcccggtaacaacggacaagaccgcgacccgtgggggaaccgaaacggcggtaataataacggcgacgggaactctaacggtaatcaaggaggtcgggatcgtaaagcatcagatctcgatgatttgttccggaaactgagtgcaaaacttggcggtttcggtggtaaaaaaggaggaaactcctcttctgggcaaaatggcggacctcgtggtaatgctggaaacgtattagtttctcttgcattaggtgcagtggttgtcgtttgggctgccagtggtttttataccattaaagaagccgaacaaggtgttgtgactcgtttcggtaaattttaccaaatcgtcgagcctggtttaaactggaaaccgactttcattgatgaagttcagcctgtcaacgtaaaaaccatccgtgatttaactacgggtggcatgatgttgacatcagatgaaaacatggttcaagttgagataaacgttcaatatgttgtctcagatccagaagcatttctctttaatgtcacaacgccaatgaatagcctaggacaagcgacagacagtgccgtccgtggtgtcattggtcgttcagaaatggaaaagatcctgacatcgaaccgttcagaaattcgtgatcaaacccgtcaagaattagaagagacgatccgcccttataaaatggggatctccattgtggacgtcaacttccaagttgctcgcccaccagaagcggtaaaagcggcattcgatgacgtaattgcggcacgagaagaagagcagaaaaccattcgtcaggctgaggcttataaaaacgaagtgttaccattagcaaaaggtaacgcacaacgtatgattgaagaagcaaccgcttataaaacgagtgtggtgatgaaagcagaaggtgaggtggcgagtttcgccaaaatcttacctgaatatcgcgcagcaccggaaattactcgtgagcgtctgtatattgaaacaatggaaaaagtgttgtcgaaaacacgtaaagtcattgccaatgacaaaggtaacagtatgttggttctgcctttagagcaaatgttacgccagcaaccaaaagcgccaacgtcatttaatagtgtcacagaggcacctgcgcgtatttcaacccctacgccaagtaccaacacaacacctactcagaaaccagcaacaacttatggtaacggtggatatggtagcaataatagtggtggttatggtcagccttatggctctaatcaaggaggacaataa

SEQ ID NO: 306862 - DNA, 1284 bp, Proteus mirabilis
ttgtttgatcgttatgaaggtggcgaattagccgttttagtgcacgttttcttttcgcaagaaaaggatattgatgacttgcaagagtttgaatctttggtgacatctgccggtgtaaaaccagttcaaattattacagggagccgtagagcgcctcactccaaatattatgtgggagaaggtaaagcggaagaaatcgcagaagcagtaaaagcgagtggtgcagatgtggtgctatttaatcacgcactctcaccggcacaagaacgaaatctggaaagactttgtgaatgtcgtgtggttgatcgcacgggagttatcctcgatatttttgctcaacgagcaagaactcacgaaggaaagctacaggtagaactcgctcagttacgtcatttatcaacccgtttagttcgagggtggacacacttagaacgacaaaaaggggggattggattacgtggccctggcgaaacacagcttgaaacggaccgacgtttgctcagaggcaaaattagtcaaattctaatgcgtctaggcaaagttgaacgtcagcgtgaacaaggacgacaagcgcgaagtaaagctgatattccaacgttatctctggtgggttacaccaatgcgggtaagtcgagtttattcaatcgtataacctgtgctgatgtatatgctgctgatcagttgtttgcgacactggatcctaccttaagacgaattcaggtcgatgatgttggtaccgtggtgttagctgatacggttggttttatccgacatctacctcatgatctggtggcggcatttaaggcaacgctacaagaaacacgtgaagcgacattgcttcttcatgttattgatgccgctgatagccgttttgaagagaacattcatgcagttgaaaatgtattagaagagattgatgctcacgagataccgacactgtatgtgatgaataaaattgatcttcttgaggacttcaccccaagaattgatcgaaatgaagataatttacctgttagggtttgggtttctgcacaaacaggtgaaggtattcctctgttatatcaggcgttgacagagcgcctttcaggtgagatcgcacacgttgaattgcgtttaccgccagaagaagcagggcgattacgtagccgtttttatcaattacaggctattgagcgtgaatggattgaaaaagacggtaaagttgggctaatcacccgaatgcctatggtagactggcatcgactttgcaagcaggagcctactttattggattacgtggtctga

SEQ ID NO: 306863 - DNA, 291 bp, Proteus mirabilis
atggctaaggggcaatctttgcaagatccttttctgaacgcattacgtcgtgaaagggtccctgtttcaatctatttggtaaacggcattaaattacagggtcagatcgaatcttttgaccaatttgttattctgctgaaaaacactgttagtcagatggtatacaaacatgctatctctaccgtagtaccttctcgtcctgtttctcatcatagcaatacaggtaccaaccaagcgggtacaaactacagtggcggtaacgcgactcagcaggatgatgttgcagaataa

SEQ ID NO: 306864 - DNA, 942 bp, Proteus mirabilis
atgagcgaagtaaaaacgcaaataaaacctaaagcaatctttctgatggggccaacagcctctggtaaaaccgcattagccattgcgctaagacaaaaactgcccgttgatcttattagtgttgattctgctcttatttatcgtggtatggatattggtactgcgaaaccggatgagacagagcagtcgcttgcaccacatcgtttaattgatattctagatcccgcattaccttattctgccgcagactttcgtaaagatgcgttaaaagcaatggaagaaattacggctgcaggacgaattccactattagtgggcgggactatgctatattttaaagcgttattagaaggcttatcgcctttgcccagtgctaatccagaaattcgtgctgaaatcgaaaaaaaagcagccgaacaagggtgggaggcaattcatcaagagctagcatccgtcgatcccgttgcggccaaacggatccatcctaatgatcctcaacgcctttctcgtgcactggaagtttacctgatttcaggtaaatcgatgacagaattaactcaaatatcaggcgaagcattgccttatgatgtttatcagtttgcgattgctccgaaagatagaaatgtacttcatcaacgcattgaagcacgttttaaacagatgttaacgtgtggctttgaagatgaagtaaaatcattataccaacggggcgatctgcatgaagatttaccttctatacgttgtgtcggctatcgccagatgtggtcatatttatccggcgaaatcgactatgatgagatggtttatcgagggatctgcgctacccggcaattagcgaagcgacaaatcacttggttaagaggttggcatgatgttcattggttagatagtgaagattttgaacagtctcttaacactgttttgcaggtagttagtgcatag

SEQ ID NO: 306865 - DNA, 2010 bp, Proteus mirabilis
atggcgattaatttattacctcctcagttagcaaatcagattgcagcaggggaagtcgttgaaagacccgcttctgttgttaaagagttacttgaaaatagcttagacgcgggtgcgacaacaattgatatcgatatcgataaaggtggcgctaagctaattcgtatccgcgataatggatgcggcatttctcgtgatgatttgaagttagcacttgctcgccatgcaacaagcaaaatatcgacactggatgaccttgaagccattatgagcatggggtttcgtggtgaagccttagccagtattagctctgtatcacgtttaaccttaacatctcgtaccgcatctcaggaggaggcttggcaagcctacgccgaagggcgtgatatgacagtggcagtcaagccagcagcacatccggtggggagcacagttgaagtgctcgatcttttttataacactcctgcaagacgtaaatttttacgtaccgaaaaaacagagtttggtcatatagatgaagtagtacgtcgtatagccttatcccgctttgatgtgtcaattaatttaacccacaacggtaagcgggtgcgtcaatatcgcgctgcgaaagaaactcatcagcatcatcgtcgtttaagtgctatctgtggtaatcattttgttgatcaagcaatgcaactgacgtgggagcatggtgatctggcaataaaaggctgggtagagcatcctttagctccagtgcaaagcagtgaaatacagtactgttatgtcaatgggcgcatgatgcgcgatagattgattaaccatgctattcgtcaagcatatgaaggttatttgcaaggtgaacagcaaccctcttatgtgctttatttaaccgtcgaccctcatcaagtggatgtcaatgtgcatcctgccaaacatgaagtgcgttttcacgaatcgcgcttagtacacgattttatctatcaagctgtcttgagtgtgttaaggcaggttacagaagatacgttatctttagatgaagaggataatggggctttaactgccacaacatttcctgaaaatcgccaagttgcgggagaaaatgttttttcgcagccttatcaagcaccagtaacctcatctactcaaaaaaagagcacgggagcttaccaaggaagtgcaggaaaagggttaacagatacgcaaaagagtccccaaaaaacgctagatacacgtcagtttggagagagttatcaacgtacgcaaggcatgctttatcaaaaaatgatgcaagaaagtgcgagcgatgttgaaaataaagaaaaaatacctctatttccccctcgtcccccattgaatttagttgatgttggtcatacaacgaataacaatgaaacaaatgtaatttcagtggtgcctcgttctgttaatgccagcgcagcgcaaacagattatacttttggccgggtattggcgatttatcagcagaaatatgcgttaattgaatcttcgcaaggtctagggctgttagcattggaagaagctgattttctgttaaaatgtgcccagttattgccagaaaatgaaaatttgaaaccccaacctttgctagtgcctttaaaagtcacactcagtaaagatgaaattaatacatttaagcagtttcaggcgttaatcagtgattttgggattgttattgacatctctcatggtaaagcgacgatccatgcggtctcgttgccgttgcgacagcaaaatttacctgtattactgacaaagctattagcttatttggcaacagaaaaattatgctctaaacaacaaattgggcattggttagcaaaacagttaagtcatgagtcgggtgtttggtcacaggctcaggcagtaggattattggctgatattgaacgattatgtccacaatatgtcagacagccgtccaaaaacttattacaattaatagaattacaacctgtggtagcggcactgaataatgagcgaagtaaaaacgcaaataaaacctaa

SEQ ID NO: 306866 - DNA, 1317 bp, Proteus mirabilis
atgtcgagtctcatcactattgtgagccaatgtcagcgttatattgccacctttttgttggttgttctgtcactttttgtggtgcaaatagcacaagccgctacggtaacagaagtgaaggccgaaaatggggatgtggctacaacacttacattttcgtttagtggtgggaaaccaagctatagatattactcactgaaaaatccagataggttagtgatggattttaagcaaggtagccaaataacgggtttacctgtgacattaaatcgtcagcaattagcacagaaaattcgcacgacacaatcaaaagatagccaatatcaaagtatggtggtagagcttgccaaaccagtggtggtgacggagcgcttattaaatagcaatggtgaatataagttagtacttactatcaaacctattaatgctcgacaaaataacaatacatcaacgacggtcagtgtagtggcgttatcagcaaacaaagccacaaatacggtggctaatcaacagatggcgcctttagtgagtacacctaagcaacccgttgcacctgtagtaccagtaaagcctcgtacaacctcgaataagcccgcatcgagtgatcggcaaataattattgcgattgacgcagggcatgggggtcaagatcccggcgctattgggcaaaaaggtaatcgtgaaaaagatgttaccttaagagtggcaaaaaaattagaagcgattttgcgtaatgatcctatgttcaaacccgttttaacccgcaatggcgactattttatttctgttgctggacgctctgaagtggcccgtaagcaaggtgccaatatgttagtgtctattcatgccgattctgcacctaatcgcagtgcgcgcggggcatctgtttgggtattgtcaaatcgtcgcgcgaatagtgaattaggtaaatggcttgaacaaagcgaaaaacaatcagagcttctcggtggcgccggtgatgcactcgcagaaggggttgatccctatttaagccaagcggtattagatttacaatttggtaattcacagcgtgtaggctatgacgttgcggtagcggtgttatctgaacttagaaaagtaggatcattacataaaaaaacaccagagcacgccagcttaggggttttacgttcacctgatattccgtctattttggtcgaaacaggttttattagtcatgccgctgaggaacaattgctgatttcagatgcttaccaagagaaattagccgcttcaatctatgccggattaaaaaattactttctcgctcatcccttacagaatgggccaaaataa

SEQ ID NO: 306867 - DNA, 468 bp, Proteus mirabilis
atgaaagaatgggttgttacattagaagatgaagctgcaacagtaaaactagggcattcagtcgcaatggcgacaaataaccaagggcttattatttatttatttggtgatctaggggccgggaaaaccacctttagccgcggatttttacaagctttaggtcatcaaggtcatgttaaaagtccaacatataccttggtagagccttatatgctgacaccacgcccagtctatcatttcgatctttatcgcttagcttcagcggaagagttagaatttatggggatacgtgactattttgcacaagatccactgtgtctcattgaatggccttctcaaggggaagggtttatacctaatgcggatttagagcttcatttaagctatgaaaatgaaggtcgtaaagcccattttattgccctttcacagagagggaatgctgttttatcccgtattcagtctgcataa

SEQ ID NO: 306868 - DNA, 1155 bp, Proteus mirabilis
atgtcatcactcgatcttcatcaccttgctcaaaatataaaacgttggggaactgaactaggattccaacaaacaggaatttgcgatactgatttatcgctcgaagagcctcgtttacaagcttggttagataaacagtatcatggtgaaatggcatggatggctaaatatggcatgactcgagcaagaccccatgaattggtgccgggcacattgcgtgtgatcagcgtcagaatgaactatttaccaacagatgccgcttttgctcgtacccttaataatccagagcaaggctatattagccgttatgcattaggtagagattatcacaaagtattaagacaacgccttaaaaaattaggtgaaaaaattacgcaatattgccaacagtttgaatatcaaggtattgttaattttcgcccttttgttgattcagcgccgataatggaacgaccattggccgtgaaagctggtcttgggtgggttggtaaacactcacttgttatcaataatcaggctggctcttggttttttctcggtgaattattaattaatttacctttgcctattgattctcccgttgaagagcaatgcggtaaatgtgtagcttgcatgaccacttgcccaacaggcgccatcgtagagccttacaccattgatgctcgtcgctgtatttcttacctaacgattgaacttgaaggcgctattcctgaagaatttcgccctttgatgggcaatcgtatctatggttgtgatgattgccaattaatttgcccatggaatcgtttttcttcgctcacagaggaagatgatttttctccgcgccgtgccttacatacaccagaattgctggatctattccaatggagtgaagaaaaattcctgcgtattacagaaggttcaccgatccgacgaattggctatttacgttggctaagaaatattagtgttgcgttaggcaatgccccttatcaggacaaaattgtactggccttgcaagagcgctttggtttaggggaggttttagatgaacatttgcactgggctatcgcccaacagaaagtcaaaagagaagaaaaaacactaaaaatacagacttcacaacaaaaacgtctagtaagggcaataactaagggcctacctcgtgatgcttag

SEQ ID NO: 306869 - DNA, 174 bp, Proteus mirabilis
atgcgttactcagaacaaatcaaaccaattagttatttaaaagctaatgtcgccgaagtgatgactaaactcactgaatctggtgcaccgatgattattactcaaaatggcgaagcaaaagtggttattcaggatattacctcttatgttatgaagagacacaggaaacattag

SEQ ID NO: 306870 - DNA, 327 bp, Proteus mirabilis
atggcgtcctataaagtggtaatgacgaaagatgccgaaacagacttagaggacatcaataactatattgccgaccacgacagcatagataatgtagattatgtattagatgagctgcttaaggtcactaatacactggctaactttcctatgaaaggcagtattccaaaggaattacaaagtttaggtattcgtgaatatcggcaaatcttttttaaaccttatcgtgtcatctatcacacaatagcaaaacaagtggttatctttattattgcggatggcagacgagacatgcaagccctgcttactcggcgacttttagggtaa

SEQ ID NO: 306871 - DNA, 1212 bp, Proteus mirabilis
atgaagctaacagacatggcaatcaagcgtgccaagccaaaagaaaaatcatacacgctggcggacggtaacgggctatctttgttagttgaaactaacggttccaaaggctggcgttatcgctatcaattcgctggtaaaaccaaaatgatatcgttaggtatctatcctgttgtcacactcaatgaagcaagagcgaaaagagatgaagcacgaaagcaggttgccaatggtattaatccaagcgaagccagaagagcagagaaagcagccacaattaaccaaactgaaaacacctttaaaaatattgcccttgaatggtatgagggtagaaaggatcgctggtctgttggttatcgtgatgacatgatggacgcattcgaaaaagatgtctttccttatataggtaatcgcccgattgccgaaatcaaaccaatggaattactcgaagtgctttctattatggaaaagcgcggagcaaccgagaagctaaagaaagtgcgccaacgttgtggtgaggtgtggaagtacgccattattactggtagggctgagtataaccctgcgccagatttagccagcgcctttgttcctcataagcgtgagcattatgcccacctttcagtaagtgaattaccagagtttctttcttctattgataagtacatgggaagccagattgtaagagtggcattaagggtgcttatattaactggagttcgaccaggggaattgagaaaggcggaatggtcagaaattaactttgatactaaggtttgggaaataccagctgaaaaaatgaagatgcgccgccctcatattgtgccgctatcagagcaggttattgatttgctgaaacagatacaccccatcagtggcagttatcaatatatattccctagccgtactgattatagaaagcatatatcagatatggcactgaatacgatgattaggcgcatgggttacagtggtagagctacaggccacggattcaggcatacaatgagcaccatcctacacgaacaaggctataacacgacatggattgagacgcagctagcacacgttgataaaaactctatccgtggaacatataaccatgctcagtatattgatggccgtagagaaatgcttcaatggtacgctgattacatgggggcattagagaacgggggtaatgttgtacacggtaactttaaacgtgcttaa

SEQ ID NO: 306872 - DNA, 915 bp, Proteus mirabilis
atggaaaatgtttatttctccgagaataaaggtggagaatttcaaaagaaagctaaagccacaatacatttatgtgagtgtgagaatgaagtaagtattttcaaaaatttgtcagaacataaacactttgtagaagggagtgacttagaatatgcttcaggacaaagattgaggataaagcatttagaaaaagataataaaagtttatttgcagaaataacattatatgagtgtaaagcaaaagttcctgtaactcctgtaactcctgtaactctagatgattcaaatacaaatacaaatgattcaaatacaaataccgatgagccgaatgatttagcggatatagaaaactatgatagatgccaagtgtttatgtatgttatagaagataagattttttctgtttttcagatcactccgcatccaaggattccaagatttgttaaaattttcaagtgttttggaattgaagctaaggttactgatagcttgaataaaagcactatggataaaataaaaaaagaaggagttaggtcaataaacttagcgattcaaaccgatagagaaagcattgagcaacaggccgcaggaggctttataaagaaatcagtgcaggcagtatcaaaaatttttgataaggaaggaagcgatggtaatgatggaacattctatggaacgcttgttattgaaggtaaaaacaacgtcaagcttgcaaatgatatacaaactcatccagaaaggatagttaatgagttatctgatggctttttcttaattactggtaaaggtaatactataaaaagctcagaaattagcactcaaagagattattatacaattaagtatggttctacaaacataaagaaggagcatgcgaaattgattctagaacatttcattgattatgttatataa

SEQ ID NO: 306873 - DNA, 486 bp, Proteus mirabilis
atgaaaaatagagatactaagtttatactgctggcgttattcgtagttatagtgtcttcaattgccacttactttttccatgaaaaaataagatataacaaagacttactgaattttactgcaaatattttttccatactaactggatttttacttcttgtcattacagttagcggggatgtggccactttgcagagccctaggaaaagatctcaatcgtattcagtaaaaaacacattcgatataagatttggccgatatatgatgttgttttttatatatttatctgttctttgtcttattttcctttactacttaacaatgccttctggcgatttaagcaagctaataaatagtgagccatctagactgtcctattggttagaaattgctatttgttggttaagcatcactgctttttttagttctttttttattccaatgagaataaaacaactttataaagaaaagatggaatcaaaatag

SEQ ID NO: 306874 - DNA, 1113 bp, Proteus mirabilis
atgggaatttatctaaggggaaatatctggttttgcgactttacagattatttaggtaaaagaatccgcaagagcttacacacagaaagtaagatagaagctcaagagctatttgataggttgaaatctgattcttggagggtaagacacctcaaggaaaaagagaagcatacatttgaggatgcatgcgaacgatggataaaagagaaaagaacaaaaagaacgattaaaggtgatatatccaaactaaaacgattatctataaagttcgggaaaagattactagcagatataggagcaggtgaattaactgcttttgtttattctcaatcgaatgaaaaacacagacagaattgggaggctaaacaactatcaaataaagacaatgacctaccaataggcaagtatcgacctaagcctatcaaaatagccaccagcattagttatattcgcttgctcaaagctctattcagagccgccgcatttgagtggggatggctagaaaatccattatattttaaagttccgcagcctgattcgtctcgaacccgctggcttagaaaaaatgaggttcaacgactgttatctgagttgccagaatacttaaaagatgttgtcagatttgctttagcgacagggctaaggcgttctaatataattaacttaaaatggtctcaggtagatattgagcggaacgtggcatggattgacgcagatgagatgaaagggaaaaagccaataggggtagtgtttaacagaacagcagcaaatattgttagtaagcagattggtaatcaccaagtatgggtatttacccgtgaacagcaatataaaaatactaaaggcgacaaatttattgctagagttaaattaaaagtagattcgaatcgagcatggagaacagcgttaaaaaaagctggaattactgattttagattccatgatttgcggcacacgtgggcaagctggttagttcaatctggcgttactctggcgatattgcaagaaatggggggatgggaatctatttctatggtccagcgttatgcccatttagctcctgagcatttaagagaacatgccaataaattggatgacatgatccctgattga

SEQ ID NO: 306875 - DNA, 804 bp, Proteus mirabilis
atgttggcactttctgtcagacagccacttaatatttattattggctcattgcgatatcattagtttatatcagtttattgagttgggtacttaattcatggtctatgacagaaagtgcgcaccatattgatcagcaacagcaaaatacattatcggtctatcaggtgatgttttcgccacctaaacaatctactaccatgattgaaccgagaataaagatcgagtcacaacaaccacctattgcactaccaagaagtgagaacggtgaatttattgaagcgcccaaacaacccgcaaaaaagcgtcaacaacaaccggccccaataacacctaaagcgataaaacaggtaaaaaaacagccagtagtagacaaaacagtacctataaaactacctgatttaacaaatcacaacatagttcaaagtacatcacaaccatcagcagaaaacttaacacagcataccgcgagttcattggcagggagcagtcgtgcattaagtgaaaatggtattgggcagggagagtctgaaaatcactatatcagtttattgcgccgagaaattgagcgtcataagcgctatcctgcgcaagctcgtcgtatgcaagatgaagggctggttgttgtgcgtttttcattaaccgatgaaggctatatttcatccgttgtacttgagcagacctcaggggtggcatctcttgataatgctgcacttgcagcggtaaaacgggtaaaaccaattggcccgaaacctaataacttatctgatcctttaactatctcgttaaaatttcaattaaattga

SEQ ID NO: 306876 - DNA, 156 bp, Proteus mirabilis
atgaacgatgatgttgaccgatgtcctgagtgtcaagtaagggcatactatacggatgattttgtccgtgtttaccaagcctattctactactatcgctcagagcgcagtcgcaaatggtacttttgtttctcccccttttagtagacccgtatga

SEQ ID NO: 306877 - DNA, 1026 bp, Proteus mirabilis
atgaaattattgttaacaccctatattcagtccgatcttggtgttgttttattgaagcctgaagcggagttgtttgagcaacttaaacaacattctcgtgtgattattagtgatgtaccaaagagtttaaataaatggccttctggtgaattaacagggaacgaacagccattattgaataacaagagcattgttgattttttgaataatgaaaaagtgatccaagctatgggcgggctggtatcgatgaatatgtggataggcaggaatatccattgctgccagattaacgataagcatgacagttatcatcatcatgaattaacaaccacatggcataaagacggtgtgatacgaacctgttggtaccatgataatcatattcgtaattcatcggcggggtgggttgctgagttagcgtataaaaatcgtattgcttggatgatagatactattcgcagtcgtttgagattagatgatagccattcgctgacgatacctgacttttttgcttttgccgtgatgcataaactggttaatgaattacctgatgctatattacgtcgtattctaaattggtctgataaacctaaagatcgtagagtgcatggcggttttcctgaagctgatattgttcccaatgaagtaacagcactatcagcaatgaatgcgcgtttagatgccataaaacccgttattaatgtgactgtcgatcctgaacctccagcctcatttcttcttaaacctaaaatgtgccgttgggagaattctcaatggcttcaatgggtaaaaacacagccttgttgtgtttgcggacaacaagctgatgatccgcatcatattatcggacatggtatgggaggcatgggaacgaaagctcatgatttattcactattccattatgtcggcaacatcatgatgagttgcatcgtgatccgaaattgtgggaagccaattatggtaaccaaatcgaattgttattttcttttttaaaccgttcattaggaatgggggcattggtttaa

SEQ ID NO: 306878 - DNA, 1773 bp, Proteus mirabilis
atggcttttgtaacagaattaacacatgaagataatatagtaccagcaacagcaaccgctcatttaatggcaacgaggcttggaactaccttaagagaacgctttgaagggcatattcataagcgagagtgttctaccatacaatcagattatgatgtaaaaatggctagtagagcaatagctgcttttgtaattcaccaccttggtcaagttgatgatgttgtttctggcgctgccgtttgtgatagttcacaagatggaggaattgatgctattcatgttaatcatacagaaaaaacagttgttgttgtacaagcaaaatattctcaatcaggtaattcaacatggactaattcagattttttagtattcaaacatgcatgtgatcttttaatacaagaagaatatgagcgatttgatccaatattacaaaataaacgagatgatattagcagagctttaagttctatagattataaatttttatttgttatggcccatactgggaaaagaggggctgcaaatactattttatttgatatgcaacaatggcaacaagaattaaatgaatcggcatcattaacaagtattcctcctaaccatgagctaccattccaggttcatttggtttcttctgaagatataactcaatggcgttatgcccaaacatctatgactgttgatttagatgatgtggaattagagcagtatgggaaaattgaaaccccttatattgcattttttggtgtgattagtggagatcaaatatcagaatggtggaaattacattcctcaaaattatttactaaaaatattcgtaatttactgggtaaaacagaggttaatgaagcaataaagcaaactgctgtaaatgatcctgagcatttttggttttttaataatggtattactgttcttgttcgatccattgaaccacacagaagaaataaaactaatcaacgagatgttggtagatttaattttcgtgatgtaagtgttattaacggagctcaaacagttagtaatattggctctttagatggttttgatgaaggttttcttacaaaaataaaaatccaagtacgatttatacaaatacctcaaggtgcatcaggagatattattaattccataactagagcaaataatcatcaaaatagagttcttggtagagattttgcttctcaacatcctcaacaattacgattaagagatgaattaattatagagggttatatttatcagttgttaagaagtgatatgtccacagatactttaggtgaaagaaatatagatatagatgaagcattagatgctttggcttgtttaaattgtaaaccatcaacgctagctttattaaaaagccaacggggtaagttttttgaaaatttagaaggttcagcatataaaacactttttaactcatcagtaagtggggttttacttataaatgcagttttacatcatcgagttattgaaaaaagaattaaggaattattaaattctactaataggcaagaagataaaaaacgttatggtatcttaactcatgctaaccgagtgtttgctggctttattcttagtactactccaaatataaagaatgcaaaaaatatcattagtatcaatatggagtatattaataatgagttggaaagaatcttgtcaataacagaaaaacttattgaaagctcttatccaactgcataccctgctcgattttttagtaatgtagataagatttcattaactctcgataaattgaaagaataa

SEQ ID NO: 306879 - DNA, 228 bp, Proteus mirabilis
atgaaatttttagtcgtaggctgtgggttaacaggggctgtaattagtcgccatctagctgatgctggtcattgcatcacgataatagaccaaagatcacatattgctggtaattgccatacagaacgagatagaaataccggtattatggaacatgtttatggtccacatatcttccacactagcgatgaagtggtatgggaatatatcaataaacatggtgaatga

SEQ ID NO: 306880 - DNA, 849 bp, Proteus mirabilis
atgcttaaattcaattctgtgtggagatacgaagccccagccaccgctgatcccgtctttgttaacgaggtaatgggcgaaataatccaatccattgttgctgagtgcagcaataagcgcatatatgaaatttttaaacgtcgattcgcacatgcatccggtagcccaactggtgaaagctctgatgaaggctgggcaaaaacagaccttggggacgcaatgatccgaacagcgcagaaaaacgttgttttgtttattgaggctttatatgacggatttcatgatctccatattgcaaatgtcaatgctcaaattccgcccctgcacttcgttaataagcatttagaatcgacgggatttgctataaaagaacccgacttattaatcaggataagcaaccatgagcctataccggttcctaccatagctccttcgtttgatgtgcaggccaatgaggtaattcaggcatcgttgagaaaatcggaagagcttcttgatgtaggaaatcatcgaggtgccgttcaggaagtatattggttgcttgaaaccattacaacggctttcaagggagtgcaaatggctgacggtaatgtatctggtaaatatttttcaaaaattattggagagatgcgtcagctaaaccgccataaaacactagatcaagtatctggctggttagtaaatatttatgggtacctttcagcgcctggcggtggcggggtgcgtcatggtgccgatatattaaattatgacgagttgacagccagcgaggcacgactattttgtgatctcgcccgtagctatatatcttattttttacatgaacatagcctgttacagagaacttag

SEQ ID NO: 306881 - DNA, 651 bp, Proteus mirabilis
ttgagaattaatgtggaaaatgaaacttgggcattaatgggggctgcatcagccattgccgtgccgctgatttataacacagtaaaagaagctatctgggaaactaaaaaaagaaaacgcgaagaacgatatatcgtaatacaacttattttcatgctggacaaatatatatctcagtgtgaattcttgtcttataatgacggtatttacgatcctgaaaaagaatacaaggtagtagactatgttaaacctgaactgcaattatcatcggtaaagggtgactataaatatctggatgcagatatgctttacaggttgtacagcattgactcgaaatgtgctcaggtaatcagtgaactgtcaaaccttgatgactcttactttgatgatgcgcctgatttcactggctattatgccaggcggcaagagctctatgcaaagcacggcctgtatgtaatcgaactctcagagaatatttgccgtaaattccgtataaaacatgtttcatgggaagggggatttaacccggcagtctccatcagggaacgtttggttcagattcgcgcatcgaaatcccgtgccaatctgcgcagaatggaaatgaaggcgaagcgagctgcagaaaagcagcgaaaattattgcaagggtag

SEQ ID NO: 306882 - DNA, 1119 bp, Proteus mirabilis
atggcgcgaaaatttgttatacaaaaacctcagtcaaatgaggagctatttaaatcattagtaattaacgctattgattttttagatgcctcaattgacaatttagataaaagacccaaaaattcaattattgatttttatactgctattgagctttttttaaaagcaagattaatgcgagagcattggacgcttatattagaagatccaggaaatgcgcatagtcaaaactttagcgtgggtgactttaaatcagtttaccttgatggagcagttaaacggctaagatctattctcggtataaatcttgatgataaagttatagataatttcaaagcgttgggtgagcacagaaatcaaattgttcatttcgcgcatacagaatattcaaatcagcaagcaaataaagctggtgtagtagcgcagcaatggtcttcatggcattatttatataacctcttatcggtagattggaaagacatctttttagagtatcaaaaaagcatagaacgtattcataaaagaatgctcactcagaaagaatttctgagtgcacgatttactgaactctctcaacaaattgaaataaagagaaaaaaaggaataaaagtcgttaattgcgatcaatgtaatctacctgcaggcatagttaatgataatcatacgtggggagatgattatgaatgtttggtatgcgaatcacaaggtgtagctttggaaaaggttcgagataccctagattgtcctcaatgtagtaatccttttgaattctttagccatgatgttaataaatgtccgacatgcaaccacaaaatagacacaaatttattaattagactgtgtaaagcaaagtataaaacaggtgatgattggtgggagcctggtggagatgtcattgcaggatgccatcaatgtcaacatatccctgattctgttttttatattgaaggacagtggagttgcgtttcatgttttgatcgtggatggtctgcaattaactgtccacattgtaacgcgtatgttactggagatatggatagaattaaatattttgcttgttataaatgtgaagataaacagaggtcttctattttatcaacggcgggcgttaatttatga

SEQ ID NO: 306883 - DNA, 414 bp, Proteus mirabilis
atgaattggtcttttattctaattttagctctatttgtagttgttggttgtgttgataaagagaggaatacatctggctctatagaaaaggtggcaacagagatagcgactcttactgttcaatatcaccacgatgaaagtcgttatcccacatttatgttatcaaaacaatctcgttttgaaatgcaagccaaggaggaaaaacagaaattcaatcaattatttaaatttggatttgaagagccaaccacacccactaatagcgaatattcctataaaaaggaacaacgtataagaaagaatgatcagtcaatgattattctgccagaagcgatacctgtatggaataaagataaacaagaagttgaagttaagtggagctacagaccaaaatatgtttttgatgcatattaa

SEQ ID NO: 306884 - DNA, 243 bp, Proteus mirabilis
atgcgcccaatttttttgttaataccatttatgtttttaattggctgtaccgagcaaatgagtgtcggaattggcacttctagaacgcataatataggatatccagtttgttcaacattagtttgtggaaagaatacgcgaacagttgaagaacaaaaggcaattaatgaagcggtgcatgaacagcaaagagctattatgcgaggagaaaaaccagatttaaaaattattgcctcatattaa

SEQ ID NO: 306885 - DNA, 447 bp, Proteus mirabilis; identical to SEQ ID NO: 306256

SEQ ID NO: 306886 - DNA, 201 bp, Proteus mirabilis
atgaacaacaacaacgacgaactcaataatgctctatatcgagtcgctttagtgttagataaagggcttgaatcaacaagagaactagcagctggttatgtagaaacaatgggattggggtttgatagatctgttaggaatctatcgtatttttttgatggctatgaagatgtctatgaaaatataaaatataaaatataa

SEQ ID NO: 306887 - DNA, 642 bp, Proteus mirabilis; identical to SEQ ID NO: 305892

SEQ ID NO: 306888 - DNA, 561 bp, Proteus mirabilis; identical to SEQ ID NO: 296621

SEQ ID NO: 306889 - DNA, 309 bp, Proteus mirabilis; identical to SEQ ID NO: 296730

SEQ ID NO: 306890 - DNA, 390 bp, Proteus mirabilis
ttgtttataatttcttttttaaaaaagtattctgtaaatattatatttattggacgtcaagatgatttagttaatcttcagatcgatagttttttaagtaatcctattggagattttattagtgcgtcagcaataataaaacatgctgatttaattataacaccagatacatctattgtgcatgttgctactgcttttgataaacctacgctcgctttatatggaaatgattatcatggtaagtatgtaaataattttatgtggtcacctaataataaaaaagcaattcagataacacagaagaaagtagatagtaaagtgagtgatatatcaatagacctaattaaatctaaattagattttcttgtggataaatatttatgtcaataa

SEQ ID NO: 306891 - DNA, 213 bp, Proteus mirabilis; identical to SEQ ID NO: 297906

SEQ ID NO: 306892 - DNA, 741 bp, Proteus mirabilis; identical to SEQ ID NO: 301462

SEQ ID NO: 306893 - DNA, 1026 bp, Proteus mirabilis
atgagtgataatcttcctgaagcaccacagggtgaatttattttgttccgcagtgaagatggtcaaactcgtgtcgaatgccgctttgagtctgatacgttgtggttatctcaatcctcgatttgtgagctttacggtaaagctaagtccacgattagtgagcatattcgcaatatttttactgagggtgagttagtcgaagattcagttgttcggttttaccgaacaactgcggatgatgctaagcagtacaatgtaaaatacttcaatctctcaatgatccttgccattggctaccgtgtccgctctgtccgtggtactcagtttcgtcagtgggcaacgcaaacgctggaacagtatctgattaaagggtttgtgatggacgatgaacggctgaaaaatccgcctatcggtcagtcagtcgtaccggattactttgatgagatgctcgaacgcatccgtgatattcgtgccagtgagcggcgggtatatttacgggtgaaagagatcttcaccatggcagcggattacgaaccatccaataaagaaacaactcgtttcttccaaaccatccaaaacaaactgcattttgcttgtactggcatgactgctgcggagcttatagctagtcgcgcagatgccagtcagccggatatgggcttaaccagctataaatttgatgaggtgcgtaaaaccgatgtcacgattgcgaagaattatctacgcgaaaatgagctgaaagaattaaaccgtatcgtcaatatgtggctggattttgctgaagaccaagcgctgcgccgtaagcaagtttttttacaagattgggatactaagctagatcagtttttaagtttcaatgaccgtgatgtattacaaggcgcaggtggaattagtaagaaagccgctgatgaaaaagccaaagagatatttgatatttatgctcaaaaacgtcgtcggttaaaagaaaccgaaggggaaagggcaaatattgcggcattgaaagatttgctaaaaaaaggtaagtaa

SEQ ID NO: 306894 - DNA, 393 bp, Proteus mirabilis
atgtctatcagtattgttttagatcttgaggattatttggtgaaaaatttgttgtcatcttgcgaagtggcaggagagcaattgaatgaacatatcatatctatactagaatcacatagcgcttcagctacgagtgattcagagttacttaaattggcattaaatagagttaaagaaatgcctaatggacaagagtttacactgaaagaagtaatggctgatgtttgggatcaaattgaaagcccaagagcttttgggcgcttatttaaaaagcaatcttcgtatttagcatcccatcaaggtgttaattcatcaaataaagctatttataagaaatttgaatgccaatccaatggttatttagttcaccagtgttcaactaccatcggttaa

SEQ ID NO: 306895 - DNA, 375 bp, Proteus mirabilis
atgacagataaagatattgaaaaagaaattcaagccaaaggtaaaacagcggctcgtgtaacaccagatcacgttgaaggtgtgattgctagtgagcattacttcactggagcacaaggagatcatcaggcaaaagaagatgagttgcaaattaatccagagccgtatgttgaagccacgcctgattctttgcaccttctcaccttctgtgtcctagtgctgaaaaatggcttcactgttactggtgaatcggcatgtgcaagccctgaaaactttgatgcagaaattggccgtaagattgcacgtgaaaatgcaattaacaaaatctggatgcttgaaggttatttgttaaagcaaaagttatctgaagaataa

SEQ ID NO: 306896 - DNA, 366 bp, Proteus mirabilis
atggctagactatttgtaatattcatagattgtgttattgccagctcgttttattttggactcactctaggcaatgatgggttgattaatgtgggttattttgcaggatggttatttgcctcaataaatattattggcggttttgtagggaaagacgaaatagctaaacattacacacatcaacacttcgtgtggcgagcatatgatgcggttctgagctcaatctatgtcatatttgccgcttattctggatggtttgtattagcatctttttttgctgttggagctatgattaaggcggaaataaacgggaagatagaaaaagatttactaaaaaaccaagaagaaagcaatacgggaaattga

SEQ ID NO: 306897 - DNA, 1521 bp, Proteus mirabilis
atgaaaatatcacatttctatcgatggatagtattcatcatactcacaatattggcgctttactttactgtactcggagggtatttagtttcattagcaggatcgcctttttatctctttaccggtgtcatgcttcttattattgcagcttgctttttaagtcgaaggaaaagcaccctattactctttaactttctatttttaataacgattgtctggagtatctgggagtcaggatttgatttttgggcactcgctcctcgcttagatattatttttattctaggcttactccttattcctttcacactcaataataatgtttacacttgtcgtaccaataaaattggcttattcacactattagccacaacacttatcattatattaggtagttcactaaccgatcctcatgccattaatggtcaatttacacaacaacagcccaccaactctatatctcctatcggagtaaatgataatgactggcccgcttatggcagaacgcaagccggaatacgctattcaccattaactcaaatcaacagtgataatgttgataagttagttgagaaatggacttttcataccggtgatgaaaaaagggctaatgatgccgttgagataaccaacgaagttacgcctataaaaattgaagataatctctttctatgtacacctcaccaatatttaattagcttagatcccgcaacaggtaaagagaagtggcgttttgattctaaattgcaatataacaaaagcttccagcatatgacttgccgaggtgttgcctattataatcaaaataatagtgccgaatttgccaaaagcctcgaagttcgccaaccaagcatatcagatgaatgtcctgaaaaagtctttcttccagtcaatgatggccgcctaatcgcagttaatgcgcaaacgggtaatgcatgccgtgattttggtcagaatggagaaatcaatctgttagcttctatgccttatgcttatttgggtggatataacccaacatctcccccaatcgtcaccggtaatactattattataggtggctctgttactgataacttatcaactcaagagccttctggtgtgatccgtggctatgatgttaatagcggaaaattaatatgggtatttgatactggcgcagaagatcccaatgcgatgccaggtaaagagactcaatttgttcataactctcctaatgcatgggcgcctttagcttatgatgcacaaacggatgtggtctatattccgacaggagtaggtacacccgatatttggggaggcgatcgtcatccattaaaagagcgttacgctaattcagttttagcactaaaagggtcgacaggcgagctattgtggcatttccaaaccacccatcatgatttatgggatatggatgtaccttcgcaaccatcactggttgatatcaaaactgataaaaatgaaacaatacctgccatttatatcgtcacgaaaacagggatggtgtccgaaaatagaatctaa

SEQ ID NO: 306898 - DNA, 990 bp, Proteus mirabilis
atgagccaaagtacgctaagagtagacgagttatatactgatgatattgatgagaacatggaagagttcgatgaagcagccgcaacaaaagaggctgaaaatgaatctgacgctcaagatgaaattgaactcattgaaggagtcaatcagcgtgcgttagatgcaactcagctctatttaggagaaattggctattctccattgttgagtgctgaagaagaagtattctttgctcgtagagcgttacgaggtgatatcccatcaagacaacggatgatagagagtaatctacgtttagttgttaaaatatctcgccgttatacgaaccgagggttagctcttcttgacttaattgaagaaggtaatttaggccttattcgtgctgttgaaaagtttgatcctgaaaaagggtttcgtttttcaacctatgccacatggtggatacgtcaaactattgaacgtgccattatgaaccaaacccgcactattcgtctccccattcatatcgttaaagaactcaatgtctatttaagaaccgcaagagaattagcacataagctcgatcatgagccaagtgttgaagaaattgcgcaaacgctggataaaccggtcgatgatgtcagcaaaatgctacgtttaaatgaacgtatttcttctgttgatacaccgattggtggggattcagataaagccttactagatattatttcagacgaaaatgaagaagggccagaagcaaccattcaaaataataacctcaaggaaaatatcgtaaaatggttatttgaattaaatccaaaacagcgtgaagtattagcgcgtcgctttggattactgggttacgaggctgaaacattagaagatgttggtcgagaaattggtttgacaagagagcgggttcgtcagatccaagttgagggattgcgtcgtttaaaagatattctgcaagggcaaggattatgcatagaggcactttttaagatgaactag

SEQ ID NO: 306899 - DNA, 2565 bp, Proteus mirabilis
atgactgacagccaaaatttcgaatcccacacccccatgatgcagcagtatcttaagcttaaggcagagcacccagaaatcttactgttttatcgtatgggtgacttttatgaactgttttttgatgatgctaaaaaagcctcacgcttattagatatttcattaacaaaacgaggtcagtcggcaggtcaacctattcctatggctggcgttcctcatcatgcggttgaaaactatctggctaaattagtgcaattgggagaatccgttgccatctgtgaacaaattggtgatccggccaccagcaaaggccctgttgagcgtaaagtgatccgtattgtcacaccgggcaccgttacggacgaagcgctacttgaagagcgccaagacaatctattagccgctatctggcaagataaaaatggcgcttttggttatgccactttagatatcacctctggacgttttcgggtcactgaaatgccggatagcgaaagtatggctgccgagctgcaacgcactcacccagcagaactactctatccagaaacctttgagtcaatggcattaattgagcgtcagcaaggtttacgccgacgtccaatttgggagtttgagtgtgaaaccgccaaacaacaacttaatttacagtttggaacccgtgacttaactggatttggtgttgaaaatgcccgacttgcactttgtgccgcaggttgcttattacaatatgttaaagatacgcaacgcactgcgttgcctcatattcgtagcattaccatggagcgtccgcaagataccattatcttagatgcagccactcgccgtaatttagaattaacccaaaatcttgctggcggttgtgataacaccttggcatctgtacttgatctgtgcgtgaccccaatgggaagccgcatgctcaaacgttggatacacacccctttacgccagcgtgaacaattaattaaacgccaagatgcgattagcgccttacaacccctctattttgagttacagccttttttacgtcaggtgggtgatttagagcgggtacttgctcgtttagcattgcgatccgctcgtcctcgtgacttatcacgcatgcgccatgcctttcaacaatatcaagatatccaccaagtgcttgatcaggcggatatgccctatattaaagaattacagcagcgtatcagccagtttgatgagttgcgtgaattactggaaaatgccattgttgaaacaccacccgtattagtacgcgatgggggggtgatagcccctggttataatgcagaattagatgaatggcgagcattggctgacggtgcgagtgactatcttgaaaagcttgaagttcgtgaacgtgaaaaatggggtattgataccttaaaggttggctttaatggggttcatggttactacatacaagtcagtcgtggccaaagcaatttagtcccaatgcactatgtgcgtcgtcaaacactgaaaaatgctgaacgctatattattcctgaactaaaagagtatgaagacaaggtattaacctctaaaggtaaagcattagcaattgaaaaaatgctctacgaagagcttttcgaaaaactattacctcatctaaccgccttacaaaccagtgctgaagcgttagctgaaaccgatgttctggctaatctcgctgagcgtgcagaatcactcaattatacacgccctgaattaacagaaaaaacaggtattcaaatcactggtggacgtcaccctgttgtagaacaagtactgagtgagccatttatctcaaaccctctacaactcgcgcctcaacgccgtctactcattattaccggccctaatatgggcggtaaaagtacctatatgcgtcaagcggcattaattacgctactggcttatattggtagttttgtgcccgcagaaaaagcggtaataggcccaattgatcgtatttttacccgcgtgggtgcctctgacgatctggcttcgggtcgttcaacatttatggtggaaatgacagaaaccgcaaatatccttcataatgccactgaaaacagtttagtgttaatggatgaaattggccgaggcacttctacttatgatgggctttctctcgcttgggcttgtgccgaaaatttagcgaatcgcattaaagcgatgacactctttgccacacactattttgaattaacgacactgccagaaaaactagaaggcactgccaatattcacttagatgcagtagagcatggagaaactattgcctttatgcacagtgttcaagaaggtgcggccagtaaaagttatggtttagcggttgcggcattagccggtgtgccaaaagaggtgatccgccgtgcaaagcagaaattaaaagagttggaaaccctatctggtcattcaggggcaagccatgtagaaacgtcacaactgatgttattagcagatattgagccttctgaagttgaattagcattaaataaaattgatccggattcattaacaccaaaacaagcgttggaattgctctatcacttaaaagagctaaataaataa

SEQ ID NO: 306900 - DNA, 438 bp, Proteus mirabilis
atgttaaaaattagaatatcacgcccttcagaagcacctgaaatcatacaaatctggaaaaattcagtcgatgctacacatgactttctgacagctgacgatcgccaagagattgaaaaagaagttatcggttttttttccgaaacaccggtatgggttgctactaatcaacaagatcgcccactcggctttatgtttttacatgacggtcatctagaggcgctttttatcgatgcatcagcacgagggttagggataggaaaacagttaatatcacacgcattaactcttcatcctaatttaagcgttgatgtcaatgaacaaaatcagcaagccgtcggtttttatcagcatatgggctttcaaatatcgggacgttcggagttggataatcaaggaagagcgtacccattattgcatctaagtagagctaagtaa

SEQ ID NO: 306901 - DNA, 354 bp, Proteus mirabilis; identical to SEQ ID NO: 298387

SEQ ID NO: 306902 - DNA, 273 bp, Proteus mirabilis; identical to SEQ ID NO: 297876

SEQ ID NO: 306903 - DNA, 1254 bp, Proteus mirabilis; identical to SEQ ID NO: 297951

SEQ ID NO: 306904 - DNA, 357 bp, Proteus mirabilis
atgactatagaaaaaaatgttataccactgtcagaaaaaatttcagatgatccaaagaaatttctcgttattggatggactgtggttttattaggcttagcaatttttattttttgggctgctttcgcgccccttgataaaggcgttcctgcaataggaaacgtagccatatcggggaataaaaaaagtgtacagtcatctgttgaaggtattattactcatatttttgtaaaaaatggtgatccggtatctgccggacaaacactgatacaattaagccctattcaatctcaagccttagtaaaatcgttatcagagcaatatgataatactacaacaaaatcgtttattaaatga

SEQ ID NO: 306905 - DNA, 1620 bp, Proteus mirabilis; identical to SEQ ID NO: 299264

SEQ ID NO: 306906 - DNA, 156 bp, Proteus mirabilis
atgttcgacactggatgtaaagcatgggtagcaggtattgcttattgggtagatggttgtgagtggcaagtaagccccgagataggaagaacgaatccactacgcgctgctatggaattatttctattaatgaaggatgaggagaatgaaggctga

SEQ ID NO: 306907 - DNA, 177 bp, Proteus mirabilis; identical to SEQ ID NO: 305140

SEQ ID NO: 306908 - DNA, 1173 bp, Proteus mirabilis
atggcacaagattatcatcatggtgtgcgcgttattgaaataaacgaaggcacccgccccattcgcactatcagcaccgctattgtcggcgtggtttgcaccgctgatgatgcggacgaaaaagcctttcctttaaacaagcccgtcttattgaccgatgtatcacagggtatcggtaaagcagggaaaaccggcaccttagccagtaccttaaaagccattgcagatcaggctaaacctatcactattgtagtacgtgttgcacaaggtgaagaagaggcagaaaccaccactaatattattggtggcaccaccgacgaagggctaaaaacagggttacaagcactgttagcatcacaagcccaacacggcattaaacctcgtattattggcgtgcccggtcacgacacattagcggttgccaatgagattgcggtgatttgtcaaaagctccgcgcctttggctatgtttcggcttacgactgtaaaaatatcagcgaagcaatcaagtaccgtgacaactttggtcagcgtgaattaatggtcatttttcctgattttacctcatgggatagcaccaccaacagcgaatcaaccgcttatgccacagcgcgggcgttgggtctgcgtgccaagttagacaatgatatcggttggcataaaacgctatccaatatcactgttaatggtgtgacgggtatttctaaagatatctattgggatttacaagatcccgcgactgatgccggtttactgaatgaaaaaggggtgacgacacttattcgtcgtgatggttttcgtttttggggttcgcgtacctgttcggatgatccactgtttgcctttgaatcttatacccgaacggcgcaagtcctcgctgacactatggcagaagggcagatgtgggcaattgataaaccgttaacgccatctttagcgcgggatatcgttgaaaccatcaatgcaaaattacgttcactggtcagtcagggttatttgttaggtggtgaatgttggtatgacccaacatcaaatagcaaagaagcactgaaagacggcaagctcacactggattatgactacacacccgtaccaccaatggaaaatctgatgttacgtcagcgtattaccgataaatacctgatggatttcggtaacaaaatcaaggggtaa

SEQ ID NO: 306909 - DNA, 921 bp, Proteus mirabilis; identical to SEQ ID NO: 303872

SEQ ID NO: 306910 - DNA, 483 bp, Proteus mirabilis
atgtcagtgctactgaatgaagcagcaaccttgtttcgtgttaaatattatcgcaacggaagccatgccggatttattttatacgtcagtgacgcctcacaaaaccaaagtgatattgataaaattcgtaacgcaatgcaaaactcaaaaggccccggcaatttccgcaacctgtttatccacgcaccgaacggcaagaaagacggcgtgcaagttattccattaagtgagattgcagcaaaagatgaatttctcaatatcaacaatgtcagccgtgacaatatgttagctgcgcaccgcgtaccgcctcaaatgatggggatcattccacagaataccggtggctttggtgatgttgaaaaagcagcaaaggttttctttcgtaatgagctggcaccactgcaaagcaagatattacaaatcaatgattggttaggtgaggaagtgattaagtttgataagtacacattagatgatgagtaa

SEQ ID NO: 306911 - DNA, 780 bp, Proteus mirabilis
atggataaattaatttcacatttgccaaaagaaaagcgcttagttgaaccgtttgcgggttcttgtgctgttatgatgaacacagaatataacgaatatttaattgcagatgccaatcaggatttaattagtttatatcataatgtcgtagaacatactgaaataatggcacgtaaagagttctatgcgtgggaagaaaacaatcataaaaatgattacattgctattagaaagttatttaattcaattaagatattagataaaaacgagtgtgatcaatatatacaatctgctcggtttttatatttaaatcgtcattgctttaatggattatgtcgatataacaattcgggtgaatttaatgtgccattcggaacatatgcccgtgtttattttccagaggaggaaatcagacaatttgctgagaaagccactaatgccattatcgcttgtttagaatggcaagatactttgtcactcgttgatttcggtgatggtgtttattgtgatcctccatatatgggagatgaaggtagttttactaaatatcatcacacggattttactcacgctcatcaaattgagttagctcaagcattaaaggcattaaatcaatcacaaggtaacccgattactgtctctaattccattcacgccaaagagctgtatgccgatctcggttttattattcacgagattgatgcgcctcgttctatttctgcaaatggaaaacgccaatcagcaaaagagattatcgccgttttgccggaggtgtgctga

SEQ ID NO: 306912 - DNA, 501 bp, Proteus mirabilis
ttgtctttttttggggcatcacctgattatattgctgaaaactcaccccgaagccactatagaaaattgagtctaaatatacattatcaatatttatttccttactctgtctcctatattacgtctttttatggtcaatatacatctgataatctttatagtgtggaaaaaataaccatagatggattaaatgcggttcgtggtactaaacaaaataagcttagtgccaatagaggactttattggcgtaatgaaattaatacaccatggataaattcatttttaggtcaatggcgttttattacggctgttgattatggcgttatctattctgatcaatatgaaacaaagcagcagtctttattagctggcgctatggggctttcattttatcgttcccctttttcttcacaactattgataaacaaaccattcatttatccaaagtggtcaaatgctaaccaatggtctttatcttggtcaatttcttttgctctttaa

SEQ ID NO: 306913 - DNA, 336 bp, Proteus mirabilis; identical to SEQ ID NO: 302672

SEQ ID NO: 306914 - DNA, 336 bp, Proteus mirabilis
atggtgcccgcgacgttttgcgcttcgcctttagctttttttaattcatctacaaacttctgtaattctccttttcctgcttgttcagcaagcacagataatgcagaaaaagcctcctcaccggcaatcgctttaaagaagcctgcccgttgtgcattacccatcttagcggttttcttatccaactcagctaataactcaggaaagtcgcgtaagttcccttttgcatcgcgggttttaatgccaagttcttctaatgctttggcggccattttcggtggctccgccaaacgtcctaaaattgcccgcaatgaggtacccgccattgagccttga

SEQ ID NO: 306915 - DNA, 483 bp, Proteus mirabilis
atgtcagtgctactgaatgaagcagcaaccttgtttcgtgttaaatattatcgcaacggaagccatgccggatttattttatacgtcagtgacgcctcacaaaatcaaagcgacattgataaaatccgtaaagcaatgcaaaactcaaaaggccccggcaatttccgcaacctgtttatccacgcaccgaacggcaagaaagacggcgtgcaagttattccattaagtgagattgcagcaaaagatgaatttctcaatatcaacaatgtcagccgtgacaatatgttagctgcgcaccgcgtaccacctcaaatgatggggatcattccacagaataccggtggctttggtgatgttgaaaaagcagcaaaggttttctttcgtaatgagttggcgccactacaaagcaagatattacaaattaatgattggttaggtgaggaagtgattaagtttgataagtacacactagatgataagtaa

SEQ ID NO: 306916 - DNA, 207 bp, Proteus mirabilis
atgtctaaagaaagtgatgtaaccgatttaattaaagccgttcgagaagatgaaagaaaatctcgggcggttcttttttctgcccgtttacgcaaattagcatcaaaagcactaagtgaacgaatggagccttcacaagtatttcaattattagaaggtgaagccgagtctatcgaacatcaagcacaggaatggaattatgtctaa

SEQ ID NO: 306917 - DNA, 315 bp, Proteus mirabilis
atgaagaaaatgccctataaagatccaagtaatattaattggctgacagcgttattagttagcttaatggcgctctttggcagtatcgccagttatgccaataaggtgttaaaaggcgaaccgttccgctttgggattttaattgcacaaattattgtttccatgtttgcgggtatgtttgtcctgttgggagcaagttattttcaatggcaaatagagatagctggtagctttgccggtatggcgggctggtctggcgctgcattggtgagtgcattagaaaaacaattcttaaggaaggcatcaggtgagtaa

SEQ ID NO: 306918 - DNA, 600 bp, Proteus mirabilis
gtgcgctatggctatgactcaaagccgtatgaatttaagcccggtagtgtatttcagttatacgaacccgatttgaatcaagagctatacgggttaccagaatatctggcctccacgatgtcagtgctactgaatgaagcagcaaccttgtttcgtgttaaatattatcgcaacggaagccatgccggatttattttatacgtcagtgacgcctcacaaaaccaaagtgatattgataaaattcgtaacgcaatgcaaaactcaaaaggccccggcaatttccgcaacctgtttatccacgcaccgaacggcaagaaagacggcgtgcaagttattccattaagtgagattgcagcaaaagatgaatttctcaatatcaacaatgtcagccgtgacaatatgttagctgcgcaccgcgtaccgcctcaaatgatggggatcattccacagaataccggtggctttggtgatgttgaaaaagcagcaaaggttttctttcgtaatgagctggcaccactgcaaagcaagatattacaaatcaatgattggttaggtgaggaagtgattaagtttgataagtacacattagatgatgagtaa

SEQ ID NO: 306919 - DNA, 483 bp, Proteus mirabilis; identical to SEQ ID NO: 306910

SEQ ID NO: 306920 - DNA, 285 bp, Proteus mirabilis
atggtgttgtctcatacttatgcgagtaaaaccaatgctgaacgtgccgcgaaagccgcgtgggaaaaaatacagcgaggtgttgcctcttttagtattacccttgcgaaagggcgtgcggatctctttcctgaattacccgtaaaggttagcggatttaagcctgagattgatgaggcctattggacgttggtcacggtgagtcattcattgaacaatagcggatttaccacctcgttagaattagaagttaaaagcagtgagatagatatggataaggaatag

SEQ ID NO: 306921 - DNA, 315 bp, Proteus mirabilis
atgaagaagatgccctataaagatccaaataatatgaattggtttactgccttattaattgccggtatggcggtttttggtggtattgccagttatgccaataaaatagtgaaaggggaaccgttccgcgttgccatcttatttgcacaaattgttgtctctatgttttcaggggcattgattttattcggtgcaagttattaccagtggcaacctgaaattgccggcgctattgccggtatggcgggctggtctggtgctgcattggtcagtgcgttagaaaaaagattcttaaggaaggtctctggtgaataa

SEQ ID NO: 306922 - DNA, 282 bp, Proteus mirabilis
ttggcgattgttatttcacctaaagctaatggttctatgatggctaaaggtagaaatatattagcaacctcagtagagggacttggtatatcctttagcgatataacgatggataaagatacatcaatcgatgttggtaaaaaacaacaaatttatccagagatattaaataataaaggtaaaatagatatacaatctgaattaattaatacaaaaccaataaatgaattacctaaaggatttttcaatgcatcgatgtcagtgctcattacttataattag

SEQ ID NO: 306923 - DNA, 213 bp, Proteus mirabilis
gtgattgacggtcgggttcgtcgtgaagtgattgcgtggtatgactctgcagtaaatgtgacggctggcgttgttggggcacatgtgagtcgtgttattagtgctgaaattaaatctatctctgaattgatagaggtaatgactcacgttgctaaactgtgcgaaacggccattgaaattattgatccgaagcatttaggcggtgtgcggtaa

SEQ ID NO: 306924 - DNA, 213 bp, Proteus mirabilis
gtgattgatggtcgtgtgcgccgtgaagtgattgcgtggtatgactctgcggtaaatgtgactgctggcgttgttggtgcgcatgtgagtcgtgttatttgcgcagaaattaagtctatctctgaattgatagaggtaatgactcacgttgctaaactgtgcgaaacagccattgaaattattgatccgaagcatttaggcggtgtgcggtaa

SEQ ID NO: 306925 - DNA, 438 bp, Proteus mirabilis
atgcgttacctcccaaatggcgatgcagttactaatattacattagccaccagcgattcatggaaagataaacaatcaggtgaaaccaaggaacgtgtcgaatggcatagagttgtgatatttggaaagctcgccgaaatcgctggagaatatctgcgtaaaggttcacaagtttatatcgaaggccaattacaaacacgtaaatggctagaccaaagcggacaagaccgatacacaacggaagtggtagtcaatgttggcggttcgatgcaaatgctaggcggtaacagtggtaatcaggcaggaagccagaagccacagcagaatcaaggatggggtcagtcgcagcaaccgcaagcaccacaacagcaagctaagcaacaagcaccacaatatcctgaaccatcaatggatttctcagacgacatcccattttga

SEQ ID NO: 306926 - DNA, 327 bp, Proteus mirabilis
atgacagataaactcaaagaagagattaacgcacttcaacaagaagtagctagaggtcacgtatatgagtgggagttacacaggctaaatttactactcttagtagctgaacattacctttcagaaaataatcccaaagaagctcacctttgggttcaaagtatatttcagtggattgattcagaatttcacgaagagatgaaaaacaatgctggagatattaacgcttggtttaataagcaaatggaaggcgcagttggtaccgagaaagcgttaaaagtaactcgtgaattatatcctgaaatcgaaaagctacggatagcttaa

SEQ ID NO: 306927 - DNA, 141 bp, Proteus mirabilis
atgaaattaaattcattacagcttcaacaacacaaatataaattatcaagtgattcatttaaaaatgaaaataacaattctatttatattgttagtctcattttatttatgggttatttattaatatcagctttaagttaa

SEQ ID NO: 306928 - DNA, 729 bp, Proteus mirabilis
atgatgatctctttgaaagttatttctctgttattggattatcccagcgaagatctctgggaacatcgtaatgagatcattgatgcattgcaggaagctgacgagcttcctgtcacgcaagtcgcaaaattaatggcgtttattcgtgaactcacgcaacaagatctgctggatgcacaagcgaattacagtgagatttttgatcgaggtagagcgagatcgctattgttatttgaacatgtacatggtgaatcgcgtgatcgtggtcaggcaatggttgatctgcttaatcagtatcaacaagcagggatcaccttaagtagtcgtgaattgcctgattacttacctacttaccttgagtatttaacgctattgcctaccgatgaaagtattgaagggcttaataatattgcccctattttggcattgctgagtgagcgtttaaaacagcgaggcagtgattatcacgctctttttgatgtattgctttgtctctcacaaagtgagttagacgcttcacaactggcggctcaagtagaaaaagagcctgtagatgatacgccggctgcattagatgccgtatgggaagaagagcaagtgacgtttctaggtgaaagtgcgcaatgtggtagtaacaatattagccagcatcagcgacgttttgcgcaagaaacgcctgttcaatatctcaatgtcggtaattcgctagatatgggagcacaaaaatga

SEQ ID NO: 306929 - DNA, 1830 bp, Proteus mirabilis
atgaaaatgcacaacattcaatggcattatcgcttttcaattattaatcaaatcgctattttaatgttgcttttcacactatttggtgtggtaggtatggctatttctaaccacattattttaagcgtacaaggcaatgctcacgccattaataaatccggctcactgcgcatgcaaagctatcgtttactctcagccttaccccttgatgataagcaccgtgattatctacaagaattagaaaatgatttagatagtaaagagttacgtcaagtattaagcacctcatcactgcaatcacaatatgtacaactgactcattactggaaagagacattaaaaccaactttgtcagcagccaaacagcctaatgatgcgaaacaagaagttatcttttttgtttctcaactcgatacattagtatcaagtattgaccaacttactgaacaaaaaatccgcctagtcgcttatactcaacttatctttaccgctcttaccttattactgctgtttggttctgtttggcattttcgtcgtcgcttattactgccttggcaacaattgatgtccatggctaattctattggacatggtgatttttcaactcgttttcggcctcgtcctcaccatgatgaaattgccacactaggaattgcacttaacaccatgtcagaagagctatcgacgctctacagtgaattagaacaacgagtcattgaaaagacccatgatttacaacaaaaaaataaggttctctcttatctttatcactcaagtcaacaactgcattcccaagcgccactttgcgctcgcttaaggcagatccttgcagagctacagcatattattcctgatagctatttgcagatccgtctatatgaagataatcaacatacattatttaatgagataagcttagccccttcctcacgccctgaatattgtccaacgcctgattgtgagcgttgcaatgaagataccagcatcactacaccgttaaataatcgcttattacattgggaattgaccgatcagatccaccgctatggtttattcgtaatgcagctaccggaaaatagtgtacttactgacgaacagaataatttaatgctcttattgactaagcaaatttccgcaatgcttgccatggagcaacaaaatgaacagcaacaacagctattattaatggatgagcgttcagcgattgcacgtgaattacatgattcgattgctcaatcgctatcatgtttaaaaatgcaggtcagttatctacaaatgcaatcgaaaaccttgccagataactgtcaaaaactactaaaagagatgcgagaagagctaaatgtggcttatcgtcagttaagagaattactgaccacatttcgcttgaaattgacagagcctggcttattagccgcattagaaaatacactaaatgaatttaatcaacgtttagggtttgctatccattttgattatcagttacctgcaaaatgtgttaattcacatcaaagtattcatgtggtgcaaattgttcgtgaagcattaaataatattctgcaacatgcgaatgcaaactgggctgaagtcgcattaacacttaataatggcatcgttgaactgcaaattaatgataatggtgaaggtattacgcctaatcccgaaaagataaatcactacggactgattattatgcgtgaacgcgcgaatagtctgaatggctcttatagtataagggttcgcaaagaaggtggaacgcaagtatttgtcacatttccgttaatcactacccataaagatcctatcgaaaagggagcaaatcataatgaataa

SEQ ID NO: 306930 - DNA, 663 bp, Proteus mirabilis
atgaataatatgggagcagtcgcagacaaagcgactattttattaattgatgatcacccgatgttacgcaatggtgtgaaacaacttttaagtcttgatacaacattaaccgtcgttggtgaagctggcgatggtattcaaggggtaaaattagctgaagagttagatcctgatttaatcctactcgatctcaatatgccgggtatgaatggttttgaaacactcgatcaattgcgattacgatcgctatctgggcggatcgttgtgtttagtgtatcaaactacagtgatgatctgatcaccgccttaaaacgaggagcggatggctatctcttaaaagacatggagccagaagagctattagccgctttaaagcaagcagccgcagggaaaatggtggttagcccaacattaacccccattttagcgcagtcgctacgagaagatcgttctgaaggtgagcgggatatagaccaactcaccccacgagagcgcgatattttaaagctgatagcacaagggctatccaataagatgatcgcacgtaaactcgatattactgaaagtacggttaaagtacatgtcaaacatctactcaaaaagatgaaattaaaatctcgtgttgaagtcgcggtttgggttcatcaacaacgtgtggattaa

SEQ ID NO: 306931 - DNA, 441 bp, Proteus mirabilis
atgcaaggtattaagcgaaaaattgtctatgttaccgcttatgaagtatttggttgggttatctcatcggtaggactggcgcttttagccgatagttcaaccgctgttacggggccactcgcactcattattaccactatcgcggtaagttggaattttatttataactgtttatttgaattttgggagagtcgacaaaagtcgagaattcgcacctttagacgccgtcttgctcatgcggtaggttttcagcttacgttggtagtttaccttattccgctgatagcttggtggctaggggtttcattatggcaagcactggtgatggattttgcacttattatcatcatcccttgctatacatttgtctataactgggtatttgacaaaatttttggcttaccaaaatcagcattgcccgaagatgtgcctgttgcttaa

SEQ ID NO: 306932 - DNA, 549 bp, Proteus mirabilis
atgaaaaagtggagtttagcagcactattacctggttttttaacgttaaatagtcaagctgttgctagttcaacagggctacctaattctgaattaacatttgaacctgaagatctcgtgtttgctcctttaaatacagaaacaccgttttatatagcagggcatagaagccatagttctcatcgaagccatcgtagtcatagctctcatcgctcttcatctgggggaggatattatcgaagtaccccttctacacaaagttattctcaaccacaaacaaccaatagaacaacttctaatttatctaataatgatttttcacaagcagttaagaattctaatgttaatcaggaacaaaaaaagcgcctgataatgagggtacaatatgccctatttgaaagacattattttaatgggatcattgatggtattatggggccaacaacacgtcaatctatacgtaactatagaagagatgcaaaattacccgctaatgtattaattgatgtagatttattaaattcattgggaatttatgcaacttattaa

SEQ ID NO: 306933 - DNA, 1110 bp, Proteus mirabilis
atgcttgaggttattaggaaagatttattcgatattagaagtaaattagacaatggctactatcaaatatttaaagatagactggtagatcctacattctatttagataatattcttgttcaacaagaaggaaaaattttatcgtcgacactctgtaacggtgcaaaatatataatagcagatagtgaactttataatagtattgaaaatggtgatattatatctgtttcaaatagtagaattagagttattttatctcgcaaggcaaatcataatacgttacttgttactgagcgttgtaataatttatgtcaattttgttctcagccccctaaaaatagagatgattcttggcttttagatgatgctctacttgcgattgctgcttttaatttcgatggtgttattggaattagtggtggagagcctttactttatggcaataaatttattgattttattagagaaataaaaagattggcaccgaggaccgttttacatgtattaacgaatgggcgaaggttttctgatatttattttacaaagaaattattatctgaagcaaaagatatgaatatttcatttgggatccctctttattcatctcataaagaaattcatgatgagttagttgggcataatggtgcatatgaagaaacaattatgggaatagtaaatgcaggtaatttaggcattaatattgaattgagaataatcccaacaaaaataaattatcttcactttcataatattgttgaattatgtgctagagtgttctcaaatattaatcaaatttctattatgaatcttgaacccgttgggtgggctaaaaaaaattgggataatttatatatctcaccagataaatatatagaaaatctgaatcttgctatcaacatggctgatattagtcaattacctatagctttatttaattatcctttatgtcatttacctaatagtttatggaaatatactattcaatctatttctgattggaagaattattatccgaatgaatgtgaccaatgtaaaatgaagagtcattgtggtggatattttagttcttcatatggaaaatatcatcaaacagcgagggcgatattatga

SEQ ID NO: 306934 - DNA, 318 bp, Proteus mirabilis; identical to SEQ ID NO: 306764

SEQ ID NO: 306935 - DNA, 375 bp, Proteus mirabilis
atgaagattgaaacaataaaaaaactttcaaaacaaagacgcaagttttatattggttcttctttgaatattgcaattgataaaataaaatatgcacaacaaaagcaagctctattatcaccaattaaagaaacggcacagatctttgagtatgtaaaaaacaataataaaaagaaagcagcgatatatgcactagattatctcattttttgtttttctcatggttgttgtacaatcaaaaaatttataagaagagaacttatgtttttattggaaaggatcaagcattttatcgcttatgagttaaaagagatcattcaaccttcaacatttttctgttttaattttttaaaagcgttaaaaaagcatttataa

SEQ ID NO: 306936 - DNA, 417 bp, Proteus mirabilis
atgtctgtagtcgttggtgttggagtgatcatcgtcaatgaaaaaggtgaagtattattaggtaaacgctgtggtaaacacgccccttattggtcaatttttggtggccatgtcgatccgggggaaacctttgagcaatgtgctattcgtgaaattgaagaagagattggcattaccatccctactcctgaagtgattgggatcagcaacaatctacaaacttatcaattagaaggtaaacataccgtatctatctgtatgattgcgcaatatcaaggtggcgagcctaagttaatggagccagataaatgttctgaactacgctggtgctcacctgatgatttacctgaacctcattttgaagcgagccgtaattctattgctttatggaaaagtaaacgtttctatcaaccttaa

SEQ ID NO: 306937 - DNA, 546 bp, Proteus mirabilis; identical to SEQ ID NO: 296552

SEQ ID NO: 306938 - DNA, 1284 bp, Proteus mirabilis
atgtctagttctcaactgaaaaaacaatatattggtgaacatcaattatctccagaaacgttaatgatgagctatggatacgatccattgttatcggaaggctctgtcaaacctcctgtatttttaacatcgacatttatttttaaaagtgcagaagaagggaaaaatttttttgatacggtaagtggaagaaaaccccttccagaaggagaaaaagcgggtttagtctattctcgttttaaccaacctaatagtgagatcgttgaggatagattagcagtttatgaaaacacagcatcatgtgtcctcttttcatcgggaatgtcagctattacaacgacattaatggcttttacacaacctggcgatgttattttacattctcaaccactttatggtggaacagaaacattaatagccaaaacattcgctaagttcggtattcaagcaacaccatttacagatggtttaaatttagcacatatccaatcgcaagctgaaatggctagccaaaaagggagagttgcggtgatatttgccgaaactcccgccaatccaactaattcactggttgatattcaagcgttaaaaatcgttgcggataaattagaaacaagccaaggctatcgacctattattatttgcgataacaccttattaggacctgtttatcaacatcctatagagcaaggcgctgatatttcactctattcattaacaaaatatgtgggtggacattctgatttagtcgccggtgctgcaatgggatcacgcgagcttattaatcaagttcgcctattaagaggtgcaatagggacacaacttgatgcgcattcttgctggatgttaggccgctctttagaaacattgcaaattcgcatggaaaaagccaatcaaaatgcgctattagttgcacaatttctacgtgaccatgaaaaagtgaaagtgatccactatttaccttttgtagatgaaaatagtattgaaggtcaagtatttgctagacaatgcacaggcgcaggatcaacattctcctttgatattgttggtggtgaagcagaagcttttcgttttctcaatgcgatgaaaatatttaaattagcggtgagtttgggaggaaccgagtcattggcatgtcatcctggctctaccacacattcaggtgttcctatggaattacgccacaatataggtattcaagaaacaaccattcgtttatctattggtattgaaaatccttatgatcttattgctgacttatctcaagcattagatcatgtttaa

SEQ ID NO: 306939 - DNA, 504 bp, Proteus mirabilis
atggctaaattattcaagacgattgatttaaatgttaaacataaaagtaagcagtgcagaggtcgttctgctactacactgatctatttcgtgattatagggatggcaagtattgccagcgagtcatttgctgttagcaaagatattgaatttaactcagatattcttgacttaaaagatcgaggaaatattgatttatcaagcttttcccgagcgggatatattactcctggcaagtatgagttaattattaatattaataacaatgaattaagtggaacttatcgtgttgactatattgtgcccaaagatgatcccaaggcaagcgaaccttgtatctcacccatattagttaagcagtttgcactcagaccagaatggttaaaaaagttaacttggaaagataagggtaattgccttaatgaggcatcgttaccaggtatgagcctgaggacagatttaggtagtggggtttttttattactcttcctcaagcttatctag

SEQ ID NO: 306940 - DNA, 783 bp, Proteus mirabilis
atgaagaaagttttaaaatgggtgttgattgttcttgttgtgctaatcattattggcatatttgtcggcaaagataaagatggttctgataaaaaaccagaagcagtaaaatcttctgaacaaaaaatagcaatgacagacaaagaatacaagatggctgagttaatcattaacaatgatgtgatgaattcactgaatggtaatgattcacaaataactacagattatattcgtgttacagctagagagatgcaacagacttatgctagcaatgaggcaagaggagataaaacctataaaggtaagaacattattattacaggcattattaaatctatagactcaagtattggcgatatacctgttgttagcttaaacacaggagagatgttctctactgtaagacttcatctagcaaaaccatacagagatatggctgctgatttagataagaatcaaaaaataacacttgcctgtgttggtgacagcgtaattataggctctccagggctaaaagattgcaaaccggtacctgctgtcgcatcaaaaataacaaacgagcaaatgaagtttgttaataaatttattaagggaaacaatgaagtacctaatgaaataaagcaaatagtattacttgctaaagtattaggtaaagaaacaggtgatttctctcaatgccaagatattaactctcaatgcatgaatgactcagtaaaagtattaaagagtattagcaaagaaaaactacaagaagaagctaagttacttggcgttgaaatgtag

SEQ ID NO: 306941 - DNA, 498 bp, Proteus mirabilis
  misc_feature (455)..(464): n is a, c, g, or t
atgacagatactaataaaaaaaagttaacaatcaatgatatagccaaactttgtggtgtgggcaaatcgactgtttcaagagtacttaatcaagatcctatggttaatgaagaaacaaggaaaaaagttaactcaattattgagaaatataaattcacgccgtcaaaatctgcacgagcaatgcggggatactctaatcgttcttttggtattatcgtcactcgcctggattcttatgcagaaaatcaagcggttagtgccatattaccgatcctttatcaaaacaacattgatcctattattttagaaagccaatttagccaagccaaagtagaagaaaacttaaaaatgctcgcccaccagaaaatcgatggcgtaatattatttgcattttcagggatcaatgcggctaacttagcaagttggaaacaaaaaatggttgttatcgcaaggcnnnnnnnnnnggccactagaaggttttgtttccatttgtcatga

SEQ ID NO: 306942 - DNA, 459 bp, Proteus mirabilis
atgcattatttccatcaagacaaacattatcaacatataagttttatcgggatccaaattaatgatgaaacaacgggtttattacgttatcaaacttatcttcaatattgccagcaacatcaattaatatctcaagctcaacttggtgaacttaattatcaaagtggctatttacttgccaaacaagcattagcaagcaagcctcaagctattttatgtgcgaccgactctctggcctttggtgtacaaaaatatttagccgaacagaaaatagatcatattgaggtggcctgcatcggtcgtaatgatctactcacctttttatttcctcaaactaaattctatcgattaggttttagagaaagtggacaagaagctgctaacatattgatacaaatgctagaaaaaaatattcctgcacaaaaaatcattatatcaagtcatgacttaaacccatga

SEQ ID NO: 306943 - DNA, 453 bp, Proteus mirabilis
atgttaaatggcgatggcattacctataaaaatgaagaactgacaaatgatgaattttggcctgatttaaatttaggtgattttcaaaaaagtcgcgctattcccgccaatatcgatgctgattttattgctgatgcattattaaccacggtcacagaaattaattctgaattaaaagacgtaaaaagttattggctatcaaaaggtgttaatcaggcaaaagacgccccaggcgcaaaaataaaaggggtgaatgccctttgtgcgcaatataaaaaagcggtgtatgccagggcaaaagcggatttattgggtgaatatttgtcgattgtcagtcgagcgcccaatccacagcaagaaagcgacgaattacggtcacggttattagcagaatcaacttttgttattcgcaatatgaaacagttgcctcgcattacggtgaaaataatatga

SEQ ID NO: 306944 - DNA, 477 bp, Proteus mirabilis
atgacccgactacaaaaattgacggcgttcttacgtgcaaatttgcctgaacccgtatttgcaaccgaatttagtagtgagatggatgatattacatttaaacgcgctcacaatgatttaggcgaaaaacaatatcaaattttaacgcaagaatatgatgcggtaattgcgtgggggcgttggccttatcgtgaaattgatacacgttatattcccgtattaattgaggcatggtatcaagatttagaaacggattttaccgaacctgatttcgatgatgaaccaccgactattgatgttgatgtgattgacgatgatatcgcgatggttgtagtgacccttaaattaagtgattccattgtgttaaaagaagatgagaaaggccttgtgccctttgacggtaaacgttggtcattagccaatcctgaagtgttatttgctgaaaatattgatgtgatcccccgtggtgtgaaatga

SEQ ID NO: 306945 - DNA, 699 bp, Proteus mirabilis
atgagcattcaagggcaattaaacgaaaaacaattaaaaaagctacgagaacagcttaaaaagttggaattaccgccgaaaaaacgccagcggttactttggcgaattgcgaaatatggtgtgattgttgcttcaaaacgcgcggtaaaaaatcagcagacacctgatggtgaggcatggcaagggcgacacggtaactacaaaaaaaagatgctccgtaaaatgcctaagctattaaaaattcgtgaaattcccgaaaaaggcgtagtccgcatttatctcgggggcggaaattatcgcaatggcagtaaacctgtgggtgctggtgtcgtgggatatagccagcaatatggtatgacagcaaaaattagtcgtaaaaatgccaacgataataatatccgaaaagcaacgagtgagaagaagccagaacctaccgcaacaccgaaacaagccaaaaaattacgggcattgggctataaagtcaaaaaagggaagcgttgggtaaagcctcctttaaaagagattgcgggaaagatgcgtttttttcaggcggggttattaattcgtcttttacaaaataaacctaaaaaaaccagttgggaggtagatatccccagtcgtgagtttttaggcatcagtgatgaagattttatcaaagcgttagagagacaacttcaaggcatcggctacggtgcataa

SEQ ID NO: 306946 - DNA, 453 bp, Proteus mirabilis
atgagcggaaaacggatttcggggcagtcgattgattttaatatcgacggtgatttagttcatgttgagaaagtcagtctatcgattacagataatacgggcgttgctcaaacgaatggtgtgcctgatggttatgtgaatggggatgtgtcggcagagggggagctggaattatccactaaatatctcaacgtcattaccgctaaagcccgtagtgctggctcttggcgtgccattcctttagtcgatttgatgtggtacgcgaaagcggggacggaggaacttaaggttgagtctttcggctgtaaattaaacgtcaccgatattttagacgttgacccgaaaggcggtgccgtgatgacgcataaaattaaatttattgtcacctcaccggactttgtgcgtattaacggtattccatacttagagtctgaattaacagacaaactgtaa

SEQ ID NO: 306947 - DNA, 294 bp, Proteus mirabilis
atggaagaacataataaaacactgatttcactgattatcttaggggcattgatagctattggtaaaatgatgtcagggagtgaacctattacgctacgtctgtttattggacgcgttattttaggttcagcggtgtcattaatggcgggagcattactgatttggatccctggtatttctcctttagcgattacggggttaggttcagcgttaggcattgcaggctttcagttagtggaattgtggctgaaaaaacgaggcagtgatttactgacagggaagttaaaaaaatga

SEQ ID NO: 306948 - DNA, 333 bp, Proteus mirabilis
atgacactcggtgaaaaacaacgcaagtttacgcgcatgattgcagacttgattatatttgcttatgacaacggctatgagctgacattctcagaagcgtatcgcacaccagaacaagcaaagttaaatgctaaatcaggcattggtattaaaaacagcttacatactcagcgattagccgtggatttcaacctgtttaaaaatggtgtttatctcacaaagacaactgaccatcagccccttggcgaatattgggaatccattggcggtacgtggggcggtcgtttcaatgacggtaatcactactcgttagagcacaacggcgtgaaataa

SEQ ID NO: 306949 - DNA, 375 bp, Proteus mirabilis
atgaaacaagcaacggtgattttttttgcgtttattttgactttttcggcgggctggctggttaaaggttggcatcaagacagtctagaagtggtcgcattaaaaacggcgaatgaagtcaataacgccagtttaaaggctcaacaagatttagcgagtcaatcagcaaggacgttagaaaataaattagaggaactcgccaatgtgcaaccgcctgaaatacgcaccgaaattattaagcctgtgttcactaatctttgtgttagtgatgattttgtcaggatgtacaacgaagcaatcgacagtgccgaacgtaccctatcaggaaaatctactgacaaaatgcccgacgacattaccaaagttaaacggtaa

SEQ ID NO: 306950 - DNA, 270 bp, Proteus mirabilis
atgagtaccaagaaaaacacaattactttagtcgtgatgggcaaagagctggtttttgaacccaatatgaccgcgtacaatggctggttaaatgcgatttctgccgacgataaagtggcgcctactgttacctatttgcgccgaattattgcccctgaaagcaaagaagcattaaccgatattttaaatatccctggttcggcaatgcagttactggaaaaagtaaactcagaatatgcgccaaaactggatattgaactaaaaaactaa

SEQ ID NO: 306951 - DNA, 1026 bp, Proteus mirabilis
atgaagttactattaacgccgtatattcaaaaagaattgggggttgtgttgttgaaacctggtgctgagttgcttgagcaatttagaaaccatcagcgtgtgatcatcagtgatgtaccacagagtttagatgtgttgccctcaggcgcattaaccggtgatgaacagccgattttaaataatcagcacattgttcaatttctcaatagcaaaaaggtgatccacaccatagataaagtggcaccaatggatacgtgggtcgctcatcatattcattgttgtcagattaataacgatgcagataactatcatcatcatgaattggtgaccacatttcatgaagcgggtgtgatccgcacttgttggtatcacgataatcatattcgaaactcatcagcagggtgggttgctgagttggctcataaaaatcgtattgattggatgttagatactattcgttttcgtttgagattagatgatggccaccagctgacgatacctgattttttcacctttgctgttatgcataacgttatcgatgaattacctgatgccatattgcggagagtgttggactggcctgataaacccaaagaacgcagagtacatggcggatttcctgaggctgacattgttccaaatgaaatgtcagcattatctgcaatgagcgggcgtttagaggcgataaaaccggttattaaagttgctgtcgatccggagccaccagcctcatttctgctgaaacctaaaatgcaacgttgggaaaatacccaatggttgcaatgggtaaaaactcaaccgtgttgcgtgtgtgggcaacaggctgatgatccgcatcacatcatcggtcatggtatgggaggcatgggtactaaagctcatgacctattcactattccattatgccgcattcaccatgatgagttacatcgagacccaaaacaatgggaagcgactcacggcaatcaactcgaattgttatttcattttttaaaccgttctttaggtatcggtgcatttatttaa

SEQ ID NO: 306952 - DNA, 165 bp, Proteus mirabilis; identical to SEQ ID NO: 305612

SEQ ID NO: 306953 - DNA, 465 bp, Proteus mirabilis
atgaatagtattctaactttttctaaaataaagcttctttttttaatgctcttaactctatgtgtcattaaccaagcatatgctgctgtatcattaggggcaactagagtcatttattttgcaggtgaaaagcaagtaaaattaccagtaattaataatgatgaaaaacgttatttaatacagtcttggatagaaaatagcgaaggaaagaaagataactcttttgttattacgcctcctctattttctatgcagggtaaaaaagagaatactttaagaattatagatgcaactaacaataaattaccgaaagatagagaaactttattttggttgagtgtaaaatctatccccgctgtagaaaaatcacttgctaatgagaatatgttacaacttgcgattattagtaaaataaaattcttttatagaccaaaagatcacgtaataatgacacacttattataa

SEQ ID NO: 306954 - DNA, 645 bp, Proteus mirabilis
atgaaaaaagtaaatgaagttattggcgaaaggttaaaatccattcgtgaatcaagagggctaagtcaagctcaattagctaaattgtgcggctactctgctgcgtccagaataggaaactatgagcttggagagcgcaagattagcgctgatgatgcgattgttataagtgaagctcttggtatatcacctgccgaattaatgtttggcagtcaaagtgagcaagtgatcaaaaattatgaataccctctattcacaaaggtacaggccggcgctttctcaacagaatttaactcatacacccagaaagatgctgtgtcgtggatacctacagctaagaaagccggtgagcgtgctttttggttagaggttgaaggccaatcaatgacagcaccaccaggaggtaagccaagttttcccgaaggaatgcttattttggttgatcctgatgaagaagtggaattcggagatttctgtgtcgctcgtttgctaaatgatgaattcacattcaaacgattgattagagaaggtggcgttgagtatttagagccattaaaccctcgtttcgatctgattcctattaatgggaactgcacaatcataggtaaggtaatcaagtcacaatggcctgacgacacgttttag

SEQ ID NO: 306955 - DNA, 828 bp, Proteus mirabilis; identical to SEQ ID NO: 302343

SEQ ID NO: 306956 - DNA, 195 bp, Proteus mirabilis
atggacattatcgactcagcaaatgaaacaaacgaattatatattcaagtgtcattatcaaatcgcaaggtagcaattaaatcatataacggaatgtgcatctggtgtcacgaagagcaggtagcacctaatagcgcatactgcagtaaagattgtggtgatgatcatgaacagtataaaaggaagaatggatag

SEQ ID NO: 306957 - DNA, 345 bp, Proteus mirabilis
atgaatagctataataagtacaccgaccttcaaattaatgaattagttgctacaaggttaaagaagaaatgcttattaacagaagaatctgtattagcgtatatggatagcggctatcggactttcgacccctgcaataaccctactgacgctatgccgattattattgagaatgggatatccataatgttcgacactggatgtaacgaatgggtagcaggtattgcttattgggtagatgggtgcgagtggcaagtaagccccaagataggaagaacgaatccactacgcgccgctatggaagtttatttattaatgaaggatgaggagaatgaaaaagtatga

SEQ ID NO: 306958 - DNA, 156 bp, Proteus mirabilis
atgcaaataatcggatatgtattactcgtgctaatacagggttctgctgtgcctgtaacggaagatatatacacgcaatcggaatgcaataaacgtgctgaatatttaatgtcagtggggaatgttgaagttatttgtggagaaatatacagatga

SEQ ID NO: 306959 - DNA, 537 bp, Proteus mirabilis
atgaacgaaagagatttggttgactggattgcttttggtgccacggtgctatcttctatggggatattggttgctattattatttactgcctacaagaaagaaagtcaaaaaaaaagataaaatcaataaagaaaaaccttatagacgatttggatgcagtgggtgatgaaatcgctattctagatgaattgatatcatcattagatagtaattattccatcacttgtaagtgcaaagatagaaaaatatttataagagaccacgaaaacaatgttttcaactttggtgagattaatattttagatttaaagttttattacgaaaagctagctgaagatgactttaatgtaagtagaataataaattatataatttacgcattaaacgaatacaattcaattataaatgaaatgattaatcaaataggtgatactcaaggaaaattcaacgtagaacagattttcaaggatagagttaaaattaaattcactatagagtatattgaattacaaattaaaaatatccccctgcactag

SEQ ID NO: 306960 - DNA, 282 bp, Proteus mirabilis
atggcaatagttcaattttatatagcaggtggtaggggcgaagacccgtcaggaattagtgaagataacctctatgaattaccagatgatcataatttcagtgttgatgatgacctcgattcatacattgaagcatgtgcagaatattatcacgcagactgtgatggatgggaggatcaatggccgttgttattcatgttatggattgacgaccaatatcttggcatgtttgaagttgagcgtgaatatgatccagtattctcagcaaataaggtggaatga

SEQ ID NO: 306961 - DNA, 192 bp, Proteus mirabilis; identical to SEQ ID NO: 297212

SEQ ID NO: 306962 - DNA, 336 bp, Proteus mirabilis; identical to SEQ ID NO: 294439

SEQ ID NO: 306963 - DNA, 885 bp, Proteus mirabilis
gtgagcacgtcaattattgagtttgtgcaacaacaagagtcattattttgtaacgcactaacagatcaaacaatcacatgggccaaggaaagccagtttgcaattcaggcattccaacgaaatgacgagctagcaagagtggctatggaaaaccccgctagtgctcagaatgccattattaacgtggcggctattgggattacattaaatccagcaagtaagttggcgtatttagtgccaagaaagggttttgtttgccttgatatcagctatatgggtctcatgcacctagctcaggccactcaagctatcgaatggggtcaatgcaagttagtccatgaaaatgacgtttatgaatctaatggtctagacaccccgccaacccacaaatataacgcattcagtgatagaggtagtgttattggtggttattgcacagtaaaaacagcaagtggcgactatctcacggaagagatgcgattggatgagataaaggctgttgaggctacgagcaagtcaagaaatggcccatggaaaacatggtgggatgagatggctcgtaaaacaattgtgaaaagagcgagcaaatactggcctcgtcgtgaaaggttagatcaagccattgattatgtgaacaccgaggcaggcgaaggcaatgattttgatgtgccagcaaataaagcaaaggacataacgccagcaagcgaggatcaactaaaagctatcacggacttgatgcttaaagttaatggcgaatggagtgacgcattcttcacattcattagtaaaaaattcaaccatcaaatatcccatccagagcaattaaccacatttgaagccaataccattatcgacatgctaaggaaaaaggcagaagggaaatga

SEQ ID NO: 306964 - DNA, 684 bp, Proteus mirabilis
atgaataagataaaattaatcctttttttattattgtggtttccattaaaaaatagttttgcagtaaatgtaggtaatataacagagataatatcttctgatgaaagtactcttgccaaagaaattgaaaatacagtaaatacggcaagattagtcaatttgacaatagaaaaattagactcaccacttgaaaatgggaaagttattccggttactgatcccaatgaaattctatcaacaccggctaatctgattcttcccggtcatgcaagtgatgtatttaaaatcatttatcaagggcctaaggatgataaagagcgttattatcgattaaattggaaagatgatcctattgctgaaaatggtataacacaaagctcaaaatcagcgacagcaacaacatctgcaactattagtacaattttagtggttgcacccagaattgagaattttaattatcagtatcatgataataaagtttctaatatcggtaatagttcatttcgtgttgtggcttcaggcccttgtctagcagaaaaacaacaatatggtgtggaggggatgtgtcgcgagcgttattaccttatgccacatttagccgttaaattgcaacttgtcgatctcacaaataaaaaatctagcgtaggcatttggcacaaaggagagttcattgttgtcaaataa

SEQ ID NO: 306965 - DNA, 897 bp, Proteus mirabilis
atgcatttacgtaatgttgatcttaatttattaacggtgtttgatgctgttatgcaaatgcaaaatgtcacacgagcagcacaggtgttaggtatgtctcaaccggcagtcagtaatgcagtttctcgtcttaagatcatgtttaatgacgagttatttgttcggtatggccgaggtattcaaccaacattaagagccaaacagttatttggccctgttcgacaagcattacaattagtccataatgaattgccaggggcgggatttgagccggaacaaagtgatcgtgtgtttagcttatctatttgcagtccattagatatcaagttagcgccaaaaattgtagagagaataaaaaataaaacccctaatattaatgtaaatattaagtcttatttgaatagtaatattgaacaccaattaaaatatcaggaagttgagttctttattaattataaacaatttgataaaccagagtttcattcacaccctttattcaatgatgaagtggttttggctgtctctaaccaacacccacgaattaaagagagcgttactgaagagatgttattaaatgagcatcattctattgtttctttagaagatgtggggtcttttagtgcggcttattataagaatacagagttagaagatttaattacttatgaaggtactgatttaaatagtgtattaaatctagtctcaaaaacttattcggtcgctattgcgcctagatggttagttgaaagctattcagaacaattgaacattaaggcgatatcattaccttgggagaaggtagaacgtccatgctatttaatttggcatgagtcaacggcacgagataaaggccatttatggatgaaaaatttacttagtgaggtttgtcaaaactaa

SEQ ID NO: 306966 - DNA, 687 bp, Proteus mirabilis
atgggtaaatatggcattattataaaaggaaaggatcgcaatgttcaaatagatagctttaatacggttatgaactgtattagaaagcagactgttgtaatgaaaggcgggatagtatctggaaatcaaggatattatactgaattaccgaacaccccacattcatctacaaagttatttgctgtatcacctaacaatgtttttgttaaagttattgggggagccataaaaggaagtgacaaaaatatccagatatcccaaccttataatgactcttcgggtagtgttgatgtatttgaatttggtgattttcctaataatatttttaaagaaaaatatggagtcgttataaaaaatagtagtacaaaacagactgtttataactctaattggggggtgctaaaaatagtaggatattttattgcatcatggaaagaagatattgattatcaattaccaaatataaaagatttagctttcgtttttggtggcggaatgggaggaatatgggaggatggatttgaaggggcttggatggatacttttattaaaagagtgggaaatacgttacaagtaagatataaagaagctgttctttggagcacaggcagtgcaaatcgtgatttatctagatttccatctacttgcttaataatagatgtgagcgatattaagaaggtattatga

SEQ ID NO: 306967 - DNA, 723 bp, Proteus mirabilis
atgaaatggcaacgtaagcgattcgcgctttcgggcgatttaacgggcattacctgttcattattacccgttcacccgtttatttatggtgtcggacaaaatactgccacaggcagttatttaagccccaccaatgcgattaattatattgcgaataaaattcagggggcgggtgaggttgatattgtggtgacgatgatttgtgcccgtacccatgacgagtttatcaatgcaattcaaggcttttcgggggtattgcctttacctgtgtttagccaagttgaacgtatggccaaaaccgccgaaagcctaaatattaccaaaatgcagatacccgctaaaacgttagccggtattcctgaacctcaaacgttatcaaccaataatagccgtgcggtaatcaatgcggtattaattgaaaaagcaaaaagtgaagcctcaagcggggcaagtgttgctgggttactttctagcgtaaaaggatttgctgaaagtcgaaagaatatcttgcaaggcatggccgattcattgacggacttactggaaaaatcaaccaccgtttgggtgttccagggaaaaggtaacggcgcggaattagccgataaaatgaaaaaagaaatccctgaacaagatgcggtttacaccttggctacgctttttgcgggcgatattgatgcaatcaaaggaatgatgcatgacacagacaccactttacgaaaataa

SEQ ID NO: 306968 - DNA, 753 bp, Proteus mirabilis
atgacccaatcgaatggtgataattcatctgatcgaacagttcaaaatgaccttatcgataagcgcaaattgaaaccatcaaacagtgcaaaatgcgctgttctgaacgggtcaaaatggcctgatcttacagagaatacaacagagattacttcagagagtacaacagaaacagatcattcgtcgcagaattctgacgaatccagcgaccagccgaaaaatgattttttaactcgttatcctgaagcagtgatttacagcgctaacttccaaaaatggggcgatgaaggtgatttaaaaacggcgaaatggatgtttggtcgtgttaaaaaactaaatccatctgcgctagagcctacttggtatgactgggcgaacgatattcgtttgatgcgtcaaatcgatgggcgtacccatgagcaaatttgtgccttgttcgattgggccaacaaagattcattctggtaccaaaacattttaagtcctcgtaagttacgtaaacactttgatgaactattcgttcgtagtcaaaagccaaaggatgagctaaaggttcaagttgacaccgttgaacgtgatagtgccttttcccgcttgattggctctcggtctaaacctaaaaaccgcattgaagaaattgcgcttgaactagcgggtaagacaggcattcgccgtatgagtgagttttctggtcgccaagcatggaacagtatttggaagcaagcgacagaaatgtctctggaggctcagtaa

SEQ ID NO: 306969 - DNA, 909 bp, Proteus mirabilis
atgcaaaatgtgttgttaacgttatggcctttatttgcgttaattgcgctaggcgctattttaagaagaaataaagcatttgaacctgcattttgggtaggggctgaaaaattaaattattttttactctttcctgcattacttctcaatagcttggctaatgctcctttatctgatcctcaattacctcaccttgctggggctattttctcagtagtcatcattaccactattttgtgtgttatttttaaaaaaataaccggctggtctgctggccgttttggtgcgatcgttcaaggcaatattcggtttaacacttatttaggtttagctattgtcgctgatttatttggcgttgaaggcttaggaatagctgctttgatattagcaaccttggttcctctatcaaatgtgacttcagtgctttgtttaaccgcagggcaaaatgtaacttttcgtcaattaatcttcccaattattaaaaatccattaattatctcttgcgtaatagggattgttatcaatttatcaggaatagggcttccttttggtagcgatcaatttctaaaattgttagctgcgactagtttacctttagggcttatctgtattggtgcggcattacatttatcaacactaaaagcagaaagtaaaatgattagtattaacacagtgactcggttgcttattgtaccgataattgcatatagtgttgctaattttttaggtttgtctccattagttatgatgcttttagtcattttcttttctatccctacagccccaacttcttatattttaactcgacagctaggaggggattctgagctaatggcggggatcattacatcacaaaccatgcttgcagcagttaccttgccgatcgtattaagttttttaattccataa

SEQ ID NO: 306970 - DNA, 423 bp, Proteus mirabilis
atgtcaaaagagataagcgaattacagtttagtcttcactatgcctcagaaacagacagtgaaaagaatacctccatcattttaacggcgaatatccatacggctgatggtgaaactcaacaactcacacaactaatttgcacgacatctcccgcaggtaaaaagcaatatcgaataggcttgcaaaagattagtgatgcaggcgacacatcgctggtggcgattgaatcttattggcgtaaaaacatacaagagagttgtgtttattttttagataaagcaaaacagtttattcaaggacatttacagcagacgaatgcatggatatctatgtatggtcttgtcattgtttctgaggcgtcacttgaagagcaattgcctgaaggtttattaaaggcacttaaagtattaatacccgcctaa

SEQ ID NO: 306971 - DNA, 270 bp, Proteus mirabilis; identical to SEQ ID NO: 303480

SEQ ID NO: 306972 - DNA, 576 bp, Proteus mirabilis
atgaagaaacacctcttgcttaccgccggcatcttcaaaacgcaattcattaaaaccttcccctttgtgggtttggctacggaaagtggtttgtgtcttattctctgggaacttaatcggtggtgcgttacgaccatcataggtacaaccggtaatcatcggtctgtcgatatccccattcaggtagctgaccagcacttgcgtgccaatgcgcggtaccgcagaaaaaccataaccatttccactccagcccatggcaacccgtacccagcaggaggcactgtgatcggcacttccccgacgatcccaatgaaaatgcactttcacggcgccatattcattgacgtagatttcttcccccggcggtcccaccaccgtcgccacttcatcgccgtcggccgtcggtttataacgataagggggacgccactcttgcgtgcccggaataaaggagacgctattcgacagttgtgtgccttcgcccccgctattgtccgccagtggctgtacaccatgatggctgacgctgatcacttgccagcgatcattcatcggctgatggggatgctgagataa

SEQ ID NO: 306973 - DNA, 516 bp, Proteus mirabilis; identical to SEQ ID NO: 301306

SEQ ID NO: 306974 - DNA, 204 bp, Proteus mirabilis
gtgggtgcaactgcaggcgtatttggtaacgccacagggggacgccgaggtgctattttaggtgcttttgctcaaggtttattgattactttcttacccgtatttttattacctgtacttggtgatattggtattgccaataccacatttagtgatgcagacttcggtgtgattggtattctattagggattattgttcgttaa

SEQ ID NO: 306975 - DNA, 750 bp, Proteus mirabilis; identical to SEQ ID NO: 305654

SEQ ID NO: 306976 - DNA, 594 bp, Proteus mirabilis
atgaaaagcaaaggtagccaaacgctatggatggaaattgtaagattaattgtttatttttctattgttttttttggtgttttcacagtagcaaagagcaagctaagtgttgatagtttttggtattcagcctcttactactttttagaaataagttctttattatttattttattcataatatctctatttagatttggcgtatcatctatagatgaccctattatattttggagagagcgagggtttaatgcgtcaaataatgatgaagactattatgatttattcgatgatttttttataaagtactattcttctgagaatataaaaaatagagtgtcagatgccttttatttcataatagtgcttttagatgcactcgctgtagttgtaacttggataatttattttcaatttacaaacactgatgtgtatatcattactcctgcgtcattcctacctcaaatatttttgttcttttactttatcttttctactcctatctaccttttgtgtaaagttataacaaatagatacccgggagaagcaatgaaggcgagaaaaacagaatcacatttatcattacacaaatag

SEQ ID NO: 306977 - DNA, 327 bp, Proteus mirabilis
atgaataagtcagacgcaaggaagatagcgcaatctatcacaaacgaacaacttaacgatatgtttgagagagcaaagacatctataactaactgggaaattaaaagcaaagtaaacccacaattcagtattggcgccacttggaatatattttattccgtttatagcgccaataaatttctacatgtgacagctaaaacaaacatgatacgtgaatttggtgattatcttgacgaaagcctgaaaccagttaagaaaagcaagcggggagtgaacattaaaattcatcacgaggaacctatttttacaccaaaaggaggcatctaa

SEQ ID NO: 306978 - DNA, 186 bp, Proteus mirabilis
atgaacaacataaaaataaatgaacttgtaaaatttaaagatgaaatcaaatccatctgtaagctcagatacaaagatgattggaatgctatgtacgcaatgcacgattgggatatttacttccgcgaaggttatcgagctaataatgcacacgaagccgttgatgacgctagagcgtgcatgtag

SEQ ID NO: 306979 - DNA, 399 bp, Proteus mirabilis
atggctagagataacttcccaatagaaaacgcaatcacaattattaaatctgtaaggcatttagatgtatttgatacaaaaacagcgtttgcagtgacagatttaacgatcaaccaatgtcgagaaacaatcatgcatctcaaaaagataggagcaataagaaagtctgataaaagtgcgtggaagtttgtcgtttgtgataacgcgatacagctaattaagtcatatgctgacgatagagcggaggtgaagatagttagacaaaaggcgagagagtataaatctcgacctatgaaatttgtcgataaagccaatgtagcaggtatgggtaatccgatgttgatgaaaatagactcgttactcaaaggagttcgcaatgaactgcatgtcatgcaatag

SEQ ID NO: 306980 - DNA, 156 bp, Proteus mirabilis
atgagtttggaggcgatatttttgcttgctgaaagaaacgaagtgaagcgcattctagatggcatttcgtggaatgacattatcggcaagatgacatttaccagtcgcttaatgaaagttgaatctcaattgcgagatttaggcgttattttttaa

SEQ ID NO: 306981 - DNA, 195 bp, Proteus mirabilis
atgcaaccacatcaacaacgagtagtggatgagaaagcagagttagaagtaaaaataaataaacttaattcatttattgcgaccagttctattttcactgacatgaatgatactcaacagggtttactcatggcgcaagttggtgcaatgagcgcttatctagaaatcctaaatttacgcattgcaagtttctaa

SEQ ID NO: 306982 - DNA, 543 bp, Proteus mirabilis
atgcaatatccaaaagttattgttaatggcgtatcggttagagttgatagcgctgggcgttatagtttaaatgacttgcattcagcagcagtattgaaaggcgaggcaaacgaatcgcaaaaaccaagtaagtttattcgcagtgcttctgtgaagcgatttgtttctgctcttgatgccagaggacaaaaaagtcctttgaaagaaaatcaatcacttaaagtcattaagggtggtaatgaacaaggcgtgtgggcagcagagcttttagctgttcgttatgccgcttggattaagccagagtttgaaattagtgtgtatgaaacattccgagaggcaacgcttaacgggatatcaaatatgacaacactaaatcgcttggacttacttattgccaccgaaaaacaagaaataagtcactgcgctagcaagatgaatagttggggtgtaggaggacgtaaaaagtcactagctgatgctcgagctaatattattgctcaaatggatcctgatatggtttcaatcatggaaggttatcaatga

SEQ ID NO: 306983 - DNA, 399 bp, Proteus mirabilis
atggcactgacagttaagcaggaaaaattctgtcaggcatacgtcgaaacaggtaatgcgtctgaagcttatcgaatggcgtacgccacagataaaatgaaggcaacctcaataaactcaaaagcgtatgagttattgaataacggtgagattacggtgagggttgcgcaacttcaacatgagcaccggacaaagcacgacattaccgtttctgaattacttaaagagctggaagaggctcggaaaaaagcactatccgcagaaacccctcaggcatcagcagcagtggcggcaacaatgggtaaagctagattaaccggcttggataaagttgttatcgatctaactgctgacgtgaaagtcgagaatcgttctatcaaggatatattcgatggctaa

SEQ ID NO: 306984 - DNA, 1350 bp, Proteus mirabilis
atggctaatccttactttaaaccatttgcaaaaagcgccccctataaggtggcttacggtggtcgaggtagcggtaagtcttatttctttgcagagttagcgattgaagtatcacgcagaataaaaacagtcatcctgtgtactcgtgaatttcagggttcgattagtgactcagtgcataagttgctttgtgaaaccatcgataggttaggctacacgaacgagttcgagatacaaaagaacacaattattcaccttggcactggcgcttcattcgtatttgctggcataaaaaacaacgtcaccaagattaaatcaattcagggtgttggtatttgctggattgaagaggctgaggcggtagtcaaagattcatgggaagtattactaccctccattcgtggtgataaaaacgccgagatatgggtgagcttcaacccgaagaacatacttgatgacacttaccagcgatttgttgttaagccgccagagggcgcaatagtcctcaaagctaattacgacgtaaatccccacttttatgacacgccactccctaaacaaatggaagagtgtaaagagcgtgatcctgaactataccgccatatttggctaggagagcctgttgcagactccgcgttagcaattatcaagcctgcatggattgaggcggcggtcgatgcgcatatcaaattaggatttgagccaagaggtaagcgcattgtcggattcgacgttgctgatgatggtgaagatgctaacgccatcgtattgcgtcatggttcagttgctttatctgtcgaagagtggcgaggtcaagacgtcatatttagcgctgacaaggtctatgctgatgcggttaagaataacgtagatacggttatctatgactcaatcggcgttggtgctggcgttaaggctcaatttaaccgcaaagataatcgcattgttactgtcgggtttaatgccggcgcttccgtagagaagccagaaagcaactataagccaggcaaaacaaataaagatatgttctccaatttgaaagcgcaacaatggcaattagttgctgaccgcttctataacacttggagagctatcgagtatggcgataaattcaccgatgaccagttaatcagcatatccagtgatatgaaagatatcgaatacctcaaagccgagttatcacgccctcaagtcgattatgacagtaacggacgcgtaaaggttgagagtaaaaaggatatgaagaaacgcggcatcccaagccctaacaaagccgatgcgttcattatggcgtttgccgatgttcgcggcggtctacgaattaaccccgcagcacttgcaggtatctaa

SEQ ID NO: 306985 - DNA, 1533 bp, Proteus mirabilis
atgaaattattcaaatggaaaaaacgcctgtcaaagcgagaggcggagcttgctattgagcaagaaaagacaaagcagcttgaggtggaagcgaagaaagcggcatctcaagctcaactaatgcagatgctagtcgctgaggaaaccaaacgacagcaaccagttaagattaaagcgcctgaacttcatccgttggtattgcctgaaggtgagaaagcgcctatcgcaatggatagctgtggcacatacgcatacgccaatcagtacgctagccaagatgtggggttctacactggttttctcggctaccctgcattggcagttatgtctcagtctagcgattatcgcagcgttcctgaaaccacggcgaaagaaatgacgcgagagtggggaaaggttaaatcacgtgacgatggtgagaatgcatctgacaaatcagatatcgtttctcaacttaaccaagcgcttgaagattttggtattcgagacatcttcaggcgtcatgttgagaatgagatgatatttggacgctctcaaatttatctcgatatcaaggggcatgatgataaacgtgatcttccactattaatcaacgaggaaggagtaaagaaaggtgagctaaacggatttgcggttattgagcctatctggtcaacacctagcgtgtataactcaaccgacccgactagctctgatttcttcgtgcctactcagtggtttgtgttaggtaagaatactcacgctgatagattgctaaccctaatcatgcgacctgtgagcgatatcctgaagccagcgtataactttagcggtttatccatgcttcagttaatgaagccgtatgttgagcgttggcagcgtacaacggactcaattagcgaattgatacactcgttttcgctgactggtctagctacagatatgcaggatattttagggggaggcagtaatgaaagtattatagaacgttcaaccctattctcattaatacgcgataatcgcggtttaatgatgacggataagaacaaagaagaattcttccagttcaacactccgttatctggcttagatgctttgcaacgtcaggcgcaagagcaaatggccgcgcctagccatacaccattggttaagttgttaggcattacgccagcagggttgaacgcgaatagtgatggtgaaattcgagtttattacgattacatctcatcacttcaaaatgctcatttgctgccacaaataaacaagatcatcgaccttattcagcttcatctattcggaaaaattcacgatggtatctatttcgaattcaccccgctttatcagttggatgataaagagattgccgaggtgaatcgaaccaatgctgaaacggctgagaaactggtgaatatcggcgcagttgacggcgaagaggttaggcaaacacttgcaacggatgaatcaagcaagtttagctttatcaaccctgacaagataatcccatcaccttttggagttcctgactatggaagtgcggaggaagaaaccgagtga

SEQ ID NO: 306986 - DNA, 792 bp, Proteus mirabilis
atggaagtgcggaggaagaaaccgagtgatgcgataatgcctgaaattaagacgtcagaggctatacatgcgtggtattacaaagagctaatgcaaatcctcaaggatatccgaaaggagcttgatgaggttctcattaacgaatatcacgggaaagctaaaaaggctctagccaatgacggaatttcagactggatagcgcatgtcgcagattacatgctggataagtggaataggcggcttaattcaatatctgaagaggtagctaaagacttcatcgataaaacggttggcaactacgacactcggtttgcagcgatgttacggcgcaaagggttcactgttcgaatgcaaaacagcgagcgcacattagacgcattgcgtgctgcgatgggtgaaaacgttgggttaattaaatccatcggcactgagtatctaagcaaggtgcagatgcatgtctggcagtctgtagcgggtggatatgacttatcaacactaaccgataacttggtacatgatttccatatagcccgaaaccgagcaaagacaatagcgcgtgaccaagccaataaggctcatgcagttattgagcaagcaaggcggaaagagttggggattaaagaggctatttggatccactctcacgcaggtaagcaacctagagaatcacacgttaaggctcacggcaagaagttcgacattgaaaagggtatgtatatcgatggcgaatggatattgccgggtgaaaaaataaattgtcgatgtggtagtaaggcaattcttccattttaa

SEQ ID NO: 306987 - DNA, 1188 bp, Proteus mirabilis
atgaagatgacagacagcatcgctttcgacagtggcacatcaatgcggagtaaggacgcgaacggacatctaaccgttgagcgtaccgtgatatcaaaagctgcagtaaacccctattacggtagagagataccagatagcaaaaggcttggtctagaacctgagaggatttactacatgctgcgtgaccctgtcgagttagagcgagcagcaaatacattcagcaaaaaacaattgctcatcaagcatattcccgtcgattccgacgaaccacaaaaacaatcaaccattggcaccatcggctcaaatatcacatttgagggcggtcgcttgtttgctgatttatgcgtgtgggatggatatgcaatcgggttaattgaagcagaaaaaatgaaagaactctccgcaggttatggctatacagccgatatgaccagtggagagtttgaagggcagtattacgacggagttatgcggaacattatcggtaaccacgtcgcattagtcgagcgcggcagaatcgggcgagacgctattatttcagaccatcaaacagttgatttggagaaattaatgaaactgaaaaaaggtgcgctcccagttgtagcagcgcaaatcaagcaagcattaggtatggattctgatattccagaaacccaactacatgcgattttaactgccgtaaaacttggcatggatgagtctccagaaaagttagacggtgcgaaagatgaagaagaaaaagcagcagaagcagctaaaaaggctcaagacgaagaagaggctaagaaaaaagccaatgacgaagaggaagccgaaaagaaagctaaagatgaagaggaagctaaaaaacaagctgccgacaacgaagaacaaggtaaaaaagcgatggactctgctatcaagctagctgaagaccaagctgttgcacgcgtgactaagttatttgaagcgcgtgaagaagttaaacctctggtcggtcaggttgctatggatagtgctgatgatgtctatgcatatgcgttaaaacaatgtggtgtagatatctctggcgtgcatcctagcgcatttaaagcaatggtaggtatggttaagcagaatcgcgcccagcctaaaaaaactagtttaggcatggactcctcgccatttgctgaagatccactaacagctcgcttcaaacaggcttaa

SEQ ID NO: 306988 - DNA, 486 bp, Proteus mirabilis
atgacaggttttcaaactcgaatgaataacgacttgccactgggtgtggctggtgattttgcttcgactaacccgcatttctcaatgctggctggtgaggggcagttaaaatcaggcgctacgggtgtaacggttggtttatttgcatgggctgatgaaaagggcttggtgactaacgttaaaactgagggcgcgttaattggtttcgttcatcgcaataatcaggcgatcatctctgcatatggtgaaggcgcaacaatgcttgttcctcaaggtcgtgaaattacccttatgaccggaggtgactacttcgtcaatctcgagtcgggcggtactcgtggtcagtttattgttgctgatgttgcaacaggcaaagccaaagcagttgacgctatcgaccctgatgacgcaacagttgaagcaactccgttccgtgtggccaaaacggtcacatctgggttaactaaaatgtctagctcactgtaa

SEQ ID NO: 306989 - DNA, 999 bp, Proteus mirabilis
atgacacaattaaattttaatgcgcttgagcagcgagcaggcattgtctttgcgacaggttacaaccctcaagcattaacgccacttgctaaacaaatggcaatggatagtgagctagtgactacgcctaacgctggcgttttatcacttttcactacctacgttgatcctaaattaatcgaaacgcttgttacgccaatgcgtatggctgaaattttcggtgagaccaaaaaaggcgactggacaactcagactgcgcacttcccagtgattgaatctactggtgaaacgtcaagctacggagattacagcaataacggtcaagctggcgtgaacgtcaactggcctatgcgtcaaccttatcactatcagacaattatccgtctgggtgaaaaagaaatggcgatggctggtgcggctaaaattgactggtcttctcgcaagcaaattgcggcggcgcttaccttgaacaagttccaaaacaaatcctatatttacgggattgatggactacaaaactacggcatcctgaacgaccctgattcactgcctaacgtaacatcaactccgtggggagctatggacgggcaaggtgtttacgactcaatccaaggcaagttgtatagcgagctaatcaagcaaaccaatggtcatgtagaagcctctactccaatggtgctgttactttcaccgaaaaacgaagttaacctacacaaaacaaaccagtacaacgttaacgtgtatgatcagttaaacaaaaacttccctaacttagaaattcgcagcatccctgagttttctactgatgcaggtgagattgttaagctgatcgttcgtgaatatgaaggtcaggaaacattagacctgagctttacagaaaaaatgcgcgttcatgcgatgatccccgaactgtcatcttggaaacaaaagcgctctcagggtactttcggctgtatcatttatcgtccgatgttcattgcatcgatgctggtttcttaa

SEQ ID NO: 306990 - DNA, 318 bp, Proteus mirabilis
atgtctgaagtaacagtagcgtgcaaattagctaatggcttgtatctggatgttggcaatcagcgagtaacagtaaaaggttttgctaatggcattcaggacgaaaacggctttggcttaactcatggtgtagataagtcaatttgggaagcatggcttgaagaaaacaaaggtcgtgacattgttaaaaatggcctcatcttcgctcacgaaaaagtgaaaagcgttgaagctgaatcaaaagaaaagaaagacaccaagtcaaaaactgagcgtttgaaacaaaacactgaaggtgtgcagaccgctgaagagtaa

SEQ ID NO: 306991 - DNA, 477 bp, Proteus mirabilis
atgaacaatcgcgaactgatgaaatatcgcagccagcaagcagccagcaatatcaacgatggcgttgtggagtttaacgtagataagtttcgcgagatttatcccaacaccaaaggcactgatgcacaactaggatctgcgttcgttaaggccggcttgctcttgcgtaacgataggtttagttgtgttaaagacttgaaagagcgtgaaatgcttctcttcttgctcgtcgctcacatggctatgctgcaatccaatatcgaagacggcaacagcgcggtaggtcgagcatctagcgcaagcgagggaagcgtatcagtatctctagattatggcacaacaaccaatgccgaaaagtggtacacgcaaacaccttacggtgctgagtactgggctttgaccagtcagtaccgttcattcctgtatacgcttggtgttatgccaatgcctgtttggcgaggtggttattatggctaa

SEQ ID NO: 306992 - DNA, 567 bp, Proteus mirabilis
atggctaaaagcaagcttgaggaagcgctggaaaaatatctatcgtctggttctaacctagagctaagggcagggatattagagggagctatctatgatgatggcacaccagttgctcatgttgcttatatgcaagaatttggcgcaagcataaatcaagcagaaagaacaggtacgatttaccgcagcatcagaaaagacggcacattcaatagaaatggacgattcgtaaaagctaaaaaatctaatttcgcaacagatcacaatattccagctcatacaataaacatacctcccagacctttttttcgctcagtcattgctaatggcagaacgacttggtctgcaatactggccaaaggaatagaaaaccgaggaggtgtaaggggggggatggaatatctaggtggtgcaatagtagaggaattgcacgagtcggtgatgacttggacttctccccctaatgctgcttctaccattgccaagaaaggctcaaatagcccccttcgtgattctatgaggctatctaggtcatttagttttgaggtaaatgatgatcaaggttag

SEQ ID NO: 306993 - DNA, 381 bp, Proteus mirabilis
atgatcaaggttagagctatcgccaacgcagctattcaagtcgttaatcctgacctaccagcgactctgatagcaaatgaaggctacgacattatacccggtggcaagcaagttcctaaattctctaactatgatattagcgtccaaatgcaaagcttgagcactcaagaccttgaacatttaggcgttatcaaccagcaaggtgagttcatctactgttatgcgagagggcaaattgaagccattcgcagagcaaaagataaaggggctgacaagattagtttcgttgcatacggtgaatccgaaccatctgaatggctggtcactaaagtcatagagtcatacccatcatgggttaaggtgcttttatggcgacaataa

SEQ ID NO: 306994 - DNA, 486 bp, Proteus mirabilis
atggcgacaataagcattactgaagatgatctctttcttgagttatggacttacttaactgatttatttggctgtcccgtcgttcgtggttatgaaaataacgttcccgtacccaaagatggcattgtcatgcacatgctgtacgaaagagatttggattacacggcaaattattgggaagcgccaacggaagaggtgacagcacagcgatcagtagaagctacctttcagtttgatttttacggtgaggaggccaataaccgatcaagagttgtagcaaatctctggaagtcatcatacacaaccgaccgactcaagaaatgcaaacctttagacagcggaagtccaaagaaaaacgtattggttaatgaagcaaatcaatacgaaaaccgcatgatgctagacgttactctgcaatataaccctgaagtctcttatcacaccgatggtgtcaatcgcgtctctatcactaccactcaagtttaa

SEQ ID NO: 306995 - DNA, 1458 bp, Proteus mirabilis
atgaattctattccagcaagcgatatcgtccagatattgcccggtgtcgttggcactggtggtaaccctctggcacttaatgcgctgtttattacaaagaaaaaagcagaatcaatgctaggtgttcgctcattcggatctgaagatgaagttggcgaagtgttcggcattgactctgatgaatatcgagccactcaaatctatttcgctggttttgttaactcaacctctcagcccgaatcactctatattgcctatatgaatggtgaagcggagtcagcaaagctcattggctctaaagttcctgttcgcacagaaagcgatttcagcccactaccaagtgatttaactttaactattgatggtaaaaaagtttctgtaaccatcgatggtgaagtaacaagctattctgctttagctcaagcggcgactgcttcgctgggtgcaaaaggccaatgcacttatgacgctatgtcgcaaactttcgttatctctggtgctacaaagggagcgaaaggaaatatctcatttgctgttggcgatttagccgaatttatgggccttactgaatcatctggcgcacagaaaaatgacggtattgatgctgattctattgaagagctgatgcctcgcattaccaaagaaacacgtaactttgtttcggtaatgactttgggcgacttctcagtgagtgagaagctcacaatttctcgctgggtttcattgcagaatgatcgctacattcacgtactgtaccactcaaatgatgatgatttaaaaaccatctcggatgcgattattggcgcagaagttggcggtacaatgctgatgtacggtgattacactcacggtgcttttgtatgtggctatcctgccagtcttaactttgatgaattgaacggacgtacaaacctatcattccgttaccaagaaggtttaatgccatcagttgatgagaaatccaaagccgatgaattaatgaagttagggtttaacttctacggtgcatacggcacagcaaatgacagatttgtctttgtttatcctggctcaatctctggcaagtttaaattcatggatagctacgttaaccaagtattcttcaacagccaattacaactagcactgatgactatgttggtgagcaataagagcgttccttacaatgatgcgggtcgagccatgcaccgcgcagcagtaaccgatcctgctaatcaaatgcttaactttggtggtattcagccgggtgttgaattatccgaacaacagaaaaagcagattaactacgaggctggttttgatgcggtatcgcaactgaaaaccgccggttggtgtattcgcgttggtgaaaccccagctcaaacccgaggattgcgtaaatccatgccattaaaactctggtacgcagatggcggtagtgtccagcaagttaatttaccgtcaattaacgttcaatag

SEQ ID NO: 306996 - DNA, 447 bp, Proteus mirabilis
atgggtatggggcataacgaaagaacaattacctcggcaaactcagtcatgatgatccgctgtaaaggtatttatgatgactgggtgcgcattcagggtttccaagctgataatgcatgggagttcggtgacgcaaatattggcgaaacacgcatgggtgtggatggcaaacaatccattggttacacaccacacgaaacgccatggacactgtacttagaacctaacagcgcatccattgatgtgatggaaaccatccgcaaagacttcaatagcaatatggaagtgcgtccgattgaaatcattattgaaatgccgtcaatcgctaaacgttacacaggcaaaggcggtttaaccaccatgaaaggtggaccaagtggtaagaaactgctcgatggaacaacttacaatttcaacatggtcacagaaggcgcagaggaaatctaa

SEQ ID NO: 306997 - DNA, 411 bp, Proteus mirabilis
atgtcattaaaaacaaaaactatcactatcgaaaaaggtcgtgatgaaggtaaaacattcgtcattactgaaatgccgatcactaaagccgacaactgggccatgcgtgctttatttgctattgctaatggtggtatcgatatcgaaggcattaaccctaacatgggtatgctaggaatggctcaggtggcgattaaggcactatctggcattaagcctgatgttggtattccgttgcttgatgagctgttagagtgtgtccaagtgattcctagtggtggtaatgcgcgagcgttgattatcgactcagatattaaagatttaagtacgatgttcacactccgcaaagaagcgctagccattcatattgattttttaactcaaggcggtgggtcagacttgaaaagttaa

SEQ ID NO: 306998 - DNA, 2385 bp, Proteus mirabilis
atggctacagttgtggaatcactgattgtctcacttaaattagacaacactgagttcggacgtgcagtaaaacaagcaattgaagataacgaacaattatctgatgcggttaatggtgttggtgatgcgtcaaaagatgcgggtattaatatcaacatctacacgcagcaaacaaagaaatccaacgacgaaacagataaagccaaaaagaaaaacaaggatttagagaaaacaataaacggagttgtaaaggctttatctggcttattcaccaccatatttgtttcaactggcttacaaaaactgattgatgaaaccagcaaaaccaatgatcaactctatttcttaagtaaaaacttaggtatgaatgcaaccgacattaaacggtggcagaacatggcggaaatgaccggcggtagtgctgatggaatgtcggcgagtttatcaggcttgagtcaatccctgtggaacttagttactacgggtgatgcttctatcctaccttggtttaatgcgctcaatgtcgatgtggtgaactctggcggtcaaattagagaccttaacgatatcctgctcgatgtatctgatagcctatcgaaaatgtcacgccctcaggcgtataacattgccaaaaatatgggtttcgatgacggcacaataaatctattgcttgaaggtcgtcaggctatgcaacagatgctagaaactcaaaagcatatcgttatctccagtgaagaagagttaaagctcagtcgtcaacttaaccaacaaaacgcattagtcagcaagcagtgggaaggtttaaaaacactcatagccaactacttaatgccttacttcctccgcttctctgaaaaagtttcaggctggcttgattacctaaataaaaatagagaggtagccaaagatctgtttaagggtatggcggttgttcttaccgtatttctgatccctgcactaataaagggcgcaattgcaatggctggcatgttcgcccctctgttaactggcactggtttagtgttggctttagctgctgcaatagtgttgttatatagggattataaaagatggaaagaaggaaaagactcttactttgattggtctaaatggtctaaaacaatagagacagtccttggttggttagatgggttatctgagtggtttaagaatacatcaataggtaagtggtttactgatcaggatggtaaggttaatggatggaaacttgcattaggtggattacttgcgttcttcactggtaagtttgcacttgggtttggtaaaacaatattatcaattggcagtgcctttgctggactcatggggtggcctggagtaattatcgcagcagttgcaggcagcctattatggtttaaagattttgttgataacttagatctaggctcacttgctcctgaaatggcaaatgtcactatgacgggagttaaaacggcagatgctttatcccacgtttcaaaagataaaagcaatgctgaaaatgcgaacattattttaagttcgttagactggttgataccgggtggaaaggctattggtcatgccacggaagagtttgacaagaaaggaattagaggtgcggttcactctatgactaatgggctaggtgattttgccaagagagttttaactcctgtcgtgaaggcatctagtgttgagtctccagctcaaaataaaaggatttataaatcagcattctcagagcaagtaaaggagggtggatctagatcttggaggaacaataacccgggcaatattgagtacggagattttgcaaaaaaatttggcgctttaggaactgatggtagatttgccatttttccagatgaagagtcaggaagaaaagcaaaggataatttaatatttgaaagtgacagagctaaaagactgtcaaccaagggagactatggagctggcataggttataaggataaaactttatcgcaagctattaccgcctacgcaccaccagaggaaaacccaactgatgtgtatattaaaagaattttagatgccgttggatccgaaaaaaggatgagtgaatactctagggcggaaagagatattatccttgaagaaatgaagaaagtagaagggtggcgagagggaaagcaaaatatagtcaacaagttggatcataaaatttcaacgccattggtaaaaggtgggataaatgagcctcaaaactttctatctcaaacccaaaaactaaatagcaagccagctactattaataataagaccgatgtgactattggcgacattaatatcacaagctccgcccctacaataaaaggaactatggctgataccaagttagcagcaagagagtctttatctcaacttatgccaactatgagttag

SEQ ID NO: 306999 - DNA, 465 bp, Proteus mirabilis
atgctgaagcaattaatatccttatctatactcataccctcgttatctttcgctgcatttgatgatctttctattatgagagataaggatggtaatttagagattaaaaatggaaattataattgtgaataccttagtataagtgattcgaataataataaaaaagccacaggagagttgagtctttatgtggaaaaaataggtaataataaatctttctttatcgcagacattcctggtggaatagcaataacatcagatgagatgttaatgagatcaaagggtgaaaattcaagcctttatatacaagagaaagaaaatggtgatatgtatatgcttggctcatcgttggattttggtgttggcgcagcagtgaaaaacaacagtaaaaacatcaatgtagaattagtgatagaaaactgtaagctaattaatagtttagaaaaccctgtttctactaagtga

SEQ ID NO: 307000 - DNA, 201 bp, Proteus mirabilis
atggaattagattttaattatccaaaaacggatgattatgtttctaaagagttttttgttaagcgtaaaatttacaaaggtcgttctgttattgatgaaatagaattagaccaagatctttcaatggcgacttgcttgagatcacatattaaacacatcaccaccgtcattaatctattaataaacagcttatggttgtaa

SEQ ID NO: 307001 - DNA, 207 bp, Proteus mirabilis
atgaataaatatattattttttatgaagcatatgataataatggggatatgctatttaagagcagtgtaggtagcaatatcgatactgataattatggtggcgctgacgatattaaacgctcatttgaaagtctggctttttcggctgcgacaggaataaatgctagcgtgaataatgtagaattaaccggctgcacgaaattataa

SEQ ID NO: 307002 - DNA, 693 bp, Proteus mirabilis
atgttaggaatgccagatataccaaactggaagggattacctaacgctggattagatgcaggtattagccttggcggtgctgcgttaattaattccctgttcggtaactactggggagtattcaatgaatacggtgttccgttattactcgctgataacgtgatatcactccagtatgaaaacaaaagtcgtgttgtaaatgcacctatcgaaagaggcacatttgccagctacaacaaaataagcgatccatggaaagcaaccgtgcaaatgagtaaggggagcggcggtgctttagagcgtggtgctttcttggctcaacttgaaatcctatctaaaagcacattgcgatttatcgttataacacctgaatttgtctacaagtttgcaaatatcgtcgggtatgacctagcgcgagaggctaaagacggggcgacacttattaaagtaaatgtgcatcttgaagaaattcgagaggtcacagttagctatgcagaggaagaagtcaccaagccagatgattcaaaggtgaaagatactggtgatcagactcaaaaggtggaatctcaaggaatatttacttgggatgatgatataaacgaaatacaaaatcttttaaatataggtcagaaatcaatagattcactgggaaaatttctcaagtttgcgcaagggcaaatatctggaggttaa

SEQ ID NO: 307003 - DNA, 276 bp, Proteus mirabilis
atgttaattgaaataaaactatcgcccacgccaaaccaatcaacctcattcactatcaataacaccctttacgaactcacgttagaaacccgacttgaaaacctatttgccacggtaaaacgagatggtgaatatctggtgtgtaatcgcatttgtcgaaaccttacttacatttgccagtggttgatatttgtcgatattgaggggaatacagatccagtgtattcagagttaggctcacgttataagttggtgtggaacgatggcattcaatag

SEQ ID NO: 307004 - DNA, 888 bp, Proteus mirabilis
atggcattcaatagaaaagttttgcgcataacattaacgttgtcgggtgaaaaccaatcgttcaccacaggtaaaaaaaatcagaaatctgctgttggattgagagcgagtgctgaaattaactatggcaatggatctccagcacctagcgcaagagtgaagatttacggattaccaattgagacaacagataagttgctacgcattaaattcaattcgttaaacggactaagagacacgatagcgatagaagcaggggatcaggatagtgagctagtgcctgtgtttaaaggtggtattacatttgcttaccctgactttggtgacgcgcctaatgttgctctgaatattgaatcacaaacagcggtgcttgaaagcatggctcctgttgatgcggaaagttacaaaggctatcaggacgtggtcaatattatggggcagatatgcgaaagggttggctatacgttagaaagcaacgatgtgaacgcaaagctcaacgatgtttatctttgtgatactgacatgaaaaaaataagaaaactcgctgacgatgctcatcttgacctttatcttgaaaatagccttgttgccataacaccaaaaggacagccgaggaaaattaaaatccctatcgtttctcctgaaacgggattaattggctacccgaccccaacaatggttggtgttaatttcaaatgcttctttgacccacttgtccgcttcggaggagttgtcagaattaaagatagcgaagttaaattttgcaatggcgactggctgatttatgggattaggtcaacccttgaaaccgagcaagagtctgcaaggtggcatatggaggtttcaacacaaacattaggaaataggaatgtcgcaatcaaaaaatga

SEQ ID NO: 307005 - DNA, 693 bp, Proteus mirabilis
atgtcgcaatcaaaaaatgagacagcctcactatatgggcctaaagatatggttggaggtattggcactcaagagatgattattaactcattgattgggcgcgtagcaactaccactgtctgtaaggttgtggcgattaaaccaagcgaaactgacgcggttggattgttagatgtcatgccactagtgcttcaagttgacggagcggggaatacttataaaaacgcagttatccataacgttccttactttcgttatcagggcggtgataacgcggtaattatcgaccctaaagtgggtgatttaggtatttgccttgtctgctctcgtgatatatcaaaagttaaacgtacaaaggatgaagcagcgccagatagtaagcgcagatatgactgggccgatagtttgtatatagggggaattcttaacggagcaccatcacaatacattcattttcttgagagtggaataaatattgtggctacaggtgaaattaacatgaaaggcactaaggtaatactggatgccccagtagaaaccacctcaacattacaatcagcagggcatatcactgacaatactgcgcagggcaacactcaaacaatggcctcaatgcgaaccacttacaacggtcacactcacagagaaaacggtcaaggctctaacacgaaccagccaaatcagcaggtataa

SEQ ID NO: 307006 - DNA, 354 bp, Proteus mirabilis
atgaaaacattatttctactacctgatacatgggatctgacccttgatgtatcgggaaacctcgctattgcctctgaacagtatgagacggctcaatcagttgctaataagtgccgagtgtttatgaaagacctttattactcacaaaatgagggaattccttatttggaggatattttaggcaagaatcgctactcactttctctataccggcagaatttagaagaggctgcgctttccgtccctaatgtcgttacagctacggctgaattatcaacggcaaatgacagagtggttagaggtaggattttattcactgacaataaaggaaataaagggagtatttcattatga

SEQ ID NO: 307007 - DNA, 1191 bp, Proteus mirabilis
atgatcccaccggtacagatacttcctcaaggtatcgtcgcaccaactactcaggaagtaatagaaggtttatggcagttaatgaaggggtgctttggtgagaacatcaatacatcaatggatacaccacaaggccagttagtcaccacgttatcagccgttattactgacgaacgaaattttatgattaacctattaaacagctttgacccacgctatgcgtcaggacaaatgcaggacgcactaggttatatctattttatgcaacgaaaacaagcgacaccttctgtggctgagttaacttttaacgggttaagtggtgttgtgatacctgcaaattaccaggtaagtgatgatagagggttgttctggacaacatctgaagagtcagtaattaatgaatcaggtgttgcagtaattaaggctaactgcttaactacaggcgccatcgatgcgccagtaggcgttattaatcgactaactaaaagcattagcgggcttgattcagtatcaaacagaactgcaggaataccgggtagaaatgctgaaggtagacaagagttcgaatatcgaagatctgaatctgttgcaaagaatgctaagaataccaattcagcaacttatggtgcggtagccaatctaaaaggcgttattgattgctatgttgttgataacccgtcagatgcaactattcaggtaggtaaaacaaaataccctttaatcagaaactcaatcgctgtttcagtggtaggtggagataacgaagaaattgcacagcaaatattaacgaaagctggtactggttgttcgttcgtaggtaacacaacagttacttatgaagataaagaaaacttcccttacatgccacctaagtacacagttaaatttatccgaccagcggatatcgctgttacattcacaattactgttgaagataaaacccaattaactcaccaagcaaaacaagccatcatcaaagctattgccgaggaattcacgactggtagaggaaaagggcagatcggtaagcgattaattgcgagtgattatgtatgtggcgtggcgcaagcaacaacctcacgattaatcaatattcaggttggcaggaaaggcttggctttggcgagttacattgattttgggatagatgagtttccagtgttatcggtagatgacataaggatagagtaa

SEQ ID NO: 307008 - DNA, 633 bp, Proteus mirabilis
atgattgatattagagaaacattactcagccaatatgccaactcccccaatatcctcgcaatactaaaatcagcaaatcaatccatcgatccacgtagccatgtagaggaattctacaatatggcggtcaacttgcattctgctgttgggttcggtctggatatatgggggagaatagttggcatcggcagaggactttcaattccagatcctgacgataactacttcgggtttgaaggaacggaaaaatttagcccttttggacaagcgccttttttcggaggtaatccgggcgatgtgacttatgaaatgtctgatgacacttatcgtgaggttatcatcataaaagcctattcaaacatcctttatgcaacagcaccaaatattaacgcttttcttaaagcatcattcccaagaggaaaagcctattacctgattacgggtcacatgcaagcaaggtatgtatttgagtaccggttatcagaatttgaaaagaacttaatatttcatcacaacattttacctcgaccatcaggtgttgatgtcggagtaaatgagcttcctacaaatgaatattttggattctacggcagtggattccagccattcaaccaagcgcctttcactaaatag

SEQ ID NO: 307009 - DNA, 1491 bp, Proteus mirabilis
atgaaaaatccaaaattaatatctaagcctttcgcacagaacgggcagaaaaacgtcatccctgaaaaatacgaaacaagcatggaaagcaaccaagcgacatgggatcaggggtttggtcagattaccatgttgccagtaagcgcaggtggattgccccctaaagggcaagactttaatggcatactaaaccagatgtgtgaaaccattgttcatatatcaaaaggcggtgtttttaaattctctgctgattatgcaacagctattaatggctacccgaaagggtctattcttcaatcagaagatgagaaaaaatactaccagagtttgattgataacaataaagtcaactttaataccgcgagtcaagatcagataaaaacatcttggaaactggtaatgactgatgacctgcttgatcagttatcaaaaaaactagaatcatctgcagtagttcaatccaccggatcatcaacaacaagcgtaatgagccaaaaggcgtctactgatgtattccaacccaaaggtacttacccaacaacatcagagatgaatgttgagcttaataaaaagattgataaagctaacatctctcagcaattagcaaatgatgttaataaagtgccgagtttggatttggtgaccaaggagttgggtaacaaacaaccgaaaggggattatgccaataagtcgtcaacatctcgtcagtcttttagcggttctttgtttggaacaacacttgctggagctgaatcaaacaataaattaaataacctgtgttttgttgcttatgatagcggtgcaaagtacattcgaatggagagtgaaggtaaaacaatagacctctcctttccagacgaatcaggggtaatttcacttaatagctattcatatagcaaaaatgaatcaaataacagattccaacccaaaggtacttacccaacaacatcagagatgaatgttgagcttaataaaaagattgataaagctaacatctctcagcaattagcaaatgatgttaataaagtgccgagtttggatttggtgaccaaggagttgggtaacaaacaaccgaaaggggattatcagccagcaggtaactatgcactaaaatcagatttaaacaattaccaaccaaaaggaaattatgcacaagcagggagttcatataccaagtccgagagtgatgcgcgttatgaaaaaagtggaatatataaacaatggcgaaaagtaggggattttaacggtgcatcagccgttattgagataacgttaagtgaaaatattttaggtaaatatgtttatgtgcagagggatggcggaggagaaacgtatactggatttcttgtaccacccatttcaggtattaagttaggtgttccaatggggcagcagggttattgggatttcattgtttcacaagatggcagaaaactaaaacttacagatagcagttacggttcagctaaaggagtttatgttttagattaa

SEQ ID NO: 307010 - DNA, 1047 bp, Proteus mirabilis
atgatttcaggaacaatcaatagaaaaataaaaaggtattataatcgtatcattgataacgaatttcatgatgcgcatagaaaacaggtaactagtattttaaatgcagtggaaatacaaaagggaaagttaagtaaagttatttataatcaatgtgatgagtatgctataactgtattaggtaatatcaaatacgctccttggttatatgtatattctgcaatatcagaagaatttaaagtagggtggatacccgataattattatgcatctgttgttctccctgttatatctggtgggtatgcggaaccatctgatttgaaatcattaagtaaaacgttacttaatagtaatcacataccagatatcctttattttgttaatggacattatatagttgtagatagcaaagaaatattatcaaaagaaagagcctcaatagaattattttctaagaatgaaaatgtaatatttaagcctgatcaatcacaacaaggtattggtataaaatttttaaataaacaggattttataaattccgcaccaaaaattaatggggtttttcaatcaattattaagcaacatgatttctttaattctatatgtaataactcagtagctactttaagagtaacgacattaattgataatgaagggaaatgtagtgttagagctgtttatcttagagtaggaagaaataatgactcacatgttaaatcaaacacacatataagaatacctgttgatatagttactggtaggctgtctaataaaggatttttgaccaattggaatacaatcacagaacatcctgacacacattttaagtttaatggaactatacctgagtttcaaaagtgttgtgaattagcagttaataatcacctgaaatatccatttgttcgttgtattggttgggatatgataattgatatcaataaccatgttaatataatggaatggaacgcagggcacaatgatattaaattctcagaagcaactcagggtccttgttttatagatatgaaatgggaatcattgaaataa

SEQ ID NO: 307011 - DNA, 1314 bp, Proteus mirabilis
gtgaataaggatattaatgaacttaataaagatattaatgaacttaataaagatattaatattgtcggattacattggattaaacgctggcgagtgaataatggaaaacatcagtcttatgttattcctttcgcaacaacctatcctattaatattgtttatcacggtaaaagcgaatttaaatatgggcagtatggcattcatcttggccagcaagatacactcacctttttaggtgataaaaaacaaaagatactggctaaatttattgattgtcgtaaaaactcaccgacatttaaatcagaattaagtttggagataaccccatcatccgcaagaacacttattattcccccaggagttgctcatactttttcccatctagaaaatgtttttaccttaaatagctactctctttttttacctactatcgagcaattagcaagtgaaacattaaattggtcacctaataatgatgtgataaatctgccggaagatatcgatattaatgagattgaaggctatgagccgatgacagaagaagcttcggcgctggtctactatcgagttgctgagatacaacagcagtggttaagccaacatcgatttttacactctgaaactcgtaaaattcgcttagataatggcgatgaaattaatgtaaggttgcgagagaaaattgccgatgttcaaaaacaatcattacctacatccactattttaggtgttgaatttcgtgaaatggcgaccctgcatacgggcaaagagagtggcattgtcccattaacgcgacaatcccctatgtatctagttgaacatggtcaggaggcttatgatttcgactcttatggattacatttagggcaagaagatcatttaacttttttaggagatacctcgggtaaaatcactattaagctggtggatatgcgtgaagattcgcctacgctattttatgaagatgaaatggtttttgatccggcacccaatattgaattagtgatcccctgtggtgttgcccatgccttatttaatatggcgaatatcattactgtcaatcgacctgttatctatttggacgaagaaaaagaatatattccgggtcatgatgtgattgattggaaaatcgctaataaaaattatcaagcttatcgtgttaataaaatagcagcagatttaacctattatcaatttcttgtttctaaacaacaagcgttaatgaaacataagcccacccatcataccccaaaatcgattattgtttatgatgaaaataatcagcctattaaagtattaattaaagaaaaggtgtaa

SEQ ID NO: 307012 - DNA, 747 bp, Proteus mirabilis
atgaatataccaaactctacttttcctattgtggcggttattcccgctgccggcataggtagtcgaatgcaagcaacctgcccgaagcaataccttaaaattggcagattgactatccttgaacatactattaatgcgctattaaaacatccacgcatttcgcaaattattgtcgcaattaacccagaagatgactatttttatcacctagctcttgctaaagataaacgaattattgtcgttaaaggagggggacaacgtgctgattcggtattatcagggcttcgctatattacagaacatcttgcgcaaaatacatgggcgctagttcatgatgcagcaagaccctgcctgtcctttagtgatttggataatcttattcaactcattgatgataaccatcttgatcctcaattttgtggcgggatcttagcctctcctgtgcgtgatacgatgaaacgtagtcatcaacaagataaccatattgaaaaaacagtggcaagagacacgctatggcatgctttaacgccacaatttttcccagcggccttgttaaaacaaaatcttgaaaacgcattggcacaaaacgtacccattactgatgaagcatctgcgatggaatttggtggatatgaacccttattagttaaaggccgtgcggataatataaaagtcacacaaccagaagacttggctcttgcagaatttttcctctctcgacaaattaccagcataaggaacacataa

SEQ ID NO: 307013 - DNA, 615 bp, Proteus mirabilis
gtgacgatacatcaagatattgtctggcatcctcatcaaatagggttaaaagagcgtgaagcacaacaggtacacaaaggatgtgtactttggtttactgggttatctggctcaggtaaatcaacactggctgatgcgctagagcaaaccttatatcagtactcgacactccatgcgcctatccgcacctatttattagatggtgataatctacgccatggtttatgccatgatcttgggtttagtgaacaagataggcatgaaaatattcgccgtgtaggggaagtggctaaactaatggttgatgccggattaattgtcttaacagcatttatttctccttatcagcaagatagacaacaagtaagagaaaggtttgctcaagggcgatttattgagatctttgttgatacacctttagccctttgtgaagcacgtgatcctaaaggcctctatcaaaaagcacgacgaggagagatcaaacagttttccggcattgattcaccttatgaaccacccactgcgccagaaattcatttagacggctcactcgcgattaatgagcttacacaacaaatcctcgcttatttacagcaacaacaaatttaccgctaa

SEQ ID NO: 307014 - DNA, 567 bp, Proteus mirabilis
atgctattaaaaaaaatatttttagtgtcttttttattccctactctctcttacgctaataccttaccaacatcaaatatagataattcactaactcccaaccatgataatcttgcccgtttttcactcggtgacaatagtcaagcatccggtagcggtgccacagctataggtatcaatagccaagccaccaatactcgtgcggttgctattggttatggtgcattagccaatgaggaaaatacggtttcatttggcaatagtgaagagaaacaaacagcacgactcaccaatgtcagtgaaggtaaaaataatactgatgcagtcaatctggcacaaacaaaagcactacttagtaaaaataaaaggttaattgatagccaaataaatgtttttagaaatcaaactaataataacttaaacaccatcaaaaaaaacatccatgagtttgatgattattatcgaagacgccaagcatcaattaccgatgcaattgaagcacttgataaaaaagttatttcattagaaaaaaagtctatgcaggtattgcttcctcaattgccatga

SEQ ID NO: 307015 - DNA, 183 bp, Proteus mirabilis
gtggccttttttattgggtggaatatgaaaacaggaacattgcattacaaaatgacactgcgccgttatatgaaaccagcgctaatcatcgctgcgttaactaattggcgatggcttacggacttatgctttaaggttgaagttgtacatcaagggcaagaagtggagttgagtagtgaataa

SEQ ID NO: 307016 - DNA, 594 bp, Proteus mirabilis
atgcagaagctaaggcgacgacgctgtaaaatatgccgagaatggtttataccagagcgaagttttcaatattggtgttgccccgagcatcgagaagaattagcaatacagatatataaaaatcaggaaaagaaacgacaggaaaaactcaaaaaagagaagcagaaaaaagaacgagaagcaaaagataaactcaaatcccgcaagttagcagtaaaacccctctcatatttcaccaagcaagcacagaccgcattcaacgcatttatcagagaaagagacaaggatgagccttgcatctcttgtggtcgttttcacgaaggtcagtatcacgcagggcactatcgaactacaggagcaaatcctgagcttaggtttgatgaagataactgccataagcaatgcgcaccatgcaataaccatctatcgggaaatatcgaaaactacacacctcgactaatagagaaaattggtcaggagcgtttcgatcgtctgatgggttctcatgaattgccaaagtggaaacgcgaggattatgagtggatacgtgatcactaccgagccaagttaaaggagctaaagaatgactcctga

SEQ ID NO: 307017 - DNA, 375 bp, Proteus mirabilis
atgaatgaaccaaaaattgctgagccacaaagcgcagagtttgtgctaaagattgccaaaaaaagatttaatggattacaagccattatttttggtgaaattagcgccatgttaaaaacatcaaaactcttaccattatatgaattacaaaatcaaaacccaacatttaaagatatcgttgctgaattgacaacatatagagatattgccacacaagtcgcaacaattgttggggcggcaatagatcaatcagaaatcgataatgtgaatgaatacctcgaacttgctttagaattagctaaggcaatagactctgatgatcatgattctttatgtgcggctatagcagcattagatgaaaaaccatatatctaa

SEQ ID NO: 307018 - DNA, 132 bp, Proteus mirabilis
atgaatatgaactgtgacttcaaaaaagtttttgagatgcttgatcagatggaggcttgcgccaaaagaatcaccgagctcaataaaaagctacatgaagctgtagcttcctaccagcgcaaggctgcataa

SEQ ID NO: 307019 - DNA, 255 bp, Proteus mirabilis
atgcaaatttcatacagctactcgaacggaactcgagtagtagacgataaaacagtcatggaatttgacgaaagtagcaagcttagcattgagacagaaagtttcgctgagctggctaaattaacggaaattgacccagtggaagccctgcaatggattatgcagttcgacaaggaagagattgacaggattgtcaatgaggcaagcaaggatgcacctatttctaagctggctctgctaaggagggttgtgtga
